United States Patent Application Publication US 2022/0090207 A1 - sequence listing, part 31

SEQ ID NO: 456700 - DNA, 88 bp, Homo sapiens; identical to SEQ ID NO: 454968
  chr19:1807818-1807906
  hypo
  breast vs. sarcoma

SEQ ID NO: 456701 - DNA, 233 bp, Homo sapiens; identical to SEQ ID NO: 453785
  chr19:1978023-1978256
  hypo
  breast vs. liver_bileduct,renal,lymphoid_neoplasm, melanoma,myeloid_neoplasm,thyroid

SEQ ID NO: 456702 - DNA, 116 bp, Homo sapiens; identical to SEQ ID NO: 345560
  chr19:1979018-1979134
  hypo
  breast vs. liver_bileduct,melanoma,renal, lymphoid_neoplasm,thyroid

SEQ ID NO: 456703 - DNA, 314 bp, Homo sapiens
  chr19:4042909-4043223
  hypo
cgcgccaggggctatgggtcaccttccccgcaagaggggcctctggacctgggtactcctcggacactcacccccaccccggtgctctgggtcaccatccacacccagcctctctgccacgcgacagacggaccccagagagatgggcctggcttccaaggccgggcaggaagagcaggaagggtcggggacctggggcttctctccttgggacccaggatccggtcaccctgggcccaaaggtgtggtgtggacgaggtgctcaacccacccagtctcttcagggccaaaaggggaaaagggggacccccccc

SEQ ID NO: 456704 - DNA, 344 bp, Homo sapiens; identical to SEQ ID NO: 382317
  chr19:4043330-4043674
  hypo

SEQ ID NO: 456705 - DNA, 571 bp, Homo sapiens; identical to SEQ ID NO: 343638
  chr19:4094519-4095090
  hypo
  breast vs. lung

SEQ ID NO: 456706 - DNA, 169 bp, Homo sapiens
  chr19:5023047-5023216
  hypo
  breast vs. liver_bileduct,upper_gi,head_and_neck, melanoma,anorectal,colorectal,ovary,bladder_and_urothelial,lung, uterine,lymphoid_neoplasm,cervical
cgcgggtgggactgagtgaaggaccctgagctgggagatgaccctggatgatctggggagcccgatgtcctcaccgggtcctcatgagaggaggcaggagggtgagagtcagagagaggctggaagaggctgtgctgtggctgcggaggtggaggaagggccttgagct

SEQ ID NO: 456707 - DNA, 450 bp, Homo sapiens; identical to SEQ ID NO: 348927
  chr19:5023245-5023695
  hypo
  breast vs. liver_bileduct,upper_gi,head_and_neck, melanoma,anorectal,colorectal,ovary,bladder_and_urothelial,lung, uterine,lymphoid_neoplasm,cervical

SEQ ID NO: 456708 - DNA, 371 bp, Homo sapiens; identical to SEQ ID NO: 367841
  chr19:5037624-5037995
  hypo
  breast vs. bladder_and_urothelial,upper_gi

SEQ ID NO: 456709 - DNA, 154 bp, Homo sapiens
  chr19:5038238-5038392
  hypo
  breast vs. liver_bileduct,bladder_and_urothelial, upper_gi
cggagcggctgggagggcctgcacagaagggtgcctggcacccagaaggcccgtggtgcccaccggcagtctagaatctggtcttgtcggcccataggctcacccccaccagaggagggaacatgaggctggggacaaggccaggagcccaggg

SEQ ID NO: 456710 - DNA, 122 bp, Homo sapiens; identical to SEQ ID NO: 367843
  chr19:5038421-5038543
  hypo
  breast vs. liver_bileduct,bladder_and_urothelial, upper_gi

SEQ ID NO: 456711 - DNA, 259 bp, Homo sapiens
  chr19:5897319-5897578
  hypo
  breast vs. upper_gi,pancreas_gallbladder,liver_bileduct
cggccggcagacggagactcatccacgtggtggacacaagaacaggcctgagacctcagttctgcggctgcttccagcctcacaccgccagctcagcggcgccccccacgggccctggcaccagggccccagctccaggttcccatcaatggctctattctcctgtggggcccggggctcctgggcctaatcccccttggcagtggctctgcttccctgcctggctgccaacgcctcctccttgccactctcgaccccc

SEQ ID NO: 456712 - DNA, 292 bp, Homo sapiens
  chr19:5915130-5915422
  hypo
  breast vs. melanoma
ttcgactcctctgagaaggacgggcaggtgggtggctgcgcggggggccccctccccaggcagttcctcggccgtgccccctcacggccctctgttcccaggtcacactggcggaattccaggactactacagcggcgtgagtgcctccatgaacacggatgaggagttcgtggccatgatgaccagtgcctggcagctgtgagcagctccggctcagccctgctgccctggcctgtcactccccacccctgccggagacctcccttccctgggccccttctctcctgggca

SEQ ID NO: 456713 - DNA, 406 bp, Homo sapiens
  chr19:5915520-5915926
  hypo
  breast vs. melanoma
ggtcctaacaggagtcactggctcaggaccccagggagaaacgctctccccacccacgccatgctgaccagagatcttgcagcccctgtggatgcccccgccgaggtcccccgatccccgcacccggactgctgctccctgcccctcccttgcgggtcccccaggaagccaggtgaccccaggtgggaggctgtgtgtggaggccatcctggaaggaagtttagacctgcccaggtgtggagcgaggggcacaggggcatcctaacctcagaaactgaaataaagcctttgaaaaaaaaatctgtaaaacatcaacccccaatcagaagatggcaaatggggaataaaaatagcaggtaacatgtccagcgggcccagtatctacattctggtgagcggcccgagg

SEQ ID NO: 456714 - DNA, 18 bp, Homo sapiens
  chr19:5915969-5915987
  hypo
  breast vs. melanoma
ggggtgggggtaaagtgc

SEQ ID NO: 456715 - DNA, 365 bp, Homo sapiens
  chr19:5915561-5915926
  hypo
  breast vs. melanoma
cgctctccccacccacgccatgctgaccagagatcttgcagcccctgtggatgcccccgccgaggtcccccgatccccgcacccggactgctgctccctgcccctcccttgcgggtcccccaggaagccaggtgaccccaggtgggaggctgtgtgtggaggccatcctggaaggaagtttagacctgcccaggtgtggagcgaggggcacaggggcatcctaacctcagaaactgaaataaagcctttgaaaaaaaaatctgtaaaacatcaacccccaatcagaagatggcaaatggggaataaaaatagcaggtaacatgtccagcgggcccagtatctacattctggtgagcggcccgagg

SEQ ID NO: 456716 - DNA, 324 bp, Homo sapiens; identical to SEQ ID NO: 367859
  chr19:5915969-5916293
  hypo
  breast vs. melanoma

SEQ ID NO: 456717 - DNA, 385 bp, Homo sapiens; identical to SEQ ID NO: 454979
  chr19:7267319-7267704
  hypo
  breast vs. head_and_neck,anorectal

SEQ ID NO: 456718 - DNA, 206 bp, Homo sapiens; identical to SEQ ID NO: 367879
  chr19:7267747-7267953
  hypo
  breast vs. head_and_neck,anorectal

SEQ ID NO: 456719 - DNA, 271 bp, Homo sapiens; identical to SEQ ID NO: 367883
  chr19:7685308-7685579
  hypo
  breast vs. liver_bileduct

SEQ ID NO: 456720 - DNA, 6 bp, Homo sapiens
  chr19:9937511-9937517
  hypo
  breast vs. head_and_neck,anorectal
ggaggc

SEQ ID NO: 456721 - DNA, 212 bp, Homo sapiens; identical to SEQ ID NO: 455816
  chr19:10197461-10197673
  hypo
  breast vs. cervical,bladder_and_urothelial

SEQ ID NO: 456722 - DNA, 154 bp, Homo sapiens
  chr19:11008216-11008370
  hypo
  breast vs. uterine,ovary,lymphoid_neoplasm, bladder_and_urothelial,sarcoma,head_and_neck,anorectal
cgactgcagtgtggcaggccagcgagtagccccaggctgggtccaggggtggccaaagcgtaacactcagtccgggtttgtgttctttacgttccccgttggagactccacctggagatcccagtccctttccttttactgcagggtaaagaaa

SEQ ID NO: 456723 - DNA, 190 bp, Homo sapiens; identical to SEQ ID NO: 455820
  chr19:13213427-13213617
  hypo
  breast vs. pancreas_gallbladder,cervical,upper_gi, bladder_and_urothelial,anorectal

SEQ ID NO: 456724 - DNA, 112 bp, Homo sapiens; identical to SEQ ID NO: 345573
  chr19:13213834-13213946
  hypo
  breast vs. pancreas_gallbladder,cervical,upper_gi, bladder_and_urothelial,anorectal

SEQ ID NO: 456725 - DNA, 152 bp, Homo sapiens
  chr19:14181154-14181306
  hypo
  breast vs. upper_gi,melanoma,colorectal
cgcgtccgccgattcctcctccttggtcgccgcgtccttggctggcgtcagaaaaatggctacaaacttcctagcacatgagaagatctggtttgacaagttcaaatatgacgacgcagaaaggagattctatcagcagatgaacaggcctg

SEQ ID NO: 456726 - DNA, 179 bp, Homo sapiens; identical to SEQ ID NO: 356051
  chr19:14181846-14182025
  hypo
  breast vs. upper_gi,melanoma,colorectal

SEQ ID NO: 456727 - DNA, 179 bp, Homo sapiens
  chr19:14663747-14663926
  hypo
  breast vs. lung,upper_gi,liver_bileduct,ovary, pancreas_gallbladder,colorectal,bladder_and_urothelial,melanoma, sarcoma
cgggcgagatcagcgtcgctctgggtgggccagtgctcctcggaggccctgagggcacaaccgcagggatgggtgtaggctgtgggtaccactgagaatggggggcaggcccagggctgagacccaggttctccaacttcccactgtgtttgtcttgtgccatattcatcctctatgaa

SEQ ID NO: 456728 - DNA, 28 bp, Homo sapiens
  chr19:14664452-14664480
  hypo
  breast vs. lung,upper_gi,melanoma,colorectal, liver_bileduct,renal,lymphoid_neoplasm,sarcoma
cgagagggctgagccgctgagccggagt

SEQ ID NO: 456729 - DNA, 267 bp, Homo sapiens; identical to SEQ ID NO: 346202
  chr19:14664561-14664828
  hypo
  breast vs. lung,upper_gi,melanoma,colorectal, liver_bileduct,renal,lymphoid_neoplasm,sarcoma

SEQ ID NO: 456730 - DNA, 132 bp, Homo sapiens
  chr19:15364865-15364997
  hypo
  breast vs. liver_bileduct,upper_gi
cgtctctgggctctagcatcctggacacaggaccgagctagtgccaggcacaggtgggaagagtttggtaagacacgtagaacacaagtcacctaacctgtttcggagtcttcgctgtcagaggagctggac

SEQ ID NO: 456731 - DNA, 247 bp, Homo sapiens; identical to SEQ ID NO: 356058
  chr19:15512036-15512283
  hypo
  breast vs. lung,upper_gi,liver_bileduct

SEQ ID NO: 456732 - DNA, 99 bp, Homo sapiens; identical to SEQ ID NO: 343813
  chr19:15531296-15531395
  hypo
  breast vs. liver_bileduct,prostate,cervical,renal, melanoma,uterine,head_and_neck

SEQ ID NO: 456733 - DNA, 106 bp, Homo sapiens; identical to SEQ ID NO: 352228
  chr19:15695669-15695775
  hypo
  breast vs. melanoma,upper_gi,colorectal,prostate, myeloid_neoplasm,uterine,ovary,thyroid,renal,multiple_myeloma

SEQ ID NO: 456734 - DNA, 102 bp, Homo sapiens; identical to SEQ ID NO: 205249
  chr19:16187000-16187102
  hypo
  breast vs. lung,lymphoid_neoplasm

SEQ ID NO: 456735 - DNA, 517 bp, Homo sapiens; identical to SEQ ID NO: 454284
  chr19:16187104-16187621
  hypo
  breast vs. lung,lymphoid_neoplasm

SEQ ID NO: 456736 - DNA, 148 bp, Homo sapiens; identical to SEQ ID NO: 454285
  chr19:16187640-16187788
  hypo
  breast vs. lung,lymphoid_neoplasm

SEQ ID NO: 456737 - DNA, 329 bp, Homo sapiens; identical to SEQ ID NO: 454286
  chr19:16187292-16187621
  hypo
  breast vs. lung,lymphoid_neoplasm,melanoma,sarcoma

SEQ ID NO: 456738 - DNA, 634 bp, Homo sapiens; identical to SEQ ID NO: 345579
  chr19:16187640-16188274
  hypo
  breast vs. lung,lymphoid_neoplasm,melanoma,sarcoma

SEQ ID NO: 456739 - DNA, 113 bp, Homo sapiens
  chr19:16472546-16472659
  hypo
  breast vs. liver_bileduct
cggaagggagtggggtggcccggaggcggaggactcaacttacagaggtgaagtctgcaaagcccgaggcagaggccttagaaggtttagctgcagaggaggggacaaatggg

SEQ ID NO: 456740 - DNA, 112 bp, Homo sapiens; identical to SEQ ID NO: 382517
  chr19:16472777-16472889
  hypo
  breast vs. liver_bileduct

SEQ ID NO: 456741 - DNA, 67 bp, Homo sapiens
  chr19:16638602-16638669
  hypo
  breast vs. sarcoma,lymphoid_neoplasm
cgtgccttgcagcgttaaactcccctgcactcgcaggacaatggtgatctatactacagagaagccc

SEQ ID NO: 456742 - DNA, 268 bp, Homo sapiens; identical to SEQ ID NO: 367983
  chr19:16681297-16681565
  hypo
  breast vs. bladder_and_urothelial,colorectal

SEQ ID NO: 456743 - DNA, 247 bp, Homo sapiens
  chr19:17264714-17264961
  hypo
  breast vs. lung,bladder_and_urothelial,head_and_neck, sarcoma,anorectal,liver_bileduct,renal,upper_gi,cervical, prostate,colorectal
cgcagagtagctattacttggcctccaaaaacaactattttcctcccaattttgacctgtaggaactaccatgtgttttattatttgttacttggggtcagcgaggaagagcgccaagaatttcagctcaagcagcctgaagattatttctacctcaaccaggtaaacagcctcaagcccgagccacaaacgccacctctgttcccggcctcaagctgtttatgtatagccgggaagtcagaggcag

SEQ ID NO: 456744 - DNA, 95 bp, Homo sapiens
  chr19:18103606-18103701
  hypo
  breast vs. renal
cggcatagttttctgaatgaaacaccgcctccggtggtggtgagaggacaggtgtgcccctgaggggctggcacagaaccctcagaggctgggca

SEQ ID NO: 456745 - DNA, 50 bp, Homo sapiens; identical to SEQ ID NO: 382537
  chr19:18103924-18103974
  hypo
  breast vs. renal

SEQ ID NO: 456746 - DNA, 41 bp, Homo sapiens; identical to SEQ ID NO: 454998
  chr19:18241264-18241305
  hypo
  breast vs. sarcoma,melanoma,anorectal,uterine,colorectal, renal

SEQ ID NO: 456747 - DNA, 124 bp, Homo sapiens; identical to SEQ ID NO: 356073
  chr19:18241355-18241479
  hypo
  breast vs. sarcoma,melanoma,anorectal,uterine,colorectal, renal

SEQ ID NO: 456748 - DNA, 3 bp, Homo sapiens
  chr19:18807947-18807950
  hypo
  breast vs. melanoma
cga

SEQ ID NO: 456749 - DNA, 160 bp, Homo sapiens; identical to SEQ ID NO: 356079
  chr19:18808024-18808184
  hypo
  breast vs. melanoma

SEQ ID NO: 456750 - DNA, 322 bp, Homo sapiens
  chr19:19391586-19391908
  hypo
  breast vs. upper_gi
cttcaggggaggcagccaaccatcctcagagcagctgacatttaatttggcatcagctgtggaacttggcaggctccagtaacactgacacatagaaagatgctgcaacagccccatccgggtggcagaaaccaccacccctcgggcggtgcggtgcttcccgggggagaaggtgagcaaaggggtgcagcgggccctctgggaagggaaaagatttgggtccttccagctcatcaacactcgggctttgccgctaagaatggcccacatttgcactcttagtccttccttggtttacagggcactgagggatgtgggggag

SEQ ID NO: 456751 - DNA, 91 bp, Homo sapiens; identical to SEQ ID NO: 455837
  chr19:19729161-19729252
  hypo
  breast vs. ovary,bladder_and_urothelial,upper_gi,lung, prostate

SEQ ID NO: 456752 - DNA, 136 bp, Homo sapiens; identical to SEQ ID NO: 455838
  chr19:19729395-19729531
  hypo
  breast vs. ovary,bladder_and_urothelial,upper_gi,lung, prostate

SEQ ID NO: 456753 - DNA, 147 bp, Homo sapiens; identical to SEQ ID NO: 352245
  chr19:19729585-19729732
  hypo
  breast vs. ovary,bladder_and_urothelial,upper_gi,lung, prostate

SEQ ID NO: 456754 - DNA, 61 bp, Homo sapiens; identical to SEQ ID NO: 455841
  chr19:30718934-30718995
  hypo
  breast vs. ovary

SEQ ID NO: 456755 - DNA, 38 bp, Homo sapiens; identical to SEQ ID NO: 343904
  chr19:32849484-32849522
  hypo
  breast vs. liver_bileduct

SEQ ID NO: 456756 - DNA, 158 bp, Homo sapiens; identical to SEQ ID NO: 343905
  chr19:32850587-32850745
  hypo
  breast vs. liver_bileduct,upper_gi,lymphoid_neoplasm, pancreas_gallbladder,ovary,melanoma,anorectal

SEQ ID NO: 456757 - DNA, 21 bp, Homo sapiens
  chr19:36221989-36222010
  hypo
  breast vs. liver_bileduct,melanoma
gtggggtactggcttttggac

SEQ ID NO: 456758 - DNA, 58 bp, Homo sapiens; identical to SEQ ID NO: 356122
  chr19:36222534-36222592
  hypo
  breast vs. sarcoma

SEQ ID NO: 456759 - DNA, 134 bp, Homo sapiens; identical to SEQ ID NO: 368084
  chr19:38481217-38481351
  hypo
  breast vs. uterine,melanoma

SEQ ID NO: 456760 - DNA, 324 bp, Homo sapiens; identical to SEQ ID NO: 348975
  chr19:38781936-38782260
  hypo
  breast vs. pancreas_gallbladder,upper_gi, lymphoid_neoplasm,renal,colorectal,lung,sarcoma

SEQ ID NO: 456761 - DNA, 169 bp, Homo sapiens; identical to SEQ ID NO: 455007
  chr19:38873767-38873936
  hypo
  breast vs. renal,sarcoma,lymphoid_neoplasm, liver_bileduct,melanoma

SEQ ID NO: 456762 - DNA, 203 bp, Homo sapiens; identical to SEQ ID NO: 343957
  chr19:39212200-39212403
  hypo
  breast vs. lung

SEQ ID NO: 456763 - DNA, 138 bp, Homo sapiens
  chr19:39642872-39643010
  hypo
  breast vs. ovary
cgtgatgaaatcttgagccatcccactctgtcccgcccgggacgtgaatcacctttcttaccccacatatccatggtgtatgtgctacccatctgtggctactcagtagctttctcggttctcacatccactgttgcc

SEQ ID NO: 456764 - DNA, 485 bp, Homo sapiens; identical to SEQ ID NO: 356142
  chr19:39646243-39646728
  hypo
  breast vs. bladder_and_urothelial,uterine,renal,lung, lymphoid_neoplasm,melanoma,cervical,colorectal,prostate, pancreas_gallbladder,sarcoma

SEQ ID NO: 456765 - DNA, 23 bp, Homo sapiens
  chr19:39650967-39650990
  hypo
  breast vs. liver_bileduct,cervical,upper_gi, pancreas_gallbladder,anorectal,lung,head_and_neck,uterine, melanoma,ovary,colorectal,lymphoid_neoplasm,renal
ttccagccactgctctagatgcc

SEQ ID NO: 456766 - DNA, 294 bp, Homo sapiens; identical to SEQ ID NO: 348979
  chr19:40829211-40829505
  hypo
  breast vs. head_and_neck,bladder_and_urothelial,lung, pancreas_gallbladder,colorectal,upper_gi,anorectal, liver_bileduct,ovary

SEQ ID NO: 456767 - DNA, 30 bp, Homo sapiens
  chr19:40829764-40829794
  hypo
  breast vs. upper_gi,liver_bileduct,renal,colorectal, pancreas_gallbladder,lung,cervical,melanoma,ovary,uterine, lymphoid_neoplasm,thyroid,sarcoma,non_cancer,head_and_neck, bladder_and_urothelial,multiple_myeloma
cgccagtgcaaagccaggaactgaggctgg

SEQ ID NO: 456768 - DNA, 3 bp, Homo sapiens
  chr19:41881461-41881464
  hypo
  breast vs. melanoma
cgt

SEQ ID NO: 456769 - DNA, 3 bp, Homo sapiens
  chr19:41881583-41881586
  hypo
  breast vs. melanoma
cgc

SEQ ID NO: 456770 - DNA, 5 bp, Homo sapiens
  chr19:42348874-42348879
  hypo
  breast vs. colorectal,head_and_neck,lymphoid_neoplasm, anorectal
cgtgc

SEQ ID NO: 456771 - DNA, 260 bp, Homo sapiens
  chr19:42349033-42349293
  hypo
  breast vs. colorectal,head_and_neck,lymphoid_neoplasm, anorectal
atgcttgaagttcattggtctttgtgagacagggtaagaaaagcagcgcgagcttggcggttcctctggccactttctcacagtgtctttgggcgtcttcttgactgaatctgactccattggaggctgtggtaaccgtgaactagctgcacgaacacggtccctcctgcctttccgtcctcctccctcttagccggactccctaacccaggcatcccctctcctccccctcgcgcccctcccgccctcgcgccccctct

SEQ ID NO: 456772 - DNA, 84 bp, Homo sapiens
  chr19:45570303-45570387
  hypo
  breast vs. lung,cervical,head_and_neck,liver_bileduct, melanoma,prostate,uterine,pancreas_gallbladder,renal
cgggaagttagcaagcgggtgtctagtgagggagaggtgacgtgggccaggcagggctcatgatggcaggactgcccttaggct

SEQ ID NO: 456773 - DNA, 220 bp, Homo sapiens; identical to SEQ ID NO: 356161
  chr19:45570493-45570713
  hypo
  breast vs. lung,cervical,head_and_neck,liver_bileduct, melanoma,prostate,uterine,pancreas_gallbladder,renal

SEQ ID NO: 456774 - DNA, 74 bp, Homo sapiens
  chr19:45574700-45574774
  hypo
  breast vs. sarcoma,renal
ggggaagcctcctgccccacctcatgcaccccaagaaagccagagtccagacgggtgtaaataaaagggaaaat

SEQ ID NO: 456775 - DNA, 48 bp, Homo sapiens
  chr19:45574888-45574936
  hypo
  breast vs. sarcoma,renal
ctgccgcaggtgtttgtccagggtggctcgcaggccgaagggcacatg

SEQ ID NO: 456776 - DNA, 122 bp, Homo sapiens
  chr19:45575156-45575278
  hypo
  breast vs. sarcoma,renal
gacttgggcatctttttgggtgatgccttctggctgtttgcagggtcagttctttgttccgtggtgatggctccccaagtgtctccaccagggccggcttgagccccactgccaggagcccc

SEQ ID NO: 456777 - DNA, 48 bp, Homo sapiens; identical to SEQ ID NO: 456775
  chr19:45574888-45574936
  hypo
  breast vs. ovary,sarcoma,renal,melanoma,uterine

SEQ ID NO: 456778 - DNA, 472 bp, Homo sapiens; identical to SEQ ID NO: 219562
  chr19:45575156-45575628
  hypo
  breast vs. ovary,sarcoma,renal,melanoma,uterine

SEQ ID NO: 456779 - DNA, 80 bp, Homo sapiens; identical to SEQ ID NO: 382721
  chr19:45627047-45627127
  hypo
  breast vs. renal

SEQ ID NO: 456780 - DNA, 59 bp, Homo sapiens
  chr19:46321120-46321179
  hypo
  breast vs. pancreas_gallbladder,prostate,head_and_neck, bladder_and_urothelial,colorectal,myeloid_neoplasm,upper_gi
cgggctccctccggggtcagacgggggaaggggagggcaagcaggctagaagctgctgt

SEQ ID NO: 456781 - DNA, 110 bp, Homo sapiens; identical to SEQ ID NO: 356171
  chr19:46321422-46321532
  hypo
  breast vs. pancreas_gallbladder,prostate,head_and_neck, bladder_and_urothelial,colorectal,myeloid_neoplasm,upper_gi

SEQ ID NO: 456782 - DNA, 112 bp, Homo sapiens; identical to SEQ ID NO: 344031
  chr19:47646754-47646866
  hypo
  breast vs. anorectal,melanoma

SEQ ID NO: 456783 - DNA, 83 bp, Homo sapiens; identical to SEQ ID NO: 336190
  chr19:47676020-47676103
  hypo
  breast vs. liver_bileduct

SEQ ID NO: 456784 - DNA, 205 bp, Homo sapiens; identical to SEQ ID NO: 344036
  chr19:47881084-47881289
  hypo
  breast vs. head_and_neck,upper_gi,bladder_and_urothelial, renal,colorectal

SEQ ID NO: 456785 - DNA, 64 bp, Homo sapiens; identical to SEQ ID NO: 348989
  chr19:47881711-47881775
  hypo
  breast vs. head_and_neck,upper_gi,colorectal,sarcoma, bladder_and_urothelial,pancreas_gallbladder,anorectal,prostate

SEQ ID NO: 456786 - DNA, 215 bp, Homo sapiens
  chr19:48003714-48003929
  hypo
  breast vs. renal,anorectal,multiple_myeloma, bladder_and_urothelial,upper_gi,colorectal,thyroid, lymphoid_neoplasm,head_and_neck,liver_bileduct,myeloid_neoplasm, sarcoma,melanoma,lung
aggaagagagccagttctaaagtcaacgctcactctgcctcaggcacgcccctgccagcctatcacatgtcggccactggaaaaaccagagccgccaggaaacctgaggaatcaatgcagggtgctaggatggcgctccggacagccagcccgtgtggcccgcagaggccctcaccttgggggtcggctttcttgaatgcgttgccagcgtccac

SEQ ID NO: 456787 - DNA, 202 bp, Homo sapiens; identical to SEQ ID NO: 344039
  chr19:48012665-48012867
  hypo
  breast vs. lung,upper_gi,melanoma,colorectal,uterine, pancreas_gallbladder,lymphoid_neoplasm

SEQ ID NO: 456788 - DNA, 345 bp, Homo sapiens; identical to SEQ ID NO: 455022
  chr19:48150921-48151266
  hypo
  breast vs. head_and_neck

SEQ ID NO: 456789 - DNA, 550 bp, Homo sapiens; identical to SEQ ID NO: 336209
  chr19:49467064-49467614
  hypo
  breast vs. upper_gi,colorectal,pancreas_gallbladder, bladder_and_urothelial

SEQ ID NO: 456790 - DNA, 224 bp, Homo sapiens; identical to SEQ ID NO: 344049
  chr19:49600463-49600687
  hypo
  breast vs. melanoma,pancreas_gallbladder,upper_gi,lung, bladder_and_urothelial,cervical

SEQ ID NO: 456791 - DNA, 253 bp, Homo sapiens; identical to SEQ ID NO: 344060
  chr19:50306223-50306476
  hypo

SEQ ID NO: 456792 - DNA, 78 bp, Homo sapiens; identical to SEQ ID NO: 356193
  chr19:50320125-50320203
  hypo
  breast vs. melanoma

SEQ ID NO: 456793 - DNA, 67 bp, Homo sapiens; identical to SEQ ID NO: 348994
  chr19:50365162-50365229
  hypo
  breast vs. melanoma,multiple_myeloma,sarcoma,cervical

SEQ ID NO: 456794 - DNA, 16 bp, Homo sapiens
  chr19:50833813-50833829
  hypo
  breast vs. melanoma,uterine,sarcoma
cgaggcgagaacttct

SEQ ID NO: 456795 - DNA, 446 bp, Homo sapiens; identical to SEQ ID NO: 352368
  chr19:50833970-50834416
  hypo
  breast vs. melanoma,uterine,sarcoma

SEQ ID NO: 456796 - DNA, 119 bp, Homo sapiens; identical to SEQ ID NO: 336251
  chr19:52715152-52715271
  hypo
  breast vs. lung,pancreas_gallbladder,head_and_neck,ovary

SEQ ID NO: 456797 - DNA, 120 bp, Homo sapiens
  chr19:56602205-56602325
  hypo
  breast vs. colorectal,anorectal,lymphoid_neoplasm
cgcttatgctcaggcctccctccagacgcactgtatgagaaagtgccgggccgggcctgtgcttcagcaagccccccaggtgattctgatgccagctccagtgtgagaatcactattcca

SEQ ID NO: 456798 - DNA, 7 bp, Homo sapiens
  chr19:56602354-56602361
  hypo
  breast vs. colorectal,anorectal,lymphoid_neoplasm
aacctgc

SEQ ID NO: 456799 - DNA, 9 bp, Homo sapiens
  chr19:58874823-58874832
  hypo
  breast vs. lymphoid_neoplasm,renal,cervical, head_and_neck,melanoma,non_cancer
cgagactcc

SEQ ID NO: 456800 - DNA, 54 bp, Homo sapiens
  chr19:58964127-58964181
  hypo
  breast vs. melanoma,renal,liver_bileduct,prostate, pancreas_gallbladder,cervical,anorectal,multiple_myeloma
cgtgcggagttacagcttgagggtaaagaaaaccggctggggtgcctgaggcta

SEQ ID NO: 456801 - DNA, 131 bp, Homo sapiens
  chr2:314855-314986
  hypo
  breast vs. bladder_and_urothelial
cgggccccgccgcagggctgtgaggccgccgtgggactggttccaccgacactggaggccaggcgtgggccctccgtaaagtcccccgtgtgggattacgggacaggcggcggaaccccagtttaaccctg

SEQ ID NO: 456802 - DNA, 189 bp, Homo sapiens; identical to SEQ ID NO: 353028
  chr2:315015-315204
  hypo
  breast vs. bladder_and_urothelial

SEQ ID NO: 456803 - DNA, 174 bp, Homo sapiens; identical to SEQ ID NO: 376223
  chr2:8713195-8713369
  hypo
  breast vs. head_and_neck

SEQ ID NO: 456804 - DNA, 213 bp, Homo sapiens; identical to SEQ ID NO: 331202
  chr2:10587836-10588049
  hypo
  breast vs. lung,upper_gi

SEQ ID NO: 456805 - DNA, 178 bp, Homo sapiens; identical to SEQ ID NO: 345000
  chr2:10588876-10589054
  hypo
  breast vs. pancreas_gallbladder,liver_bileduct, colorectal,ovary,upper_gi,sarcoma,renal,cervical,anorectal, lymphoid_neoplasm,uterine,non_cancer,myeloid_neoplasm,prostate, thyroid

SEQ ID NO: 456806 - DNA, 117 bp, Homo sapiens; identical to SEQ ID NO: 455869
  chr2:10589056-10589173
  hypo
  breast vs. pancreas_gallbladder,liver_bileduct, colorectal,ovary,upper_gi,sarcoma,renal,cervical,anorectal, lymphoid_neoplasm,uterine,non_cancer,myeloid_neoplasm,prostate, thyroid

SEQ ID NO: 456807 - DNA, 55 bp, Homo sapiens; identical to SEQ ID NO: 347881
  chr2:10600813-10600868
  hypo
  breast vs. anorectal,cervical,head_and_neck,colorectal, prostate,renal

SEQ ID NO: 456808 - DNA, 235 bp, Homo sapiens; identical to SEQ ID NO: 337559
  chr2:20574714-20574949
  hypo
  breast vs. head_and_neck

SEQ ID NO: 456809 - DNA, 116 bp, Homo sapiens; identical to SEQ ID NO: 337575
  chr2:26524687-26524803
  hypo
  breast vs. upper_gi,lung,cervical,head_and_neck,melanoma, bladder_and_urothelial

SEQ ID NO: 456810 - DNA, 116 bp, Homo sapiens
  chr2:27433190-27433306
  hypo
  breast vs. ovary,prostate,sarcoma,uterine,non_cancer, renal,multiple_myeloma,myeloid_neoplasm,thyroid,lung, bladder_and_urothelial,pancreas_gallbladder,cervical
cgctatggtctcgcatctctccagaaagagggcggccaaaagcaagagctagctgttgtttcactacaactataacatgccaaggcacaaacagcagattgtgggacccccccccc

SEQ ID NO: 456811 - DNA, 59 bp, Homo sapiens; identical to SEQ ID NO: 455879
  chr2:27938267-27938326
  hypo
  breast vs. ovary,sarcoma,bladder_and_urothelial,lung, uterine

SEQ ID NO: 456812 - DNA, 22 bp, Homo sapiens
  chr2:29337909-29337931
  hypo
  breast vs. cervical
cgtgggtgtagcacggattagg

SEQ ID NO: 456813 - DNA, 38 bp, Homo sapiens; identical to SEQ ID NO: 454314
  chr2:30453530-30453568
  hypo
  breast vs. ovary,myeloid_neoplasm,non_cancer,uterine, thyroid

SEQ ID NO: 456814 - DNA, 284 bp, Homo sapiens; identical to SEQ ID NO: 337594
  chr2:37035304-37035588
  hypo
  breast vs. bladder_and_urothelial

SEQ ID NO: 456815 - DNA, 125 bp, Homo sapiens; identical to SEQ ID NO: 337595
  chr2:37287740-37287865
  hypo
  breast vs. bladder_and_urothelial,colorectal,ovary, uterine,pancreas_gallbladder,upper_gi,liver_bileduct,prostate, renal

SEQ ID NO: 456816 - DNA, 72 bp, Homo sapiens
  chr2:44497628-44497700
  hypo
  breast vs. lung,head_and_neck,cervical
cgcagcaaagaaagaatgaagcaacaaaagaacgaaagcagctctctcggctttcggctcggaggaggccaa

SEQ ID NO: 456817 - DNA, 224 bp, Homo sapiens; identical to SEQ ID NO: 337641
  chr2:70224820-70225044
  hypo
  breast vs. prostate

SEQ ID NO: 456818 - DNA, 236 bp, Homo sapiens; identical to SEQ ID NO: 453103
  chr2:74781700-74781936
  hypo
  breast vs. uterine,upper_gi,colorectal,lymphoid_neoplasm, multiple_myeloma,pancreas_gallbladder,renal,myeloid_neoplasm, thyroid,non_cancer,ovary

SEQ ID NO: 456819 - DNA, 61 bp, Homo sapiens; identical to SEQ ID NO: 347902
  chr2:85280346-85280407
  hypo
  breast vs. liver_bileduct

SEQ ID NO: 456820 - DNA, 58 bp, Homo sapiens; identical to SEQ ID NO: 353131
  chr2:95941852-95941910
  hypo
  breast vs. lymphoid_neoplasm,sarcoma

SEQ ID NO: 456821 - DNA, 77 bp, Homo sapiens
  chr2:97427378-97427455
  hypo
  breast vs. sarcoma,head_and_neck
cgcatcgtgcagaactgtggcaccgagaaggagaggcgctatgcccgcaagattgagcccatccggcgcaagggcaa

SEQ ID NO: 456822 - DNA, 263 bp, Homo sapiens
  chr2:97435378-97435641
  hypo
  breast vs. liver_bileduct,bladder_and_urothelial,ovary, head_and_neck
cgactccttgatggagacgaagagaaccaagggggcacgctattcgggagcctccttggagggtcagatggggtgaagaccatgcacagactgtgggatgggaccttaggctgtggggtgcccagcgagagcagcctcggacaagtggtgcccgaaggcagctttgcaccggttctccgtcagccctgcctggtaatagcctcaatatggtgatttgatctcaagaagctgcctgggggcaggtgtatctgagagtgacagga

SEQ ID NO: 456823 - DNA, 185 bp, Homo sapiens; identical to SEQ ID NO: 362930
  chr2:97437985-97438170
  hypo

SEQ ID NO: 456824 - DNA, 163 bp, Homo sapiens; identical to SEQ ID NO: 337692
  chr2:99097200-99097363
  hypo
  breast vs. liver_bileduct,upper_gi, bladder_and_urothelial,colorectal

SEQ ID NO: 456825 - DNA, 5 bp, Homo sapiens
  chr2:109335080-109335085
  hypo
  breast vs. renal
cgtga

SEQ ID NO: 456826 - DNA, 122 bp, Homo sapiens; identical to SEQ ID NO: 455900
  chr2:127863367-127863489
  hypo
  breast vs. sarcoma,cervical,head_and_neck

SEQ ID NO: 456827 - DNA, 427 bp, Homo sapiens; identical to SEQ ID NO: 357297
  chr2:127863878-127864305
  hypo
  breast vs. sarcoma,cervical,head_and_neck

SEQ ID NO: 456828 - DNA, 68 bp, Homo sapiens
  chr2:216179503-216179571
  hypo
  breast vs. head_and_neck,pancreas_gallbladder,lung
cgcacccgaggccaagattttgtaggggtggaaaggtgtgatcctttgctctccatcgtaaacgtcac

SEQ ID NO: 456829 - DNA, 38 bp, Homo sapiens; identical to SEQ ID NO: 376566
  chr2:223753603-223753641
  hypo
  breast vs. liver_bileduct,upper_gi

SEQ ID NO: 456830 - DNA, 131 bp, Homo sapiens; identical to SEQ ID NO: 337890
  chr2:231676894-231677025
  hypo
  breast vs. colorectal,liver_bileduct,melanoma,sarcoma

SEQ ID NO: 456831 - DNA, 216 bp, Homo sapiens; identical to SEQ ID NO: 337911
  chr2:236452983-236453199
  hypo
  breast vs. liver_bileduct

SEQ ID NO: 456832 - DNA, 288 bp, Homo sapiens
  chr2:240226690-240226978
  hypo
  breast vs. anorectal,renal,liver_bileduct, bladder_and_urothelial,melanoma,colorectal,upper_gi, lymphoid_neoplasm,pancreas_gallbladder,non_cancer,prostate
cgcgctttcttccagccggcctggggcatgtcaggaggcagggcctgtactgcaggctctgtgttcttagacagcctttgcagggggcagaggtgcccactgccacatgggcacacacaggaggctcaccacgtttcttcaaatgcagatgacaaagcagcttgagtaacacaaatacggccacactcatctgaggattgctgctgtgttttctaactgcatggccatgaccaagcagtcggttttcatccaggttggtagtcaggtttctgaaagcgatggcagtcg

SEQ ID NO: 456833 - DNA, 154 bp, Homo sapiens; identical to SEQ ID NO: 347957
  chr2:240227007-240227161
  hypo
  breast vs. anorectal,renal,liver_bileduct, bladder_and_urothelial,melanoma,colorectal,upper_gi, lymphoid_neoplasm,pancreas_gallbladder,non_cancer,prostate

SEQ ID NO: 456834 - DNA, 339 bp, Homo sapiens; identical to SEQ ID NO: 337962
  chr2:240700344-240700683
  hypo
  breast vs. lymphoid_neoplasm

SEQ ID NO: 456835 - DNA, 100 bp, Homo sapiens; identical to SEQ ID NO: 337966
  chr2:240928864-240928964
  hypo
  breast vs. melanoma,lung,colorectal,anorectal,uterine, ovary,cervical,head_and_neck,lymphoid_neoplasm

SEQ ID NO: 456836 - DNA, 131 bp, Homo sapiens; identical to SEQ ID NO: 337989
  chr2:242277184-242277315
  hypo
  breast vs. liver_bileduct

SEQ ID NO: 456837 - DNA, 567 bp, Homo sapiens; identical to SEQ ID NO: 338000
  chr2:242616820-242617387
  hypo
  breast vs. lung,upper_gi

SEQ ID NO: 456838 - DNA, 131 bp, Homo sapiens
  chr2:242617764-242617895
  hypo
  breast vs. lung,ovary,upper_gi,colorectal,sarcoma
cggaaacggcagcagctttgctgacacaactgtgccagccaccacggtgtcatcctgagccacttctccacgcttcctagtgtgcaattctgggattctcaccttccagttcaaagtcgtgtctttcatga

SEQ ID NO: 456839 - DNA, 531 bp, Homo sapiens; identical to SEQ ID NO: 347967
  chr2:242617924-242618455
  hypo
  breast vs. lung,ovary,upper_gi,colorectal,sarcoma

SEQ ID NO: 456840 - DNA, 126 bp, Homo sapiens; identical to SEQ ID NO: 455922
  chr20:3229128-3229254
  hypo
  breast vs. cervical,multiple_myeloma,thyroid,colorectal

SEQ ID NO: 456841 - DNA, 155 bp, Homo sapiens; identical to SEQ ID NO: 455923
  chr20:3229326-3229481
  hypo
  breast vs. cervical,multiple_myeloma,thyroid,colorectal

SEQ ID NO: 456842 - DNA, 32 bp, Homo sapiens; identical to SEQ ID NO: 455924
  chr20:3229526-3229558
  hypo
  breast vs. cervical,multiple_myeloma,thyroid,colorectal

SEQ ID NO: 456843 - DNA, 144 bp, Homo sapiens; identical to SEQ ID NO: 352449
  chr20:3229659-3229803
  hypo
  breast vs. cervical,multiple_myeloma,thyroid,colorectal

SEQ ID NO: 456844 - DNA, 11 bp, Homo sapiens
  chr20:3820920-3820931
  hypo
  breast vs. lymphoid_neoplasm
cgtcccactgc

SEQ ID NO: 456845 - DNA, 94 bp, Homo sapiens
  chr20:6022704-6022798
  hypo
  breast vs. upper_gi,lung,bladder_and_urothelial, pancreas_gallbladder
cgggggctgcgctgggcgcgacggtggtaccctgtgcgtaggtggagcggttgaagcaaggtgggtgtgaagccccgagagtggtgctttggtc

SEQ ID NO: 456846 - DNA, 4 bp, Homo sapiens
  chr20:18489643-18489647
  hypo
  breast vs. sarcoma,multiple_myeloma
cgtg

SEQ ID NO: 456847 - DNA, 585 bp, Homo sapiens; identical to SEQ ID NO: 455929
  chr20:30193272-30193857
  hypo
  breast vs. lung,liver_bileduct,cervical,uterine

SEQ ID NO: 456848 - DNA, 189 bp, Homo sapiens; identical to SEQ ID NO: 345629
  chr20:30193992-30194181
  hypo
  breast vs. lung,liver_bileduct,cervical,uterine

SEQ ID NO: 456849 - DNA, 146 bp, Homo sapiens
  chr20:32301652-32301798
  hypo
  breast vs. liver_bileduct,uterine,colorectal,melanoma, upper_gi,ovary,bladder_and_urothelial
cgcaacccgttttctgagaagtgccttgagggaagagctacgggagatgacaggaaggtgaagatgcttcagcgagagacaagagatcagggagctttgaggaggaagtgatcctcagagaactggtctggattgccaggagggaa

SEQ ID NO: 456850 - DNA, 413 bp, Homo sapiens
  chr20:32378478-32378891
  hypo
  breast vs. liver_bileduct
cgtcacggcccctccctgagcctgagatgacctggcaaagcgagccaaggtgcagagagtgagcagctgttccaggcagaggagaatggcaagtacaaaggcgcagagggaggagccagcgtggcatctctgaggagagcgagtgtggctggcgcagagagtggctggaagaaggcagacgacgagggtggagagagctggggccagatcacacaggtgctggtggggaaagagcctggattttattcccagcgcagggcactgttgcggggtgaaggtctggatgcttctcactgactttcccttgccctccaggcatgaagctccacaaatgcgccctgtgcagcaagtccttcagccgccgtgcccacctcgccgagcatcagcgcgcccacacgggcaactacaagttc

SEQ ID NO: 456851 - DNA, 343 bp, Homo sapiens
  chr20:32378966-32379309
  hypo
  breast vs. liver_bileduct
aaggacaaggacctgcaaacccggcggcccccccagaggagggcagccccccgcagttgcggcagtggtgggcgcaaggtgctgacccccttgcctgacccgctggggctggaggagctgaaggacacaggggctgggctggtgcccgaggctgtccccggcaagccgcccttcgcagagccggacgcggtgctgtccatcgttgtgggtggtgcggtgggcgcggaaactgagctggtggtacctggacacgctgaggggctgggctccaacctggctctggcggagctgcaggctggggccgagggcccatgtgccatgctcgctgtgcccgtctacatcc

SEQ ID NO: 456852 - DNA, 87 bp, Homo sapiens; identical to SEQ ID NO: 368314
  chr20:32379338-32379425
  hypo
  breast vs. liver_bileduct

SEQ ID NO: 456853 - DNA, 187 bp, Homo sapiens; identical to SEQ ID NO: 455102
  chr20:36767690-36767877
  hypo
  breast vs. renal,melanoma,prostate

SEQ ID NO: 456854 - DNA, 109 bp, Homo sapiens; identical to SEQ ID NO: 368336
  chr20:36767917-36768026
  hypo
  breast vs. renal,melanoma,prostate

SEQ ID NO: 456855 - DNA, 148 bp, Homo sapiens; identical to SEQ ID NO: 344233
  chr20:37145099-37145247
  hypo
  breast vs. liver_bileduct,lymphoid_neoplasm,lung, head_and_neck,uterine

SEQ ID NO: 456856 - DNA, 63 bp, Homo sapiens; identical to SEQ ID NO: 455934
  chr20:37274639-37274702
  hypo
  breast vs. prostate,liver_bileduct,upper_gi, lymphoid_neoplasm,colorectal,melanoma,lung,sarcoma, head_and_neck,uterine,anorectal,multiple_myeloma,renal, pancreas_gallbladder,non_cancer,ovary

SEQ ID NO: 456857 - DNA, 546 bp, Homo sapiens; identical to SEQ ID NO: 205802
  chr20:37274731-37275277
  hypo
  breast vs. prostate,liver_bileduct,upper_gi, lymphoid_neoplasm,colorectal,melanoma,lung,sarcoma, head_and_neck,uterine,anorectal,multiple_myeloma,renal, pancreas_gallbladder,non_cancer,ovary

SEQ ID NO: 456858 - DNA, 390 bp, Homo sapiens; identical to SEQ ID NO: 455936
  chr20:37433723-37434113
  hypo
  breast vs. ovary

SEQ ID NO: 456859 - DNA, 27 bp, Homo sapiens
  chr20:37434086-37434113
  hypo
  breast vs. ovary
cggggtgggggttaggaaaactatttt

SEQ ID NO: 456860 - DNA, 2 bp, Homo sapiens
  chr20:46823362-46823364
  hypo
cg

SEQ ID NO: 456861 - DNA, 93 bp, Homo sapiens; identical to SEQ ID NO: 356291
  chr20:46823583-46823676
  hypo

SEQ ID NO: 456862 - DNA, 246 bp, Homo sapiens
  chr20:48524519-48524765
  hypo
  breast vs. melanoma,lymphoid_neoplasm,liver_bileduct, sarcoma,anorectal,lung
cgggccagaaacggttcagaggtgatgctggagagacggggaaggttcggagcccggaaggatctgagagcacaggatggatgggatcagactggcatagcctctcaggagggactgccaggggcaggaagagagaaggagggcctgtatggaggctgctccaggacctcaccttgatgcttctgaattccttcttccacgggtagaggaagaggttgatgcccaccgtctccagcatgctgaagg

SEQ ID NO: 456863 - DNA, 373 bp, Homo sapiens; identical to SEQ ID NO: 356300
  chr20:48524818-48525191
  hypo
  breast vs. melanoma,lymphoid_neoplasm,liver_bileduct, sarcoma,anorectal,lung

SEQ ID NO: 456864 - DNA, 18 bp, Homo sapiens
  chr20:49286725-49286743
  hypo
  breast vs. prostate,myeloid_neoplasm,melanoma
cgctctgagccaaggtag

SEQ ID NO: 456865 - DNA, 295 bp, Homo sapiens; identical to SEQ ID NO: 344297
  chr20:50208595-50208890
  hypo
  breast vs. upper_gi

SEQ ID NO: 456866 - DNA, 46 bp, Homo sapiens; identical to SEQ ID NO: 344305
  chr20:55936567-55936613
  hypo
  breast vs. lung

SEQ ID NO: 456867 - DNA, 113 bp, Homo sapiens; identical to SEQ ID NO: 345643
  chr20:57225466-57225579
  hypo
  breast vs. thyroid,myeloid_neoplasm,non_cancer, multiple_myeloma

SEQ ID NO: 456868 - DNA, 119 bp, Homo sapiens; identical to SEQ ID NO: 344318
  chr20:57240808-57240927
  hypo
  breast vs. liver_bileduct

SEQ ID NO: 456869 - DNA, 57 bp, Homo sapiens; identical to SEQ ID NO: 453879
  chr20:58514041-58514098
  hypo
  breast vs. prostate,colorectal,uterine,renal,sarcoma, pancreas_gallbladder

SEQ ID NO: 456870 - DNA, 115 bp, Homo sapiens; identical to SEQ ID NO: 345644
  chr20:58514400-58514515
  hypo
  breast vs. prostate,colorectal,uterine,renal,sarcoma, pancreas_gallbladder

SEQ ID NO: 456871 - DNA, 58 bp, Homo sapiens; identical to SEQ ID NO: 455118
  chr20:60470129-60470187
  hypo
  breast vs. prostate

SEQ ID NO: 456872 - DNA, 77 bp, Homo sapiens; identical to SEQ ID NO: 383046
  chr20:60470257-60470334
  hypo
  breast vs. prostate

SEQ ID NO: 456873 - DNA, 84 bp, Homo sapiens
  chr20:60544922-60545006
  hypo
  breast vs. head_and_neck
cggaacactcggccccctcatcggggcactcggccccccgtcggagcactcgcccccccgtcggggcactcggccccccgtcgg

SEQ ID NO: 456874 - DNA, 209 bp, Homo sapiens
  chr20:60545058-60545267
  hypo
  breast vs. head_and_neck
ccacgagtcctttggtgtcagatccctagtgcggggccaggtgacccacctgggtggggcccaagcctttcccggttgcttaactgaggtgcccttacactggctcaaatgcacagatattacctgtcagcttagtgtttcacattggcacgcgcctgtgtgacacccatgatgatcaaaacagaacattttcatcaccccagagggcc

SEQ ID NO: 456875 - DNA, 266 bp, Homo sapiens
  chr20:60545296-60545562
  hypo
  breast vs. head_and_neck
cggagccccacaccctgcttctacccacccatgaacttccatcaggcggaatcagaatgcataggcttctgtgtccggcctcttccagtcagcgtagctcctctgagattcagctacctggtggagcatatcagtagttcgttcctttttattcctggggggcgtttcactgactaaatatgcatctgtttgactctccattcacctgctgaagggcatttgggctgcttccatcttgagcatcaatacggccattgtgaacattc

SEQ ID NO: 456876 - DNA, 373 bp, Homo sapiens; identical to SEQ ID NO: 349046
  chr20:60773878-60774251
  hypo
  breast vs. pancreas_gallbladder,liver_bileduct,prostate, lung,lymphoid_neoplasm,upper_gi,renal,sarcoma, bladder_and_urothelial,uterine,head_and_neck,colorectal, anorectal,cervical

SEQ ID NO: 456877 - DNA, 212 bp, Homo sapiens
  chr20:60984130-60984342
  hypo
agccaacctggcctgcgggcagtgtgtagggaacacacggcttttgtttcgtgtgattctggagaaattaaagcaacctttaacacacctggacttccctcttgggagttcagtccctctggcctctcaggacaacaggcagacatgtcacaggctgcaggtgggaggcagtgccccctgagtcaggcccgcaccccagtctggcccaggcc

SEQ ID NO: 456878 - DNA, 124 bp, Homo sapiens
  chr20:61838301-61838425
  hypo
  breast vs. lymphoid_neoplasm,anorectal
cgtgggagacaactggaaacgcacagttcgggctgcctggaaaacacatgcagcctcctttcagggcctttgatctccctttgtctcccgcacagccaggcacaggttcagcgctcactcgctg

SEQ ID NO: 456879 - DNA, 25 bp, Homo sapiens
  chr20:61838523-61838548
  hypo
  breast vs. lymphoid_neoplasm,anorectal
atacagctgcattaaccccgggcac

SEQ ID NO: 456880 - DNA, 46 bp, Homo sapiens; identical to SEQ ID NO: 356349
  chr20:61974409-61974455
  hypo
  breast vs. lymphoid_neoplasm,thyroid

SEQ ID NO: 456881 - DNA, 234 bp, Homo sapiens
  chr20:62031374-62031608
  hypo
  breast vs. anorectal
ctcactgtggcccccagccccactgtttcacaacaccccagctcgttcgtgccctgaggagagggaccatccgtccccacacccggtccacagcaccgcacccgactcagccccagcatcgaccagaagtccccggccctcagaccggccgcccagagacagtgggagtgaggaggccacacaccgtccaggttgaatcactgcgttttactgagtgcacaggtccacctggcg

SEQ ID NO: 456882 - DNA, 115 bp, Homo sapiens
  chr20:62153095-62153210
  hypo
  breast vs. melanoma,anorectal,cervical
cggtgttggagtccgcagagcactcggaacctccccaggcctccagcagcatgaccgcctgtggcctggctcgggacgccccgaggaagcagcccggcggtcagtccagcacagc

SEQ ID NO: 456883 - DNA, 128 bp, Homo sapiens; identical to SEQ ID NO: 368479
  chr20:62153462-62153590
  hypo
  breast vs. melanoma,anorectal,cervical

SEQ ID NO: 456884 - DNA, 180 bp, Homo sapiens
  chr20:62197207-62197387
  hypo
  breast vs. liver_bileduct,pancreas_gallbladder, colorectal
cgcctgctcctcggccaggtcccctactggctctggggcagcctcccagttccccgctgccccagcctgtgtgcctcggggaggccagcgccgtctctgcgccacaccctgctcgacctgctccatggacaggccctcggggcagacactgtgccgctccacgcactcacggatgaagct

SEQ ID NO: 456885 - DNA, 336 bp, Homo sapiens; identical to SEQ ID NO: 356353
  chr20:62197416-62197752
  hypo
  breast vs. liver_bileduct,pancreas_gallbladder, colorectal

SEQ ID NO: 456886 - DNA, 19 bp, Homo sapiens
  chr20:62314830-62314849
  hypo
  breast vs. lung,head_and_neck,liver_bileduct
cgtacccaggcacgtgcac

SEQ ID NO: 456887 - DNA, 161 bp, Homo sapiens; identical to SEQ ID NO: 356358
  chr20:62314955-62315116
  hypo
  breast vs. lung,head_and_neck,liver_bileduct

SEQ ID NO: 456888 - DNA, 154 bp, Homo sapiens; identical to SEQ ID NO: 344449
  chr21:33711064-33711218
  hypo
  breast vs. lung

SEQ ID NO: 456889 - DNA, 53 bp, Homo sapiens; identical to SEQ ID NO: 344452
  chr21:34033597-34033650
  hypo
  breast vs. sarcoma

SEQ ID NO: 456890 - DNA, 48 bp, Homo sapiens; identical to SEQ ID NO: 344468
  chr21:37718564-37718612
  hypo
  breast vs. pancreas_gallbladder,liver_bileduct,upper_gi, lymphoid_neoplasm

SEQ ID NO: 456891 - DNA, 42 bp, Homo sapiens; identical to SEQ ID NO: 349055
  chr21:37775172-37775214
  hypo
  breast vs. cervical,melanoma,anorectal,renal,lung, lymphoid_neoplasm,liver_bileduct,bladder_and_urothelial,uterine

SEQ ID NO: 456892 - DNA, 130 bp, Homo sapiens; identical to SEQ ID NO: 344470
  chr21:38175745-38175875
  hypo
  breast vs. upper_gi,liver_bileduct

SEQ ID NO: 456893 - DNA, 497 bp, Homo sapiens; identical to SEQ ID NO: 344485
  chr21:40762272-40762769
  hypo
  breast vs. head_and_neck,lung,colorectal

SEQ ID NO: 456894 - DNA, 13 bp, Homo sapiens
  chr21:44338162-44338175
  hypo
  breast vs. prostate,renal,pancreas_gallbladder, bladder_and_urothelial,lymphoid_neoplasm,cervical,anorectal, upper_gi,colorectal,thyroid,non_cancer
cgcatagtacact

SEQ ID NO: 456895 - DNA, 119 bp, Homo sapiens; identical to SEQ ID NO: 346254
  chr21:44338552-44338671
  hypo
  breast vs. prostate,renal,pancreas_gallbladder, bladder_and_urothelial,lymphoid_neoplasm,cervical,anorectal, upper_gi,colorectal,thyroid,non_cancer

SEQ ID NO: 456896 - DNA, 101 bp, Homo sapiens
  chr21:45374905-45375006
  hypo
  breast vs. liver_bileduct,head_and_neck,cervical, colorectal
cgtgaatgtgcatcacggctctatctgtggcccccaaaggctgggtgccagctgcctgtcggcagggagcgtatcaccgtggcacgtccatgccgtggggg

SEQ ID NO: 456897 - DNA, 53 bp, Homo sapiens; identical to SEQ ID NO: 344546
  chr21:45621745-45621798
  hypo
  breast vs. lung,upper_gi,head_and_neck, pancreas_gallbladder

SEQ ID NO: 456898 - DNA, 157 bp, Homo sapiens
  chr21:45656872-45657029
  hypo
  breast vs. head_and_neck
cgccccgcagcatgccggccggtgacatcagggctcggttccggtagcggctgtccacgttttccaaggagctgttctgtgggatgtggtaggtcaccacggttttcgactcactggtttgccaatatacgtaaacatcatttaaatcaaaacggct

SEQ ID NO: 456899 - DNA, 17 bp, Homo sapiens
  chr21:45657058-45657075
  hypo
  breast vs. head_and_neck
cgtcgctgcctaccatc

SEQ ID NO: 456900 - DNA, 21 bp, Homo sapiens
  chr21:46206052-46206073
  hypo
  breast vs. bladder_and_urothelial
cgccactctgggcccctgcag

SEQ ID NO: 456901 - DNA, 97 bp, Homo sapiens; identical to SEQ ID NO: 368608
  chr21:46206226-46206323
  hypo
  breast vs. bladder_and_urothelial

SEQ ID NO: 456902 - DNA, 107 bp, Homo sapiens
  chr21:46277475-46277582
  hypo
  breast vs. prostate,head_and_neck,melanoma, liver_bileduct,bladder_and_urothelial,cervical,lung,uterine, colorectal,upper_gi
cgcatgattcactgtttttaactacagttaatagctgtgccaccaccacaggtgacaccgtctcacctccaggggctgggagttgaacacttgctgcatgcctgggc

SEQ ID NO: 456903 - DNA, 45 bp, Homo sapiens; identical to SEQ ID NO: 356419
  chr21:46277614-46277659
  hypo
  breast vs. prostate,head_and_neck,melanoma, liver_bileduct,bladder_and_urothelial,cervical,lung,uterine, colorectal,upper_gi

SEQ ID NO: 456904 - DNA, 395 bp, Homo sapiens; identical to SEQ ID NO: 455949
  chr21:46352279-46352674
  hypo
  breast vs. bladder_and_urothelial,anorectal

SEQ ID NO: 456905 - DNA, 23 bp, Homo sapiens
  chr21:46352868-46352891
  hypo
  breast vs. bladder_and_urothelial,anorectal
cagcagaggacggggccggggcc

SEQ ID NO: 456906 - DNA, 60 bp, Homo sapiens
  chr21:46934012-46934072
  hypo
  breast vs. cervical,head_and_neck,melanoma
cggagggagcaggccctcaggttggggaggcgctgggaggaggattctgatggcggtgtg

SEQ ID NO: 456907 - DNA, 391 bp, Homo sapiens
  chr21:46935349-46935740
  hypo
  breast vs. pancreas_gallbladder,upper_gi,uterine, cervical,bladder_and_urothelial,melanoma,colorectal,anorectal, head_and_neck,renal,lung,liver_bileduct,lymphoid_neoplasm,ovary, sarcoma,prostate,thyroid,non_cancer
cgcggggcacagtgcagggacagcatggccaggcagctgccctgagtgtcgccagcacgctgtggccaccgccagagtgcggcacagggcagggggaatcctagggggcctgctagcaggataagcggaggcccccattgctaaggcaggcggccctcgaggcaggggtcgtggggatgcactgagggccgcctgcaaagttaccacaggggcgcccgagagtcactggttcacattctgaacaccgtcgcttggaagacactgcaaacccagcttgctgacaccaggaggatggacagccagctggggacaagtctcatctgcagcctcagggcctgaggcttgggcggagcacagagtgcagggggaaggggttgtcactgggctcagg

SEQ ID NO: 456908 - DNA, 189 bp, Homo sapiens
  chr21:47799620-47799809
  hypo
  breast vs. head_and_neck
cgagtctgctgccgaacccctctctagtgaatttttttttctgtgattgtatttttcagctccagatgtcaagggagctctatttcagtctttctctctgctgagggccctgcgtgcattgtgccctcagggctctggcgggcggtggacagcctggccctggccttcacccctgctgtgccaagccac

SEQ ID NO: 456909 - DNA, 10 bp, Homo sapiens
  chr22:21154023-21154033
  hypo
  breast vs. renal,sarcoma
tgggtccacc

SEQ ID NO: 456910 - DNA, 70 bp, Homo sapiens; identical to SEQ ID NO: 455952
  chr22:21386510-21386580
  hypo
  breast vs. multiple_myeloma,thyroid

SEQ ID NO: 456911 - DNA, 201 bp, Homo sapiens; identical to SEQ ID NO: 344679
  chr22:21977477-21977678
  hypo
  breast vs. renal,bladder_and_urothelial,liver_bileduct, colorectal,lymphoid_neoplasm,upper_gi,multiple_myeloma

SEQ ID NO: 456912 - DNA, 20 bp, Homo sapiens
  chr22:22036124-22036144
  hypo
  breast vs. bladder_and_urothelial,head_and_neck,melanoma, liver_bileduct
cgtgttcacacatgggtcct

SEQ ID NO: 456913 - DNA, 212 bp, Homo sapiens; identical to SEQ ID NO: 356492
  chr22:22036173-22036385
  hypo
  breast vs. bladder_and_urothelial,head_and_neck,melanoma, liver_bileduct

SEQ ID NO: 456914 - DNA, 137 bp, Homo sapiens; identical to SEQ ID NO: 453177
  chr22:22862472-22862609
  hypo
  breast vs. uterine,prostate,myeloid_neoplasm,non_cancer

SEQ ID NO: 456915 - DNA, 500 bp, Homo sapiens
  chr22:23800960-23801460
  hypo
  breast vs. pancreas_gallbladder,ovary,lymphoid_neoplasm
ggggagggttcccagagggctgccgggcgaagggagtcctttccaaaacggtttcctgagctctgatgcacacacatgcagctcacccccaagtctagcgttccattagtctaccgttccgttcttcccagcacattcggtgcgcagccgcgaccagtctaaccgtggcacctttccaccggccctgagccctggcgtgcccctccacgacatcccctgggcacggagttgtgtcgacaggtctctgtgactggctgggcatgttttcggggtttgcccgcggggcagcgtgtctcagagtttggctgtacgaagcggtgttgacgggtaaacccggttttgtctctccctccggcggttgagggctggttccgcgttccatctgttagtgatgggatcgtgttgccgtggacgtccgtgccgaggtctgtgtgtggacagcgctcagaccccctggctgcgcgcccgggcgtgtgctgggcccatggactctgcgttca

SEQ ID NO: 456916 - DNA, 28 bp, Homo sapiens
  chr22:23801610-23801638
  hypo
  breast vs. pancreas_gallbladder,ovary,lymphoid_neoplasm
tgaggttcacgtttccccggtgcccggc

SEQ ID NO: 456917 - DNA, 177 bp, Homo sapiens; identical to SEQ ID NO: 344716
  chr22:29733772-29733949
  hypo
  breast vs. lung

SEQ ID NO: 456918 - DNA, 80 bp, Homo sapiens; identical to SEQ ID NO: 455180
  chr22:30084279-30084359
  hypo
  breast vs. pancreas_gallbladder,sarcoma,liver_bileduct, upper_gi,renal

SEQ ID NO: 456919 - DNA, 120 bp, Homo sapiens; identical to SEQ ID NO: 356519
  chr22:30084388-30084508
  hypo
  breast vs. pancreas_gallbladder,sarcoma,liver_bileduct, upper_gi,renal

SEQ ID NO: 456920 - DNA, 458 bp, Homo sapiens
  chr22:30090282-30090740
  hypo
  breast vs. uterine,prostate,upper_gi,melanoma,anorectal, bladder_and_urothelial,colorectal
cgtcaccttaccccagccatgttgccagggcatgaggactaagatgcttgccctgccaagcccggaggggatgagcagcctcagctggtgccgccacagacagcacaccacagaggtggctcagggaccttggtagatgggaatgtgagaatctattaaaataggcagggatctccggtcctctgtcaagaggcaatgctgacggctttttcctgctggcgtgcctctgcccaccagccttccccttgcacatcctcatttgtcacctcctaatttgaattattgggcaaatctggccgcttatttgggactgacagccaacttcttgagcatctatttgaacagccttccctttcgctcccagccacctttgaggtgagtccaagtggcaggacaggaccctgtgtgacagagcggaggtcttgtgccctctcagcttcttctctgctttcttacag

SEQ ID NO: 456921 - DNA, 74 bp, Homo sapiens; identical to SEQ ID NO: 356521
  chr22:30090769-30090843
  hypo
  breast vs. uterine,prostate,upper_gi,melanoma,anorectal, bladder_and_urothelial,colorectal

SEQ ID NO: 456922 - DNA, 37 bp, Homo sapiens
  chr22:30091074-30091111
  hypo
  breast vs. liver_bileduct,bladder_and_urothelial
cgtccaaggcaccggtgtgtgtgtgtcttgcactcca

SEQ ID NO: 456923 - DNA, 447 bp, Homo sapiens; identical to SEQ ID NO: 368758
  chr22:30091301-30091748
  hypo
  breast vs. liver_bileduct,bladder_and_urothelial

SEQ ID NO: 456924 - DNA, 254 bp, Homo sapiens; identical to SEQ ID NO: 344724
  chr22:30190745-30190999
  hypo
  breast vs. upper_gi,lung,head_and_neck,colorectal, prostate,pancreas_gallbladder,melanoma

SEQ ID NO: 456925 - DNA, 592 bp, Homo sapiens
  chr22:38434385-38434977
  hypo
  breast vs. pancreas_gallbladder,liver_bileduct, colorectal,bladder_and_urothelial
cgggcccaggcaggtggaagccatggctctggccgggtcacagggcggctggggtttgacctggcggccatgatgggctctggacccaggagccacccgggcacaggatgggacgggttgagagattggtcgtccaggcgttgagtgtgccctcgctcctccccaccttccgccgtggccttgagccccttgcgcccgcgcccatggggttaaatctctccctgtctctctctgctccaagttgttttccaagtgaggcagagaatggttctcttgttaccaacatggcttctgggcattgggtaatgcgctccctcttctcccgcagcgccacaaagggaccttttgttcccctccctgcccctctcgctggctcttcccggccccccacccacccaaactccctcctccccccgccggcgcccgcaccccggggctgcgcgctgaccgtggcggccgcggcgccctccctctcccagcgcctgcactggcggccgccatcttgcgagcggccctcagggcggcctgggctttcccagggttctcggggccggggcagtcgtagggggcggctggggctccacaggacgtt

SEQ ID NO: 456926 - DNA, 146 bp, Homo sapiens; identical to SEQ ID NO: 356535
  chr22:38435006-38435152
  hypo
  breast vs. pancreas_gallbladder,liver_bileduct, colorectal,bladder_and_urothelial

SEQ ID NO: 456927 - DNA, 303 bp, Homo sapiens
  chr22:41656931-41657234
  hypo
  breast vs. colorectal,anorectal
cgatcggggactcagcaatgtcctgcggggatggggagaggagagtggaagaggagtggggataaggtcacctgagagcacgtcatttggcacctgagccctgcggctgcccctgcctatctccctgtcttggaggtctggtatgttccttctctgtgccccacaccagtggctgggccaggctactgtcagcactcgcaccatctcacttcaccacttctgagcctggcagatgacactccttggtcagagtggcctgcctggcctgaagccccataggggctggctcaccagtgggagcca

SEQ ID NO: 456928 - DNA, 288 bp, Homo sapiens; identical to SEQ ID NO: 368812
  chr22:41657416-41657704
  hypo
  breast vs. colorectal,anorectal

SEQ ID NO: 456929 - DNA, 69 bp, Homo sapiens; identical to SEQ ID NO: 344787
  chr22:41658279-41658348
  hypo
  breast vs. head_and_neck,upper_gi,bladder_and_urothelial, lung,colorectal,sarcoma,renal,ovary,pancreas_gallbladder, liver_bileduct,cervical,lymphoid_neoplasm,multiple_myeloma, uterine

SEQ ID NO: 456930 - DNA, 316 bp, Homo sapiens
  chr22:41667782-41668098
  hypo
  breast vs. liver_bileduct,prostate
cgcccgtcaagacctcactcctcacttgcacactgctgcagcagcagagagaacccctctggcatcagcactacgcccggaacactgggccatcaagggcagatcccaccctgcccctgccctgggctgcttcctgcacagaggagggcctaggaggtggtgtgcagtgattcactcgagccactgcatctgtagcaggcgggaaggtgcatgcagcactcctaccggccaggctctcccaggacaacctctgaggaagaaggaagggctctatctcctatttcatataagagcccagcctcagagctgcacgcag

SEQ ID NO: 456931 - DNA, 63 bp, Homo sapiens; identical to SEQ ID NO: 383514
  chr22:41668168-41668231
  hypo
  breast vs. liver_bileduct,prostate

SEQ ID NO: 456932 - DNA, 78 bp, Homo sapiens
  chr22:42995235-42995313
  hypo
  breast vs. liver_bileduct,pancreas_gallbladder
cgtttataaaactaagggaatggactagttccagctctgaaaatcttacggcccaaacaaagaaatatttctgcattg

SEQ ID NO: 456933 - DNA, 16 bp, Homo sapiens
  chr22:42995331-42995347
  hypo
  breast vs. liver_bileduct,pancreas_gallbladder
gggcgcagtggcttac

SEQ ID NO: 456934 - DNA, 141 bp, Homo sapiens; identical to SEQ ID NO: 344800
  chr22:43351254-43351395
  hypo
  breast vs. ovary

SEQ ID NO: 456935 - DNA, 99 bp, Homo sapiens
  chr22:45075627-45075726
  hypo
  breast vs. prostate
cgctctgggacactcagtctgatggggcaggctggtcagaagacatagagccatggtgtgtttggaactttcacagagggaagcctggggctcgggaag

SEQ ID NO: 456936 - DNA, 25 bp, Homo sapiens
  chr22:45120602-45120627
  hypo
  breast vs. bladder_and_urothelial,cervical,uterine, anorectal
cgagcctctcttgcctcccctgtaa

SEQ ID NO: 456937 - DNA, 78 bp, Homo sapiens; identical to SEQ ID NO: 356562
  chr22:45120758-45120836
  hypo
  breast vs. bladder_and_urothelial,cervical,uterine, anorectal

SEQ ID NO: 456938 - DNA, 734 bp, Homo sapiens
  chr22:45592910-45593644
  hypo
  breast vs. liver_bileduct,lymphoid_neoplasm,melanoma, pancreas_gallbladder,colorectal,uterine
cggccccgggagtcgagtggcctcgcctggctgcggctccagcactggcgtgccatcgcagaccccggtggcggtggacaggtaggcacttggcagcactccgagggctgggcccggccggggctctgcgcaggctccgcacgcggctaggtcatcaggatgggcttctgccgaacttccaggatgtctagggccggcaggagggaagcaggtgaaacagtaaccctcaacagcggtgagtgctatggtcacggcagtgccacttctgaaggaagcccgcctcagccactcatgcatctcctctccaggcctcacagactgcagaggagacgtgtctccaccatcctcaccctgcagactgggaaatgggctcgcagcaacggcacaccctgcagggcctcaggtgcaagctggtgtgggggccagagccactgcctgtcacagctgctgcaggcctgggtcagcgaggtggcctgagagcctcccctcgcccgtgagtaacacacacctgggcatctgtggccactcaagaggggacagcaggtgcgccagaaaggtgaacaaagggaggacttcagctctgggaaagctacggctccacccaaagtctgagacaaagaggccaagagccctgcaaagaaacccaaccaaccgacaggacagggcgggatgactccgggtggctcacaagtaccaaggccctggaggcagagctggctgtgagaaggtgcggc

SEQ ID NO: 456939 - DNA, 404 bp, Homo sapiens; identical to SEQ ID NO: 453908
  chr22:45593240-45593644
  hypo
  breast vs. liver_bileduct,melanoma,lymphoid_neoplasm, renal,colorectal,pancreas_gallbladder,thyroid,non_cancer, uterine,myeloid_neoplasm,multiple_myeloma,upper_gi,prostate

SEQ ID NO: 456940 - DNA, 258 bp, Homo sapiens; identical to SEQ ID NO: 346288
  chr22:45593715-45593973
  hypo
  breast vs. liver_bileduct,melanoma,lymphoid_neoplasm, renal,colorectal,pancreas_gallbladder,thyroid,non_cancer, uterine,myeloid_neoplasm,multiple_myeloma,upper_gi,prostate

SEQ ID NO: 456941 - DNA, 28 bp, Homo sapiens
  chr22:45603889-45603917
  hypo
cgatcacacggctgttcggggcagcacc

SEQ ID NO: 456942 - DNA, 239 bp, Homo sapiens
  chr22:45603946-45604185
  hypo
cccatcagaaaggtgtccgtgtgcgcaccaaagccaggcccaagaggacactgggagctgcccggtacccactgacaggagggtggccaggccgccatggtacactctgcaggcattacacagcagtgagaccagattacaaccacctgtgtcaacaggcatgactcacaaacatgacatgcggagaaagaagcctgaaacaacatatactgcccgattccaatgtatgagctgtgaga

SEQ ID NO: 456943 - DNA, 55 bp, Homo sapiens; identical to SEQ ID NO: 356566
  chr22:45604387-45604442
  hypo

SEQ ID NO: 456944 - DNA, 463 bp, Homo sapiens; identical to SEQ ID NO: 344824
  chr22:46255154-46255617
  hypo
  breast vs. head_and_neck

SEQ ID NO: 456945 - DNA, 447 bp, Homo sapiens; identical to SEQ ID NO: 344825
  chr22:46261704-46262151
  hypo
  breast vs. lung

SEQ ID NO: 456946 - DNA, 633 bp, Homo sapiens; identical to SEQ ID NO: 383560
  chr22:46704062-46704695
  hypo
  breast vs. renal,pancreas_gallbladder

SEQ ID NO: 456947 - DNA, 235 bp, Homo sapiens
  chr22:48027392-48027627
  hypo
  breast vs. lymphoid_neoplasm
cggcttccacagattggacgaggcccacccaccttggggaggggccagctgctgtgttcagtccgccattgcaaacacgaagctcttccagaaacgccctcacagacaccccggaagtcacgtacccactctgtaggtgccccggggcacaggcaagcggacgagccagttatccctcagagctcctgctgcctcgcccgctttctctcggaaacgtgaagtgtggcctcagctg

SEQ ID NO: 456948 - DNA, 22 bp, Homo sapiens
  chr22:48027655-48027677
  hypo
  breast vs. lymphoid_neoplasm
gtgtcagtgtgcgtgtgcatgg

SEQ ID NO: 456949 - DNA, 41 bp, Homo sapiens; identical to SEQ ID NO: 368872
  chr22:48027786-48027827
  hypo
  breast vs. lymphoid_neoplasm

SEQ ID NO: 456950 - DNA, 108 bp, Homo sapiens
  chr22:49967872-49967980
  hypo
cgctccccagacgccggagcacccacggccagcgggtggacacggtgtccacatggtgcacactcttgcccttgagcctgtgggagggaagccaggaagatatggacg

SEQ ID NO: 456951 - DNA, 226 bp, Homo sapiens
  chr22:50191356-50191582
  hypo
  breast vs. head_and_neck,lung,upper_gi,liver_bileduct, bladder_and_urothelial
cggaccatgctgatagggagctggcaacacagagcaggacagagtctgctagaaagagcgtcttccacctcctccggacacggcgccagttcttaccgtcttcccaggagaaaggccgccgcggtgccgcagcaggccgctcaggcaggtgcatccccgaggcctcttccaagccgatgctgtccacctcgcgccgggcctgcctcagaacaacacctccctgatc

SEQ ID NO: 456952 - DNA, 81 bp, Homo sapiens; identical to SEQ ID NO: 346293
  chr22:50191626-50191707
  hypo
  breast vs. head_and_neck,lung,upper_gi,liver_bileduct, bladder_and_urothelial

SEQ ID NO: 456953 - DNA, 268 bp, Homo sapiens
  chr22:50529625-50529893
  hypo
  breast vs. cervical
tagaacacgcgctcagcggtagctggagctccagctcttggcagcgctcagatcctatgcctgtactgtaaccgtcgccccaggttcctcccgtggctgggaagctgcagtaaaggcacgttcaggactcaggaccgtggctgcagcagtggccagacggctgagggcgtgcgctgctcctgggccagacttgtctgcccagccccgaaccttttccagcaccgtgtttgttgagattctccagtcttccgaggctgctgctgatggt

SEQ ID NO: 456954 - DNA, 74 bp, Homo sapiens; identical to SEQ ID NO: 368904
  chr22:50529922-50529996
  hypo
  breast vs. cervical

SEQ ID NO: 456955 - DNA, 191 bp, Homo sapiens; identical to SEQ ID NO: 338015
  chr3:4347767-4347958
  hypo
  breast vs. pancreas_gallbladder

SEQ ID NO: 456956 - DNA, 58 bp, Homo sapiens; identical to SEQ ID NO: 338023
  chr3:10011425-10011483
  hypo
  breast vs. liver_bileduct

SEQ ID NO: 456957 - DNA, 80 bp, Homo sapiens
  chr3:12976966-12977046
  hypo
  breast vs. head_and_neck,prostate,ovary,colorectal, pancreas_gallbladder,lung,melanoma,bladder_and_urothelial,renal, anorectal,uterine
cgatgcggtagtgcctcttgcggatgacatcgttgctaaaggcaggcgagtcccagctgttgcgggcctccttgtggtag

SEQ ID NO: 456958 - DNA, 192 bp, Homo sapiens; identical to SEQ ID NO: 353298
  chr3:12977144-12977336
  hypo
  breast vs. head_and_neck,prostate,ovary,colorectal, pancreas_gallbladder,lung,melanoma,bladder_and_urothelial,renal, anorectal,uterine

SEQ ID NO: 456959 - DNA, 340 bp, Homo sapiens; identical to SEQ ID NO: 349744
  chr3:16926663-16927003
  hypo
  breast vs. liver_bileduct,pancreas_gallbladder,ovary

SEQ ID NO: 456960 - DNA, 219 bp, Homo sapiens; identical to SEQ ID NO: 338086
  chr3:44945281-44945500
  hypo
  breast vs. colorectal,pancreas_gallbladder,lung, anorectal,head_and_neck,renal,ovary,prostate

SEQ ID NO: 456961 - DNA, 255 bp, Homo sapiens; identical to SEQ ID NO: 338088
  chr3:45719334-45719589
  hypo
  breast vs. liver_bileduct,upper_gi,pancreas_gallbladder, colorectal,lymphoid_neoplasm,lung,renal,bladder_and_urothelial

SEQ ID NO: 456962 - DNA, 397 bp, Homo sapiens
  chr3:46009350-46009747
  hypo
  breast vs. head_and_neck,melanoma,bladder_and_urothelial, upper_gi
cgcctcaactctgctagctcctcctcccaggagctcgtgtgggccagcaactcctgcagccgtcgccagagctggtctgcctcctgtcccttcccagacaactcctcctggagtggggccatctccttcaccaggcgctccaggctggcccgggcatcctctttcagctgaagctccttgaccagctgttccagttgggcactctgctgtctgttgacctcctcgaccttggttctctccctttctagggcttgaagcttctcccctagctcctgcatctcctgggccgcatcactgggaataggttcttgccggccctttgtgtctgatgccgtatctgccttctgctgagccatggctagccagcctgggaagctggctaaatgctggtttttct

SEQ ID NO: 456963 - DNA, 316 bp, Homo sapiens; identical to SEQ ID NO: 353323
  chr3:46009776-46010092
  hypo
  breast vs. head_and_neck,melanoma,bladder_and_urothelial, upper_gi

SEQ ID NO: 456964 - DNA, 25 bp, Homo sapiens
  chr3:49034180-49034205
  hypo
  breast vs. pancreas_gallbladder,colorectal, lymphoid_neoplasm
cggaccggtaaaggttaatcaggta

SEQ ID NO: 456965 - DNA, 149 bp, Homo sapiens
  chr3:56718095-56718244
  hypo
  breast vs. head_and_neck
cgttcatcaacgttttcctatagtaaatgtatattaaagaaaaaataaacttgcggtcacattaaaaaatacacagcaggtcgtcgctctcccataaagggaacaacttcatagttaagagccctttacatagtggtttctaccttatc

SEQ ID NO: 456966 - DNA, 170 bp, Homo sapiens; identical to SEQ ID NO: 345801
  chr3:56718281-56718451
  hypo
  breast vs. head_and_neck

SEQ ID NO: 456967 - DNA, 768 bp, Homo sapiens; identical to SEQ ID NO: 454376
  chr3:67048599-67049367
  hypo
  breast vs. lymphoid_neoplasm

SEQ ID NO: 456968 - DNA, 102 bp, Homo sapiens; identical to SEQ ID NO: 455975
  chr3:99594790-99594892
  hypo
  breast vs. sarcoma,upper_gi,bladder_and_urothelial

SEQ ID NO: 456969 - DNA, 438 bp, Homo sapiens; identical to SEQ ID NO: 345099
  chr3:124773932-124774370
  hypo
  breast vs. cervical,anorectal,liver_bileduct,upper_gi, pancreas_gallbladder,non_cancer,uterine,myeloid_neoplasm,renal, thyroid,bladder_and_urothelial

SEQ ID NO: 456970 - DNA, 114 bp, Homo sapiens
  chr3:127395778-127395892
  hypo
  breast vs. liver_bileduct
cgcaggccctcatcctccccactgcccccaggccgcctggacattggcgtagagcatgtgagtgactgtgagcgcctggccaagcaatgccagctgtgggacctgctcagcgac

SEQ ID NO: 456971 - DNA, 123 bp, Homo sapiens; identical to SEQ ID NO: 455978
  chr3:127794271-127794394
  hypo
  breast vs. sarcoma,anorectal,cervical,thyroid, myeloid_neoplasm,renal,non_cancer,lung,pancreas_gallbladder, bladder_and_urothelial,prostate,head_and_neck,multiple_myeloma

SEQ ID NO: 456972 - DNA, 130 bp, Homo sapiens; identical to SEQ ID NO: 338188
  chr3:129231161-129231291
  hypo
  breast vs. bladder_and_urothelial,lung,head_and_neck, ovary,cervical,colorectal,prostate,upper_gi,anorectal,uterine, renal,melanoma,liver_bileduct,pancreas_gallbladder

SEQ ID NO: 456973 - DNA, 216 bp, Homo sapiens; identical to SEQ ID NO: 338193
  chr3:130424529-130424745
  hypo
  breast vs. lymphoid_neoplasm

SEQ ID NO: 456974 - DNA, 13 bp, Homo sapiens
  chr3:138679565-138679578
  hypo
  breast vs. myeloid_neoplasm,multiple_myeloma,thyroid
cgggcacagacgc

SEQ ID NO: 456975 - DNA, 124 bp, Homo sapiens; identical to SEQ ID NO: 455226
  chr3:141174173-141174297
  hypo
  breast vs. melanoma,thyroid,myeloid_neoplasm

SEQ ID NO: 456976 - DNA, 8 bp, Homo sapiens
  chr3:141174671-141174679
  hypo
  breast vs. melanoma,thyroid,myeloid_neoplasm
gtttcagc

SEQ ID NO: 456977 - DNA, 81 bp, Homo sapiens; identical to SEQ ID NO: 338212
  chr3:141495392-141495473
  hypo
  breast vs. head_and_neck

SEQ ID NO: 456978 - DNA, 26 bp, Homo sapiens
  chr3:142537613-142537639
  hypo
  breast vs. colorectal,lung,upper_gi
cggcaaaaagccaaattcaactagta

SEQ ID NO: 456979 - DNA, 15 bp, Homo sapiens
  chr3:142837817-142837832
  hypo
  breast vs. ovary
cgggacaagtatttt

SEQ ID NO: 456980 - DNA, 308 bp, Homo sapiens; identical to SEQ ID NO: 455229
  chr3:142895557-142895865
  hypo
  breast vs. head_and_neck,prostate,sarcoma

SEQ ID NO: 456981 - DNA, 54 bp, Homo sapiens; identical to SEQ ID NO: 345815
  chr3:169540679-169540733
  hypo
  breast vs. sarcoma

SEQ ID NO: 456982 - DNA, 809 bp, Homo sapiens; identical to SEQ ID NO: 345120
  chr3:183165024-183165833
  hypo
  breast vs. liver_bileduct

SEQ ID NO: 456983 - DNA, 3 bp, Homo sapiens
  chr3:183728804-183728807
  hypo
  breast vs. head_and_neck,uterine,renal,ovary,cervical, melanoma,liver_bileduct,colorectal,sarcoma,pancreas_gallbladder, lung,lymphoid_neoplasm,upper_gi,thyroid,myeloid_neoplasm, non_cancer
cgg

SEQ ID NO: 456984 - DNA, 186 bp, Homo sapiens
  chr3:184784962-184785148
  hypo
  breast vs. prostate,renal,lymphoid_neoplasm
cgagatcttctacactgccggaattttctcactgttaacaagttttgcaaaggtggtttcaaatggatgcgtctatatcacacctgaagatagttacagtcaatttccagcttcacggaattctcccctgcgcctttttcttccctttgagcctccaggattgctcaatcgttcccttgggcaaga

SEQ ID NO: 456985 - DNA, 34 bp, Homo sapiens; identical to SEQ ID NO: 353408
  chr3:185363305-185363339
  hypo
  breast vs. cervical,melanoma,colorectal,prostate

SEQ ID NO: 456986 - DNA, 139 bp, Homo sapiens; identical to SEQ ID NO: 338291
  chr3:186697410-186697549
  hypo
  breast vs. colorectal,ovary,upper_gi

SEQ ID NO: 456987 - DNA, 154 bp, Homo sapiens; identical to SEQ ID NO: 455246
  chr3:193922622-193922776
  hypo
  breast vs. renal

SEQ ID NO: 456988 - DNA, 1 bp, Homo sapiens
  chr3:195637231-195637232
  hypo
  breast vs. colorectal,renal,sarcoma,liver_bileduct, pancreas_gallbladder,melanoma,lymphoid_neoplasm
c

SEQ ID NO: 456989 - DNA, 83 bp, Homo sapiens; identical to SEQ ID NO: 353427
  chr3:195637425-195637508
  hypo
  breast vs. colorectal,renal,sarcoma,liver_bileduct, pancreas_gallbladder,melanoma,lymphoid_neoplasm

SEQ ID NO: 456990 - DNA, 13 bp, Homo sapiens
  chr4:759725-759738
  hypo
  breast vs. ovary
cgggacgtgattc

SEQ ID NO: 456991 - DNA, 328 bp, Homo sapiens; identical to SEQ ID NO: 363466
  chr4:759841-760169
  hypo
  breast vs. ovary

SEQ ID NO: 456992 - DNA, 53 bp, Homo sapiens; identical to SEQ ID NO: 353458
  chr4:1338812-1338865
  hypo
  breast vs. melanoma,uterine,sarcoma

SEQ ID NO: 456993 - DNA, 140 bp, Homo sapiens
  chr4:1807117-1807257
  hypo
  breast vs. liver_bileduct
cggccaggtggtcatggcggaggccatcggcattgacaaggaccgggccgccaagcctgtcaccgtagccgtgaagatgctgaaaggtgaggagggggcggccaggggtgcagagcagggctgggggcgccgccgccgcc

SEQ ID NO: 456994 - DNA, 304 bp, Homo sapiens; identical to SEQ ID NO: 338389
  chr4:1814436-1814740
  hypo
  breast vs. head_and_neck

SEQ ID NO: 456995 - DNA, 79 bp, Homo sapiens
  chr4:1827219-1827298
  hypo
  breast vs. bladder_and_urothelial
cgagtggcctttcgaggctgatgtttcccttgagcccgtgccggcctggcaccaggccaatattcacgcacctgcttca

SEQ ID NO: 456996 - DNA, 10 bp, Homo sapiens
  chr4:1827327-1827337
  hypo
  breast vs. bladder_and_urothelial
cccagggccc

SEQ ID NO: 456997 - DNA, 57 bp, Homo sapiens
  chr4:1993659-1993716
  hypo
  breast vs. prostate,sarcoma
cggcatccggtgccctcccagcagcctcccacctcccagcagcacccagtccactgg

SEQ ID NO: 456998 - DNA, 197 bp, Homo sapiens; identical to SEQ ID NO: 348041
  chr4:1994335-1994532
  hypo
  breast vs. prostate,sarcoma

SEQ ID NO: 456999 - DNA, 24 bp, Homo sapiens
  chr4:2514675-2514699
  hypo
  breast vs. melanoma,renal
cggatgcccgcgctaaggcagagt

SEQ ID NO: 457000 - DNA, 43 bp, Homo sapiens; identical to SEQ ID NO: 363514
  chr4:2514728-2514771
  hypo
  breast vs. melanoma,renal

SEQ ID NO: 457001 - DNA, 55 bp, Homo sapiens; identical to SEQ ID NO: 353470
  chr4:2926396-2926451
  hypo
  breast vs. sarcoma

SEQ ID NO: 457002 - DNA, 3 bp, Homo sapiens
  chr4:2932837-2932840
  hypo
  breast vs. head_and_neck
cgc

SEQ ID NO: 457003 - DNA, 103 bp, Homo sapiens
  chr4:3217005-3217108
  hypo
  breast vs. liver_bileduct,pancreas_gallbladder, head_and_neck,bladder_and_urothelial,melanoma,anorectal, lymphoid_neoplasm,upper_gi,renal,colorectal,sarcoma,cervical, prostate,multiple_myeloma,uterine
cgtgcaccgcggtgagtgtggactcctggaagcgcaccgtagctccgctgtgtcctgctgctcctccctagctgtcagggaggctgtagtccattgctttgcc

SEQ ID NO: 457004 - DNA, 56 bp, Homo sapiens; identical to SEQ ID NO: 345832
  chr4:3217154-3217210
  hypo
  breast vs. liver_bileduct,pancreas_gallbladder, head_and_neck,bladder_and_urothelial,melanoma,anorectal, lymphoid_neoplasm,upper_gi,renal,colorectal,sarcoma,cervical, prostate,multiple_myeloma,uterine

SEQ ID NO: 457005 - DNA, 149 bp, Homo sapiens; identical to SEQ ID NO: 338417
  chr4:3220650-3220799
  hypo
  breast vs. lung

SEQ ID NO: 457006 - DNA, 23 bp, Homo sapiens
  chr4:6748324-6748347
  hypo
  breast vs. renal,lymphoid_neoplasm,cervical,melanoma, prostate
cgtccaccggcaaaggacaatgg

SEQ ID NO: 457007 - DNA, 7 bp, Homo sapiens
  chr4:7047046-7047053
  hypo
  breast vs. anorectal,head_and_neck,cervical,lung, liver_bileduct
cgtagtc

SEQ ID NO: 457008 - DNA, 199 bp, Homo sapiens; identical to SEQ ID NO: 353481
  chr4:7047283-7047482
  hypo
  breast vs. anorectal,head_and_neck,cervical,lung, liver_bileduct

SEQ ID NO: 457009 - DNA, 309 bp, Homo sapiens; identical to SEQ ID NO: 455274
  chr4:39447953-39448262
  hypo
  breast vs. sarcoma

SEQ ID NO: 457010 - DNA, 76 bp, Homo sapiens; identical to SEQ ID NO: 338489
  chr4:56222936-56223012
  hypo
  breast vs. liver_bileduct

SEQ ID NO: 457011 - DNA, 310 bp, Homo sapiens; identical to SEQ ID NO: 338518
  chr4:99399725-99400035
  hypo
  breast vs. lung,head_and_neck,upper_gi

SEQ ID NO: 457012 - DNA, 185 bp, Homo sapiens; identical to SEQ ID NO: 338528
  chr4:106335558-106335743
  hypo
  breast vs. lung,upper_gi,liver_bileduct,head_and_neck, pancreas_gallbladder

SEQ ID NO: 457013 - DNA, 910 bp, Homo sapiens
  chr4:141563919-141564829
  hypo
  breast vs. upper_gi,head_and_neck,lung
cggcagagatttgctgctcagctttccgctactgttgcagttcttccccctcttgcgggcgggcgacagggctctcgggggcgtgggtctgtttccacggcctgcgtgccaagcttccatgggactcctcgtgcctgtcctcggagtcccggcgccgctgcagcttcaccagctcatgctgcttctccttgtactggtgctggacctcggcccgccacattctgaagtccagttccaggacgtccatgtcctccacggaggacttcatggggtacatccgctcctccttcttgcgcatccagctgtacttattgtgggcttcagctcccgtgggagccgcaggttcttgagcgggtcccaccacgggcccatccagcacctccctcagcatgtggctgccggctgccagcaggctctccagtgagggccgagccaccagggcccgctccgcacctcccaccttcttgctcctcctctccagctccagctctgcgatctcgctcagcagggtgatgccgtgcagaaagctctgctccaagacaaggctctcggcagcttcctgcttctccaaggcctggactccagtagcacctggggagggcagaggcctggcctggggcagctccatggccacctccatgccagccagtgggtcttccaggccgggcaggaactgctcagagcttgcctcttccaggtagcaggtgctgccgggcacaggcacggcctcccggggctccagtctcgggcactctccctccccggcgggcacgtcacagtctgacatttctaggctgggctggggctcgctcagggccgcctgggccaggccttcctccggcgctgcctctgccgcaggaaccgccacaggcacctccactggctcctccttggcctccactagcgtctc

SEQ ID NO: 457014 - DNA, 17 bp, Homo sapiens
  chr4:153918932-153918949
  hypo
  breast vs. sarcoma
cggtgcatccctgaggc

SEQ ID NO: 457015 - DNA, 17 bp, Homo sapiens
  chr4:154216357-154216374
  hypo
  breast vs. renal,sarcoma,melanoma,colorectal, pancreas_gallbladder,prostate,uterine
acctgcgtgggcaggtg

SEQ ID NO: 457016 - DNA, 352 bp, Homo sapiens; identical to SEQ ID NO: 209824
  chr4:154216898-154217250
  hypo
  breast vs. renal,sarcoma,melanoma,colorectal, pancreas_gallbladder,prostate,uterine

SEQ ID NO: 457017 - DNA, 7 bp, Homo sapiens
  chr4:184667623-184667630
  hypo
  breast vs. bladder_and_urothelial,colorectal
cgatagg

SEQ ID NO: 457018 - DNA, 125 bp, Homo sapiens; identical to SEQ ID NO: 353523
  chr4:184667665-184667790
  hypo
  breast vs. bladder_and_urothelial,colorectal

SEQ ID NO: 457019 - DNA, 194 bp, Homo sapiens; identical to SEQ ID NO: 456009
  chr4:187026475-187026669
  hypo
  breast vs. lung

SEQ ID NO: 457020 - DNA, 386 bp, Homo sapiens; identical to SEQ ID NO: 363656
  chr5:510026-510412
  hypo
  breast vs. colorectal

SEQ ID NO: 457021 - DNA, 176 bp, Homo sapiens; identical to SEQ ID NO: 338699
  chr5:10256093-10256269
  hypo
  breast vs. head_and_neck

SEQ ID NO: 457022 - DNA, 171 bp, Homo sapiens; identical to SEQ ID NO: 456015
  chr5:10564301-10564472
  hypo
  breast vs. lymphoid_neoplasm,thyroid,myeloid_neoplasm, non_cancer,ovary,sarcoma,anorectal,renal

SEQ ID NO: 457023 - DNA, 274 bp, Homo sapiens; identical to SEQ ID NO: 338706
  chr5:14332870-14333144
  hypo
  breast vs. head_and_neck,pancreas_gallbladder,upper_gi, liver_bileduct,ovary

SEQ ID NO: 457024 - DNA, 38 bp, Homo sapiens; identical to SEQ ID NO: 456033
  chr5:77268330-77268368
  hypo
  breast vs. thyroid,ovary,myeloid_neoplasm,non_cancer, uterine

SEQ ID NO: 457025 - DNA, 26 bp, Homo sapiens
  chr5:94982109-94982135
  hypo
  breast vs. melanoma,renal
cgtgaaccaccgcgcccggccttaac

SEQ ID NO: 457026 - DNA, 72 bp, Homo sapiens
  chr5:96114516-96114588
  hypo
  breast vs. lung,pancreas_gallbladder,ovary,upper_gi, head_and_neck,liver_bileduct,colorectal
cgcaagatccagtgcatgtgctgagggaagaccggcaggacttgcgtagttagatgtctggggaagaaagga

SEQ ID NO: 457027 - DNA, 53 bp, Homo sapiens; identical to SEQ ID NO: 353629
  chr5:96114632-96114685
  hypo
  breast vs. lung,pancreas_gallbladder,ovary,upper_gi, head_and_neck,liver_bileduct,colorectal

SEQ ID NO: 457028 - DNA, 45 bp, Homo sapiens
  chr5:98200950-98200995
  hypo
  breast vs. cervical
cgctggaaccaagtaagtcagagaagtggccggcaacgatgggag

SEQ ID NO: 457029 - DNA, 625 bp, Homo sapiens; identical to SEQ ID NO: 456042
  chr5:142781875-142782500
  hypo
  breast vs. anorectal,multiple_myeloma

SEQ ID NO: 457030 - DNA, 78 bp, Homo sapiens; identical to SEQ ID NO: 456043
  chr5:142782625-142782703
  hypo
  breast vs. anorectal,multiple_myeloma

SEQ ID NO: 457031 - DNA, 111 bp, Homo sapiens; identical to SEQ ID NO: 456045
  chr5:148206075-148206186
  hypo
  breast vs. prostate,bladder_and_urothelial,ovary,lung, sarcoma,anorectal

SEQ ID NO: 457032 - DNA, 36 bp, Homo sapiens; identical to SEQ ID NO: 350191
  chr5:148206432-148206468
  hypo
  breast vs. prostate,bladder_and_urothelial,ovary,lung, sarcoma,anorectal

SEQ ID NO: 457033 - DNA, 834 bp, Homo sapiens; identical to SEQ ID NO: 456049
  chr5:158634816-158635650
  hypo
  breast vs. lung,pancreas_gallbladder,head_and_neck, colorectal,lymphoid_neoplasm,ovary

SEQ ID NO: 457034 - DNA, 824 bp, Homo sapiens; identical to SEQ ID NO: 456050
  chr5:158635191-158636015
  hypo
  breast vs. lung,head_and_neck,upper_gi

SEQ ID NO: 457035 - DNA, 168 bp, Homo sapiens; identical to SEQ ID NO: 338839
  chr5:159489238-159489406
  hypo
  breast vs. lung

SEQ ID NO: 457036 - DNA, 163 bp, Homo sapiens; identical to SEQ ID NO: 455308
  chr5:159776164-159776327
  hypo
  breast vs. head_and_neck,pancreas_gallbladder,anorectal

SEQ ID NO: 457037 - DNA, 147 bp, Homo sapiens; identical to SEQ ID NO: 353678
  chr5:159776588-159776735
  hypo
  breast vs. head_and_neck,pancreas_gallbladder,anorectal

SEQ ID NO: 457038 - DNA, 2 bp, Homo sapiens
  chr5:171382146-171382148
  hypo
  breast vs. sarcoma,lymphoid_neoplasm
cg

SEQ ID NO: 457039 - DNA, 2 bp, Homo sapiens
  chr5:171708377-171708379
  hypo
  breast vs. pancreas_gallbladder
tc

SEQ ID NO: 457040 - DNA, 192 bp, Homo sapiens; identical to SEQ ID NO: 345874
  chr5:176764238-176764430
  hypo
  breast vs. lung,melanoma,renal,anorectal,head_and_neck, prostate,bladder_and_urothelial,liver_bileduct,sarcoma

SEQ ID NO: 457041 - DNA, 53 bp, Homo sapiens; identical to SEQ ID NO: 338891
  chr5:177525861-177525914
  hypo
  breast vs. anorectal,cervical

SEQ ID NO: 457042 - DNA, 3 bp, Homo sapiens
  chr5:178987428-178987431
  hypo
  breast vs. head_and_neck
cgt

SEQ ID NO: 457043 - DNA, 1 bp, Homo sapiens
  chr5:179448856-179448857
  hypo
  breast vs. cervical
c

SEQ ID NO: 457044 - DNA, 205 bp, Homo sapiens; identical to SEQ ID NO: 305254
  chr5:179448886-179449091
  hypo
  breast vs. cervical

SEQ ID NO: 457045 - DNA, 266 bp, Homo sapiens; identical to SEQ ID NO: 345875
  chr6:3285535-3285801
  hypo
  breast vs. colorectal

SEQ ID NO: 457046 - DNA, 11 bp, Homo sapiens
  chr6:12287989-12288000
  hypo
  breast vs. melanoma
cgcgcgcgcgc

SEQ ID NO: 457047 - DNA, 17 bp, Homo sapiens
  chr6:16218404-16218421
  hypo
  breast vs. lymphoid_neoplasm,pancreas_gallbladder, uterine
cggggttgctggtggag

SEQ ID NO: 457048 - DNA, 144 bp, Homo sapiens; identical to SEQ ID NO: 353763
  chr6:34520750-34520894
  hypo
  breast vs. upper_gi,cervical,bladder_and_urothelial, colorectal,pancreas_gallbladder

SEQ ID NO: 457049 - DNA, 109 bp, Homo sapiens; identical to SEQ ID NO: 339022
  chr6:36165692-36165801
  hypo
  breast vs. melanoma,cervical,pancreas_gallbladder, upper_gi,sarcoma,renal,colorectal,prostate

SEQ ID NO: 457050 - DNA, 90 bp, Homo sapiens; identical to SEQ ID NO: 353769
  chr6:37275483-37275573
  hypo
  breast vs. colorectal,upper_gi,lymphoid_neoplasm

SEQ ID NO: 457051 - DNA, 61 bp, Homo sapiens
  chr6:37358463-37358524
  hypo
  breast vs. head_and_neck,lung,uterine,upper_gi, liver_bileduct,bladder_and_urothelial,ovary,colorectal,melanoma, anorectal,lymphoid_neoplasm
cggaagggaaatacaggctcctcatttatttatttctcttctttttctccaaagcaaagag

SEQ ID NO: 457052 - DNA, 321 bp, Homo sapiens; identical to SEQ ID NO: 353771
  chr6:37358553-37358874
  hypo
  breast vs. head_and_neck,lung,uterine,upper_gi, liver_bileduct,bladder_and_urothelial,ovary,colorectal,melanoma, anorectal,lymphoid_neoplasm

SEQ ID NO: 457053 - DNA, 312 bp, Homo sapiens; identical to SEQ ID NO: 339048
  chr6:41620850-41621162
  hypo
  breast vs. lymphoid_neoplasm,cervical

SEQ ID NO: 457054 - DNA, 249 bp, Homo sapiens; identical to SEQ ID NO: 339049
  chr6:41715240-41715489
  hypo
  breast vs. head_and_neck,renal,cervical

SEQ ID NO: 457055 - DNA, 16 bp, Homo sapiens
  chr6:41773505-41773521
  hypo
  breast vs. bladder_and_urothelial,head_and_neck,upper_gi, lung,pancreas_gallbladder
cgcagagaaattcctg

SEQ ID NO: 457056 - DNA, 357 bp, Homo sapiens
  chr6:41773903-41774260
  hypo
  breast vs. bladder_and_urothelial,head_and_neck,upper_gi, lung,pancreas_gallbladder
tggctgagcacctggaggatggagttcatgtagcaggtgttgcccaggttgcgcaggcccgtgacgcctggggccatggccggctggcgacgcagcttgagtgtggcggcgggcactctgcgtgaggtagggagggcggcggggcgcgaggcagccgggcccgcgtcgcggggcgtgtgcaggagcagccgtgcactcttgcgcggaggggtgctggccagctcctccagcagccgccgtttcacctcgcgccgccgcctccgcgcctcctccttcttgcgctccagggcctcctcctgccgccgctgctccagcttcgcctggccccgggagctcttctcgaaccacagccgcagc

SEQ ID NO: 457057 - DNA, 557 bp, Homo sapiens
  chr6:41773903-41774460
  hypo
  breast vs. lung,upper_gi,liver_bileduct, bladder_and_urothelial,head_and_neck,pancreas_gallbladder
tggctgagcacctggaggatggagttcatgtagcaggtgttgcccaggttgcgcaggcccgtgacgcctggggccatggccggctggcgacgcagcttgagtgtggcggcgggcactctgcgtgaggtagggagggcggcggggcgcgaggcagccgggcccgcgtcgcggggcgtgtgcaggagcagccgtgcactcttgcgcggaggggtgctggccagctcctccagcagccgccgtttcacctcgcgccgccgcctccgcgcctcctccttcttgcgctccagggcctcctcctgccgccgctgctccagcttcgcctggccccgggagctcttctcgaaccacagccgcagcgtcctggccagcaggcgctgacgccggtaccacagagccgtgagcatctgcggctgtccctgaggagcgcgctgcggcaggaccacgtcctcacccgaagccatggaccgcagcgtccgcccacgtctcaccggcgtgtcctgtttctggccccggaccgccaggagggagcttcttagcagcttcaggtccccctctgg

SEQ ID NO: 457058 - DNA, 97 bp, Homo sapiens; identical to SEQ ID NO: 455331
  chr6:42762779-42762876
  hypo
  breast vs. lymphoid_neoplasm

SEQ ID NO: 457059 - DNA, 236 bp, Homo sapiens; identical to SEQ ID NO: 339054
  chr6:43096747-43096983
  hypo
  breast vs. head_and_neck

SEQ ID NO: 457060 - DNA, 174 bp, Homo sapiens
  chr6:43748290-43748464
  hypo
  breast vs. lung,prostate,bladder_and_urothelial,melanoma, colorectal,uterine,liver_bileduct,cervical,anorectal,upper_gi, ovary,lymphoid_neoplasm,pancreas_gallbladder,non_cancer
cgcctgtgtgcgcccgcgcatgcctccccagagaccacctgcctcctgacacttcctccgggaagcggccctgtgtggctttgctttggtcgttcccccatccctgcccaccttaccacttcttttactccccccaccgcccccgctctctctctgtctctgtttttttatttt

SEQ ID NO: 457061 - DNA, 637 bp, Homo sapiens; identical to SEQ ID NO: 456077
  chr6:52227115-52227752
  hypo
  breast vs. upper_gi,pancreas_gallbladder,ovary, bladder_and_urothelial,colorectal,cervical

SEQ ID NO: 457062 - DNA, 110 bp, Homo sapiens; identical to SEQ ID NO: 339072
  chr6:52409363-52409473
  hypo
  breast vs. head_and_neck

SEQ ID NO: 457063 - DNA, 571 bp, Homo sapiens; identical to SEQ ID NO: 456080
  chr6:71123134-71123705
  hypo
  breast vs. upper_gi,lung,pancreas_gallbladder, liver_bileduct

SEQ ID NO: 457064 - DNA, 289 bp, Homo sapiens; identical to SEQ ID NO: 350397
  chr6:71123746-71124035
  hypo
  breast vs. upper_gi,lung,pancreas_gallbladder, liver_bileduct

SEQ ID NO: 457065 - DNA, 206 bp, Homo sapiens; identical to SEQ ID NO: 339101
  chr6:90367697-90367903
  hypo
  breast vs. colorectal,pancreas_gallbladder,anorectal

SEQ ID NO: 457066 - DNA, 315 bp, Homo sapiens; identical to SEQ ID NO: 456088
  chr6:107810308-107810623
  hypo
  breast vs. ovary,colorectal,head_and_neck

SEQ ID NO: 457067 - DNA, 128 bp, Homo sapiens; identical to SEQ ID NO: 346850
  chr6:107810665-107810793
  hypo
  breast vs. ovary,colorectal,head_and_neck

SEQ ID NO: 457068 - DNA, 315 bp, Homo sapiens; identical to SEQ ID NO: 456088
  chr6:107810308-107810623
  hypo
  breast vs. ovary,uterine,colorectal, bladder_and_urothelial,sarcoma

SEQ ID NO: 457069 - DNA, 430 bp, Homo sapiens; identical to SEQ ID NO: 350445
  chr6:107810665-107811095
  hypo
  breast vs. ovary,uterine,colorectal, bladder_and_urothelial,sarcoma

SEQ ID NO: 457070 - DNA, 573 bp, Homo sapiens; identical to SEQ ID NO: 456092
  chr6:111408744-111409317
  hypo
  breast vs. ovary

SEQ ID NO: 457071 - DNA, 179 bp, Homo sapiens; identical to SEQ ID NO: 456093
  chr6:111409368-111409547
  hypo
  breast vs. ovary

SEQ ID NO: 457072 - DNA, 265 bp, Homo sapiens; identical to SEQ ID NO: 456094
  chr6:111409052-111409317
  hypo
  breast vs. ovary,anorectal,uterine

SEQ ID NO: 457073 - DNA, 274 bp, Homo sapiens; identical to SEQ ID NO: 456095
  chr6:111409368-111409642
  hypo
  breast vs. ovary,anorectal,uterine

SEQ ID NO: 457074 - DNA, 440 bp, Homo sapiens; identical to SEQ ID NO: 453397
  chr6:127836226-127836666
  hypo
  breast vs. lung

SEQ ID NO: 457075 - DNA, 225 bp, Homo sapiens; identical to SEQ ID NO: 453398
  chr6:127836441-127836666
  hypo
  breast vs. lung

SEQ ID NO: 457076 - DNA, 31 bp, Homo sapiens; identical to SEQ ID NO: 350458
  chr6:127837749-127837780
  hypo
  breast vs. lung

SEQ ID NO: 457077 - DNA, 429 bp, Homo sapiens
  chr6:128901277-128901706
  hypo
  breast vs. bladder_and_urothelial,lung,upper_gi,cervical, anorectal
cgatgtcgacactctgcacatgctcctcaaacttggtgatctcctcctccagcaagtctgtccccactttgtcgtcctccaccacacactgaatctgcatcttccggataccatagcccacggacgccagcttggaggccccgctcactagcccatccagctggatagagcgcacacatgcctccagctgggtcatgtccgtcttattgtcccaaggcttgatgtccagcaggatggaggacttggccaccagcgagggattcttggccttcttggcgtacagccgcagccgctcctcccgcagccgccttgcctccttgtcttcctccttattgtcgctgccaacagatcaatgtcatcgtcctcgttatcctctgcttcttggccggggtcgtagtaaggggggcgaggggaggggcgctccacttg

SEQ ID NO: 457078 - DNA, 90 bp, Homo sapiens
  chr6:130499428-130499518
  hypo
  breast vs. colorectal,pancreas_gallbladder,uterine,renal, upper_gi,prostate,lymphoid_neoplasm
acccttcttgaagacagtgccttagggctgcttctgctgctcttctccgctgcaatgccgtgtgattgaatagatccccacagtgagtgc

SEQ ID NO: 457079 - DNA, 135 bp, Homo sapiens; identical to SEQ ID NO: 339137
  chr6:136901469-136901604
  hypo
  breast vs. lung

SEQ ID NO: 457080 - DNA, 3 bp, Homo sapiens
  chr6:137144617-137144620
  hypo
  breast vs. renal,prostate,multiple_myeloma
ccc

SEQ ID NO: 457081 - DNA, 752 bp, Homo sapiens; identical to SEQ ID NO: 332955
  chr6:150921277-150922029
  hypo
  breast vs. lung,upper_gi

SEQ ID NO: 457082 - DNA, 398 bp, Homo sapiens; identical to SEQ ID NO: 339158
  chr6:155577660-155578058
  hypo
  breast vs. lung

SEQ ID NO: 457083 - DNA, 218 bp, Homo sapiens
  chr6:157505865-157506083
  hypo
  breast vs. sarcoma,melanoma
caagtattcaaaaagattccatctacctctacacaaaataaagatcccccagtggccagtttgaatacatgtgcacttctaggaaatgccaccctacaggttcgacagctcgagctcccccgccctctttcggaaatcctcagatttgaactttagtaaaatgaagcctgggcttcgtttctaatgtcccctacccagcaagttctcacttctaggga

SEQ ID NO: 457084 - DNA, 3 bp, Homo sapiens
  chr6:157506112-157506115
  hypo
  breast vs. sarcoma,melanoma
cac

SEQ ID NO: 457085 - DNA, 56 bp, Homo sapiens; identical to SEQ ID NO: 339169
  chr6:158321417-158321473
  hypo
  breast vs. head_and_neck

SEQ ID NO: 457086 - DNA, 520 bp, Homo sapiens; identical to SEQ ID NO: 346865
  chr6:158402113-158402633
  hypo
  breast vs. bladder_and_urothelial

SEQ ID NO: 457087 - DNA, 69 bp, Homo sapiens; identical to SEQ ID NO: 339175
  chr6:159203076-159203145
  hypo
  breast vs. liver_bileduct,renal,melanoma,sarcoma, lymphoid_neoplasm

SEQ ID NO: 457088 - DNA, 447 bp, Homo sapiens; identical to SEQ ID NO: 339182
  chr6:160679377-160679824
  hypo
  breast vs. head_and_neck

SEQ ID NO: 457089 - DNA, 314 bp, Homo sapiens; identical to SEQ ID NO: 339208
  chr6:169641077-169641391
  hypo
  breast vs. cervical,upper_gi,bladder_and_urothelial

SEQ ID NO: 457090 - DNA, 504 bp, Homo sapiens; identical to SEQ ID NO: 364199
  chr7:503100-503604
  hypo
  breast vs. prostate,melanoma

SEQ ID NO: 457091 - DNA, 49 bp, Homo sapiens
  chr7:564189-564238
  hypo
  breast vs. pancreas_gallbladder,upper_gi
cggcgttaagaccaggccctcacggagccctcactctctgaggaggaac

SEQ ID NO: 457092 - DNA, 107 bp, Homo sapiens; identical to SEQ ID NO: 377917
  chr7:564271-564378
  hypo
  breast vs. pancreas_gallbladder,upper_gi

SEQ ID NO: 457093 - DNA, 372 bp, Homo sapiens; identical to SEQ ID NO: 353882
  chr7:907709-908081
  hypo
  breast vs. lung,bladder_and_urothelial

SEQ ID NO: 457094 - DNA, 176 bp, Homo sapiens; identical to SEQ ID NO: 348182
  chr7:920980-921156
  hypo
  breast vs. lymphoid_neoplasm,melanoma,cervical,uterine, sarcoma,renal,anorectal,pancreas_gallbladder,ovary

SEQ ID NO: 457095 - DNA, 124 bp, Homo sapiens; identical to SEQ ID NO: 455366
  chr7:1308164-1308288
  hypo
  breast vs. anorectal

SEQ ID NO: 457096 - DNA, 28 bp, Homo sapiens
  chr7:2232864-2232892
  hypo
  breast vs. melanoma,lymphoid_neoplasm,renal,cervical, head_and_neck,uterine,myeloid_neoplasm,liver_bileduct, non_cancer,ovary,bladder_and_urothelial
cggcccaagccacgccccagcatactca

SEQ ID NO: 457097 - DNA, 237 bp, Homo sapiens
  chr7:2233056-2233293
  hypo
  breast vs. melanoma,lymphoid_neoplasm,renal,cervical, head_and_neck,uterine,myeloid_neoplasm,liver_bileduct, non_cancer,ovary,bladder_and_urothelial
attgctgtgctgagtttcagcacagggaccgtgcgtcctgctctctgctgcatctcccagccagtatacaccacggtacgtcataagccctcaacaaatatttgttgaatggaacagacgtgatcacaatatgtgctcctgggaaccctcggctaccagaaaaaaaggcgagacagaaatgagcacttctcaaccctgggagcaaatttataagggttttatcccttcaaaattatt

SEQ ID NO: 457098 - DNA, 469 bp, Homo sapiens
  chr7:2472811-2473280
  hypo
  breast vs. liver_bileduct
cgcgtgatgatcgtgctgagcggaagcctgctgcaccgcggtgcgccctaccgcgacccgctgcgcatcccgcgcgagcacgtgcacaacgccagcgcgcacctgaccttcaacaagttctggcgccgctacgggaagctctcccgccacctcatgaaggtcaagctcaagaagtacaccaagttcctcttcgtgcgcgaccccttcgtgcgcctgatctccgccttccgcagcaagttcgagctggagaacgaggagttctaccgcaagttcgccgtgcccatgctgcggctgtacgccaaccacaccagcctgcccgcctcggcgcgcgaggccttccgcgctggcctcaaggtgtccttcgccaacttcatccagtacctgctggacccgcacacggagaagctggcgcccttcaacgagcactggcggcaggtgtaccgcctctgccacccgtgccagatcgact

SEQ ID NO: 457099 - DNA, 60 bp, Homo sapiens
  chr7:2473220-2473280
  hypo
  breast vs. liver_bileduct
cgcccttcaacgagcactggcggcaggtgtaccgcctctgccacccgtgccagatcgact

SEQ ID NO: 457100 - DNA, 328 bp, Homo sapiens; identical to SEQ ID NO: 345896
  chr7:2473779-2474107
  hypo
  breast vs. liver_bileduct

SEQ ID NO: 457101 - DNA, 399 bp, Homo sapiens; identical to SEQ ID NO: 364276
  chr7:2770640-2771039
  hypo
  breast vs. cervical,uterine,lymphoid_neoplasm

SEQ ID NO: 457102 - DNA, 84 bp, Homo sapiens; identical to SEQ ID NO: 350505
  chr7:3083602-3083686
  hypo
  breast vs. non_cancer,myeloid_neoplasm,thyroid, bladder_and_urothelial,pancreas_gallbladder

SEQ ID NO: 457103 - DNA, 50 bp, Homo sapiens
  chr7:4771516-4771566
  hypo
  breast vs. sarcoma,head_and_neck,liver_bileduct
cgcttgctacgtgccagccgtccggtcaggactgatgttcacggcatgga

SEQ ID NO: 457104 - DNA, 3 bp, Homo sapiens
  chr7:6525091-6525094
  hypo
  breast vs. lymphoid_neoplasm,sarcoma,renal,melanoma, multiple_myeloma
ttc

SEQ ID NO: 457105 - DNA, 210 bp, Homo sapiens
  chr7:7605822-7606032
  hypo
  breast vs. melanoma,sarcoma,lymphoid_neoplasm
cttaatctctccccacttcctctgctcattcatccatacctactgcctcctcactgctatgtcctctctcctgacccggcacttgctctttcccagtcctagaaggctcttctcttccagttcccactgcccttttccctttcctggctaatcccatactcatccttcttgtctcaacctagtggtccttaaggaagctttgctgacccc

SEQ ID NO: 457106 - DNA, 141 bp, Homo sapiens; identical to SEQ ID NO: 456108
  chr7:22893437-22893578
  hypo
  breast vs. lung,liver_bileduct,lymphoid_neoplasm, prostate,cervical

SEQ ID NO: 457107 - DNA, 700 bp, Homo sapiens; identical to SEQ ID NO: 456109
  chr7:22893607-22894307
  hypo
  breast vs. lung,liver_bileduct,lymphoid_neoplasm, prostate,cervical

SEQ ID NO: 457108 - DNA, 867 bp, Homo sapiens; identical to SEQ ID NO: 456110
  chr7:22893828-22894695
  hypo
  breast vs. lung,prostate

SEQ ID NO: 457109 - DNA, 210 bp, Homo sapiens; identical to SEQ ID NO: 456111
  chr7:23052818-23053028
  hypo
  breast vs. lung,prostate,ovary,bladder_and_urothelial, melanoma,uterine

SEQ ID NO: 457110 - DNA, 595 bp, Homo sapiens; identical to SEQ ID NO: 346883
  chr7:23053080-23053675
  hypo
  breast vs. lung,prostate,ovary,bladder_and_urothelial, melanoma,uterine

SEQ ID NO: 457111 - DNA, 599 bp, Homo sapiens; identical to SEQ ID NO: 456113
  chr7:23053195-23053794
  hypo
  breast vs. ovary,prostate,lung,lymphoid_neoplasm, bladder_and_urothelial,uterine,melanoma,renal,sarcoma

SEQ ID NO: 457112 - DNA, 246 bp, Homo sapiens; identical to SEQ ID NO: 350530
  chr7:23053819-23054065
  hypo
  breast vs. ovary,prostate,lung,lymphoid_neoplasm, bladder_and_urothelial,uterine,melanoma,renal,sarcoma

SEQ ID NO: 457113 - DNA, 761 bp, Homo sapiens; identical to SEQ ID NO: 454479
  chr7:23510081-23510842
  hypo
  breast vs. colorectal,cervical,anorectal,uterine, head_and_neck,upper_gi,ovary,non_cancer

SEQ ID NO: 457114 - DNA, 229 bp, Homo sapiens; identical to SEQ ID NO: 454480
  chr7:23513246-23513475
  hypo
  breast vs. uterine,anorectal,head_and_neck,cervical, non_cancer,lymphoid_neoplasm

SEQ ID NO: 457115 - DNA, 843 bp, Homo sapiens; identical to SEQ ID NO: 456121
  chr7:25019058-25019901
  hypo
  breast vs. lung

SEQ ID NO: 457116 - DNA, 845 bp, Homo sapiens; identical to SEQ ID NO: 358785
  chr7:25019409-25020254
  hypo
  breast vs. lung,upper_gi,pancreas_gallbladder

SEQ ID NO: 457117 - DNA, 164 bp, Homo sapiens; identical to SEQ ID NO: 348217
  chr7:26283815-26283979
  hypo
  breast vs. lung,melanoma,bladder_and_urothelial, head_and_neck,renal,pancreas_gallbladder,anorectal,ovary, sarcoma,upper_gi,colorectal,lymphoid_neoplasm,uterine

SEQ ID NO: 457118 - DNA, 142 bp, Homo sapiens; identical to SEQ ID NO: 345270
  chr7:27136790-27136932
  hypo
  breast vs. bladder_and_urothelial,head_and_neck, anorectal,prostate,sarcoma,non_cancer,lymphoid_neoplasm, melanoma

SEQ ID NO: 457119 - DNA, 456 bp, Homo sapiens; identical to SEQ ID NO: 353956
  chr7:27531253-27531709
  hypo
  breast vs. sarcoma,pancreas_gallbladder

SEQ ID NO: 457120 - DNA, 126 bp, Homo sapiens; identical to SEQ ID NO: 339438
  chr7:27831654-27831780
  hypo
  breast vs. liver_bileduct,uterine,colorectal,sarcoma, melanoma,upper_gi

SEQ ID NO: 457121 - DNA, 54 bp, Homo sapiens; identical to SEQ ID NO: 339448
  chr7:30599500-30599554
  hypo
  breast vs. pancreas_gallbladder

SEQ ID NO: 457122 - DNA, 54 bp, Homo sapiens
  chr7:30603338-30603392
  hypo
  breast vs. prostate
cgactcaccgttctggaggctggaagaccaagatcaaagtgttggccgagccat

SEQ ID NO: 457123 - DNA, 110 bp, Homo sapiens; identical to SEQ ID NO: 378122
  chr7:30603436-30603546
  hypo
  breast vs. prostate

SEQ ID NO: 457124 - DNA, 126 bp, Homo sapiens; identical to SEQ ID NO: 339450
  chr7:30656768-30656894
  hypo
  breast vs. bladder_and_urothelial,head_and_neck, liver_bileduct

SEQ ID NO: 457125 - DNA, 3 bp, Homo sapiens
  chr7:44835105-44835108
  hypo
  breast vs. renal,multiple_myeloma
cgg

SEQ ID NO: 457126 - DNA, 78 bp, Homo sapiens
  chr7:47515282-47515360
  hypo
  breast vs. melanoma,myeloid_neoplasm
cgcttgcagagtgtatgaaggtaaacacaggatggaaaaaaacaaggacactctgcccttgaacttcaatcaaaagct

SEQ ID NO: 457127 - DNA, 147 bp, Homo sapiens; identical to SEQ ID NO: 353980
  chr7:47515405-47515552
  hypo
  breast vs. melanoma,myeloid_neoplasm

SEQ ID NO: 457128 - DNA, 57 bp, Homo sapiens
  chr7:50560501-50560558
  hypo
  breast vs. renal,anorectal,lymphoid_neoplasm,uterine, prostate,thyroid,non_cancer,ovary
cgagcgccggggaagagttgtccgggagagatgagcgcacagccgccaacttgctgg

SEQ ID NO: 457129 - DNA, 220 bp, Homo sapiens; identical to SEQ ID NO: 345911
  chr7:50560663-50560883
  hypo
  breast vs. renal,anorectal,lymphoid_neoplasm,uterine, prostate,thyroid,non_cancer,ovary

SEQ ID NO: 457130 - DNA, 132 bp, Homo sapiens
  chr7:56037272-56037404
  hypo
  breast vs. bladder_and_urothelial,head_and_neck,ovary
cgtgtttgtctgtctgccctcaccagcaaactgagctcccgtgaagtcagggccaggttcatctgtgcatcgtcagtggctgacaggtgtagtgcacagtctgtaaataacagtgatcatattgccgggcgc

SEQ ID NO: 457131 - DNA, 405 bp, Homo sapiens; identical to SEQ ID NO: 339524
  chr7:64146495-64146900
  hypo
  breast vs. liver_bileduct

SEQ ID NO: 457132 - DNA, 15 bp, Homo sapiens
  chr7:99156600-99156615
  hypo
  breast vs. lymphoid_neoplasm,liver_bileduct,melanoma, sarcoma,anorectal
ccgccgtcaggagcc

SEQ ID NO: 457133 - DNA, 216 bp, Homo sapiens; identical to SEQ ID NO: 456137
  chr7:99156600-99156816
  hypo
  breast vs. melanoma,sarcoma,anorectal,lymphoid_neoplasm

SEQ ID NO: 457134 - DNA, 77 bp, Homo sapiens; identical to SEQ ID NO: 345277
  chr7:99156982-99157059
  hypo
  breast vs. melanoma,sarcoma,anorectal,lymphoid_neoplasm

SEQ ID NO: 457135 - DNA, 87 bp, Homo sapiens; identical to SEQ ID NO: 339569
  chr7:100030648-100030735
  hypo
  breast vs. liver_bileduct,melanoma,lung,uterine, anorectal,cervical,ovary,sarcoma,colorectal, pancreas_gallbladder

SEQ ID NO: 457136 - DNA, 157 bp, Homo sapiens; identical to SEQ ID NO: 339572
  chr7:100179313-100179470
  hypo
  breast vs. pancreas_gallbladder,lung,liver_bileduct, upper_gi,bladder_and_urothelial,cervical,lymphoid_neoplasm, colorectal,uterine,head_and_neck

SEQ ID NO: 457137 - DNA, 5 bp, Homo sapiens
  chr7:100179670-100179675
  hypo
  breast vs. liver_bileduct,upper_gi,melanoma, bladder_and_urothelial,anorectal
cgcag

SEQ ID NO: 457138 - DNA, 188 bp, Homo sapiens; identical to SEQ ID NO: 354023
  chr7:100179940-100180128
  hypo
  breast vs. liver_bileduct,upper_gi,melanoma, bladder_and_urothelial,anorectal

SEQ ID NO: 457139 - DNA, 312 bp, Homo sapiens
  chr7:101652279-101652591
  hypo
  breast vs. sarcoma,prostate,lymphoid_neoplasm
cggccccgcgtgctccagcaggtctgcatgattaacctgaattgcagtgttcagaggctcggcctgccagccacagcggttccagatgaaatgcagcttagaaggcagcatggtgtagtagctttggcgccagccgcacccagagtttggattgtagccagatggcctcaggtgcaatgtataacctctgggaattccagatttcctatttacacgacagggatgattccatacctgaagggctgtttggaagcatctagaagcaagcacagtggagtggctgtcatgacgctgaccgcacaaatgatggtg

SEQ ID NO: 457140 - DNA, 88 bp, Homo sapiens
  chr7:127371042-127371130
  hypo
  breast vs. liver_bileduct,lung,lymphoid_neoplasm, head_and_neck,uterine,colorectal,melanoma,upper_gi, pancreas_gallbladder,cervical,renal
cgtatggagctgcctttagcagcatctgcttctccagctggagaggcttgttttagaacgactggcatgcggaagcggtaggtggagg

SEQ ID NO: 457141 - DNA, 252 bp, Homo sapiens; identical to SEQ ID NO: 354050
  chr7:127371249-127371501
  hypo
  breast vs. liver_bileduct,lung,lymphoid_neoplasm, head_and_neck,uterine,colorectal,melanoma,upper_gi, pancreas_gallbladder,cervical,renal

SEQ ID NO: 457142 - DNA, 3 bp, Homo sapiens
  chr7:128097690-128097693
  hypo
  breast vs. sarcoma,multiple_myeloma
tgc

SEQ ID NO: 457143 - DNA, 47 bp, Homo sapiens
  chr7:129330248-129330295
  hypo
  breast vs. melanoma
cgtaagtacaagagcatgatcctggaagacctggagtctgctctggc

SEQ ID NO: 457144 - DNA, 89 bp, Homo sapiens; identical to SEQ ID NO: 348249
  chr7:129330351-129330440
  hypo
  breast vs. melanoma

SEQ ID NO: 457145 - DNA, 31 bp, Homo sapiens; identical to SEQ ID NO: 364499
  chr7:129800434-129800465
  hypo
  breast vs. liver_bileduct,lung,head_and_neck,upper_gi

SEQ ID NO: 457146 - DNA, 56 bp, Homo sapiens
  chr7:129846024-129846080
  hypo
  breast vs. liver_bileduct
cgctgagccaggcgcacggatatagaaaataagaccttcctggttattacccagag

SEQ ID NO: 457147 - DNA, 72 bp, Homo sapiens; identical to SEQ ID NO: 354058
  chr7:129846109-129846181
  hypo
  breast vs. liver_bileduct

SEQ ID NO: 457148 - DNA, 32 bp, Homo sapiens
  chr7:131041484-131041516
  hypo
  breast vs. head_and_neck,lung,bladder_and_urothelial, cervical,liver_bileduct,melanoma,colorectal,renal, lymphoid_neoplasm,anorectal,upper_gi,pancreas_gallbladder, uterine,prostate,multiple_myeloma
cgaggattacctggagcttaatggccactagg

SEQ ID NO: 457149 - DNA, 86 bp, Homo sapiens
  chr7:134918319-134918405
  hypo
  breast vs. liver_bileduct,melanoma,sarcoma,prostate, anorectal,renal,lymphoid_neoplasm,pancreas_gallbladder, colorectal,bladder_and_urothelial,thyroid,non_cancer
cgagctgattactgacgcgagggtcccctccctgacccctcgcgaccctgcgaggtgagtcagccccgcccctccctcttctctct

SEQ ID NO: 457150 - DNA, 132 bp, Homo sapiens; identical to SEQ ID NO: 345922
  chr7:134918661-134918793
  hypo
  breast vs. liver_bileduct,melanoma,sarcoma,prostate, anorectal,renal,lymphoid_neoplasm,pancreas_gallbladder, colorectal,bladder_and_urothelial,thyroid,non_cancer

SEQ ID NO: 457151 - DNA, 125 bp, Homo sapiens; identical to SEQ ID NO: 339659
  chr7:148448819-148448944
  hypo
  breast vs. lung,upper_gi

SEQ ID NO: 457152 - DNA, 163 bp, Homo sapiens; identical to SEQ ID NO: 345926
  chr7:148851234-148851397
  hypo
  breast vs. liver_bileduct,melanoma,sarcoma,cervical, renal,multiple_myeloma,colorectal,uterine,lymphoid_neoplasm, thyroid

SEQ ID NO: 457153 - DNA, 351 bp, Homo sapiens; identical to SEQ ID NO: 333299
  chr7:150676178-150676529
  hypo
  breast vs. ovary

SEQ ID NO: 457154 - DNA, 148 bp, Homo sapiens; identical to SEQ ID NO: 348269
  chr7:150774065-150774213
  hypo
  breast vs. head_and_neck,bladder_and_urothelial, anorectal,uterine,cervical,sarcoma,multiple_myeloma

SEQ ID NO: 457155 - DNA, 18 bp, Homo sapiens
  chr7:150774308-150774326
  hypo
  breast vs. uterine,head_and_neck,lymphoid_neoplasm, anorectal,bladder_and_urothelial,cervical,thyroid, pancreas_gallbladder
cgcacagcaggaagtctg

SEQ ID NO: 457156 - DNA, 347 bp, Homo sapiens
  chr7:150774358-150774705
  hypo
  breast vs. uterine,head_and_neck,lymphoid_neoplasm, anorectal,bladder_and_urothelial,cervical,thyroid, pancreas_gallbladder
ctccgtctccccgggcctgccgcctgccccttgctcacctgtgcagtagcctggaggcacagtcaggtcctggcggtatttctcctcccccagcagctggcgcaacccctcagctactatgtccttgtgactgaggagaaaggacaccagtagcaggaagggcccggcacctcatcctaatctgtcccagtctagtgccaccaccctgggcaaagccctctgctgcttcagggcccagttttatggtggccgagagctccttagctttggcgcttcatggtccctctggcttttccactctgctggtcccaggctggcccctccccttgccccaggctgccccatcc

SEQ ID NO: 457157 - DNA, 22 bp, Homo sapiens
  chr7:150774857-150774879
  hypo
  breast vs. uterine,head_and_neck,lymphoid_neoplasm, anorectal,bladder_and_urothelial,cervical,thyroid, pancreas_gallbladder
tgaggggtgcctgtggggaggc

SEQ ID NO: 457158 - DNA, 219 bp, Homo sapiens; identical to SEQ ID NO: 378397
  chr7:157334647-157334866
  hypo
  breast vs. anorectal

SEQ ID NO: 457159 - DNA, 250 bp, Homo sapiens; identical to SEQ ID NO: 339753
  chr7:157589680-157589930
  hypo
  breast vs. anorectal

SEQ ID NO: 457160 - DNA, 203 bp, Homo sapiens; identical to SEQ ID NO: 339758
  chr7:157642963-157643166
  hypo
  breast vs. head_and_neck

SEQ ID NO: 457161 - DNA, 218 bp, Homo sapiens; identical to SEQ ID NO: 339770
  chr7:157916520-157916738
  hypo
  breast vs. head_and_neck,prostate

SEQ ID NO: 457162 - DNA, 171 bp, Homo sapiens; identical to SEQ ID NO: 364643
  chr7:158741267-158741438
  hypo
  breast vs. head_and_neck

SEQ ID NO: 457163 - DNA, 95 bp, Homo sapiens; identical to SEQ ID NO: 339827
  chr8:6633002-6633097
  hypo

SEQ ID NO: 457164 - DNA, 101 bp, Homo sapiens; identical to SEQ ID NO: 339837
  chr8:8898512-8898613
  hypo
  breast vs. liver_bileduct,colorectal, bladder_and_urothelial,prostate

SEQ ID NO: 457165 - DNA, 20 bp, Homo sapiens
  chr8:23020932-23020952
  hypo
  breast vs. colorectal,cervical,anorectal,renal,upper_gi, pancreas_gallbladder,non_cancer,myeloid_neoplasm,liver_bileduct
cgaacgaacgaacgaacgaa

SEQ ID NO: 457166 - DNA, 25 bp, Homo sapiens
  chr8:23021107-23021132
  hypo
  breast vs. colorectal,cervical,anorectal,renal,upper_gi, pancreas_gallbladder,non_cancer,myeloid_neoplasm,liver_bileduct
cggcccggtcgctcctgcccagccc

SEQ ID NO: 457167 - DNA, 127 bp, Homo sapiens; identical to SEQ ID NO: 345299
  chr8:23021590-23021717
  hypo
  breast vs. colorectal,cervical,anorectal,renal,upper_gi, pancreas_gallbladder,non_cancer,myeloid_neoplasm,liver_bileduct

SEQ ID NO: 457168 - DNA, 65 bp, Homo sapiens; identical to SEQ ID NO: 339891
  chr8:42134216-42134281
  hypo
  breast vs. head_and_neck

SEQ ID NO: 457169 - DNA, 18 bp, Homo sapiens
  chr8:42147521-42147539
  hypo
  breast vs. colorectal,renal,prostate
cattgcggttggccaccc

SEQ ID NO: 457170 - DNA, 69 bp, Homo sapiens
  chr8:49334914-49334983
  hypo
  breast vs. bladder_and_urothelial
cggagtctgctctgagacccagggaccgtgcgttctgcagggaagctggcgcatgcccttaggttctgc

SEQ ID NO: 457171 - DNA, 120 bp, Homo sapiens
  chr8:54645734-54645854
  hypo
cgccagctgctcatgtactgaggacagctggttcacccgcctggacttgaaggacgctttctttagcatcagactagctcctgagagccagaaattgtctgctttccagtgggaagatcc

SEQ ID NO: 457172 - DNA, 6 bp, Homo sapiens
  chr8:55372563-55372569
  hypo
  breast vs. ovary
tgatcc

SEQ ID NO: 457173 - DNA, 173 bp, Homo sapiens; identical to SEQ ID NO: 456160
  chr8:56791852-56792025
  hypo
  breast vs. upper_gi

SEQ ID NO: 457174 - DNA, 731 bp, Homo sapiens; identical to SEQ ID NO: 456161
  chr8:56792065-56792796
  hypo
  breast vs. upper_gi

SEQ ID NO: 457175 - DNA, 935 bp, Homo sapiens; identical to SEQ ID NO: 350750
  chr8:56792306-56793241
  hypo
  breast vs. upper_gi,lung,pancreas_gallbladder,ovary

SEQ ID NO: 457176 - DNA, 239 bp, Homo sapiens; identical to SEQ ID NO: 453448
  chr8:60030908-60031147
  hypo
  breast vs. myeloid_neoplasm,thyroid,non_cancer,ovary

SEQ ID NO: 457177 - DNA, 200 bp, Homo sapiens; identical to SEQ ID NO: 453449
  chr8:60030947-60031147
  hypo
  breast vs. ovary,uterine,lung,non_cancer, myeloid_neoplasm

SEQ ID NO: 457178 - DNA, 115 bp, Homo sapiens; identical to SEQ ID NO: 346983
  chr8:60031791-60031906
  hypo
  breast vs. ovary,uterine,lung,non_cancer, myeloid_neoplasm

SEQ ID NO: 457179 - DNA, 350 bp, Homo sapiens; identical to SEQ ID NO: 453451
  chr8:60031791-60032141
  hypo
  breast vs. uterine,ovary,non_cancer,myeloid_neoplasm, thyroid

SEQ ID NO: 457180 - DNA, 55 bp, Homo sapiens; identical to SEQ ID NO: 346990
  chr8:72756949-72757004
  hypo
  breast vs. sarcoma

SEQ ID NO: 457181 - DNA, 142 bp, Homo sapiens
  chr8:81213177-81213319
  hypo
  breast vs. colorectal,upper_gi,prostate, pancreas_gallbladder,melanoma
cgatgatgtgcagatctggcacttgcttgcaggattacactgcagtgaaggagaagtatgccaagtacctgcctcacagtgcagagcggtatgccgccaaacgcttccgcaaagctcagtgccccatcgtggagtgcctcac

SEQ ID NO: 457182 - DNA, 327 bp, Homo sapiens; identical to SEQ ID NO: 354209
  chr8:81213356-81213683
  hypo
  breast vs. colorectal,upper_gi,prostate, pancreas_gallbladder,melanoma

SEQ ID NO: 457183 - DNA, 197 bp, Homo sapiens; identical to SEQ ID NO: 456173
  chr8:82192428-82192625
  hypo
  breast vs. ovary,pancreas_gallbladder, bladder_and_urothelial,anorectal,upper_gi,cervical

SEQ ID NO: 457184 - DNA, 99 bp, Homo sapiens; identical to SEQ ID NO: 345308
  chr8:82193698-82193797
  hypo
  breast vs. bladder_and_urothelial,ovary, pancreas_gallbladder,anorectal,upper_gi,colorectal, lymphoid_neoplasm,cervical,renal,prostate,non_cancer, myeloid_neoplasm,thyroid

SEQ ID NO: 457185 - DNA, 2 bp, Homo sapiens
  chr8:90913515-90913517
  hypo
  breast vs. multiple_myeloma,prostate,renal,sarcoma, non_cancer,thyroid,lymphoid_neoplasm,uterine
cg

SEQ ID NO: 457186 - DNA, 245 bp, Homo sapiens; identical to SEQ ID NO: 350781
  chr8:91657421-91657666
  hypo
  breast vs. liver_bileduct,bladder_and_urothelial

SEQ ID NO: 457187 - DNA, 39 bp, Homo sapiens; identical to SEQ ID NO: 339976
  chr8:95556587-95556626
  hypo
  breast vs. liver_bileduct

SEQ ID NO: 457188 - DNA, 448 bp, Homo sapiens; identical to SEQ ID NO: 354219
  chr8:100796506-100796954
  hypo
  breast vs. pancreas_gallbladder,colorectal, lymphoid_neoplasm,upper_gi,uterine,liver_bileduct, bladder_and_urothelial

SEQ ID NO: 457189 - DNA, 142 bp, Homo sapiens; identical to SEQ ID NO: 340000
  chr8:117336931-117337073
  hypo
  breast vs. lymphoid_neoplasm,renal

SEQ ID NO: 457190 - DNA, 221 bp, Homo sapiens; identical to SEQ ID NO: 340002
  chr8:118531602-118531823
  hypo
  breast vs. head_and_neck,renal,liver_bileduct,lung, anorectal,sarcoma,cervical,lymphoid_neoplasm,ovary,non_cancer, thyroid

SEQ ID NO: 457191 - DNA, 104 bp, Homo sapiens; identical to SEQ ID NO: 354234
  chr8:125580698-125580802
  hypo
  breast vs. lung,liver_bileduct,head_and_neck, bladder_and_urothelial,prostate,uterine,lymphoid_neoplasm, cervical,colorectal,renal

SEQ ID NO: 457192 - DNA, 631 bp, Homo sapiens; identical to SEQ ID NO: 455454
  chr8:128871653-128872284
  hypo
  breast vs. prostate,uterine,sarcoma,ovary,colorectal, multiple_myeloma,thyroid,lymphoid_neoplasm,non_cancer, myeloid_neoplasm

SEQ ID NO: 457193 - DNA, 191 bp, Homo sapiens; identical to SEQ ID NO: 345946
  chr8:128872459-128872650
  hypo
  breast vs. prostate,uterine,sarcoma,ovary,colorectal, multiple_myeloma,thyroid,lymphoid_neoplasm,non_cancer, myeloid_neoplasm

SEQ ID NO: 457194 - DNA, 62 bp, Homo sapiens
  chr8:128888848-128888910
  hypo
  breast vs. melanoma
cgtacactcttcccatctcctggcccctccagttctgaagggatggggactaagtgggatct

SEQ ID NO: 457195 - DNA, 43 bp, Homo sapiens; identical to SEQ ID NO: 345948
  chr8:128889422-128889465
  hypo
  breast vs. melanoma

SEQ ID NO: 457196 - DNA, 107 bp, Homo sapiens; identical to SEQ ID NO: 340030
  chr8:128957492-128957599
  hypo
  breast vs. head_and_neck,bladder_and_urothelial, anorectal,prostate,colorectal,pancreas_gallbladder

SEQ ID NO: 457197 - DNA, 199 bp, Homo sapiens; identical to SEQ ID NO: 340045
  chr8:140770366-140770565
  hypo
  breast vs. bladder_and_urothelial

SEQ ID NO: 457198 - DNA, 297 bp, Homo sapiens
  chr8:141599879-141600176
  hypo
  breast vs. head_and_neck,uterine,prostate,ovary, anorectal,non_cancer
cgagatccgtgccatcagcacgagccgcagaacaggacggagtgatggctcagtgagtacagaccagagagtagatgctatcaagctgtactctcctgctaaaatcaggacacgagggtgacaactcacctgttgtctacacaagcaagcctcccttatggccacccaagttgacgctaaacacagtcatggcagcttttttggtgaaatggacagagacggtctcagaatgtgtgctgggaatgcagtcggaacatctgctcctgtcagccggagtgcagacaactgtatgctgtc

SEQ ID NO: 457199 - DNA, 50 bp, Homo sapiens; identical to SEQ ID NO: 345953
  chr8:141600284-141600334
  hypo
  breast vs. head_and_neck,uterine,prostate,ovary, anorectal,non_cancer

SEQ ID NO: 457200 - DNA, 193 bp, Homo sapiens; identical to SEQ ID NO: 455459
  chr8:142367176-142367369
  hypo
  breast vs. pancreas_gallbladder,head_and_neck,lung,renal, uterine,colorectal,prostate,sarcoma,lymphoid_neoplasm,ovary, anorectal,thyroid

SEQ ID NO: 457201 - DNA, 288 bp, Homo sapiens; identical to SEQ ID NO: 455460
  chr8:142367824-142368112
  hypo
  breast vs. pancreas_gallbladder,head_and_neck,lung,renal, uterine,colorectal,prostate,sarcoma,lymphoid_neoplasm,ovary, anorectal,thyroid

SEQ ID NO: 457202 - DNA, 107 bp, Homo sapiens; identical to SEQ ID NO: 456182
  chr8:142427489-142427596
  hypo
  breast vs. colorectal,myeloid_neoplasm,non_cancer, multiple_myeloma,prostate,thyroid

SEQ ID NO: 457203 - DNA, 328 bp, Homo sapiens; identical to SEQ ID NO: 456183
  chr8:142427700-142428028
  hypo
  breast vs. colorectal,myeloid_neoplasm,non_cancer, multiple_myeloma,prostate,thyroid

SEQ ID NO: 457204 - DNA, 56 bp, Homo sapiens; identical to SEQ ID NO: 455464
  chr8:143333267-143333323
  hypo
  breast vs. anorectal

SEQ ID NO: 457205 - DNA, 37 bp, Homo sapiens
  chr8:143334502-143334539
  hypo
  breast vs. anorectal
cgggtgagagtgcggaggtggacaggctggcgacagc

SEQ ID NO: 457206 - DNA, 321 bp, Homo sapiens; identical to SEQ ID NO: 340114
  chr8:144178383-144178704
  hypo
  breast vs. head_and_neck

SEQ ID NO: 457207 - DNA, 12 bp, Homo sapiens
  chr8:144675988-144676000
  hypo
  breast vs. bladder_and_urothelial,melanoma,upper_gi, renal,anorectal,uterine,pancreas_gallbladder,ovary, lymphoid_neoplasm,sarcoma,cervical,head_and_neck,colorectal, prostate,liver_bileduct
cgtccgagccca

SEQ ID NO: 457208 - DNA, 88 bp, Homo sapiens; identical to SEQ ID NO: 345961
  chr8:144676118-144676206
  hypo
  breast vs. bladder_and_urothelial,melanoma,upper_gi, renal,anorectal,uterine,pancreas_gallbladder,ovary, lymphoid_neoplasm,sarcoma,cervical,head_and_neck,colorectal, prostate,liver_bileduct

SEQ ID NO: 457209 - DNA, 93 bp, Homo sapiens; identical to SEQ ID NO: 364909
  chr8:144683804-144683897
  hypo
  breast vs. uterine

SEQ ID NO: 457210 - DNA, 15 bp, Homo sapiens
  chr9:4300166-4300181
  hypo
  breast vs. pancreas_gallbladder,ovary
gccaattcgaaggcc

SEQ ID NO: 457211 - DNA, 167 bp, Homo sapiens; identical to SEQ ID NO: 340170
  chr9:4864421-4864588
  hypo
  breast vs. head_and_neck,anorectal

SEQ ID NO: 457212 - DNA, 184 bp, Homo sapiens; identical to SEQ ID NO: 340185
  chr9:27212729-27212913
  hypo
  breast vs. colorectal,pancreas_gallbladder,cervical, melanoma,renal,anorectal,lymphoid_neoplasm,uterine,sarcoma, thyroid

SEQ ID NO: 457213 - DNA, 26 bp, Homo sapiens
  chr9:34224474-34224500
  hypo
  breast vs. lung,ovary,head_and_neck,liver_bileduct, bladder_and_urothelial,upper_gi,colorectal,pancreas_gallbladder, cervical,renal,uterine,melanoma,anorectal,lymphoid_neoplasm, prostate
cctcctcaaacatggactgtgtggac

SEQ ID NO: 457214 - DNA, 730 bp, Homo sapiens
  chr9:34372076-34372806
  hypo
  breast vs. upper_gi,lung
cgtctgagcccacgcacactcggtagctcagctctggcgctgcggcgcggccggcgggtggcttgtagggcgtgtcgtggtagcgcgcctgaagccgcagcgagcgctccgtgctgttccagcccaggtggaagggcactgagtcattgactttgatggcggccgcgcgcgaagatagccagtagcgctcgaggatgcccccaaacgcggcgtcggaggagtagacatcgctggtgacgaacggctggggctcctgctggccatccaggcggatgggccagtgttgcgtcctcatctcggcgccaccataccagtgggccgccgcgtcgcccaagaacatggcgtgctccacggcccggcccggcgctgcctcctcccagcgcacgcggtagcacatgaccgtgtccttgggccgcacagtctggatgaagaagtgcagcggcagcccgtcggccgtgagcgagcagcccagcagggcgccatcgcggctgcaggagtcaaggtccagcgcgccggagcggaaggccaggcggaagacctgctctcccttctgattgcggatggagaagccgccagctttcaggtccagcagctccgcgcgaagtcgctccgccttgcgtagggagacgctgtagtagcaccaggccaccaccgcggccagcacaagcagcagccccagaaccgcggagcccagcagcggcttcaggtctttggaaggcttgggcttggc

SEQ ID NO: 457215 - DNA, 295 bp, Homo sapiens
  chr9:35711931-35712226
  hypo
  breast vs. sarcoma,thyroid,bladder_and_urothelial, colorectal,prostate,non_cancer
cgagagggaggaaggagaggcctggcattctttgactcctacgttcccccaccccctaccgtcctcctaccgagtcactcaggagtcgcttgctggcatctccaactgccctcagggcattatccacatcgcgctggccaggtaggcagctgacacagcggttcagagcctgggtcactgctttagccacctggggtgagaaaggagacagggttgcccaagtgaaaagaatttgagagatcgcctccattcacgcgacatgggagatgactagctctactgcctctgaaagtga

SEQ ID NO: 457216 - DNA, 28 bp, Homo sapiens
  chr9:104248623-104248651
  hypo
  breast vs. ovary
gctggtttttcctggtcctgggagggac

SEQ ID NO: 457217 - DNA, 149 bp, Homo sapiens; identical to SEQ ID NO: 456192
  chr9:104248697-104248846
  hypo
  breast vs. ovary

SEQ ID NO: 457218 - DNA, 186 bp, Homo sapiens; identical to SEQ ID NO: 347048
  chr9:104248975-104249161
  hypo
  breast vs. ovary

SEQ ID NO: 457219 - DNA, 55 bp, Homo sapiens; identical to SEQ ID NO: 340321
  chr9:128103464-128103519
  hypo
  breast vs. liver_bileduct,bladder_and_urothelial, pancreas_gallbladder,ovary,head_and_neck,lung,upper_gi

SEQ ID NO: 457220 - DNA, 67 bp, Homo sapiens
  chr9:131399183-131399250
  hypo
  breast vs. head_and_neck,upper_gi,anorectal,ovary
cgctgccactcaccggccgtaggcacaggccaccacagagccagtggagttccaggagatgctggtc

SEQ ID NO: 457221 - DNA, 25 bp, Homo sapiens
  chr9:131399291-131399316
  hypo
  breast vs. head_and_neck,upper_gi,anorectal,ovary
atacagacaagacacctgcggagac

SEQ ID NO: 457222 - DNA, 355 bp, Homo sapiens; identical to SEQ ID NO: 365073
  chr9:132393701-132394056
  hypo
  breast vs. prostate,bladder_and_urothelial

SEQ ID NO: 457223 - DNA, 33 bp, Homo sapiens; identical to SEQ ID NO: 354401
  chr9:135548276-135548309
  hypo
  breast vs. renal,lymphoid_neoplasm,liver_bileduct, colorectal

SEQ ID NO: 457224 - DNA, 5 bp, Homo sapiens
  chr9:136728393-136728398
  hypo
  breast vs. liver_bileduct,uterine,anorectal
cgtgg

SEQ ID NO: 457225 - DNA, 105 bp, Homo sapiens; identical to SEQ ID NO: 365117
  chr9:136728494-136728599
  hypo
  breast vs. liver_bileduct,uterine,anorectal

SEQ ID NO: 457226 - DNA, 33 bp, Homo sapiens; identical to SEQ ID NO: 365146
  chr9:139103631-139103664
  hypo
  breast vs. bladder_and_urothelial,liver_bileduct

SEQ ID NO: 457227 - DNA, 196 bp, Homo sapiens
  chr9:139268627-139268823
  hypo
  breast vs. liver_bileduct,lung,bladder_and_urothelial, ovary,upper_gi,renal,colorectal,uterine
cgggggagaaacgtcccttccagaagtgtcgttatcctcgttatccccatcatgaggcatccctgctctccaccaggatgcatgtgaggactgaggccactctcggggtcccccaaaccagcttcagaagagccggtgacagcagggcacagctcggcccccatccagggacaacggacagcagagtctgccctga

SEQ ID NO: 457228 - DNA, 128 bp, Homo sapiens
  chr9:139268912-139269040
  hypo
  breast vs. liver_bileduct,lung,bladder_and_urothelial, ovary,upper_gi,renal,colorectal,uterine
aactgagttgccacccaacaggttcgagaaggggccgccaggctggaaggcaaggaagctggtgtggagcttgcctaaccgttctcagcctccagccctcaggcctctgtgcggacaacgtctgacat

SEQ ID NO: 457229 - DNA, 441 bp, Homo sapiens; identical to SEQ ID NO: 354430
  chr9:139269121-139269562
  hypo
  breast vs. liver_bileduct,lung,bladder_and_urothelial, ovary,upper_gi,renal,colorectal,uterine

SEQ ID NO: 457230 - DNA, 145 bp, Homo sapiens
  chr9:139317510-139317655
  hypo
  breast vs. liver_bileduct
cgcgctcgtgtgacacgcgtttgccctctgcactaggcaacgtgaagccggaagatgtgaagagagtcgcttctaagatgctccgagggaagccggcagtggccgccctgggtgacctgactgacctgcccacgtatgagcacat

SEQ ID NO: 457231 - DNA, 380 bp, Homo sapiens; identical to SEQ ID NO: 345987
  chr9:139317866-139318246
  hypo
  breast vs. liver_bileduct

SEQ ID NO: 457232 - DNA, 233 bp, Homo sapiens; identical to SEQ ID NO: 340442
  chr9:139374838-139375071
  hypo
  breast vs. ovary,lung,bladder_and_urothelial

SEQ ID NO: 457233 - DNA, 206 bp, Homo sapiens; identical to SEQ ID NO: 454068
  chr9:139698453-139698659
  hypo
  breast vs. lymphoid_neoplasm,renal,sarcoma, myeloid_neoplasm,melanoma,non_cancer,uterine,multiple_myeloma, liver_bileduct,ovary

SEQ ID NO: 457234 - DNA, 21 bp, Homo sapiens
  chr9:139699253-139699274
  hypo
  breast vs. lymphoid_neoplasm,renal,sarcoma, myeloid_neoplasm,melanoma,non_cancer,uterine,multiple_myeloma, liver_bileduct,ovary
cggagaccctgaaatgtaagc

SEQ ID NO: 457235 - DNA, 33 bp, Homo sapiens; identical to SEQ ID NO: 348397
  chr9:139889104-139889137
  hypo
  breast vs. liver_bileduct,lymphoid_neoplasm,ovary, prostate,sarcoma,melanoma,renal

SEQ ID NO: 457236 - DNA, 187 bp, Homo sapiens; identical to SEQ ID NO: 336699
  chrX:23801086-23801273
  hypo
  breast vs. prostate

SEQ ID NO: 457237 - DNA, 892 bp, Homo sapiens; identical to SEQ ID NO: 336707
  chrX:39933533-39934425
  hypo
  breast vs. prostate,upper_gi,head_and_neck

SEQ ID NO: 457238 - DNA, 104 bp, Homo sapiens; identical to SEQ ID NO: 456211
  chrX:39956753-39956857
  hypo
  breast vs. prostate

SEQ ID NO: 457239 - DNA, 90 bp, Homo sapiens; identical to SEQ ID NO: 456218
  chrX:40035057-40035147
  hypo
  breast vs. prostate

SEQ ID NO: 457240 - DNA, 599 bp, Homo sapiens; identical to SEQ ID NO: 456219
  chrX:40035057-40035656
  hypo
  breast vs. prostate

SEQ ID NO: 457241 - DNA, 564 bp, Homo sapiens; identical to SEQ ID NO: 456220
  chrX:40035161-40035725
  hypo
  breast vs. prostate

SEQ ID NO: 457242 - DNA, 721 bp, Homo sapiens; identical to SEQ ID NO: 347751
  chrX:40035852-40036573
  hypo
  breast vs. prostate

SEQ ID NO: 457243 - DNA, 14 bp, Homo sapiens
  chr1:2375641-2375655
  hyper
  cervical vs. ovary,melanoma,renal,breast,uterine
gggggccgcccctc

SEQ ID NO: 457244 - DNA, 200 bp, Homo sapiens
  chr1:7764988-7765188
  hyper
  cervical vs. head_and_neck,anorectal,lung, pancreas_gallbladder
cgcgtgcggtcgagggcggcggccggcgggggcgcgcgcggggcgggggcggggccggggcgtggggacacgcgtgctcgcgggccgggggcgtggtgcgcggccacgcgtgtttctggcgcgagtgtgcggggccaggccgggagggcgtgcgcggaccgggcgtgtttacgcgcggcagggaggggccacgagggtgc

SEQ ID NO: 457245 - DNA, 426 bp, Homo sapiens
  chr1:9711649-9712075
  hyper
  cervical vs. head_and_neck,lymphoid_neoplasm
cggcgggggaaggcgaggccctggaggacctgttgtttttcctgttgcaagtgaaaaggaaacaaagtgggaagtggagtgtgcgggttggcggcaggcggggcgccccggcgcgccccgcctccctccctcgaggctcactcgcgcccagcgcagtcgctccgagcggccgcgagcagagccgcccagccctgccagctgcgccgggacggtaagcgatcgccgctggctgcgtcaggggaggtgggaagaggaccgcggccaggggctttgggagctgcggctgcgctcgggggcgcggggctggctggcgggcgtctctccggcacacacagcccgtgcgccctggccctgggcgcctccccgagtctagcgagccgggtcctgggagccccgggggccgggctgctgggacctgggcggggg

SEQ ID NO: 457246 - DNA, 64 bp, Homo sapiens; identical to SEQ ID NO: 346318
  chr1:12123950-12124014
  hyper
  cervical vs. lymphoid_neoplasm

SEQ ID NO: 457247 - DNA, 205 bp, Homo sapiens
  chr1:18434105-18434310
  hyper
  cervical vs. melanoma
cggcttagcggacgagagccgaacagcccagaaaggattaaagaaaagtctgtataatacgcggagagcgcggcgaggggagggcaaggagggcgggggggcggggagagggggagggacggagggagggcgagaggaggggggtgctcgcgccgccgggagaggcgagcgcgaggcagagagcgcgattcggctccaaactccg

SEQ ID NO: 457248 - DNA, 37 bp, Homo sapiens; identical to SEQ ID NO: 349182
  chr1:18434816-18434853
  hyper
  cervical vs. melanoma

SEQ ID NO: 457249 - DNA, 83 bp, Homo sapiens
  chr1:18971634-18971717
  hyper
  cervical vs. colorectal,upper_gi
cgcgcgcgcgcgtgcgtgcgcacgacagcagagtgtgtttgcggggctggggctgaatttggcagccagcccccaagctgacc

SEQ ID NO: 457250 - DNA, 13 bp, Homo sapiens
  chr1:18972083-18972096
  hyper
  cervical vs. colorectal,upper_gi
gccgaggtctttc

SEQ ID NO: 457251 - DNA, 201 bp, Homo sapiens; identical to SEQ ID NO: 344942
  chr1:20512799-20513000
  hyper
  cervical vs. ovary

SEQ ID NO: 457252 - DNA, 100 bp, Homo sapiens
  chr1:21835634-21835734
  hyper
  cervical vs. ovary,bladder_and_urothelial
ggctgggctggggcagcccggaggcagagagaccgagagtgcggggcgggcgagggacgccagggccgcgtcaccccagcccgttcctagctccgctccc

SEQ ID NO: 457253 - DNA, 151 bp, Homo sapiens
  chr1:21835765-21835916
  hyper
  cervical vs. ovary,bladder_and_urothelial
cggcccgcggggcgcggggctcgggccgggggcggggccggggccgggctggggaggggttggggccgggggcgggggagggggcgggctgcccgggcctcactcgggccccgcggccgcctttataaggcggcgggggtggtggcccggg

SEQ ID NO: 457254 - DNA, 82 bp, Homo sapiens
  chr1:21835652-21835734
  hyper
  cervical vs. anorectal
cggaggcagagagaccgagagtgcggggcgggcgagggacgccagggccgcgtcaccccagcccgttcctagctccgctccc

SEQ ID NO: 457255 - DNA, 151 bp, Homo sapiens; identical to SEQ ID NO: 457253
  chr1:21835765-21835916
  hyper
  cervical vs. anorectal

SEQ ID NO: 457256 - DNA, 186 bp, Homo sapiens; identical to SEQ ID NO: 330722
  chr1:22351424-22351610
  hyper
  cervical vs. upper_gi,lung

SEQ ID NO: 457257 - DNA, 262 bp, Homo sapiens; identical to SEQ ID NO: 452712
  chr1:32180427-32180689
  hyper
  cervical vs. colorectal,melanoma

SEQ ID NO: 457258 - DNA, 1 bp, Homo sapiens
  chr1:32238716-32238717
  hyper
  cervical vs. non_cancer
c

SEQ ID NO: 457259 - DNA, 225 bp, Homo sapiens
  chr1:34629913-34630138
  hyper
  cervical vs. melanoma
cctcctagctccgagcgccgagggaggggtagcatttgaggagggggatggcggccgcagtctgcagtcggttccagagggggcaccggtttcaattggagaaaatgggcgggggcagggaagggcagaccttgcagacgcagaaatggggagggggcgcacggttcctctccagcccccaggaccagcgtgcctggcagaatcaggagccgggggagtagggct

SEQ ID NO: 457260 - DNA, 27 bp, Homo sapiens
  chr1:35394588-35394615
  hyper
  cervical vs. ovary
cggcacacacaatcgcccacagaccca

SEQ ID NO: 457261 - DNA, 253 bp, Homo sapiens
  chr1:35394790-35395043
  hyper
  cervical vs. ovary
cccgcggccctgaccgggagcgtgggtccgcggtccgcgtggtcccctgcccgcccctcgggtcgggcccgcgggcagccaggccggggcaggagcgggggcagctgaggaggcccagcccctcccccctcccggggccgggagccgagcgccggagcccggggcgtgggcggcgccggggccgcagccgggccgtgcctggggggcgctgcagagggagccgcgagcgcggccccgtccccactcctccccg

SEQ ID NO: 457262 - DNA, 113 bp, Homo sapiens; identical to SEQ ID NO: 346333
  chr1:35396131-35396244
  hyper
  cervical vs. anorectal

SEQ ID NO: 457263 - DNA, 83 bp, Homo sapiens; identical to SEQ ID NO: 330787
  chr1:43147856-43147939
  hyper
  cervical vs. head_and_neck,lung

SEQ ID NO: 457264 - DNA, 264 bp, Homo sapiens
  chr1:44872030-44872294
  hyper
  cervical vs. anorectal
cgtagagtagcccgacacgtgggatctcccgggattttcggggtcgggaccccctctcccagcggttctactgagcaaggcgggaggacgatcgtggagacgagggctacttgactactctacttgtagttttatttttatcttagacctgccttaaactgagtaacaatttctcttctgacttaagaacaaaacttttcagtgagcacgccggtcgctgcggtcctgcggccactgccgccgcgcttgtcagcccgggccgag

SEQ ID NO: 457265 - DNA, 264 bp, Homo sapiens
  chr1:46955978-46956242
  hyper
  cervical vs. myeloid_neoplasm
cgcttcggatccgtcacggttttgcctcatttggaagatattacttcgcccctgaaaaaaaaaatacaaaaaaggtttggatattaagcggagacaaatccttctcagtttggaagggggcggcgcggggagggaggtggccggcgtaatgcggaccagatgcggcctggggagttgcggagccctgggcgggggctggggagggggcgcggccggcagcccagttcccagcctgcggagcgcagaggccgcccacgccctccc

SEQ ID NO: 457266 - DNA, 255 bp, Homo sapiens; identical to SEQ ID NO: 346339
  chr1:46957171-46957426
  hyper
  cervical vs. myeloid_neoplasm,non_cancer, multiple_myeloma,thyroid

SEQ ID NO: 457267 - DNA, 114 bp, Homo sapiens; identical to SEQ ID NO: 344955
  chr1:50893877-50893991
  hyper
  cervical vs. myeloid_neoplasm

SEQ ID NO: 457268 - DNA, 605 bp, Homo sapiens; identical to SEQ ID NO: 349244
  chr1:54204704-54205309
  hyper
  cervical vs. anorectal

SEQ ID NO: 457269 - DNA, 260 bp, Homo sapiens; identical to SEQ ID NO: 452717
  chr1:63793072-63793332
  hyper
  cervical vs. thyroid

SEQ ID NO: 457270 - DNA, 293 bp, Homo sapiens; identical to SEQ ID NO: 330855
  chr1:65431047-65431340
  hyper
  cervical vs. liver_bileduct,upper_gi

SEQ ID NO: 457271 - DNA, 133 bp, Homo sapiens
  chr1:70032839-70032972
  hyper
  cervical vs. anorectal
cgcaaccccagaatgaggagaggacttaagagcaggcacaaggttcgctgccatgactgatgtgaagcgacctgacgcacaagcggagacttttctccttggcagccaacaacctgcagcaggcaaggcgggc

SEQ ID NO: 457272 - DNA, 232 bp, Homo sapiens
  chr1:70033272-70033504
  hyper
  cervical vs. anorectal
gagctcggcctctcgtcccgttctcgaaaagcagcctatcgtgacggagccgggagaaggctagcgtttcaatcctgtgcaggactgggatttttcttctcataatttgggggagccggagtagaggtcagagggacaggcgaggatctcaaaaagagaccgagggttgtgaacatggttaccccctcctatcattggaaaatctccttgacatttttcacactttgaagca

SEQ ID NO: 457273 - DNA, 100 bp, Homo sapiens; identical to SEQ ID NO: 349263
  chr1:72750578-72750678
  hyper
  cervical vs. bladder_and_urothelial,lung

SEQ ID NO: 457274 - DNA, 50 bp, Homo sapiens
  chr1:77333579-77333629
  hyper
  cervical vs. breast,ovary,lung,sarcoma,multiple_myeloma, prostate,thyroid,non_cancer,uterine
cggggttgcctcgcctcctagatctccggcgagaggtccgagggggtggc

SEQ ID NO: 457275 - DNA, 185 bp, Homo sapiens
  chr1:77333579-77333764
  hyper
  cervical vs. multiple_myeloma,breast,ovary,lung,sarcoma, prostate,non_cancer,myeloid_neoplasm,thyroid,uterine,renal
cggggttgcctcgcctcctagatctccggcgagaggtccgagggggtggcggagagctgcaggagcgatggaggagtgggcagattgctcaagggatgggggtgcccaaaagcaacagcctgccaaaaactaagagggacggggaggggggacctttgcagactttcttcgttttcttagatttc

SEQ ID NO: 457276 - DNA, 120 bp, Homo sapiens; identical to SEQ ID NO: 452723
  chr1:77333644-77333764
  hyper
  cervical vs. ovary,multiple_myeloma,myeloid_neoplasm, non_cancer,renal,sarcoma

SEQ ID NO: 457277 - DNA, 224 bp, Homo sapiens; identical to SEQ ID NO: 452724
  chr1:78956569-78956793
  hyper

SEQ ID NO: 457278 - DNA, 170 bp, Homo sapiens; identical to SEQ ID NO: 369187
  chr1:85463947-85464117
  hyper
  cervical vs. upper_gi

SEQ ID NO: 457279 - DNA, 154 bp, Homo sapiens; identical to SEQ ID NO: 356828
  chr1:91183993-91184147
  hyper
  cervical vs. melanoma

SEQ ID NO: 457280 - DNA, 16 bp, Homo sapiens
  chr1:91316222-91316238
  hyper
  cervical vs. head_and_neck
cgtgacagagactaaa

SEQ ID NO: 457281 - DNA, 289 bp, Homo sapiens; identical to SEQ ID NO: 452731
  chr1:101702081-101702370
  hyper
  cervical vs. sarcoma,uterine

SEQ ID NO: 457282 - DNA, 152 bp, Homo sapiens; identical to SEQ ID NO: 452732
  chr1:101702796-101702948
  hyper
  cervical vs. sarcoma,uterine

SEQ ID NO: 457283 - DNA, 393 bp, Homo sapiens; identical to SEQ ID NO: 452733
  chr1:101702796-101703189
  hyper
  cervical vs. sarcoma,uterine

SEQ ID NO: 457284 - DNA, 306 bp, Homo sapiens; identical to SEQ ID NO: 452735
  chr1:108506290-108506596
  hyper
  cervical vs. multiple_myeloma

SEQ ID NO: 457285 - DNA, 612 bp, Homo sapiens; identical to SEQ ID NO: 330940
  chr1:115212647-115213259
  hyper
  cervical vs. pancreas_gallbladder,head_and_neck,lung

SEQ ID NO: 457286 - DNA, 448 bp, Homo sapiens
  chr1:154297543-154297991
  hyper
  cervical vs. lymphoid_neoplasm,melanoma,lung
cggtgctgtgtcgttcattcaaggagagttgagatacagtgaaatgagccagggcgaggagggagggtgaaggaacggagggcgggcggctccgaggagcgagagtcgggctgagggcaacctggcgccagggaaaattctggttattcaccacttctacagctctcctgccgctccctgcagaggatgctcgttttgcagagaaggcagtgttcctctattcccttcttccgaattaaaaataccccctcagagcgatctagcctcccgaattgttttttcttttaagatgcggatggacgtacgtgtgggggcatcccagcccagccacgccgaggctcggaagggctaagaccctcccactgccccgcacaaagatggctgctccctcctccccgctccttctcccctccccaaaaccccctcccgccccccggcccccgccgcc

SEQ ID NO: 457287 - DNA, 73 bp, Homo sapiens
  chr1:154298038-154298111
  hyper
  cervical vs. lymphoid_neoplasm,melanoma,lung
cgggccgaggccccgggggagcggggccgcagctgggggggcgggagcccgtggggagccgagccgagcgccc

SEQ ID NO: 457288 - DNA, 200 bp, Homo sapiens; identical to SEQ ID NO: 330974
  chr1:155881090-155881290
  hyper
  cervical vs. head_and_neck,lung

SEQ ID NO: 457289 - DNA, 43 bp, Homo sapiens; identical to SEQ ID NO: 455561
  chr1:156390054-156390097
  hyper
  cervical vs. non_cancer,thyroid,multiple_myeloma

SEQ ID NO: 457290 - DNA, 8 bp, Homo sapiens
  chr1:161510039-161510047
  hyper
  cervical vs. head_and_neck
gcgcaatc

SEQ ID NO: 457291 - DNA, 354 bp, Homo sapiens; identical to SEQ ID NO: 369301
  chr1:161695853-161696207
  hyper
  cervical vs. bladder_and_urothelial

SEQ ID NO: 457292 - DNA, 349 bp, Homo sapiens
  chr1:166135586-166135935
  hyper
  cervical vs. thyroid
tcccggtcagactcagctcgcacctaggagcggggagccgccgggcatccttggggaagccccctcctcttgcagccgcgcggggtccccgctgccccgacgtccgcccacgcccgccccctcgctccggcagggcgcgcggagggtgcactcctaggaggcggcgggtgccctcgccggctccagcgcccgggcggagggcagggaggggagcggcgctgcgaggaatggtgcccaccccgggccggagccccccgcccctcgccggagaggaggaggcggcagcggcggcggcatggagccgggggagggcggcggtggcagcgcccggtctgtctgcctccgcggc

SEQ ID NO: 457293 - DNA, 629 bp, Homo sapiens; identical to SEQ ID NO: 356926
  chr1:166135586-166136215
  hyper
  cervical vs. sarcoma

SEQ ID NO: 457294 - DNA, 17 bp, Homo sapiens
  chr1:170630320-170630337
  hyper
  cervical vs. thyroid
tatgtgtaggggaaaaa

SEQ ID NO: 457295 - DNA, 94 bp, Homo sapiens
  chr1:196577278-196577372
  hyper
  cervical vs. head_and_neck
cggccctcccatttccgtctctttttcagcaatatttacagaacaatcctccaccacaccactcacctgtcgtcgttttgccatccttggtccc

SEQ ID NO: 457296 - DNA, 194 bp, Homo sapiens
  chr1:196577435-196577629
  hyper
  cervical vs. head_and_neck
ccatccttcctcaaagagtgggaaacatcaaacaacaaatggaggagaggagggagaaagaaagaaaatattgcggagtacagggagaggactaacaagacgctgtggccgagagagggatgggagaaggggaaggggacagggagggggagggggtccgcttggagccggaagctaaggcttgaaagggggct

SEQ ID NO: 457297 - DNA, 93 bp, Homo sapiens; identical to SEQ ID NO: 349371
  chr1:200012227-200012320
  hyper
  cervical vs. colorectal,upper_gi,uterine,non_cancer

SEQ ID NO: 457298 - DNA, 87 bp, Homo sapiens
  chr1:202183285-202183372
  hyper
  cervical vs. head_and_neck,lung
cgcttggagggagagggccgctcagcgagggcgggacagaacctctcccgggctgggagtgcacggcgcggtgcgcccaggtaggct

SEQ ID NO: 457299 - DNA, 28 bp, Homo sapiens
  chr1:202183401-202183429
  hyper
  cervical vs. head_and_neck,lung
tccacaggtcctccgcagccctggggag

SEQ ID NO: 457300 - DNA, 28 bp, Homo sapiens
  chr1:202183676-202183704
  hyper
  cervical vs. head_and_neck,lung
tccactgaaccacctggcgtgggttcgc

SEQ ID NO: 457301 - DNA, 146 bp, Homo sapiens; identical to SEQ ID NO: 356990
  chr1:207628133-207628279
  hyper
  cervical vs. lung

SEQ ID NO: 457302 - DNA, 585 bp, Homo sapiens; identical to SEQ ID NO: 356991
  chr1:209957600-209958185
  hyper
  cervical vs. upper_gi

SEQ ID NO: 457303 - DNA, 158 bp, Homo sapiens
  chr1:214162300-214162458
  hyper
  cervical vs. colorectal,liver_bileduct
cgctttccgccaaaccccatccttccgatctccccaggctaaaactccggggccggtccccttgtcctttctctttgtcttgtttattatagctgcctttcttcccggctcttccaatttgcttgtcatttgcatacctttcacttctccttttttaa

SEQ ID NO: 457304 - DNA, 4 bp, Homo sapiens
  chr1:214162850-214162854
  hyper
  cervical vs. colorectal,liver_bileduct
tacc

SEQ ID NO: 457305 - DNA, 70 bp, Homo sapiens; identical to SEQ ID NO: 349391
  chr1:214387777-214387847
  hyper
  cervical vs. pancreas_gallbladder,upper_gi

SEQ ID NO: 457306 - DNA, 14 bp, Homo sapiens
  chr1:215256971-215256985
  hyper
tcccgccggtgccc

SEQ ID NO: 457307 - DNA, 38 bp, Homo sapiens; identical to SEQ ID NO: 452747
  chr1:223936543-223936581
  hyper
  cervical vs. prostate,non_cancer,multiple_myeloma, myeloid_neoplasm,thyroid,renal

SEQ ID NO: 457308 - DNA, 45 bp, Homo sapiens
  chr1:226736488-226736533
  hyper
  cervical vs. anorectal
cggcggccgcctgagctcggcgcggagcccggagcccgcagccga

SEQ ID NO: 457309 - DNA, 618 bp, Homo sapiens; identical to SEQ ID NO: 357042
  chr1:230561973-230562591
  hyper
  cervical vs. lung,head_and_neck,pancreas_gallbladder, anorectal

SEQ ID NO: 457310 - DNA, 117 bp, Homo sapiens
  chr1:234350341-234350458
  hyper
  cervical vs. head_and_neck
ccgggggtccctgcaccctagccggggaatgctgccaccctgaggggggctgtctggctgcggggcgccggggctgggggtactgctcccccaggacgcggctccgcagtgcagagc

SEQ ID NO: 457311 - DNA, 1 bp, Homo sapiens
  chr1:234350469-234350470
  hyper
  cervical vs. head_and_neck
c

SEQ ID NO: 457312 - DNA, 162 bp, Homo sapiens; identical to SEQ ID NO: 331158
  chr1:234812061-234812223
  hyper
  cervical vs. upper_gi,colorectal,pancreas_gallbladder

SEQ ID NO: 457313 - DNA, 13 bp, Homo sapiens
  chr1:240775455-240775468
  hyper
  cervical vs. bladder_and_urothelial,lung
gaatcctctcggc

SEQ ID NO: 457314 - DNA, 421 bp, Homo sapiens; identical to SEQ ID NO: 452751
  chr1:241519651-241520072
  hyper
  cervical vs. uterine,ovary

SEQ ID NO: 457315 - DNA, 50 bp, Homo sapiens; identical to SEQ ID NO: 452752
  chr1:241520022-241520072
  hyper
  cervical vs. uterine,ovary,colorectal,thyroid

SEQ ID NO: 457316 - DNA, 51 bp, Homo sapiens; identical to SEQ ID NO: 452753
  chr1:241520533-241520584
  hyper
  cervical vs. uterine,ovary,colorectal,thyroid

SEQ ID NO: 457317 - DNA, 148 bp, Homo sapiens; identical to SEQ ID NO: 452754
  chr1:241520612-241520760
  hyper
  cervical vs. uterine,ovary,colorectal,thyroid

SEQ ID NO: 457318 - DNA, 91 bp, Homo sapiens; identical to SEQ ID NO: 349442
  chr1:241520789-241520880
  hyper
  cervical vs. uterine,ovary,colorectal,thyroid

SEQ ID NO: 457319 - DNA, 307 bp, Homo sapiens; identical to SEQ ID NO: 331178
  chr1:247241973-247242280
  hyper
  cervical vs. upper_gi,lung,pancreas_gallbladder, colorectal,bladder_and_urothelial

SEQ ID NO: 457320 - DNA, 819 bp, Homo sapiens; identical to SEQ ID NO: 331179
  chr1:247267064-247267883
  hyper
  cervical vs. pancreas_gallbladder,lung, bladder_and_urothelial,breast,colorectal

SEQ ID NO: 457321 - DNA, 177 bp, Homo sapiens; identical to SEQ ID NO: 331181
  chr1:248406552-248406729
  hyper
  cervical vs. upper_gi

SEQ ID NO: 457322 - DNA, 96 bp, Homo sapiens; identical to SEQ ID NO: 345341
  chr10:1780056-1780152
  hyper
  cervical vs. anorectal,head_and_neck,melanoma,prostate, liver_bileduct,breast

SEQ ID NO: 457323 - DNA, 101 bp, Homo sapiens
  chr10:11207330-11207431
  hyper
  cervical vs. melanoma
tttgccactgctcttcttcctcctccttccgcctccccgctcccccacccccactattttttcttcctgtccctcatcgtgccgccctaactctggctccc

SEQ ID NO: 457324 - DNA, 76 bp, Homo sapiens; identical to SEQ ID NO: 359505
  chr10:14646259-14646335
  hyper
  cervical vs. head_and_neck,upper_gi

SEQ ID NO: 457325 - DNA, 87 bp, Homo sapiens; identical to SEQ ID NO: 359506
  chr10:14646653-14646740
  hyper
  cervical vs. head_and_neck,upper_gi

SEQ ID NO: 457326 - DNA, 209 bp, Homo sapiens; identical to SEQ ID NO: 452758
  chr10:17270445-17270654
  hyper
  cervical vs. uterine,melanoma

SEQ ID NO: 457327 - DNA, 209 bp, Homo sapiens; identical to SEQ ID NO: 452758
  chr10:17270445-17270654
  hyper
  cervical vs. melanoma,uterine

SEQ ID NO: 457328 - DNA, 63 bp, Homo sapiens; identical to SEQ ID NO: 454116
  chr10:22540645-22540708
  hyper
  cervical vs. anorectal

SEQ ID NO: 457329 - DNA, 791 bp, Homo sapiens
  chr10:31607954-31608745
  hyper
  cervical vs. liver_bileduct
cggttgccgcaaaccgcccggtccctagcaacaaggttccggccgtagagcgagagcctctaggtgtaaggaaggtgatgtcgtaaagccgggagtgtcgtaaaccaggtgcggtggggaggggggaggggtggaggcggaggggtgggggggaagggggagggagggggaggaggtgactcgagcatttagacacaagcgagaggatcatggcggatggccccaggtgtaagcgcagaaagcaggcgaacccgcggcgcaataacggtgagtggcggaggggaccggggagcggcggagtcagggggagctgggcagccggggcgcccccgggggtgaggggggcgagccgggctgggggcagccggggcagggacggcaaagtggagtgggaaagtagaaagtagtgctctctgcccccctccgctgccgccgctgccggagccgcgccgcggccgctcgctctccctgaaccgttatgtctcttacctggtctctctccgcctagcggctcccgccgcccctgccgcctccctggaccgttagccggcgccgacgccgccgcatccccggcgcagggcgggcggccgggacgcactggccacttttctggtcccgggtggagcggctgttgcttctttccgcacttttccccactcttgtgcccttcggcgcctccctctccccctcctcctggccccctcagcgcgattctccctcagcgcccaggcccccgggagccgcggaacaaacttgtgcccggcgctgaccgtgcaaagtggcttccgcgc

SEQ ID NO: 457330 - DNA, 467 bp, Homo sapiens
  chr10:31608278-31608745
  hyper
  cervical vs. lymphoid_neoplasm,anorectal
cgcccccgggggtgaggggggcgagccgggctgggggcagccggggcagggacggcaaagtggagtgggaaagtagaaagtagtgctctctgcccccctccgctgccgccgctgccggagccgcgccgcggccgctcgctctccctgaaccgttatgtctcttacctggtctctctccgcctagcggctcccgccgcccctgccgcctccctggaccgttagccggcgccgacgccgccgcatccccggcgcagggcgggcggccgggacgcactggccacttttctggtcccgggtggagcggctgttgcttctttccgcacttttccccactcttgtgcccttcggcgcctccctctccccctcctcctggccccctcagcgcgattctccctcagcgcccaggcccccgggagccgcggaacaaacttgtgcccggcgctgaccgtgcaaagtggcttccgcgc

SEQ ID NO: 457331 - DNA, 4 bp, Homo sapiens
  chr10:44806356-44806360
  hyper
  cervical vs. pancreas_gallbladder,multiple_myeloma, breast,prostate,myeloid_neoplasm,thyroid,non_cancer
cggg

SEQ ID NO: 457332 - DNA, 107 bp, Homo sapiens; identical to SEQ ID NO: 345354
  chr10:44806674-44806781
  hyper
  cervical vs. pancreas_gallbladder,multiple_myeloma, breast,prostate,myeloid_neoplasm,thyroid,non_cancer

SEQ ID NO: 457333 - DNA, 198 bp, Homo sapiens; identical to SEQ ID NO: 452766
  chr10:44882100-44882298
  hyper
  cervical vs. upper_gi,pancreas_gallbladder, bladder_and_urothelial

SEQ ID NO: 457334 - DNA, 28 bp, Homo sapiens
  chr10:44882362-44882390
  hyper
  cervical vs. upper_gi,pancreas_gallbladder, bladder_and_urothelial
ctggccaaagcaaacgccatcgcctctc

SEQ ID NO: 457335 - DNA, 94 bp, Homo sapiens; identical to SEQ ID NO: 351040
  chr10:50606762-50606856
  hyper
  cervical vs. melanoma

SEQ ID NO: 457336 - DNA, 127 bp, Homo sapiens; identical to SEQ ID NO: 359578
  chr10:63213212-63213339
  hyper
  cervical vs. bladder_and_urothelial

SEQ ID NO: 457337 - DNA, 79 bp, Homo sapiens
  chr10:64133789-64133868
  hyper
  cervical vs. anorectal
cgccgcgactgcgaggctgacacgcgtctttccttccctcccccggggaatgatcccagcatctctcgcagtgatgtca

SEQ ID NO: 457338 - DNA, 3 bp, Homo sapiens
  chr10:64134405-64134408
  hyper
  cervical vs. anorectal
agc

SEQ ID NO: 457339 - DNA, 42 bp, Homo sapiens; identical to SEQ ID NO: 333957
  chr10:68685841-68685883
  hyper
  cervical vs. liver_bileduct

SEQ ID NO: 457340 - DNA, 99 bp, Homo sapiens; identical to SEQ ID NO: 287184
  chr10:71333132-71333231
  hyper
  cervical vs. melanoma

SEQ ID NO: 457341 - DNA, 544 bp, Homo sapiens
  chr10:77160489-77161033
  hyper
  cervical vs. head_and_neck
cgggcggctggcgcctcagaggctgtgtgcacacactggcttctgcggatacgaaggacggcgactttggaaccgtatttcagacctccgcctgccttcggtgccgagtgaaggggcctgggtcggggtaggggctttcatatcgaaaggagaaacaagtattggcagccttgctccctagcatgcacgccccattccacttcctcccccttttccgccctagttttgaggtacggaagcagtagcctcttcccccattcgggagctgaatcactccgacccccccacctccgcccagatcccgagaaaaagaaagccctagggtggcagccagggtagtggtcccagtgcgatccagagagagggtccttacctcgatggggctgaccggcgtggaaggcaggggctgcaggtactcggggtgcaaaatgtggccagttcgtgccgtcagcatcttcagcaccttgattggcaggcggttggcctggcgcagggggtcagaggggggcacggcgtgcacaaaaggcttggtgctgccggccgg

SEQ ID NO: 457342 - DNA, 29 bp, Homo sapiens
  chr10:77161406-77161435
  hyper
  cervical vs. head_and_neck
agtgccgggcggctcgcggtgtccgcctc

SEQ ID NO: 457343 - DNA, 761 bp, Homo sapiens; identical to SEQ ID NO: 345363
  chr10:98479725-98480486
  hyper
  cervical vs. upper_gi,pancreas_gallbladder, liver_bileduct

SEQ ID NO: 457344 - DNA, 3 bp, Homo sapiens
  chr10:101293972-101293975
  hyper
  cervical vs. bladder_and_urothelial,myeloid_neoplasm, multiple_myeloma
tcc

SEQ ID NO: 457345 - DNA, 164 bp, Homo sapiens
  chr10:102587906-102588070
  hyper
  cervical vs. anorectal
ctgccgaatccctgggaaaaattcttttcccccagtgccagccggactgccctcgccttccgggtgtgccctgtcccagaagatggaatgggggtgtgggggtccggctctaggaacgggctttgggggcgtcaggtctttccaaggttgggacccaaggatcg

SEQ ID NO: 457346 - DNA, 78 bp, Homo sapiens
  chr10:102588175-102588253
  hyper
  cervical vs. anorectal
gctctcagccctgccttgcccctacctcagcgtctcttccacctgctggcctcccagtttcccctcctgccagtcctt

SEQ ID NO: 457347 - DNA, 15 bp, Homo sapiens
  chr10:102588427-102588442
  hyper
  cervical vs. anorectal
gttctgagctggcgt

SEQ ID NO: 457348 - DNA, 21 bp, Homo sapiens
  chr10:103044414-103044435
  hyper
  cervical vs. multiple_myeloma,myeloid_neoplasm
tcccctctatgggccccgccc

SEQ ID NO: 457349 - DNA, 22 bp, Homo sapiens
  chr10:116852626-116852648
  hyper
  cervical vs. head_and_neck
cggcggacgggaaggacttctt

SEQ ID NO: 457350 - DNA, 240 bp, Homo sapiens; identical to SEQ ID NO: 454122
  chr10:118891774-118892014
  hyper
  cervical vs. multiple_myeloma,thyroid,non_cancer, myeloid_neoplasm

SEQ ID NO: 457351 - DNA, 240 bp, Homo sapiens; identical to SEQ ID NO: 454122
  chr10:118891774-118892014
  hyper
  cervical vs. multiple_myeloma,thyroid

SEQ ID NO: 457352 - DNA, 138 bp, Homo sapiens; identical to SEQ ID NO: 345371
  chr10:122708760-122708898
  hyper
  cervical vs. pancreas_gallbladder,multiple_myeloma, thyroid,renal,non_cancer,sarcoma

SEQ ID NO: 457353 - DNA, 565 bp, Homo sapiens
  chr11:2398759-2399324
  hyper
  cervical vs. head_and_neck,anorectal
cgcccgccgcccgcgccgccatgggagtggagggctgcaccaagtgcatcaagtacctgctcttcgtcttcaatttcgtcttctgggtaagggctgcgccgggggccggggcgggagggggcaggcacacactccacgttgggcaggtcccgcggcagcgtgctaggccccgcgggcgcagcgcgggccgcgaagttgtggggccacctgtgggctccaggagcggggtggggggtcgcccggggccaccgcgccccccgacattggggctgagggctgcgagccgagtttcggggcctctgtgctcgggggcccacctctgcggccgggccggggcttctgggggccgccgggcagttcccgctgtggtggtgatgggtgcggtggtcgcgggtcgggacccgagtacccggccgcccctcagctaaggaggggcctgcgcgggtccctggccgcggattccggactgctgcttcgcggggacgaggggggggctcgcgggcgggactcctggcgccccgcccccatgagctcatcaagagccgccgcccctggatggtggggc

SEQ ID NO: 457354 - DNA, 112 bp, Homo sapiens
  chr11:2399399-2399511
  hyper
  cervical vs. head_and_neck,anorectal
cggtcaccacccgagaccttcctgggggtcgcgcctaaaaggagcgcagactcccgccgggatggcccagaagctggggtgcgcgcaccctggccgtccctgcctgggagcc

SEQ ID NO: 457355 - DNA, 286 bp, Homo sapiens
  chr11:2399038-2399324
  hyper
  cervical vs. head_and_neck
cgagccgagtttcggggcctctgtgctcgggggcccacctctgcggccgggccggggcttctgggggccgccgggcagttcccgctgtggtggtgatgggtgcggtggtcgcgggtcgggacccgagtacccggccgcccctcagctaaggaggggcctgcgcgggtccctggccgcggattccggactgctgcttcgcggggacgaggggggggctcgcgggcgggactcctggcgccccgcccccatgagctcatcaagagccgccgcccctggatggtggggc

SEQ ID NO: 457356 - DNA, 401 bp, Homo sapiens; identical to SEQ ID NO: 351145
  chr11:2399399-2399800
  hyper
  cervical vs. head_and_neck

SEQ ID NO: 457357 - DNA, 4 bp, Homo sapiens
  chr11:8041149-8041153
  hyper
  cervical vs. head_and_neck
tagc

SEQ ID NO: 457358 - DNA, 129 bp, Homo sapiens; identical to SEQ ID NO: 351149
  chr11:8615887-8616016
  hyper
  cervical vs. ovary

SEQ ID NO: 457359 - DNA, 5 bp, Homo sapiens
  chr11:14665069-14665074
  hyper
  cervical vs. anorectal
cgtcc

SEQ ID NO: 457360 - DNA, 347 bp, Homo sapiens
  chr11:14665271-14665618
  hyper
  cervical vs. anorectal
cgcgcgcccaacggaccaggctggggccgtgaggtaactgttgcagccagcggaggtgggaggcgacactgagtctccagtcccgagaggtgcccgagggaaaaggaggcggcagctaaactggtcctggagagaagccccttccgcccctctcctcagccagcatgtcccggactccgccgctcctcagtccgcgcggtggggaccccgggccgtggcggccggcgcagccctgacgggttgcgaaccagggggcgccccgaacgcgggggttggggtctgggagcgcgagcggccgctacggtacgagcggggtgtgctgagtcccgtggccacccccggcccca

SEQ ID NO: 457361 - DNA, 299 bp, Homo sapiens
  chr11:14665651-14665950
  hyper
  cervical vs. anorectal
atgcggtccctgcagccgccggatggggccggctcgccccccgagagtctgaggaacggctacgtgaagagctgcgtgagccccttgcggcaggaccctccgcgcggcttcttcttccacctctgccgcttctgcaacgtggagctgcggccgccgccggcctctccccagcagccgcggcgctgctcccccttctgccgggcgcgcctctcgctgggcgccctggctgcctttgtcctcgccctgctgctgggcgcggaacccgagagctgggctgccggggccgcctggctgcggac

SEQ ID NO: 457362 - DNA, 17 bp, Homo sapiens
  chr11:16634123-16634140
  hyper
  cervical vs. multiple_myeloma
cgggggggcggggttgg

SEQ ID NO: 457363 - DNA, 79 bp, Homo sapiens; identical to SEQ ID NO: 351157
  chr11:16634452-16634531
  hyper
  cervical vs. multiple_myeloma

SEQ ID NO: 457364 - DNA, 230 bp, Homo sapiens
  chr11:22214131-22214361
  hyper
  cervical vs. bladder_and_urothelial
cgagaccaaaagtaactcccaactgggagaggggttctctccgagtggcacgcatgagcggatcgatgaagacccggccaaccggctgagggagcatcgggaccccctttggggatcggaggaggaggattccgacaggagggaagcggcagccctggggaaccaggattcctggtcgtgggtggacccagtggaaaaggacgtgcgaagcctgtacagaatggagcagg

SEQ ID NO: 457365 - DNA, 251 bp, Homo sapiens
  chr11:33891709-33891960
  hyper
  cervical vs. anorectal,ovary
cggggacggggagagccgctcagcgaacacctctccttggaaaggaggctgggcaaccactaaatcattcttcagggcttcccctcttccgcctttcccttttggtttaactaaggcagaaagtaacccacgaacagctcgagcaagcaagaaaagacaagaatgtgaaataagcacctacagaaatgcaagtgttcccagtggattttccgcccgtcccaggttcgaggtcccaggtccacggacgccgt

SEQ ID NO: 457366 - DNA, 119 bp, Homo sapiens; identical to SEQ ID NO: 347148
  chr11:33892127-33892246
  hyper
  cervical vs. anorectal,ovary

SEQ ID NO: 457367 - DNA, 56 bp, Homo sapiens; identical to SEQ ID NO: 452790
  chr11:43599961-43600017
  hyper
  cervical vs. bladder_and_urothelial,uterine,thyroid

SEQ ID NO: 457368 - DNA, 239 bp, Homo sapiens; identical to SEQ ID NO: 452791
  chr11:43600215-43600454
  hyper
  cervical vs. bladder_and_urothelial,uterine,thyroid

SEQ ID NO: 457369 - DNA, 174 bp, Homo sapiens; identical to SEQ ID NO: 452792
  chr11:43600280-43600454
  hyper
  cervical vs. melanoma,myeloid_neoplasm,ovary,prostate, sarcoma,uterine,non_cancer,lung,breast

SEQ ID NO: 457370 - DNA, 61 bp, Homo sapiens; identical to SEQ ID NO: 359822
  chr11:43965299-43965360
  hyper
  cervical vs. lung,bladder_and_urothelial,anorectal

SEQ ID NO: 457371 - DNA, 42 bp, Homo sapiens
  chr11:43965463-43965505
  hyper
  cervical vs. lung,bladder_and_urothelial
cggggtccaggctcccaagactcggggaggtgggggaggagg

SEQ ID NO: 457372 - DNA, 141 bp, Homo sapiens; identical to SEQ ID NO: 359824
  chr11:43966061-43966202
  hyper
  cervical vs. lung,bladder_and_urothelial

SEQ ID NO: 457373 - DNA, 52 bp, Homo sapiens
  chr11:44337578-44337630
  hyper
  cervical vs. anorectal
cgctgcgcgagttatcagaaatccctggagccaaacactacgggggaccggc

SEQ ID NO: 457374 - DNA, 118 bp, Homo sapiens
  chr11:44748073-44748191
  hyper
cggcagcgggaagcccaggagcccgatcaggaccgaggatctcaccccaacccctgcgtttgggccccggggtcagctgaaagttcccctggaataaacacttcgggtccagcatgcc

SEQ ID NO: 457375 - DNA, 257 bp, Homo sapiens
  chr11:44748419-44748676
  hyper
ggaggggcggaggtttggggagggggagggagggcgggggaggggagggacggacggcggcggaggtggggccggcgggctggcgggcgtgcagctgccgccggcgtcgcggggctccaggctgcggggcggacgtagcgccgagcgatccaccgcggagccgcgcgaggccgcccgagccccagccccggccccggccccagccccggccccggccccggccccggccccggccccggtcccggccccgagccccg

SEQ ID NO: 457376 - DNA, 16 bp, Homo sapiens
  chr11:44748871-44748887
  hyper
ccgccgccgcgccccc

SEQ ID NO: 457377 - DNA, 257 bp, Homo sapiens; identical to SEQ ID NO: 457375
  chr11:44748419-44748676
  hyper
  cervical vs. anorectal

SEQ ID NO: 457378 - DNA, 314 bp, Homo sapiens
  chr11:44748871-44749185
  hyper
  cervical vs. anorectal
ccgccgccgcgcccccggggacctggggacccccccgcgcgccgccccgggggtgctgctggacgcggcggggaattggggtggagtagggatcccaggacggaagcccggcaaccaagttccactcaaactagcacgcgggggctggggggccggggacggtctccaccccgtgcctgcccggagtccgctgagggccgggggctgcgcccaggacaggtgcagagccggtgggctcccagtgctccgggtggaggagtgggggcttctggagaacggcgcggggtggcaggtgtggttacaaggttcggggt

SEQ ID NO: 457379 - DNA, 185 bp, Homo sapiens
  chr11:44749218-44749403
  hyper
  cervical vs. anorectal
cgccacgccacccggtaagacagtgagggaccagggactgggagcggcgatcggggccgggagggctgtggggcccggcagctgcatggagggcgggctgcctttggggtccctggcagcggggcggggcggggcggaggcgccactcgttcctccaggaccccccttattccttaggtgtgtgc

SEQ ID NO: 457380 - DNA, 279 bp, Homo sapiens
  chr11:44748906-44749185
  hyper
  cervical vs. anorectal
cgcgcgccgccccgggggtgctgctggacgcggcggggaattggggtggagtagggatcccaggacggaagcccggcaaccaagttccactcaaactagcacgcgggggctggggggccggggacggtctccaccccgtgcctgcccggagtccgctgagggccgggggctgcgcccaggacaggtgcagagccggtgggctcccagtgctccgggtggaggagtgggggcttctggagaacggcgcggggtggcaggtgtggttacaaggttcggggt

SEQ ID NO: 457381 - DNA, 516 bp, Homo sapiens; identical to SEQ ID NO: 351193
  chr11:44749218-44749734
  hyper
  cervical vs. anorectal

SEQ ID NO: 457382 - DNA, 28 bp, Homo sapiens
  chr11:45377196-45377224
  hyper
  cervical vs. bladder_and_urothelial
ctgaaggcgaccaacgagagggagggcc

SEQ ID NO: 457383 - DNA, 383 bp, Homo sapiens; identical to SEQ ID NO: 334300
  chr11:66176338-66176721
  hyper
  cervical vs. head_and_neck

SEQ ID NO: 457384 - DNA, 510 bp, Homo sapiens; identical to SEQ ID NO: 452797
  chr11:76381512-76382022
  hyper
  cervical vs. bladder_and_urothelial,multiple_myeloma, lymphoid_neoplasm,non_cancer,myeloid_neoplasm,thyroid

SEQ ID NO: 457385 - DNA, 30 bp, Homo sapiens; identical to SEQ ID NO: 452798
  chr11:76382264-76382294
  hyper
  cervical vs. bladder_and_urothelial,multiple_myeloma, lymphoid_neoplasm,non_cancer,myeloid_neoplasm,thyroid

SEQ ID NO: 457386 - DNA, 290 bp, Homo sapiens; identical to SEQ ID NO: 359907
  chr11:79150336-79150626
  hyper
  cervical vs. head_and_neck

SEQ ID NO: 457387 - DNA, 38 bp, Homo sapiens; identical to SEQ ID NO: 452799
  chr11:84431917-84431955
  hyper
  cervical vs. melanoma

SEQ ID NO: 457388 - DNA, 55 bp, Homo sapiens; identical to SEQ ID NO: 359909
  chr11:84432270-84432325
  hyper
  cervical vs. melanoma

SEQ ID NO: 457389 - DNA, 772 bp, Homo sapiens; identical to SEQ ID NO: 334350
  chr11:94963753-94964525
  hyper
  cervical vs. head_and_neck,pancreas_gallbladder

SEQ ID NO: 457390 - DNA, 131 bp, Homo sapiens; identical to SEQ ID NO: 347179
  chr11:106889091-106889222
  hyper
  cervical vs. head_and_neck,anorectal

SEQ ID NO: 457391 - DNA, 168 bp, Homo sapiens; identical to SEQ ID NO: 351253
  chr11:107462735-107462903
  hyper
  cervical vs. anorectal

SEQ ID NO: 457392 - DNA, 45 bp, Homo sapiens
  chr11:113930323-113930368
  hyper
  cervical vs. anorectal
cgccagcactaaagatggagaggcgccggggccttgcaggggagg

SEQ ID NO: 457393 - DNA, 230 bp, Homo sapiens
  chr11:113930801-113931031
  hyper
  cervical vs. anorectal
gccccggctgtcagcctgggcgcagctgcctccccagcccttcctcttcagggcacggtcggggtgagaggtggggggcgtagcggtgtgcgggggctgagggcgtgagcagaggggtcggggatccggaggctttgtaccgccaggggctggcggagcaacagagcccgtgggtgctcttatgtatgcggaccggtgcgcgggcgcaagataaggttgtggtttattta

SEQ ID NO: 457394 - DNA, 208 bp, Homo sapiens; identical to SEQ ID NO: 359936
  chr11:113931067-113931275
  hyper
  cervical vs. anorectal

SEQ ID NO: 457395 - DNA, 160 bp, Homo sapiens
  chr11:120435049-120435209
  hyper
  cervical vs. ovary
cgctcgcggggagggggctcgggaatccgggcccgggcaaccggcgccgcatgctaatcagggggcgcccgcccccgctttgcccgtggccctcctttcccgattccccgacgtttcgggaggagtggggtcggagcgcagggctgggaagggtcttagg

SEQ ID NO: 457396 - DNA, 161 bp, Homo sapiens
  chr11:131564801-131564962
  hyper
  cervical vs. bladder_and_urothelial
cgctcagcgccctcgcagccggaatggggcctgggaagggaggagccccagcagaggggcagtcggagagccatgaaattgcgacctgctgccaccagagggcagtgttggacgggctgggaggagcgccgccgccgccgggagggtgcaggagagagctg

SEQ ID NO: 457397 - DNA, 12 bp, Homo sapiens
  chr11:131565073-131565085
  hyper
  cervical vs. bladder_and_urothelial
aatctctgtgac

SEQ ID NO: 457398 - DNA, 238 bp, Homo sapiens
  chr11:131781335-131781573
  hyper
  cervical vs. anorectal
gtgcggctgccggagttcggggaagttgtggctgtcgagaatgggggtctgtgggtacctgttcctgccctggaagtgcctcgtggtcgtgtctctcaggctgctgttccttgtacccacaggagtgcccgtgcgcagcggagatgccaccttccccaaagctatggacaacgtgacggtccggcagggggagagcgccaccctcaggtagggagctgacattgttctgcgaactgat

SEQ ID NO: 457399 - DNA, 1 bp, Homo sapiens
  chr11:131781648-131781649
  hyper
  cervical vs. anorectal
c

SEQ ID NO: 457400 - DNA, 16 bp, Homo sapiens
  chr11:133401972-133401988
  hyper
  cervical vs. bladder_and_urothelial
cgcgcgtgtgagcgag

SEQ ID NO: 457401 - DNA, 76 bp, Homo sapiens; identical to SEQ ID NO: 372884
  chr11:133402290-133402366
  hyper
  cervical vs. bladder_and_urothelial

SEQ ID NO: 457402 - DNA, 16 bp, Homo sapiens
  chr11:133827440-133827456
  hyper
  cervical vs. thyroid,renal,prostate
aaacgtgatgcagacc

SEQ ID NO: 457403 - DNA, 217 bp, Homo sapiens; identical to SEQ ID NO: 334418
  chr11:133920473-133920690
  hyper
  cervical vs. pancreas_gallbladder,upper_gi,colorectal, lung

SEQ ID NO: 457404 - DNA, 17 bp, Homo sapiens
  chr11:133938756-133938773
  hyper
  cervical vs. melanoma,sarcoma,myeloid_neoplasm,thyroid, non_cancer,prostate,renal
cgccaagttcattgaaa

SEQ ID NO: 457405 - DNA, 161 bp, Homo sapiens; identical to SEQ ID NO: 345407
  chr11:133939437-133939598
  hyper
  cervical vs. melanoma,sarcoma,myeloid_neoplasm,thyroid, non_cancer,prostate,renal

SEQ ID NO: 457406 - DNA, 254 bp, Homo sapiens; identical to SEQ ID NO: 334433
  chr12:2692239-2692493
  hyper
  cervical vs. pancreas_gallbladder,upper_gi,ovary, colorectal

SEQ ID NO: 457407 - DNA, 86 bp, Homo sapiens; identical to SEQ ID NO: 452813
  chr12:4377809-4377895
  hyper
  cervical vs. lymphoid_neoplasm,colorectal

SEQ ID NO: 457408 - DNA, 142 bp, Homo sapiens; identical to SEQ ID NO: 452814
  chr12:4378558-4378700
  hyper
  cervical vs. lymphoid_neoplasm,colorectal

SEQ ID NO: 457409 - DNA, 245 bp, Homo sapiens; identical to SEQ ID NO: 452815
  chr12:4378558-4378803
  hyper
  cervical vs. lymphoid_neoplasm,colorectal,non_cancer, myeloid_neoplasm

SEQ ID NO: 457410 - DNA, 88 bp, Homo sapiens; identical to SEQ ID NO: 454142
  chr12:4378715-4378803
  hyper
  cervical vs. colorectal,melanoma

SEQ ID NO: 457411 - DNA, 247 bp, Homo sapiens; identical to SEQ ID NO: 455641
  chr12:4379920-4380167
  hyper
  cervical vs. anorectal,colorectal

SEQ ID NO: 457412 - DNA, 247 bp, Homo sapiens; identical to SEQ ID NO: 455641
  chr12:4379920-4380167
  hyper
  cervical vs. anorectal,colorectal

SEQ ID NO: 457413 - DNA, 285 bp, Homo sapiens; identical to SEQ ID NO: 455642
  chr12:4380196-4380481
  hyper
  cervical vs. anorectal,colorectal

SEQ ID NO: 457414 - DNA, 266 bp, Homo sapiens; identical to SEQ ID NO: 455643
  chr12:4380215-4380481
  hyper
  cervical vs. anorectal

SEQ ID NO: 457415 - DNA, 152 bp, Homo sapiens; identical to SEQ ID NO: 455644
  chr12:4381033-4381185
  hyper
  cervical vs. anorectal

SEQ ID NO: 457416 - DNA, 401 bp, Homo sapiens; identical to SEQ ID NO: 455645
  chr12:4381033-4381434
  hyper
  cervical vs. colorectal,anorectal

SEQ ID NO: 457417 - DNA, 202 bp, Homo sapiens; identical to SEQ ID NO: 454143
  chr12:4381232-4381434
  hyper
  cervical vs. anorectal,colorectal

SEQ ID NO: 457418 - DNA, 167 bp, Homo sapiens; identical to SEQ ID NO: 347205
  chr12:4382439-4382606
  hyper
  cervical vs. anorectal,colorectal

SEQ ID NO: 457419 - DNA, 51 bp, Homo sapiens; identical to SEQ ID NO: 454144
  chr12:4382915-4382966
  hyper
  cervical vs. anorectal,colorectal,melanoma, multiple_myeloma,head_and_neck,non_cancer,myeloid_neoplasm, thyroid

SEQ ID NO: 457420 - DNA, 210 bp, Homo sapiens; identical to SEQ ID NO: 454145
  chr12:4382999-4383209
  hyper
  cervical vs. anorectal,colorectal,melanoma, multiple_myeloma,head_and_neck,non_cancer,myeloid_neoplasm, thyroid

SEQ ID NO: 457421 - DNA, 155 bp, Homo sapiens; identical to SEQ ID NO: 345415
  chr12:4384059-4384214
  hyper
  cervical vs. anorectal,colorectal,head_and_neck, multiple_myeloma,non_cancer,myeloid_neoplasm

SEQ ID NO: 457422 - DNA, 255 bp, Homo sapiens; identical to SEQ ID NO: 455647
  chr12:4384059-4384314
  hyper
  cervical vs. anorectal,colorectal

SEQ ID NO: 457423 - DNA, 79 bp, Homo sapiens; identical to SEQ ID NO: 351309
  chr12:4384533-4384612
  hyper
  cervical vs. anorectal,colorectal

SEQ ID NO: 457424 - DNA, 117 bp, Homo sapiens; identical to SEQ ID NO: 347220
  chr12:21681020-21681137
  hyper
  cervical vs. ovary,uterine,breast,renal,sarcoma, myeloid_neoplasm,prostate,thyroid,non_cancer,multiple_myeloma

SEQ ID NO: 457425 - DNA, 6 bp, Homo sapiens
  chr12:22488262-22488268
  hyper
  cervical vs. anorectal
gcgccc

SEQ ID NO: 457426 - DNA, 118 bp, Homo sapiens; identical to SEQ ID NO: 347221
  chr12:22488705-22488823
  hyper
  cervical vs. head_and_neck

SEQ ID NO: 457427 - DNA, 23 bp, Homo sapiens
  chr12:25102288-25102311
  hyper
  cervical vs. bladder_and_urothelial
ccgtgtaacatttatatggagac

SEQ ID NO: 457428 - DNA, 77 bp, Homo sapiens; identical to SEQ ID NO: 452819
  chr12:40618264-40618341
  hyper
  cervical vs. lung,sarcoma

SEQ ID NO: 457429 - DNA, 35 bp, Homo sapiens; identical to SEQ ID NO: 351336
  chr12:40619048-40619083
  hyper
  cervical vs. lung,sarcoma

SEQ ID NO: 457430 - DNA, 293 bp, Homo sapiens; identical to SEQ ID NO: 452821
  chr12:45270086-45270379
  hyper
  cervical vs. head_and_neck,bladder_and_urothelial

SEQ ID NO: 457431 - DNA, 293 bp, Homo sapiens; identical to SEQ ID NO: 452821
  chr12:45270086-45270379
  hyper
  cervical vs. head_and_neck,breast,lung,sarcoma,uterine

SEQ ID NO: 457432 - DNA, 239 bp, Homo sapiens; identical to SEQ ID NO: 334503
  chr12:48551355-48551594
  hyper
  cervical vs. lung,upper_gi,pancreas_gallbladder, bladder_and_urothelial,lymphoid_neoplasm,anorectal

SEQ ID NO: 457433 - DNA, 494 bp, Homo sapiens
  chr12:48576976-48577470
  hyper
  cervical vs. anorectal,bladder_and_urothelial, head_and_neck,lung,sarcoma
ctctgggatcattagcaacagcctctctaccctctccgctttcctgcgcatcgctggaggacagggaggcaggactcgactttagcgccatcctctgagaaaggaatgcgggctggaaaaatctttccagggcagtctcgctgggtctcataccccggctaggggagggacgatctctcccggacttggaggtttctgcagcagacggctctctcatacttccctattaaacattgcgaccacacgctctttccagccttggccgaagccactgtagcgtcccctctcctccccccaccccgctagtccagactccagagccccactgcagcttccagccatcctccctttttcttcgccacttcctggttaccatggagacacacgtcatttacgtgccgtgcgtcgccttggaaacagaggagcatccgcgacacccccgggagacccaccccagctgctgctgccacactcgcgggcgctgcccggtaatg

SEQ ID NO: 457434 - DNA, 409 bp, Homo sapiens
  chr12:48577061-48577470
  hyper
  cervical vs. anorectal,sarcoma
cgccatcctctgagaaaggaatgcgggctggaaaaatctttccagggcagtctcgctgggtctcataccccggctaggggagggacgatctctcccggacttggaggtttctgcagcagacggctctctcatacttccctattaaacattgcgaccacacgctctttccagccttggccgaagccactgtagcgtcccctctcctccccccaccccgctagtccagactccagagccccactgcagcttccagccatcctccctttttcttcgccacttcctggttaccatggagacacacgtcatttacgtgccgtgcgtcgccttggaaacagaggagcatccgcgacacccccgggagacccaccccagctgctgctgccacactcgcgggcgctgcccggtaatg

SEQ ID NO: 457435 - DNA, 3 bp, Homo sapiens
  chr12:52401537-52401540
  hyper
  cervical vs. anorectal,head_and_neck
tcc

SEQ ID NO: 457436 - DNA, 54 bp, Homo sapiens; identical to SEQ ID NO: 347231
  chr12:52401605-52401659
  hyper
  cervical vs. anorectal,head_and_neck

SEQ ID NO: 457437 - DNA, 125 bp, Homo sapiens; identical to SEQ ID NO: 351358
  chr12:52672849-52672974
  hyper
  cervical vs. upper_gi,pancreas_gallbladder, liver_bileduct

SEQ ID NO: 457438 - DNA, 156 bp, Homo sapiens; identical to SEQ ID NO: 334530
  chr12:53272458-53272614
  hyper
  cervical vs. pancreas_gallbladder

SEQ ID NO: 457439 - DNA, 725 bp, Homo sapiens; identical to SEQ ID NO: 351360
  chr12:53613775-53614500
  hyper
  cervical vs. colorectal,upper_gi

SEQ ID NO: 457440 - DNA, 194 bp, Homo sapiens; identical to SEQ ID NO: 345427
  chr12:54150983-54151177
  hyper
  cervical vs. pancreas_gallbladder

SEQ ID NO: 457441 - DNA, 156 bp, Homo sapiens; identical to SEQ ID NO: 454151
  chr12:54338511-54338667
  hyper
  cervical vs. multiple_myeloma,thyroid,myeloid_neoplasm

SEQ ID NO: 457442 - DNA, 432 bp, Homo sapiens; identical to SEQ ID NO: 334559
  chr12:54400009-54400441
  hyper
  cervical vs. bladder_and_urothelial

SEQ ID NO: 457443 - DNA, 191 bp, Homo sapiens
  chr12:58015267-58015458
  hyper
tcgaaaagggaggaaggacggagggtggaggggtagtatgtgacaagggagcaggaaaggaggttggagccacgtggctgaacgagggcgctgaggaggtgtaagccctggtggcactgggtagagagggcctcgctctgggggtcccgcgccggggcgcatgagccctggcacggggccctctgctcatc

SEQ ID NO: 457444 - DNA, 213 bp, Homo sapiens
  chr12:58015267-58015480
  hyper
  cervical vs. anorectal,lung
tcgaaaagggaggaaggacggagggtggaggggtagtatgtgacaagggagcaggaaaggaggttggagccacgtggctgaacgagggcgctgaggaggtgtaagccctggtggcactgggtagagagggcctcgctctgggggtcccgcgccggggcgcatgagccctggcacggggccctctgctcatcgcccctgccctcagacgctggc

SEQ ID NO: 457445 - DNA, 189 bp, Homo sapiens; identical to SEQ ID NO: 351381
  chr12:58015548-58015737
  hyper
  cervical vs. anorectal,lung

SEQ ID NO: 457446 - DNA, 184 bp, Homo sapiens; identical to SEQ ID NO: 345428
  chr12:63026256-63026440
  hyper
  cervical vs. pancreas_gallbladder

SEQ ID NO: 457447 - DNA, 278 bp, Homo sapiens
  chr12:68758776-68759054
  hyper
  cervical vs. bladder_and_urothelial
cgcctcagtattgtcgatttccacatccacagcctaacaacgtggtgcaatcgccctttgcgacgccgcagaccaacagacggatgctgccctgctgcagtttcacagcacaccgggtctttccgcttcagctggacagaggcccagccaggccgtagggaggattccgaaggtctctctgcagaggaccggcctctcagaccgagaaggctccacccaggcaggaaaggacactgtatgtggggcagtcggcctgggccccatggctcgtgtttgtt

SEQ ID NO: 457448 - DNA, 108 bp, Homo sapiens; identical to SEQ ID NO: 360150
  chr12:68759131-68759239
  hyper
  cervical vs. bladder_and_urothelial

SEQ ID NO: 457449 - DNA, 479 bp, Homo sapiens
  chr12:70760478-70760957
  hyper
  cervical vs. anorectal
cggggggagcacgccagccgccgagagtggggggcgatggcgaagctccgggtggcttacgagtacacggaagccgaggacaagagcatccggctcggcttgtttctcatcatctccggcgtcgtgtcgctcttcatcttcggcttctgctggctgagtcccgcgctgcaggatctgcaagccacggaggccaattgcacggtgctgtcggtgcagcagatcggcgaggtgttcgagtgcaccttcacctgtggcgccgactgcaggggcacctcgcagtacccctgcgtccaggtctacgtgaacaactctgagtccaactctagggcgctgctgcacagcgacgagcaccagctcctgaccaaccccaaggtaagaacgccccgcgcacccaggggctccccgcgagggaggtttggaggcagcgtcggtgttagactccgcgcggggagggttcggcgtgtgctcgcattgctagg

SEQ ID NO: 457450 - DNA, 82 bp, Homo sapiens; identical to SEQ ID NO: 351391
  chr12:70761129-70761211
  hyper
  cervical vs. anorectal

SEQ ID NO: 457451 - DNA, 119 bp, Homo sapiens; identical to SEQ ID NO: 360157
  chr12:77719613-77719732
  hyper
  cervical vs. anorectal,bladder_and_urothelial

SEQ ID NO: 457452 - DNA, 205 bp, Homo sapiens
  chr12:79257510-79257715
  hyper
  cervical vs. head_and_neck,lung
gagaggaagcagggagagaatctatgctttagtcgtcactgctctggcaaggggtcgagagagatgggggagggaggtggcaaaaaataaaaatgaaaaaataaaaaagcatctccaacaatgttgcacttgacccaagtgtacaaacttattggtcgctgcaatggaaactcccagtgcactctccacggcctggcagccgccg

SEQ ID NO: 457453 - DNA, 313 bp, Homo sapiens
  chr12:81331319-81331632
  hyper
  cervical vs. bladder_and_urothelial
cctgcctgagcgcgtcccatgtcccgttgggaattggcaggcggggaagggaggaggggagaggggacgcggtggcctggcgagcgagccgctcccttacctctgtccagggtgagcggctggaccactgtcaatgtcgccatgtctgccgtgggagccgaagtgacgctcggcttcagcatcagcaaccgctcgtagtgagaaaaaaaggaggagattgggggcgggggtggagagggaagacggaaaggagggggaggagggggaaggaaggaaggtggtggtggtggagaagaaagcttgggtgggttgg

SEQ ID NO: 457454 - DNA, 57 bp, Homo sapiens
  chr12:85305601-85305658
  hyper
  cervical vs. anorectal
cgccacactctcaaattccaggatgcgcagaaacacaggagccgtgatttctccagc

SEQ ID NO: 457455 - DNA, 255 bp, Homo sapiens
  chr12:85305980-85306235
  hyper
  cervical vs. anorectal
ggatgctgtgggcaatttccacgacgggaagaaaggatggcggcacgtttcaacccatgtgcttccccttacatgtgcagcctgtcgccccccaccctgattgtacagagatgcagagttagacggttgcccgcccagcccagcttctccctcccagggcttttgagctgccctccctcctcccaccccaggacgcagcgagtccttcccggcatccatccatcaattcgttcccggtgctggtgcccaggctcc

SEQ ID NO: 457456 - DNA, 105 bp, Homo sapiens
  chr12:94541793-94541898
  hyper
  cervical vs. anorectal
cgacccggggaaacccacaccctgtcacaggggcgccttggtccccggagtctccggctcggccatgtctcccgcgcgcctccccggggcctccctctcgccgct

SEQ ID NO: 457457 - DNA, 758 bp, Homo sapiens
  chr12:94541957-94542715
  hyper
  cervical vs. anorectal
aaccccttcgcaccctggatcctcgctccgcgcgcctggcgtatccccgacccggctgctgtcgtaaacaaaaccgggcgttggagcagcaccgcgggcggacgggcgcgggagcccgctccgtgcgccgttagcgcgccccgggagccccaggcgagccaagggggcgatggtggcggccgcggcggccgcggcgggcggctgagctttgttatgaatagatgaaagaggccacctacacagtaacccaaattacgagacctccctcctccctatctcaccgaatcaagaggggaggggagatgggcgtggagggagggcgggcgggcgggcaggaggcggagggcggaggaggaagagaggatgaggaagggggccagttgcatcccactttcacaatgggaaagtgaaacgcacaagcgcacccaacctctccagccctccccgcccgcctcgctcctctccgcccgtcccctcccttcccctccgcgcctccccgcgagcgccagcgctgcacacaggaactctccggcgaaggagggcgaggaggaaacggtgccggagcgcgcagggcttgctgccgccaccgccgctgcacaggctgccggagcgagcctgccgcgcgccgccctccccgctctccttcctgggcgagctgcggggatggggcggccgcgggagcccgagcgcgcgcaggaaccgccgccgccgccgcccgcgtctccgttgccgcgcgcctgagccgccgtcgccgccgc

SEQ ID NO: 457458 - DNA, 851 bp, Homo sapiens
  chr12:94542238-94543089
  hyper
  cervical vs. melanoma,sarcoma,ovary,multiple_myeloma, prostate,breast,non_cancer
cgaatcaagaggggaggggagatgggcgtggagggagggcgggcgggcgggcaggaggcggagggcggaggaggaagagaggatgaggaagggggccagttgcatcccactttcacaatgggaaagtgaaacgcacaagcgcacccaacctctccagccctccccgcccgcctcgctcctctccgcccgtcccctcccttcccctccgcgcctccccgcgagcgccagcgctgcacacaggaactctccggcgaaggagggcgaggaggaaacggtgccggagcgcgcagggcttgctgccgccaccgccgctgcacaggctgccggagcgagcctgccgcgcgccgccctccccgctctccttcctgggcgagctgcggggatggggcggccgcgggagcccgagcgcgcgcaggaaccgccgccgccgccgcccgcgtctccgttgccgcgcgcctgagccgccgtcgccgccgcgcgccctgcccgggggcggcccccccagccccatggaggtctcccggaggaaggcgccgccgcgccccccgcgccccgcagcgccactgcccctgctcgcctatctgctggcactggcggctcccggccggggcgcggacgagcccgtgtggcggtcggagcaagccatcggagccatcgcggcgagccaggaggacggcgtgtttgtggcgagcggcagctgcctggaccagctggactacagcctggagcacagcctctcgcgcctgtaccgggaccaagcgggcaactgcacagagccggtctcgctggcgccccccgcgcggccccggcccgggagcagcttcagcaagctgctgctgccctaccgcgag

SEQ ID NO: 457459 - DNA, 373 bp, Homo sapiens
  chr12:94542716-94543089
  hyper
  cervical vs. non_cancer,multiple_myeloma,melanoma, prostate
cgccctgcccgggggcggcccccccagccccatggaggtctcccggaggaaggcgccgccgcgccccccgcgccccgcagcgccactgcccctgctcgcctatctgctggcactggcggctcccggccggggcgcggacgagcccgtgtggcggtcggagcaagccatcggagccatcgcggcgagccaggaggacggcgtgtttgtggcgagcggcagctgcctggaccagctggactacagcctggagcacagcctctcgcgcctgtaccgggaccaagcgggcaactgcacagagccggtctcgctggcgccccccgcgcggccccggcccgggagcagcttcagcaagctgctgctgccctaccgcgag

SEQ ID NO: 457460 - DNA, 31 bp, Homo sapiens; identical to SEQ ID NO: 452825
  chr12:94543992-94544023
  hyper
  cervical vs. non_cancer,thyroid,sarcoma,multiple_myeloma, melanoma,prostate,ovary,lymphoid_neoplasm,breast

SEQ ID NO: 457461 - DNA, 86 bp, Homo sapiens; identical to SEQ ID NO: 345430
  chr12:94544052-94544138
  hyper
  cervical vs. non_cancer,thyroid,sarcoma,multiple_myeloma, melanoma,prostate,ovary,lymphoid_neoplasm,breast

SEQ ID NO: 457462 - DNA, 107 bp, Homo sapiens; identical to SEQ ID NO: 360176
  chr12:96183929-96184036
  hyper
  cervical vs. head_and_neck

SEQ ID NO: 457463 - DNA, 268 bp, Homo sapiens; identical to SEQ ID NO: 452828
  chr12:103351149-103351417
  hyper
  cervical vs. thyroid,prostate,non_cancer, multiple_myeloma,breast,ovary,uterine,melanoma,lung

SEQ ID NO: 457464 - DNA, 745 bp, Homo sapiens
  chr12:117536372-117537117
  hyper
  cervical vs. pancreas_gallbladder,upper_gi, bladder_and_urothelial
cgggccgatgcggggcgcgcagcctttgctggtcccgggagactcagcgaactcaggggaggacgctgggctccgggcaaagtgctctgcggccgctgcctcgctaagtctcccagccacccgcggggatgaggctgcctgaacccattttacagatgcgaggacgaaagcaggcgccgggcgccggctctcccgactaaggtcacccggccggggagcgtcggagacctgttcccacccaggtccgccgacttcaaaactttccgctctcgcgctcacgaatgcaaacgactctcaggtgtggggcgcgcgcgccagcgggggtgcctgagggacttgcccgcccggcctgaggcacctgccctgcgcttgggaagcctgggccccgctccctccccggtccgcagtcccccggccagggagttcccgggccagtccgaagctgagcggctgcggcactgagcatcgccgcggagctcctcgccgcagcccgcgaggtggccagcggggacccatttgaaagaggaggagactgaggcgcagagagggcccgccactggcccaaggtcacacagcgcggcggcgggccggggtccccaacagtggccgttcggaggtcccgccccggtccccgcgccgccccccgcgggtactcacagccggtcttgccctcgagctcccgcacctcctcagacgcggagtgggcagcgcccatggtgcccgcggcgggggccccggggcgcgc

SEQ ID NO: 457465 - DNA, 752 bp, Homo sapiens; identical to SEQ ID NO: 452831
  chr12:117536636-117537388
  hyper
  cervical vs. pancreas_gallbladder,bladder_and_urothelial, upper_gi,uterine

SEQ ID NO: 457466 - DNA, 435 bp, Homo sapiens; identical to SEQ ID NO: 334695
  chr12:125815555-125815990
  hyper
  cervical vs. pancreas_gallbladder,upper_gi,lung, bladder_and_urothelial,colorectal,ovary,liver_bileduct,uterine, melanoma,multiple_myeloma,sarcoma

SEQ ID NO: 457467 - DNA, 147 bp, Homo sapiens
  chr12:126018005-126018152
  hyper
  cervical vs. liver_bileduct,lung,colorectal
cgagggaatgttcctaaacgcttgttttccctttgcatagctgattgcagagcccagcaagtctttctctaaatggctttactttgacaaggggtcgcgatggcattttgattggcatccgcctctcctccggggaaggacctcgtg

SEQ ID NO: 457468 - DNA, 33 bp, Homo sapiens; identical to SEQ ID NO: 360237
  chr12:126018265-126018298
  hyper
  cervical vs. liver_bileduct,lung,colorectal

SEQ ID NO: 457469 - DNA, 132 bp, Homo sapiens
  chr12:128850403-128850535
  hyper
  cervical vs. bladder_and_urothelial
cgttgattgtgtgccgaggagccctccccgggaaggctgtgatttatacgcgcaggcttgtcacggggtgaaaggaagggccactttttcattttgatccaatgttaggtttgaaagccacccactgctgta

SEQ ID NO: 457470 - DNA, 143 bp, Homo sapiens; identical to SEQ ID NO: 360255
  chr13:22178308-22178451
  hyper
  cervical vs. head_and_neck

SEQ ID NO: 457471 - DNA, 71 bp, Homo sapiens
  chr13:27131483-27131554
  hyper
  cervical vs. anorectal
cgcaaactcaaaggtactgtaatgggcacctagcaatcagaggtgatacaagggtctcttggcccgaagta

SEQ ID NO: 457472 - DNA, 127 bp, Homo sapiens; identical to SEQ ID NO: 351453
  chr13:28491488-28491615
  hyper
  cervical vs. upper_gi,colorectal,multiple_myeloma, non_cancer,myeloid_neoplasm

SEQ ID NO: 457473 - DNA, 177 bp, Homo sapiens; identical to SEQ ID NO: 452839
  chr13:28491617-28491794
  hyper
  cervical vs. upper_gi,colorectal,multiple_myeloma, non_cancer,myeloid_neoplasm

SEQ ID NO: 457474 - DNA, 38 bp, Homo sapiens; identical to SEQ ID NO: 454161
  chr13:28527202-28527240
  hyper
  cervical vs. pancreas_gallbladder,upper_gi,colorectal

SEQ ID NO: 457475 - DNA, 462 bp, Homo sapiens; identical to SEQ ID NO: 454162
  chr13:28527384-28527846
  hyper
  cervical vs. pancreas_gallbladder,upper_gi,colorectal

SEQ ID NO: 457476 - DNA, 197 bp, Homo sapiens; identical to SEQ ID NO: 454163
  chr13:28527649-28527846
  hyper
  cervical vs. upper_gi,colorectal,pancreas_gallbladder, liver_bileduct

SEQ ID NO: 457477 - DNA, 58 bp, Homo sapiens
  chr13:28540416-28540474
  hyper
  cervical vs. colorectal
cgcatttgaatggggctgcggccccgaccccgcgcctgctatgaaagtaaagggaact

SEQ ID NO: 457478 - DNA, 112 bp, Homo sapiens; identical to SEQ ID NO: 360268
  chr13:28541283-28541395
  hyper
  cervical vs. colorectal

SEQ ID NO: 457479 - DNA, 103 bp, Homo sapiens
  chr13:28542253-28542356
  hyper
  cervical vs. upper_gi
cgcagcaagtgccggaggacgcgattctgccggcgtccagcagtgctcacgccgacattccccggagcttcccgaaggtgtcccggggttgcgaatgaggagc

SEQ ID NO: 457480 - DNA, 259 bp, Homo sapiens
  chr13:28542395-28542654
  hyper
  cervical vs. upper_gi
gaatattcactcccaggctcagtaggtcagagaagccccgacgggccagaggcccccgaatttgtctccgggccgtgcccctcctggcgccgagctcccagacagcccgggacgcccctgtgcgcactggacgcgcgacgcgcagcagccactggctcgacccgcgccttcccaagcaccctccgaaggggcgcagcctctgcttaccttggctgccgagggactgctgcgccggcttccgcatccactcgcacaggtt

SEQ ID NO: 457481 - DNA, 201 bp, Homo sapiens; identical to SEQ ID NO: 452842
  chr13:29292491-29292692
  hyper
  cervical vs. ovary,lung,colorectal,uterine, lymphoid_neoplasm,non_cancer,multiple_myeloma,thyroid,breast, renal,pancreas_gallbladder,sarcoma,upper_gi

SEQ ID NO: 457482 - DNA, 242 bp, Homo sapiens; identical to SEQ ID NO: 345442
  chr13:29293342-29293584
  hyper
  cervical vs. ovary,lung,multiple_myeloma,colorectal, lymphoid_neoplasm,uterine,renal,non_cancer,breast, pancreas_gallbladder,thyroid,sarcoma,upper_gi,myeloid_neoplasm

SEQ ID NO: 457483 - DNA, 98 bp, Homo sapiens; identical to SEQ ID NO: 452844
  chr13:29393559-29393657
  hyper
  cervical vs. lung,ovary,breast

SEQ ID NO: 457484 - DNA, 277 bp, Homo sapiens
  chr13:35516217-35516494
  hyper
  cervical vs. lung
cgccccgcctctgccagcttgccccagtgtctggcagcagtccccatgcacctgctcacctgtctatccgttcggggtggttgggggagggacgaggggtgtcggggtgggtgggtgggaagagaaggagggcagggcaaaagagggggtgcaccgagggctccgcccccccggaggctgtgcgcaggcgcagtggctgctaccgcaggcagggggcggcaacatggcggagtgagcggcggcgtcggggcttcacaacaacagtggtggccgtagc

SEQ ID NO: 457485 - DNA, 470 bp, Homo sapiens
  chr13:35516535-35517005
  hyper
  cervical vs. lung
cttcagcaccggccagcgtcgtggccagctgctcgcgtcctcgggcttctcggagcggctgcagcatctccgcggggggcgggccgggccggacagaccgggagagggagagagcagaggcagcggcggcggcagcggcagcggcagcggcacacctgctgggcgggcacagccgcttgcccggcagcggttagcggtaccgccaccgccgagaataagcctgcggatcccccgccgcctccgcgggggagagcgccggagcgggccgggctgaggcgcaggcggggagcgggcccggcgccgcggcgctggtggatgctggggctccgaggcgacggccggggggcgggggccgaggcaggtataacggtaccggcggcggcagcgccgctgctcttcccttctcctcaggaggggggccaatggctagcgagaagccgggcccgggcccggggctcgagcctcagccc

SEQ ID NO: 457486 - DNA, 63 bp, Homo sapiens
  chr13:35517052-35517115
  hyper
  cervical vs. lung
cggtggtggcggcaccgggggcagcgggatgggggagctaaggggggcgtccggctccggctc

SEQ ID NO: 457487 - DNA, 2 bp, Homo sapiens
  chr13:38443221-38443223
  hyper
  cervical vs. bladder_and_urothelial
cg

SEQ ID NO: 457488 - DNA, 118 bp, Homo sapiens; identical to SEQ ID NO: 289679
  chr13:38443934-38444052
  hyper
  cervical vs. bladder_and_urothelial

SEQ ID NO: 457489 - DNA, 8 bp, Homo sapiens
  chr13:38444054-38444062
  hyper
  cervical vs. bladder_and_urothelial
ctgacagc

SEQ ID NO: 457490 - DNA, 200 bp, Homo sapiens
  chr13:45492040-45492240
  hyper
cgccagtctaaaatttcggcgttcccacaccgggagtcgaacccgggccgcctgggtgaaaaccaggaatcctaaccgctagaccatgtgggagacggcaatagcgactccaagcctagacaaattgagtcttctcggtcggcttccgcccactccatcgcgttcatccgtaggcgtcaaacctgctcctgcgcctgcgc

SEQ ID NO: 457491 - DNA, 546 bp, Homo sapiens; identical to SEQ ID NO: 360292
  chr13:45492271-45492817
  hyper

SEQ ID NO: 457492 - DNA, 65 bp, Homo sapiens
  chr13:52980451-52980516
  hyper
  cervical vs. head_and_neck
aggaaacaggcaggaaacgcgcggccagccaaggtcctgcgggagggggtgcggccccggcagac

SEQ ID NO: 457493 - DNA, 141 bp, Homo sapiens; identical to SEQ ID NO: 360306
  chr13:60738352-60738493
  hyper
  cervical vs. upper_gi,head_and_neck,lung

SEQ ID NO: 457494 - DNA, 155 bp, Homo sapiens; identical to SEQ ID NO: 452848
  chr13:67804074-67804229
  hyper
  cervical vs. lung,head_and_neck,melanoma

SEQ ID NO: 457495 - DNA, 196 bp, Homo sapiens; identical to SEQ ID NO: 351482
  chr13:67805438-67805634
  hyper
  cervical vs. lung

SEQ ID NO: 457496 - DNA, 34 bp, Homo sapiens
  chr13:79160914-79160948
  hyper
  cervical vs. anorectal
cgaaaagccccagacagccactgcagtgccaagt

SEQ ID NO: 457497 - DNA, 65 bp, Homo sapiens; identical to SEQ ID NO: 360319
  chr13:79161096-79161161
  hyper
  cervical vs. anorectal

SEQ ID NO: 457498 - DNA, 6 bp, Homo sapiens
  chr13:92050674-92050680
  hyper
  cervical vs. bladder_and_urothelial,sarcoma,lung,uterine
cggact

SEQ ID NO: 457499 - DNA, 162 bp, Homo sapiens; identical to SEQ ID NO: 452854
  chr13:92050814-92050976
  hyper
  cervical vs. bladder_and_urothelial,sarcoma,lung,uterine

SEQ ID NO: 457500 - DNA, 3 bp, Homo sapiens
  chr13:107570099-107570102
  hyper
  cervical vs. head_and_neck
cgg

SEQ ID NO: 457501 - DNA, 207 bp, Homo sapiens
  chr13:108518148-108518355
  hyper
  cervical vs. liver_bileduct,melanoma, bladder_and_urothelial
cgacgcactgcctgcaagtggtcatctcgccgccttccttgagcaccacatccagactgcagttcaaagtgttgggactggacaaccccgagaacaactcccaaagtgtgtaggaattacaaaacgaaaggtaaaaatccgacaagttccagagcggagtgggatgcttgctcctcacctcctgcccgtcccccccggccgcccccc

SEQ ID NO: 457502 - DNA, 1 bp, Homo sapiens
  chr13:108518657-108518658
  hyper
  cervical vs. liver_bileduct,melanoma, bladder_and_urothelial
c

SEQ ID NO: 457503 - DNA, 68 bp, Homo sapiens; identical to SEQ ID NO: 452856
  chr13:108520309-108520377
  hyper
  cervical vs. lung

SEQ ID NO: 457504 - DNA, 30 bp, Homo sapiens
  chr13:108520915-108520945
  hyper
  cervical vs. lung
cgggagcagcaggtggcgtgggtgccagac

SEQ ID NO: 457505 - DNA, 33 bp, Homo sapiens
  chr13:108520947-108520980
  hyper
  cervical vs. lung
tgccggtgcgcaccgagtgcagcgctgccccgg

SEQ ID NO: 457506 - DNA, 269 bp, Homo sapiens
  chr13:111766945-111767214
  hyper
  cervical vs. head_and_neck,lung,ovary
acagcccagatcttcggcgtccccgagacgcagccaggcgcccggcccggcccggcccggccctctgcacagccccacttcaggccacgccgtttccttgaccttcccccggcagggtctgaagcgtcaccgtccgtctagagcagagtcgcgcaggcccctgccctgccggtgaggtcggcgccgcgctccggagagtcggttcctcccgattcagacccatatggcttcagatggaaccatcatttctgttccgtcatgaccggctt

SEQ ID NO: 457507 - DNA, 34 bp, Homo sapiens
  chr13:111768508-111768542
  hyper
tttaaagaggcacgcatctgtagctgagggctgc

SEQ ID NO: 457508 - DNA, 352 bp, Homo sapiens
  chr13:112760444-112760796
  hyper
  cervical vs. bladder_and_urothelial,multiple_myeloma
agctgccctggctggtgattggaggtttaacgtccggaattcaggcgcttctgcagctcagatttgccggccaaggggcctcagttgcaacttttcaaaatggtgtttctggaaaataacaaattcagactcaactggtgacagcttttggctatagagaatgaaactgcttccctttggcggtggaactcttaaacttcgaagagtgaaagaatacaatgaaataaaatgccataagatcactggatttttcagaaaaaggaagaccccaaattactcccaaaatgaggctttgtaaattcttgttaaaaatctttaaatctcgaatttccccctacaacatctgatgagt

SEQ ID NO: 457509 - DNA, 247 bp, Homo sapiens; identical to SEQ ID NO: 452857
  chr14:21098618-21098865
  hyper
  cervical vs. upper_gi,ovary,uterine

SEQ ID NO: 457510 - DNA, 196 bp, Homo sapiens; identical to SEQ ID NO: 351514
  chr14:21099147-21099343
  hyper
  cervical vs. upper_gi,ovary,uterine

SEQ ID NO: 457511 - DNA, 686 bp, Homo sapiens; identical to SEQ ID NO: 334837
  chr14:21099793-21100479
  hyper
  cervical vs. upper_gi,renal,uterine, bladder_and_urothelial,breast,colorectal

SEQ ID NO: 457512 - DNA, 113 bp, Homo sapiens; identical to SEQ ID NO: 345453
  chr14:21101056-21101169
  hyper
  cervical vs. melanoma,upper_gi,colorectal,uterine, non_cancer,prostate,thyroid,ovary,myeloid_neoplasm, multiple_myeloma,renal,breast

SEQ ID NO: 457513 - DNA, 39 bp, Homo sapiens; identical to SEQ ID NO: 452862
  chr14:23355352-23355391
  hyper
  cervical vs. bladder_and_urothelial

SEQ ID NO: 457514 - DNA, 53 bp, Homo sapiens; identical to SEQ ID NO: 351522
  chr14:23355484-23355537
  hyper
  cervical vs. bladder_and_urothelial

SEQ ID NO: 457515 - DNA, 79 bp, Homo sapiens; identical to SEQ ID NO: 452864
  chr14:27067019-27067098
  hyper
  cervical vs. lung

SEQ ID NO: 457516 - DNA, 219 bp, Homo sapiens; identical to SEQ ID NO: 452865
  chr14:27067386-27067605
  hyper
  cervical vs. lung

SEQ ID NO: 457517 - DNA, 205 bp, Homo sapiens; identical to SEQ ID NO: 360381
  chr14:27067699-27067904
  hyper
  cervical vs. lung

SEQ ID NO: 457518 - DNA, 266 bp, Homo sapiens
  chr14:29225768-29226034
  hyper
  cervical vs. bladder_and_urothelial
acactaaaatcaaaaagactcctggtgcttgcgagtacaaccccaaattctctcgcacactgcccaagtttcttgaaactcggaggctcagctcagtgtaaaaacatgggggttctcctgagtcggtttccctgaccacagggggacccctgcaaacacggcctcctctttaatacctttgtaactcagttcttcaagcaacccacctaggagaataaaaggacccactgagctccaataactgagtagatgattaaataaagccg

SEQ ID NO: 457519 - DNA, 203 bp, Homo sapiens; identical to SEQ ID NO: 454173
  chr14:37135434-37135637
  hyper
  cervical vs. head_and_neck

SEQ ID NO: 457520 - DNA, 10 bp, Homo sapiens
  chr14:37135775-37135785
  hyper
  cervical vs. head_and_neck
agccctggag

SEQ ID NO: 457521 - DNA, 22 bp, Homo sapiens
  chr14:37136618-37136640
  hyper
  cervical vs. head_and_neck
agttcaaaactctcaaaaaacc

SEQ ID NO: 457522 - DNA, 138 bp, Homo sapiens; identical to SEQ ID NO: 452871
  chr14:42076491-42076629
  hyper
  cervical vs. sarcoma

SEQ ID NO: 457523 - DNA, 52 bp, Homo sapiens
  chr14:42077719-42077771
  hyper
  cervical vs. sarcoma
aggcagaaagtcttcctacgaccgtcttttcccttagaggcaccaggtaaca

SEQ ID NO: 457524 - DNA, 224 bp, Homo sapiens
  chr14:51562012-51562236
  hyper
  cervical vs. bladder_and_urothelial
atagggcagtcttcgctcgcggctgcaagatctctgaagggggccggcgtgcggaggctaggggaccgggaaggaggagttaggcgggatgattcatcctcgcccggcttacttccgacctccggtgcagtctcccaggagctgggggcgtgagaaacccctccccgcagcgagtgggctgccggagggggctggggcttctcgccagcgtttgcgtttggctc

SEQ ID NO: 457525 - DNA, 260 bp, Homo sapiens; identical to SEQ ID NO: 334898
  chr14:52327346-52327606
  hyper
  cervical vs. head_and_neck,lymphoid_neoplasm,anorectal, bladder_and_urothelial

SEQ ID NO: 457526 - DNA, 315 bp, Homo sapiens; identical to SEQ ID NO: 452872
  chr14:52781114-52781429
  hyper
  cervical vs. upper_gi

SEQ ID NO: 457527 - DNA, 24 bp, Homo sapiens
  chr14:52781405-52781429
  hyper
  cervical vs. upper_gi,myeloid_neoplasm
cgcgccgctggcggggggacgtgg

SEQ ID NO: 457528 - DNA, 27 bp, Homo sapiens
  chr14:52781982-52782009
  hyper
  cervical vs. upper_gi,myeloid_neoplasm
cagtggccggggcggccccggggcccg

SEQ ID NO: 457529 - DNA, 80 bp, Homo sapiens; identical to SEQ ID NO: 452875
  chr14:52782046-52782126
  hyper
  cervical vs. upper_gi,myeloid_neoplasm

SEQ ID NO: 457530 - DNA, 17 bp, Homo sapiens
  chr14:52782173-52782190
  hyper
  cervical vs. upper_gi,myeloid_neoplasm
cctccaccctttccacc

SEQ ID NO: 457531 - DNA, 173 bp, Homo sapiens; identical to SEQ ID NO: 351562
  chr14:60043607-60043780
  hyper
  cervical vs. colorectal,myeloid_neoplasm

SEQ ID NO: 457532 - DNA, 80 bp, Homo sapiens; identical to SEQ ID NO: 452877
  chr14:60097114-60097194
  hyper
  cervical vs. breast,myeloid_neoplasm,melanoma,prostate, multiple_myeloma,renal,thyroid,colorectal,non_cancer,uterine, bladder_and_urothelial

SEQ ID NO: 457533 - DNA, 637 bp, Homo sapiens; identical to SEQ ID NO: 360447
  chr14:60337053-60337690
  hyper
  cervical vs. breast,ovary

SEQ ID NO: 457534 - DNA, 45 bp, Homo sapiens; identical to SEQ ID NO: 452878
  chr14:60385935-60385980
  hyper
  cervical vs. myeloid_neoplasm,thyroid

SEQ ID NO: 457535 - DNA, 7 bp, Homo sapiens
  chr14:60386737-60386744
  hyper
  cervical vs. myeloid_neoplasm,thyroid
caaaccc

SEQ ID NO: 457536 - DNA, 114 bp, Homo sapiens; identical to SEQ ID NO: 347307
  chr14:62584399-62584513
  hyper
  cervical vs. thyroid,non_cancer,renal,myeloid_neoplasm, multiple_myeloma,prostate

SEQ ID NO: 457537 - DNA, 9 bp, Homo sapiens
  chr14:70654358-70654367
  hyper
  cervical vs. multiple_myeloma,myeloid_neoplasm,thyroid, non_cancer,sarcoma
cgcgcgcgc

SEQ ID NO: 457538 - DNA, 56 bp, Homo sapiens
  chr14:73358909-73358965
  hyper
  cervical vs. sarcoma,ovary
cggttatgtgatttcggctggaaatggggaaactgaaaatcagttgtgggttcggt

SEQ ID NO: 457539 - DNA, 255 bp, Homo sapiens
  chr14:73359040-73359295
  hyper
  cervical vs. sarcoma,ovary
ccataaaacattttctttcttgggtgaaacgctgtggcgttcaagcgcagtgtatccgagcttccgagccagaactgaagccaggagctcctatctgatcagcctcagcttccaacgtcctcttaacggcagctttcatataaatatatttgaaacctggggccttcctacccctttccctatttctgatgggcgacgagctggcgcaaacacgtccgattctccctgtgcattcctttgcgttaggaaccccct

SEQ ID NO: 457540 - DNA, 139 bp, Homo sapiens; identical to SEQ ID NO: 360482
  chr14:73359490-73359629
  hyper
  cervical vs. sarcoma,ovary

SEQ ID NO: 457541 - DNA, 464 bp, Homo sapiens; identical to SEQ ID NO: 334962
  chr14:73359779-73360243
  hyper
  cervical vs. colorectal,ovary,pancreas_gallbladder, uterine,renal,head_and_neck

SEQ ID NO: 457542 - DNA, 227 bp, Homo sapiens; identical to SEQ ID NO: 334963
  chr14:73360763-73360990
  hyper
  cervical vs. upper_gi,head_and_neck,pancreas_gallbladder, lung,liver_bileduct,colorectal,bladder_and_urothelial,anorectal

SEQ ID NO: 457543 - DNA, 198 bp, Homo sapiens
  chr14:88789765-88789963
  hyper
  cervical vs. anorectal
cgaccctccccgcggcgcgccccagacgccgcgccccggcaagagggagcagggcgagcagcggaccgaggctcccagctgggaaggcgcgctgagcccccggcacccggctcggggcagcgggaggcggtcgcggacttgcccgcggggcggcgggaggcggtgggcggtggcggggaagccgcggaggggcgggga

SEQ ID NO: 457544 - DNA, 406 bp, Homo sapiens; identical to SEQ ID NO: 360508
  chr14:89493490-89493896
  hyper
  cervical vs. bladder_and_urothelial

SEQ ID NO: 457545 - DNA, 486 bp, Homo sapiens
  chr14:90085312-90085798
  hyper
cgtgacaatgctaaacccgagcagattaggaggcaggaaatgagccccattttcgttaccttcgatcgcctgcccccccgctgcttctcgcggccgcattggggggctgcggcgacgctggactcgcgggtggccccgccgccgggtcgcgccgtctcccggccgagctgcagcagatcgcggccggaaccccggctcctgcgcccggcgcccgcccggggtcggcggcgcggctcccaccccggcctggagccctgctgggtcctagtgcgcgccgcgcgcccgcctcgcggcccggtctgcagcccgcaccgagggcaggcagctcccagcgccgcgagtctccgggcgaggccgccaccctctcggtcccttgcgaaagcggccgcggggtgtgcggatgaactggagcttaatgtcaaatcctggcacaagatgttcaaaagaaagacattggctccaactgaactcttagaaggcagatgc

SEQ ID NO: 457546 - DNA, 144 bp, Homo sapiens; identical to SEQ ID NO: 360512
  chr14:90527180-90527324
  hyper
  cervical vs. head_and_neck

SEQ ID NO: 457547 - DNA, 227 bp, Homo sapiens
  chr14:90527931-90528158
  hyper
  cervical vs. anorectal
ggcacctacaaagccagcagactgacacccgtgtcctagccgtcggcggcctgcgaagcgatagtcaaaggaaccaggacccaggaccccggcgctctgcttacccgcagacctccggaccgcgccccccccccgccgccccgccccgccccgccccgccccgcgaccgtctctttgcgggaaactcgagttggctcgagcttgccctgaagacgcgccacgccccc

SEQ ID NO: 457548 - DNA, 213 bp, Homo sapiens
  chr14:103010929-103011142
  hyper
  cervical vs. head_and_neck
cgctgcccggaacgccccgcgggagaacatctgcgccaggggccgggggccgggggccgcggcgggcgaaatccgagaggcccgggctcctcctgctgcgcggccggggaggggggcgcctgccgggtcggggctggaggacctgcgcgcggccccgggaggccccgcctcgccttccagtctgtgaaatggggcgacggcctgggcgtggcg

SEQ ID NO: 457549 - DNA, 99 bp, Homo sapiens; identical to SEQ ID NO: 351625
  chr14:103011360-103011459
  hyper
  cervical vs. head_and_neck

SEQ ID NO: 457550 - DNA, 78 bp, Homo sapiens; identical to SEQ ID NO: 345463
  chr14:105512395-105512473
  hyper
  cervical vs. head_and_neck,anorectal,lymphoid_neoplasm, colorectal

SEQ ID NO: 457551 - DNA, 409 bp, Homo sapiens; identical to SEQ ID NO: 335057
  chr15:26178877-26179286
  hyper
  cervical vs. liver_bileduct,bladder_and_urothelial, anorectal,upper_gi

SEQ ID NO: 457552 - DNA, 145 bp, Homo sapiens; identical to SEQ ID NO: 335062
  chr15:29432142-29432287
  hyper
  cervical vs. liver_bileduct,upper_gi

SEQ ID NO: 457553 - DNA, 61 bp, Homo sapiens; identical to SEQ ID NO: 452890
  chr15:29561185-29561246
  hyper
  cervical vs. lung,liver_bileduct,pancreas_gallbladder, bladder_and_urothelial,ovary,melanoma,breast

SEQ ID NO: 457554 - DNA, 700 bp, Homo sapiens; identical to SEQ ID NO: 347323
  chr15:29561316-29562016
  hyper
  cervical vs. lung,liver_bileduct,pancreas_gallbladder, bladder_and_urothelial,ovary,melanoma,breast

SEQ ID NO: 457555 - DNA, 838 bp, Homo sapiens
  chr15:29561523-29562361
  hyper
  cervical vs. pancreas_gallbladder,liver_bileduct,lung
cgtttgaagaggtcggggaagatgtccttgtagtccccgatgacgtgcttcagtatgtcggcccgcttgatcggaatcttcttctggtctttaatcagcaagaactgcaccagctcggacactttcagctccagctgcttctggctcctgggccccacggcgggggcggcctgggcccggcgggcgccctgaggcgaggggccctgcgacccctgcgagccgcccggcccgcgggacgtgctcggggcctcctcggcaaagccgtctctgagaacccgggcgtcttccccggcccgcgaagccccggggtttccgctatggctccagtctctgtccctctcggcctggccgccagagcggccccggttcctcggtttttgcaacatgtctccggcggcaggtgccggcgcacactccggtaggcaagcagccgcggcggggattgcgggtcggcgacccgctaacgccggtgcctggaggcgcgcgcagtgtcggctgagactgcgtgctgcgtcatgaagcctgcgccttgcgtcagggcggctgggcggtgcgcctgcgcggctgcggcgggtaccaaaaggaacagcgttttccgtgcagccctgcaggtccgggcgatgatttttagtatagtgaagtgttgttaccaaaccatgcaaacagagagcgagaaccgaaactcctaaacaagtgtgtcgctaaattcagaccacacaggctcaggcaagttttacagacagtattatgagtttctaaatcgggagcatttgtaaacggaaagaattcagaggatgaacgtgtgagaaaaaaaaaaggtgaagaggaagggccgacc

SEQ ID NO: 457556 - DNA, 507 bp, Homo sapiens; identical to SEQ ID NO: 351653
  chr15:31774606-31775113
  hyper
  cervical vs. pancreas_gallbladder

SEQ ID NO: 457557 - DNA, 155 bp, Homo sapiens; identical to SEQ ID NO: 351656
  chr15:32322773-32322928
  hyper
  cervical vs. head_and_neck

SEQ ID NO: 457558 - DNA, 124 bp, Homo sapiens; identical to SEQ ID NO: 345470
  chr15:45722474-45722598
  hyper
  cervical vs. pancreas_gallbladder

SEQ ID NO: 457559 - DNA, 338 bp, Homo sapiens
  chr15:45722600-45722938
  hyper
  cervical vs. pancreas_gallbladder
cagggggcgccagcgcccgcgttcgggcgcttcacgtcagccgcagaatgtcctgcagggggcgcccgggagtcgcgtgcccaacggggaaagcgagtcaggtccctcgcgctccccgccccacgcgcgtgaccagagcgcgctggcccggcccacccggggcggttgtggtcgctatatataaggtggggaggccgccggcccgttcggttccgggcgttaccatcgtccgtgcgcaccgcccggcgtccaggtgagtctcccatctgcagagacgcggacgcgccggcccgcagttggcctgcggagcgcggtggacggtttggcgcccaccaggc

SEQ ID NO: 457560 - DNA, 119 bp, Homo sapiens; identical to SEQ ID NO: 452893
  chr15:48469946-48470065
  hyper
  cervical vs. lung,renal,breast,ovary,melanoma,prostate, uterine,sarcoma,bladder_and_urothelial,myeloid_neoplasm, multiple_myeloma,non_cancer

SEQ ID NO: 457561 - DNA, 53 bp, Homo sapiens; identical to SEQ ID NO: 452894
  chr15:48470094-48470147
  hyper
  cervical vs. lung,renal,breast,ovary,melanoma,prostate, uterine,sarcoma,bladder_and_urothelial,myeloid_neoplasm, multiple_myeloma,non_cancer

SEQ ID NO: 457562 - DNA, 159 bp, Homo sapiens; identical to SEQ ID NO: 452895
  chr15:48470215-48470374
  hyper
  cervical vs. lung,renal,breast,ovary,melanoma,prostate, uterine,sarcoma,bladder_and_urothelial,myeloid_neoplasm, multiple_myeloma,non_cancer

SEQ ID NO: 457563 - DNA, 1 bp, Homo sapiens
  chr15:48470626-48470627
  hyper
  cervical vs. lung,renal,breast,ovary,melanoma,prostate, uterine,sarcoma,bladder_and_urothelial,myeloid_neoplasm, multiple_myeloma,non_cancer
c

SEQ ID NO: 457564 - DNA, 78 bp, Homo sapiens; identical to SEQ ID NO: 452897
  chr15:48936649-48936727
  hyper
  cervical vs. head_and_neck,sarcoma

SEQ ID NO: 457565 - DNA, 228 bp, Homo sapiens
  chr15:53078992-53079220
  hyper
  cervical vs. liver_bileduct
gggggaggagggatattgaagtccagagcaagagcctccagggggcgggggtgggggatggggaccgagttttcccggaggggtagccttctccatttctatcttcttcccacattcccccgctccactctttggcttcagcgggcactgcctgggtaagaggccctgaagcctggctctggggtggtgtgggtgtgtgaaaaggcactaccttgggctctggagaga

SEQ ID NO: 457566 - DNA, 218 bp, Homo sapiens
  chr15:53080082-53080300
  hyper
  cervical vs. anorectal
ccagctgaactcagaaacacctggggcttggggtttcgggcaggagacctctgctcctagacttgggggtcatttacacactctcatccccaaacccccctcccgcacggggattcagacgaaaatcgcgaagaggaataataaaacaaaatgcaaagtcctcagggagtcggcagcggagtcggtcccaggacatggctattgctttgcagctctca

SEQ ID NO: 457567 - DNA, 147 bp, Homo sapiens; identical to SEQ ID NO: 360647
  chr15:53489675-53489822
  hyper
  cervical vs. bladder_and_urothelial,upper_gi

SEQ ID NO: 457568 - DNA, 206 bp, Homo sapiens; identical to SEQ ID NO: 335143
  chr15:65186319-65186525
  hyper
  cervical vs. head_and_neck

SEQ ID NO: 457569 - DNA, 61 bp, Homo sapiens
  chr15:79383268-79383329
  hyper
  cervical vs. sarcoma,prostate,uterine,multiple_myeloma, breast,lung,ovary
cccctccccagacacacacacacgcacacgcacacgcacacactcaaaccctgccctccct

SEQ ID NO: 457570 - DNA, 62 bp, Homo sapiens; identical to SEQ ID NO: 351730
  chr15:79384146-79384208
  hyper
  cervical vs. sarcoma,prostate,uterine,multiple_myeloma, breast,lung,ovary

SEQ ID NO: 457571 - DNA, 35 bp, Homo sapiens
  chr15:89942592-89942627
  hyper
  cervical vs. anorectal
cgggcccacgaccccaaatgaaacatctttcactc

SEQ ID NO: 457572 - DNA, 295 bp, Homo sapiens
  chr15:89949942-89950237
  hyper
  cervical vs. thyroid
atcataattattttatctataatttattctaaccccaaggttccaagaaaatctgtaatgaacgttaatatctacagcctcctggtcaatctgcatcgggcgagagagccgtcgggttcttcgcagtgggtgacttcaggtccctgtgccttgtttcctatcactctgaaagaattttctccccaaaggaaatccaacttgtttgaaacaggtttctcctctctgactttctgcactggagaaaaatctggatctgcttttcgaaaagattttttttttttaagaggcatccggg

SEQ ID NO: 457573 - DNA, 40 bp, Homo sapiens; identical to SEQ ID NO: 335222
  chr15:90016187-90016227
  hyper
  cervical vs. upper_gi,pancreas_gallbladder,colorectal

SEQ ID NO: 457574 - DNA, 17 bp, Homo sapiens
  chr15:91643799-91643816
  hyper
  cervical vs. anorectal,head_and_neck,ovary, bladder_and_urothelial
tgcgcttctttgaaagc

SEQ ID NO: 457575 - DNA, 202 bp, Homo sapiens; identical to SEQ ID NO: 335234
  chr15:96596605-96596807
  hyper
  cervical vs. head_and_neck

SEQ ID NO: 457576 - DNA, 547 bp, Homo sapiens; identical to SEQ ID NO: 335243
  chr15:100889946-100890493
  hyper
  cervical vs. head_and_neck

SEQ ID NO: 457577 - DNA, 497 bp, Homo sapiens; identical to SEQ ID NO: 335245
  chr15:101458286-101458783
  hyper
  cervical vs. head_and_neck,pancreas_gallbladder,lung, anorectal,bladder_and_urothelial,colorectal

SEQ ID NO: 457578 - DNA, 664 bp, Homo sapiens
  chr15:101459313-101459977
  hyper
  cervical vs. anorectal,colorectal,head_and_neck
gtgcccgaacctgaaggaggacccggtgccggaagggcccgcggaccccggcgtctcccggggcatcgagcgccatcgcccgcgttttacggccagggaaactgaggcggccgccgaggggacgcctcgcgacggttcctgggagagctggcggcggccttgctctgcgcgctcttcgcgccgccctccccgcccgcccgcctcaggattgaggaagtgcgtctgggcccggccccggcgcggggggcagacggcggtgggacggccaggccccggccccgccagtgtgtccgcccggccccgcgtcccggagcgcccgcacccggccccgccgccgcctcaggtaagcgccgctcctgccggcgccccccggcggcctggctgcctcccggccccgcccggggaacccagagcccgcgcccggcgcccgcggggagcctcggcctctgcctgcccgcgggcccctgcgctccgggcggccgcgtggtcgggcacggggggccgttgcgcaggggccgcggcccgaggggcgcggagggcgtgtggggcgaccccggtctcacgtccccgctgcctcccgccgcgcccggagcccagccagcctgtgggaggggagcgcgcggggcccgagcagggaaccccgaaaccccgtccgggcagggtc

SEQ ID NO: 457579 - DNA, 46 bp, Homo sapiens; identical to SEQ ID NO: 360767
  chr16:1383142-1383188
  hyper
  cervical vs. anorectal

SEQ ID NO: 457580 - DNA, 5 bp, Homo sapiens
  chr16:3220283-3220288
  hyper
  cervical vs. multiple_myeloma,thyroid,non_cancer,renal, sarcoma,myeloid_neoplasm,prostate
cggcc

SEQ ID NO: 457581 - DNA, 212 bp, Homo sapiens; identical to SEQ ID NO: 345485
  chr16:3222239-3222451
  hyper
  cervical vs. multiple_myeloma,non_cancer,thyroid,renal, myeloid_neoplasm,lymphoid_neoplasm

SEQ ID NO: 457582 - DNA, 18 bp, Homo sapiens
  chr16:3234164-3234182
  hyper
  cervical vs. thyroid,non_cancer
cgcacccaaagcgagaat

SEQ ID NO: 457583 - DNA, 50 bp, Homo sapiens; identical to SEQ ID NO: 452914
  chr16:3238043-3238093
  hyper
  cervical vs. multiple_myeloma

SEQ ID NO: 457584 - DNA, 49 bp, Homo sapiens; identical to SEQ ID NO: 452915
  chr16:4363872-4363921
  hyper
  cervical vs. colorectal,liver_bileduct, pancreas_gallbladder,upper_gi,uterine,renal

SEQ ID NO: 457585 - DNA, 158 bp, Homo sapiens; identical to SEQ ID NO: 345488
  chr16:4364080-4364238
  hyper
  cervical vs. colorectal,liver_bileduct, pancreas_gallbladder,upper_gi,uterine,renal

SEQ ID NO: 457586 - DNA, 1 bp, Homo sapiens
  chr16:4377508-4377509
  hyper
  cervical vs. multiple_myeloma,non_cancer,uterine, myeloid_neoplasm,thyroid
c

SEQ ID NO: 457587 - DNA, 342 bp, Homo sapiens
  chr16:4377552-4377894
  hyper
  cervical vs. multiple_myeloma,non_cancer,uterine, myeloid_neoplasm,thyroid
cggggactgcgggcggggggccgggtggctccgccagcgctgcagctgggggccgtctgctcgggctgcggtcgggcacacaatagcagccattgtctcggccagggtggcggggggcccgcccagcccaccctccgggtgacccccgccctgcggtgggtgggaagggcagggcccggtcccccgaagcccccgccgtcccggtggtccccgcggccgcccccgcgcgcttcctccctcgccgcagccgcttcctcccgctcgccccgctctaattagttccttttgcagctggaggagccgcgcagcggccggttccgcggccacccccaccccccaccg

SEQ ID NO: 457588 - DNA, 430 bp, Homo sapiens; identical to SEQ ID NO: 452918
  chr16:12897365-12897795
  hyper
  cervical vs. ovary

SEQ ID NO: 457589 - DNA, 165 bp, Homo sapiens; identical to SEQ ID NO: 455735
  chr16:56671950-56672115
  hyper
  cervical vs. multiple_myeloma,colorectal,upper_gi, myeloid_neoplasm

SEQ ID NO: 457590 - DNA, 205 bp, Homo sapiens
  chr16:77247511-77247716
  hyper
  cervical vs. lymphoid_neoplasm
taccaggcactgttctaagcactggattttaaacagcgcggtcagcgacggcctcacctaggaagtggtatctgagcggagaagcgaggtagagaagcgagggggtgagccctgtgggtgtctggggaaaggtgggcctggcagaagacatgcctcatgccaaggcgggaggtgaggctgcacttcgctgtgtttgaggagacgt

SEQ ID NO: 457591 - DNA, 49 bp, Homo sapiens; identical to SEQ ID NO: 452920
  chr16:77822069-77822118
  hyper
  cervical vs. sarcoma,renal

SEQ ID NO: 457592 - DNA, 68 bp, Homo sapiens
  chr16:80574541-80574609
  hyper
  cervical vs. bladder_and_urothelial,ovary,liver_bileduct, sarcoma
cggtactgtttcgtgcattttgtttggtgcattttgtccgtctccctggcacctggtgggtggtgaat

SEQ ID NO: 457593 - DNA, 72 bp, Homo sapiens; identical to SEQ ID NO: 345499
  chr16:80575052-80575124
  hyper
  cervical vs. bladder_and_urothelial,ovary,liver_bileduct, sarcoma

SEQ ID NO: 457594 - DNA, 31 bp, Homo sapiens
  chr16:80837324-80837355
  hyper
cgcagcgccccctttcgcccccagggagcac

SEQ ID NO: 457595 - DNA, 539 bp, Homo sapiens
  chr16:80837424-80837963
  hyper
gggggtgagggaggtggcccggggaccccggggagcggtttggcggttgtccccccgaacccccacccagcctcccccttcgcagccccccgggaccccgcctcgccccggccaggctccgctccgatcgcccgcccccctcctcccccgcgcccccggcccagccgggccgcgcaacccccgccccacacccccgccggccgcggcgcgcccccccgcattcccagcacgtccggcgccgacttttacctgtactttctgtactcgaggcggctcgtcgggcgagaaacacctccccgggaccgctacctcccccgccccggctccgcccggcttcctccttcccctccaaggccgcaaagtagatggagtaagagagtgtgtgtgcgagagaaagagaaagagggagcgggcgcgggcgccgcgggaggcggcgggcggcgggcggcgggcgggaggcgcgcccggcccccgccaccctccggccgccgccgccgccgccgcgggctcggcaactccggattgcgcccggccccggc

SEQ ID NO: 457596 - DNA, 772 bp, Homo sapiens; identical to SEQ ID NO: 335399
  chr16:85590112-85590884
  hyper
  cervical vs. upper_gi

SEQ ID NO: 457597 - DNA, 178 bp, Homo sapiens; identical to SEQ ID NO: 452923
  chr16:85932121-85932299
  hyper
  cervical vs. upper_gi

SEQ ID NO: 457598 - DNA, 7 bp, Homo sapiens
  chr17:1082878-1082885
  hyper
  cervical vs. lung,head_and_neck,anorectal, bladder_and_urothelial
cgatccc

SEQ ID NO: 457599 - DNA, 2 bp, Homo sapiens
  chr17:1083027-1083029
  hyper
  cervical vs. lung,head_and_neck,anorectal, bladder_and_urothelial
gc

SEQ ID NO: 457600 - DNA, 122 bp, Homo sapiens
  chr17:3599052-3599174
  hyper
  cervical vs. bladder_and_urothelial
cgggaaaaccgcgtgcacgcctgcgaattccaggaccctggagaaggacgcggcggctggcacccgccctgcccctcccccgccttcccaaaagtccgcggagaacttacacgaccaggtac

SEQ ID NO: 457601 - DNA, 392 bp, Homo sapiens
  chr17:3599244-3599636
  hyper
  cervical vs. bladder_and_urothelial
cggtcttgtagtcgaacagcgacaggcagagccccttgcagcccgcctgccccatggcgcgctctcagccgggcttgcggaccgcccggcccacgtgcgctcatggggagcactcggtccctcggtccctgcgcgcccggcgcccgcctcggcccgtctgcgcccgctcagctgcagcccggggtgtccggcagggctgcggggcgcgggggcgggtcggggcggccttttattgacgcggttgagaaagcctcggctgggagctgggcggcggcgagcaccggaacctcagaccgcgaccttgccgctacctcttcttcctcctcctcctcctcctcccctgacacagtgacacccctgcaacctactccccagccaccggtctgggagcg

SEQ ID NO: 457602 - DNA, 51 bp, Homo sapiens; identical to SEQ ID NO: 335484
  chr17:19912429-19912480
  hyper
  cervical vs. head_and_neck

SEQ ID NO: 457603 - DNA, 329 bp, Homo sapiens
  chr17:37782857-37783186
  hyper
  cervical vs. pancreas_gallbladder
cgacctcgcaggcctctctgaaactcccagtaccaggaccacgaaggggttaaagccagagtcctgcctccccgctgcccctctccccctccctccccctttatcctctctgctggactccatcaataatgcagcttcaagttctggggagaccgcagggggccccccagctggctccccaggccttggctctaactcccaccctcctcccagccccaggagaacacgattctccatgctcattggccagtttcccctaaaccctccctccgagcacccgggcgccagtcccaggcggaggggacgggctggggaccccaaagctggga

SEQ ID NO: 457604 - DNA, 85 bp, Homo sapiens
  chr17:40558083-40558168
  hyper
  cervical vs. colorectal,pancreas_gallbladder,upper_gi, lymphoid_neoplasm
cgggtcggagatggggttgcgtaataattgcacttgggctaaaatctctgtggtcgtccaaccctgtcctgatccctttccaccc

SEQ ID NO: 457605 - DNA, 47 bp, Homo sapiens; identical to SEQ ID NO: 345518
  chr17:40558226-40558273
  hyper
  cervical vs. colorectal,pancreas_gallbladder,upper_gi, lymphoid_neoplasm

SEQ ID NO: 457606 - DNA, 21 bp, Homo sapiens
  chr17:42091712-42091733
  hyper
  cervical vs. liver_bileduct,upper_gi,anorectal
cgaggcgctcaccttcagcca

SEQ ID NO: 457607 - DNA, 268 bp, Homo sapiens; identical to SEQ ID NO: 455775
  chr17:42091861-42092129
  hyper
  cervical vs. liver_bileduct,upper_gi,anorectal

SEQ ID NO: 457608 - DNA, 170 bp, Homo sapiens; identical to SEQ ID NO: 345520
  chr17:42092357-42092527
  hyper
  cervical vs. liver_bileduct,upper_gi,anorectal

SEQ ID NO: 457609 - DNA, 170 bp, Homo sapiens
  chr17:44928894-44929064
  hyper
  cervical vs. anorectal
cgccgcctgccccgccccacccgggtttaaagtcccgcgggcgggtggtggcggagctgcgagcttgagcggcgcgaggagatgctagagggcgcagcgccgccagcaccatgcgccccccgcccgcgctggccctggccgggctctgcctgctggcgctgcccgccgcc

SEQ ID NO: 457610 - DNA, 208 bp, Homo sapiens
  chr17:44929360-44929568
  hyper
  cervical vs. anorectal
gcgcacgcctcggaccctggccccgtccgccccggccccgcccgttcaggcgtcagtcccgctctctgatgccctctcgggatcctcacgccggtgccctgtctgccgccatcctggcctccggcgagccgtccttgcctcggactccttccccaccctccgccttcgccctgcggagcggagaccgagagggctgggtggatgggtg

SEQ ID NO: 457611 - DNA, 64 bp, Homo sapiens
  chr17:45330951-45331015
  hyper
  cervical vs. anorectal
cgctgacgacccggctggcaggcgggtcctcgtgggcgaggcgagggaggcggcgagagaggag

SEQ ID NO: 457612 - DNA, 120 bp, Homo sapiens
  chr17:45331313-45331433
  hyper
  cervical vs. anorectal
aggctccggctcggcagcgtcgcagctgccccaggatctgcgccccggtcaagttgcggacttggagccggcaaacgcggagggctggtcccgcgcgtctgcgctgggaatgcgcgtgtc

SEQ ID NO: 457613 - DNA, 90 bp, Homo sapiens; identical to SEQ ID NO: 345527
  chr17:45331675-45331765
  hyper
  cervical vs. anorectal

SEQ ID NO: 457614 - DNA, 172 bp, Homo sapiens
  chr17:46801836-46802008
  hyper
  cervical vs. prostate,non_cancer,renal,myeloid_neoplasm, multiple_myeloma
cgagatggctcgtaccgaacctccttgccttcttcctgggtctctcgggggctggaccaatacatctgccgatgccctggccgaatggcaggcgacatcgggtcctggacccccacacgcagctcagtacccacgaggccccaggccgctggaagcctgtagctccgcggac

SEQ ID NO: 457615 - DNA, 197 bp, Homo sapiens; identical to SEQ ID NO: 345532
  chr17:48619736-48619933
  hyper
  cervical vs. colorectal,lymphoid_neoplasm,melanoma, multiple_myeloma,pancreas_gallbladder,sarcoma

SEQ ID NO: 457616 - DNA, 528 bp, Homo sapiens; identical to SEQ ID NO: 351984
  chr17:49021815-49022343
  hyper
  cervical vs. liver_bileduct,pancreas_gallbladder

SEQ ID NO: 457617 - DNA, 235 bp, Homo sapiens
  chr17:54673684-54673919
  hyper
gactaagggccatggtttcggaggggtccgaatctgggtgaaaatcaccacctctggcatctgcttttgggaagagagtatgcctgtgctcgggcactttctccccttgaggggtggggaggagggagaaatcggaaccggaatctttgcgctttaagattagataggggcagaaggcacgtaacccattaaagggacgtgcaaaacatcactcccaccccaccccttaaaaagc

SEQ ID NO: 457618 - DNA, 281 bp, Homo sapiens; identical to SEQ ID NO: 361100
  chr17:54674073-54674354
  hyper

SEQ ID NO: 457619 - DNA, 216 bp, Homo sapiens
  chr17:56327007-56327223
  hyper
  cervical vs. anorectal
cttcggctggacgccggggaagacgcgcaacggcttccctctcccgctggtgagggcaggccgggccggggtgaaggatgggagccagaggggacgggatgcactacccaaacacgcagtgaaaggaggaggagggatcggtgggggcagcaggggtgcgcgatggagatctgcacagacccccaccttccgctagagggcagcagagctcggagc

SEQ ID NO: 457620 - DNA, 15 bp, Homo sapiens
  chr17:59532358-59532373
  hyper
  cervical vs. myeloid_neoplasm
actcctaggtttccg

SEQ ID NO: 457621 - DNA, 132 bp, Homo sapiens; identical to SEQ ID NO: 455793
  chr17:59532387-59532519
  hyper
  cervical vs. myeloid_neoplasm

SEQ ID NO: 457622 - DNA, 1 bp, Homo sapiens
  chr17:59532591-59532592
  hyper
  cervical vs. myeloid_neoplasm
c

SEQ ID NO: 457623 - DNA, 5 bp, Homo sapiens
  chr17:72855923-72855928
  hyper
  cervical vs. head_and_neck
cgtgg

SEQ ID NO: 457624 - DNA, 248 bp, Homo sapiens; identical to SEQ ID NO: 374259
  chr17:72856466-72856714
  hyper
  cervical vs. head_and_neck

SEQ ID NO: 457625 - DNA, 136 bp, Homo sapiens; identical to SEQ ID NO: 335681
  chr17:74620111-74620247
  hyper
  cervical vs. liver_bileduct,bladder_and_urothelial, anorectal,head_and_neck

SEQ ID NO: 457626 - DNA, 116 bp, Homo sapiens; identical to SEQ ID NO: 361194
  chr18:5896132-5896248
  hyper
  cervical vs. lung

SEQ ID NO: 457627 - DNA, 94 bp, Homo sapiens; identical to SEQ ID NO: 452939
  chr18:13823932-13824026
  hyper
  cervical vs. bladder_and_urothelial,colorectal, pancreas_gallbladder,uterine

SEQ ID NO: 457628 - DNA, 113 bp, Homo sapiens; identical to SEQ ID NO: 452940
  chr18:13824102-13824215
  hyper
  cervical vs. bladder_and_urothelial,colorectal, pancreas_gallbladder,uterine

SEQ ID NO: 457629 - DNA, 15 bp, Homo sapiens
  chr18:13868532-13868547
  hyper
  cervical vs. melanoma
cgggcaaccgcacaa

SEQ ID NO: 457630 - DNA, 21 bp, Homo sapiens
  chr18:15197980-15198001
  hyper
cgggggcaaaaaggagcggcg

SEQ ID NO: 457631 - DNA, 5 bp, Homo sapiens
  chr18:15198101-15198106
  hyper
gtgac

SEQ ID NO: 457632 - DNA, 8 bp, Homo sapiens
  chr18:31739025-31739033
  hyper
  cervical vs. anorectal
cgggttgc

SEQ ID NO: 457633 - DNA, 891 bp, Homo sapiens; identical to SEQ ID NO: 452951
  chr18:32556625-32557516
  hyper
  cervical vs. upper_gi,colorectal,lung,ovary, pancreas_gallbladder,renal,uterine

SEQ ID NO: 457634 - DNA, 769 bp, Homo sapiens; identical to SEQ ID NO: 452952
  chr18:32557064-32557833
  hyper
  cervical vs. upper_gi,colorectal,pancreas_gallbladder, lung,liver_bileduct,renal,myeloid_neoplasm,breast,prostate, non_cancer

SEQ ID NO: 457635 - DNA, 18 bp, Homo sapiens
  chr18:32557864-32557882
  hyper
  cervical vs. upper_gi,colorectal,pancreas_gallbladder, lung,liver_bileduct,renal,myeloid_neoplasm,breast,prostate, non_cancer
tctgaacctggggcgctc

SEQ ID NO: 457636 - DNA, 45 bp, Homo sapiens; identical to SEQ ID NO: 452954
  chr18:32557884-32557929
  hyper
  cervical vs. upper_gi,colorectal,pancreas_gallbladder, lung,liver_bileduct,renal,myeloid_neoplasm,breast,prostate, non_cancer

SEQ ID NO: 457637 - DNA, 291 bp, Homo sapiens; identical to SEQ ID NO: 452955
  chr18:32557542-32557833
  hyper
  cervical vs. upper_gi,colorectal,pancreas_gallbladder, lung,renal,liver_bileduct,breast,non_cancer,myeloid_neoplasm, prostate,multiple_myeloma,ovary,uterine

SEQ ID NO: 457638 - DNA, 18 bp, Homo sapiens
  chr18:32557864-32557882
  hyper
  cervical vs. upper_gi,colorectal,pancreas_gallbladder, lung,renal,liver_bileduct,breast,non_cancer,myeloid_neoplasm, prostate,multiple_myeloma,ovary,uterine
tctgaacctggggcgctc

SEQ ID NO: 457639 - DNA, 45 bp, Homo sapiens; identical to SEQ ID NO: 452954
  chr18:32557884-32557929
  hyper
  cervical vs. upper_gi,colorectal,pancreas_gallbladder, lung,renal,liver_bileduct,breast,non_cancer,myeloid_neoplasm, prostate,multiple_myeloma,ovary,uterine

SEQ ID NO: 457640 - DNA, 445 bp, Homo sapiens; identical to SEQ ID NO: 345550
  chr18:32558003-32558448
  hyper
  cervical vs. upper_gi,colorectal,pancreas_gallbladder, lung,renal,liver_bileduct,breast,non_cancer,myeloid_neoplasm, prostate,multiple_myeloma,ovary,uterine

SEQ ID NO: 457641 - DNA, 593 bp, Homo sapiens; identical to SEQ ID NO: 335791
  chr18:32621215-32621808
  hyper
  cervical vs. upper_gi,lung,pancreas_gallbladder, liver_bileduct,colorectal,melanoma,renal,ovary,uterine

SEQ ID NO: 457642 - DNA, 201 bp, Homo sapiens
  chr18:35147249-35147450
  hyper
  cervical vs. lung,melanoma
cctgccgtggggaccgggggtcgagccgcccggtccggaccccgccggactccccgccaggcccactggggctggcatctcggctgcgcgggaaagggagtggcaggcgcggagccgggagcagggtccgagcggccccgcctgtaggggtgaatactggtggtgaacttggctggggtagcagattttcacgttaatgat

SEQ ID NO: 457643 - DNA, 80 bp, Homo sapiens; identical to SEQ ID NO: 452959
  chr18:44335955-44336035
  hyper
  cervical vs. myeloid_neoplasm,sarcoma

SEQ ID NO: 457644 - DNA, 14 bp, Homo sapiens
  chr18:44337138-44337152
  hyper
  cervical vs. thyroid,sarcoma,myeloid_neoplasm,non_cancer, breast
caggggctgggcgc

SEQ ID NO: 457645 - DNA, 73 bp, Homo sapiens
  chr18:47087075-47087148
  hyper
  cervical vs. pancreas_gallbladder,colorectal
cgaggtcggaacaggatctgctggctccggctcggtttcctcgcacaggtctctccagctggatcctcgacgc

SEQ ID NO: 457646 - DNA, 197 bp, Homo sapiens
  chr18:47087704-47087901
  hyper
  cervical vs. pancreas_gallbladder,colorectal
ttcccaacatccctaagccgccgatacattatcacccacgtattgcggacgagagaaccgcctcggagaagctggctggctcgcttggagttttgcagctagtggcggagcgagcattccgagcaggtactgtgcgatcctccagcgccggccgcagctcacagccccttagctccgccgggttattgtgcggccgc

SEQ ID NO: 457647 - DNA, 358 bp, Homo sapiens
  chr18:47087704-47088062
  hyper
  cervical vs. pancreas_gallbladder,upper_gi,colorectal, bladder_and_urothelial
ttcccaacatccctaagccgccgatacattatcacccacgtattgcggacgagagaaccgcctcggagaagctggctggctcgcttggagttttgcagctagtggcggagcgagcattccgagcaggtactgtgcgatcctccagcgccggccgcagctcacagccccttagctccgccgggttattgtgcggccgcgccttctgcacctgttgcggccctcgctaggcgggaagggagggagaagaggaggacaaaggggatgaccaggtggctctcccccgacggactcccggcccagggagcggatagaccactcccagagagagtgtggctttgagccttggagaggatgctct

SEQ ID NO: 457648 - DNA, 144 bp, Homo sapiens
  chr18:47087918-47088062
  hyper
  cervical vs. pancreas_gallbladder,upper_gi,colorectal, ovary,liver_bileduct,uterine
cggccctcgctaggcgggaagggagggagaagaggaggacaaaggggatgaccaggtggctctcccccgacggactcccggcccagggagcggatagaccactcccagagagagtgtggctttgagccttggagaggatgctct

SEQ ID NO: 457649 - DNA, 242 bp, Homo sapiens; identical to SEQ ID NO: 347506
  chr18:47088502-47088744
  hyper
  cervical vs. pancreas_gallbladder,upper_gi,colorectal, ovary,liver_bileduct,uterine

SEQ ID NO: 457650 - DNA, 196 bp, Homo sapiens; identical to SEQ ID NO: 452964
  chr18:47339411-47339607
  hyper
  cervical vs. pancreas_gallbladder,liver_bileduct, upper_gi,colorectal

SEQ ID NO: 457651 - DNA, 401 bp, Homo sapiens; identical to SEQ ID NO: 452965
  chr18:47339758-47340159
  hyper
  cervical vs. pancreas_gallbladder,liver_bileduct, upper_gi,colorectal

SEQ ID NO: 457652 - DNA, 50 bp, Homo sapiens; identical to SEQ ID NO: 452966
  chr18:55104759-55104809
  hyper
  cervical vs. liver_bileduct,upper_gi,ovary, pancreas_gallbladder

SEQ ID NO: 457653 - DNA, 280 bp, Homo sapiens; identical to SEQ ID NO: 452967
  chr18:55105185-55105465
  hyper
  cervical vs. liver_bileduct,upper_gi,ovary, pancreas_gallbladder

SEQ ID NO: 457654 - DNA, 255 bp, Homo sapiens; identical to SEQ ID NO: 452968
  chr18:55105210-55105465
  hyper
  cervical vs. pancreas_gallbladder,ovary

SEQ ID NO: 457655 - DNA, 57 bp, Homo sapiens; identical to SEQ ID NO: 347514
  chr18:55106090-55106147
  hyper
  cervical vs. pancreas_gallbladder,ovary

SEQ ID NO: 457656 - DNA, 101 bp, Homo sapiens; identical to SEQ ID NO: 454266
  chr18:60985398-60985499
  hyper
  cervical vs. anorectal

SEQ ID NO: 457657 - DNA, 75 bp, Homo sapiens; identical to SEQ ID NO: 347516
  chr18:60985973-60986048
  hyper
  cervical vs. anorectal

SEQ ID NO: 457658 - DNA, 291 bp, Homo sapiens; identical to SEQ ID NO: 454270
  chr19:813406-813697
  hyper
  cervical vs. lymphoid_neoplasm

SEQ ID NO: 457659 - DNA, 322 bp, Homo sapiens; identical to SEQ ID NO: 352133
  chr19:813830-814152
  hyper
  cervical vs. lymphoid_neoplasm

SEQ ID NO: 457660 - DNA, 24 bp, Homo sapiens
  chr19:814406-814430
  hyper
  cervical vs. renal,multiple_myeloma,lymphoid_neoplasm
cgacccccatcagaacctgccact

SEQ ID NO: 457661 - DNA, 14 bp, Homo sapiens
  chr19:1775063-1775077
  hyper
  cervical vs. breast
cgggcggcgtgcgc

SEQ ID NO: 457662 - DNA, 116 bp, Homo sapiens; identical to SEQ ID NO: 345560
  chr19:1979018-1979134
  hyper
  cervical vs. liver_bileduct,lymphoid_neoplasm,melanoma, renal

SEQ ID NO: 457663 - DNA, 219 bp, Homo sapiens
  chr19:2273763-2273982
  hyper
  cervical vs. pancreas_gallbladder,liver_bileduct, colorectal
cgccgtgttactggccgcccctagggacctgcagcgccgttcggggcagcagcacttccggcggggtcgtggcctggagcgcttccgggtctgcaaccccgccgtctgcccggccgcagcgccacctgccggccgcatccgggagcgccacccggaaaatcagggccaggcctggccgggaaaccggctggaaagaggaggaaaggaggaactcgaaaa

SEQ ID NO: 457664 - DNA, 10 bp, Homo sapiens
  chr19:2274020-2274030
  hyper
  cervical vs. pancreas_gallbladder,liver_bileduct, colorectal
ccgtctgagc

SEQ ID NO: 457665 - DNA, 601 bp, Homo sapiens; identical to SEQ ID NO: 335900
  chr19:2461998-2462599
  hyper
  cervical vs. pancreas_gallbladder,upper_gi,breast, multiple_myeloma,renal,uterine,non_cancer,colorectal,ovary, prostate,lung

SEQ ID NO: 457666 - DNA, 73 bp, Homo sapiens; identical to SEQ ID NO: 452976
  chr19:2702445-2702518
  hyper
  cervical vs. melanoma,ovary,uterine,breast, bladder_and_urothelial,prostate,lung,non_cancer, myeloid_neoplasm,multiple_myeloma,thyroid,sarcoma

SEQ ID NO: 457667 - DNA, 453 bp, Homo sapiens; identical to SEQ ID NO: 347529
  chr19:2702553-2703006
  hyper
  cervical vs. melanoma,ovary,uterine,breast, bladder_and_urothelial,prostate,lung,non_cancer, myeloid_neoplasm,multiple_myeloma,thyroid,sarcoma

SEQ ID NO: 457668 - DNA, 112 bp, Homo sapiens; identical to SEQ ID NO: 361407
  chr19:8942745-8942857
  hyper
  cervical vs. head_and_neck

SEQ ID NO: 457669 - DNA, 24 bp, Homo sapiens
  chr19:10397603-10397627
  hyper
  cervical vs. anorectal
cgaggaggcggggctgcgggcctc

SEQ ID NO: 457670 - DNA, 631 bp, Homo sapiens
  chr19:10530654-10531285
  hyper
  cervical vs. melanoma,breast
cgacactgaaaacacagacaaccctcggaagaggccacgtgcgcgcacatcccgccccgggcccgcaccatcactatcctccgacgcacagacaggagatcccacacactctgccgccgcccgctgcaggtaccgcgccggtggcactaggaccactcctcaaaaactgccccccgccaggggtagcggcgaggacacgccaacaccggactccgccctcgccatgatggaccgactgactgacactctggcaaccagtccggtgtctgcttccagatcggattaaccgtttaactccttcgtgcctgtgcgcgccgcggccaagcagggtgctttgaagacagacgagttccagcgccccctcccagcccggagcggggatctgcgtgggcgggaagggcccccctccttaggtagctgccccccgctggcccggacggaggaggaggggggcggcgctgacagccgcggcgggcggggggcggggaggggcgggacggggcggaggagccggggctggcgccgagcgggccgcggaacgcggagcgcggagcgcggagagcgccgccgggcactgagcagagctccaggcgccgaaaggaagctgcagagcccggcccgggggcgattg

SEQ ID NO: 457671 - DNA, 139 bp, Homo sapiens
  chr19:10531146-10531285
  hyper
  cervical vs. sarcoma
cgggacggggcggaggagccggggctggcgccgagcgggccgcggaacgcggagcgcggagcgcggagagcgccgccgggcactgagcagagctccaggcgccgaaaggaagctgcagagcccggcccgggggcgattg

SEQ ID NO: 457672 - DNA, 116 bp, Homo sapiens; identical to SEQ ID NO: 452980
  chr19:10691764-10691880
  hyper
  cervical vs. lymphoid_neoplasm

SEQ ID NO: 457673 - DNA, 166 bp, Homo sapiens; identical to SEQ ID NO: 452981
  chr19:11805261-11805427
  hyper
  cervical vs. lung,colorectal,breast,pancreas_gallbladder

SEQ ID NO: 457674 - DNA, 369 bp, Homo sapiens; identical to SEQ ID NO: 347539
  chr19:11805597-11805966
  hyper
  cervical vs. lung,colorectal,breast,pancreas_gallbladder

SEQ ID NO: 457675 - DNA, 608 bp, Homo sapiens; identical to SEQ ID NO: 335963
  chr19:11877720-11878328
  hyper
  cervical vs. pancreas_gallbladder,upper_gi

SEQ ID NO: 457676 - DNA, 161 bp, Homo sapiens; identical to SEQ ID NO: 452983
  chr19:11909173-11909334
  hyper
  cervical vs. pancreas_gallbladder,breast,colorectal

SEQ ID NO: 457677 - DNA, 61 bp, Homo sapiens; identical to SEQ ID NO: 452984
  chr19:11909732-11909793
  hyper
  cervical vs. pancreas_gallbladder,breast,colorectal

SEQ ID NO: 457678 - DNA, 7 bp, Homo sapiens
  chr19:11909951-11909958
  hyper
  cervical vs. pancreas_gallbladder,breast,colorectal
aacaccc

SEQ ID NO: 457679 - DNA, 50 bp, Homo sapiens; identical to SEQ ID NO: 452986
  chr19:11959378-11959428
  hyper
  cervical vs. ovary,uterine,myeloid_neoplasm

SEQ ID NO: 457680 - DNA, 14 bp, Homo sapiens
  chr19:11998456-11998470
  hyper
  cervical vs. colorectal,bladder_and_urothelial, pancreas_gallbladder
cgcccttggaaaag

SEQ ID NO: 457681 - DNA, 172 bp, Homo sapiens; identical to SEQ ID NO: 352202
  chr19:11999219-11999391
  hyper
  cervical vs. colorectal,bladder_and_urothelial, pancreas_gallbladder

SEQ ID NO: 457682 - DNA, 255 bp, Homo sapiens; identical to SEQ ID NO: 452987
  chr19:12075818-12076073
  hyper
  cervical vs. colorectal,bladder_and_urothelial, multiple_myeloma,uterine,ovary,sarcoma,myeloid_neoplasm, prostate,thyroid,non_cancer,breast,renal,upper_gi, pancreas_gallbladder

SEQ ID NO: 457683 - DNA, 333 bp, Homo sapiens
  chr19:12098300-12098633
  hyper
  cervical vs. bladder_and_urothelial,breast,ovary, colorectal,melanoma,prostate,multiple_myeloma,sarcoma
cggctggaatagcagcgaccggctctgcagcgccctgttacccggggcttctgctgtcactcagggctgagggggcggggtaggatgccctatccaatcggggtgctggggcggggccctgccaactgtttaatccgccggaaggagggcgcagcattgccggtcttctcattgcctggctgctagaggaaacccgaagtcgggattctttctttcctgctctgagagggaccaggtccctcctccgtagcttttgtctctctattgcctgcgccgtgtcctggactgctcacgggagttctgcaggagacgccggaatatctggaagctgaa

SEQ ID NO: 457684 - DNA, 31 bp, Homo sapiens; identical to SEQ ID NO: 452988
  chr19:12163025-12163056
  hyper
  cervical vs. bladder_and_urothelial,breast,ovary,uterine, multiple_myeloma,lung,sarcoma,prostate,renal,non_cancer

SEQ ID NO: 457685 - DNA, 118 bp, Homo sapiens; identical to SEQ ID NO: 452989
  chr19:12163331-12163449
  hyper
  cervical vs. bladder_and_urothelial,breast,ovary,uterine, multiple_myeloma,lung,sarcoma,prostate,renal,non_cancer

SEQ ID NO: 457686 - DNA, 16 bp, Homo sapiens
  chr19:12203656-12203672
  hyper
  cervical vs. multiple_myeloma,breast,sarcoma, myeloid_neoplasm,thyroid,prostate,non_cancer,renal
ctgaggtcaggagttc

SEQ ID NO: 457687 - DNA, 443 bp, Homo sapiens; identical to SEQ ID NO: 352207
  chr19:12250823-12251266
  hyper
  cervical vs. upper_gi

SEQ ID NO: 457688 - DNA, 227 bp, Homo sapiens; identical to SEQ ID NO: 452991
  chr19:12551198-12551425
  hyper
  cervical vs. liver_bileduct,upper_gi

SEQ ID NO: 457689 - DNA, 391 bp, Homo sapiens; identical to SEQ ID NO: 352209
  chr19:12551485-12551876
  hyper
  cervical vs. liver_bileduct,upper_gi

SEQ ID NO: 457690 - DNA, 97 bp, Homo sapiens
  chr19:12595013-12595110
  hyper
  cervical vs. lung,breast,colorectal,ovary,melanoma
cggtcgtgggtttgagatctggcttcccatacacttggaaaccttgagaaacgagtcctcccttgggaagaaaagagggactgaggaccccacacaa

SEQ ID NO: 457691 - DNA, 485 bp, Homo sapiens; identical to SEQ ID NO: 347547
  chr19:12595307-12595792
  hyper
  cervical vs. lung,breast,colorectal,ovary,melanoma

SEQ ID NO: 457692 - DNA, 224 bp, Homo sapiens; identical to SEQ ID NO: 335978
  chr19:12721448-12721672
  hyper
  cervical vs. liver_bileduct

SEQ ID NO: 457693 - DNA, 133 bp, Homo sapiens; identical to SEQ ID NO: 455836
  chr19:17958343-17958476
  hyper
  cervical vs. lymphoid_neoplasm,multiple_myeloma

SEQ ID NO: 457694 - DNA, 262 bp, Homo sapiens; identical to SEQ ID NO: 347565
  chr19:18335414-18335676
  hyper
  cervical vs. pancreas_gallbladder,upper_gi, liver_bileduct,anorectal,lung

SEQ ID NO: 457695 - DNA, 262 bp, Homo sapiens; identical to SEQ ID NO: 452993
  chr19:19843330-19843592
  hyper
  cervical vs. breast,melanoma,uterine,ovary, bladder_and_urothelial,sarcoma,prostate,renal

SEQ ID NO: 457696 - DNA, 47 bp, Homo sapiens; identical to SEQ ID NO: 352250
  chr19:19844044-19844091
  hyper
  cervical vs. breast,melanoma,uterine,ovary, bladder_and_urothelial,sarcoma,prostate,renal

SEQ ID NO: 457697 - DNA, 243 bp, Homo sapiens; identical to SEQ ID NO: 336034
  chr19:19887245-19887488
  hyper
  cervical vs. upper_gi,pancreas_gallbladder, liver_bileduct,lung

SEQ ID NO: 457698 - DNA, 75 bp, Homo sapiens
  chr19:19932106-19932181
  hyper
  cervical vs. bladder_and_urothelial
cgaccttcccgtggcccctgaacaatctgggaaagacctgtgggtgcagagctgcccggagagggttccacgcca

SEQ ID NO: 457699 - DNA, 8 bp, Homo sapiens
  chr19:19932385-19932393
  hyper
  cervical vs. bladder_and_urothelial
gggatgtc

SEQ ID NO: 457700 - DNA, 694 bp, Homo sapiens; identical to SEQ ID NO: 452995
  chr19:19976556-19977250
  hyper
  cervical vs. bladder_and_urothelial,breast, liver_bileduct,colorectal,lung,prostate,renal,sarcoma, pancreas_gallbladder,non_cancer,multiple_myeloma,ovary, myeloid_neoplasm,thyroid

SEQ ID NO: 457701 - DNA, 35 bp, Homo sapiens; identical to SEQ ID NO: 345584
  chr19:19977294-19977329
  hyper
  cervical vs. bladder_and_urothelial,breast, liver_bileduct,colorectal,lung,prostate,renal,sarcoma, pancreas_gallbladder,non_cancer,multiple_myeloma,ovary, myeloid_neoplasm,thyroid

SEQ ID NO: 457702 - DNA, 69 bp, Homo sapiens; identical to SEQ ID NO: 347569
  chr19:20011652-20011721
  hyper
  cervical vs. bladder_and_urothelial,breast,melanoma, sarcoma,renal

SEQ ID NO: 457703 - DNA, 47 bp, Homo sapiens; identical to SEQ ID NO: 452998
  chr19:20011723-20011770
  hyper
  cervical vs. bladder_and_urothelial,breast,melanoma, sarcoma,renal

SEQ ID NO: 457704 - DNA, 54 bp, Homo sapiens
  chr19:20162601-20162655
  hyper
  cervical vs. breast,sarcoma,bladder_and_urothelial, prostate,renal,uterine
cgatcccagacccttgagggtctgtgagaaatcaaactttcggcactttggaag

SEQ ID NO: 457705 - DNA, 76 bp, Homo sapiens; identical to SEQ ID NO: 336043
  chr19:21512126-21512202
  hyper
  cervical vs. upper_gi,liver_bileduct, pancreas_gallbladder,lung,breast,colorectal, bladder_and_urothelial,melanoma

SEQ ID NO: 457706 - DNA, 120 bp, Homo sapiens
  chr19:21541712-21541832
  hyper
  cervical vs. bladder_and_urothelial
cgacgctgggctgggaactgtccaatcaggcacgcagcttgagcggagaggacggcttccgggatgtggcgggatttgtccgcttctttgtctttggctgccgctggaactccgggtctc

SEQ ID NO: 457707 - DNA, 173 bp, Homo sapiens
  chr19:21542078-21542251
  hyper
  cervical vs. bladder_and_urothelial
cggcctcagtcgccttcagccataagatggcggttgcgccgacagcccggcccccgggcgtcctgtctcttccctgcatagtgactgtgcccttgcctggagccctctctggggaatctctgcacccgcagcgccgcttctctaccggattgtgcagggaccgtgggagggtc

SEQ ID NO: 457708 - DNA, 309 bp, Homo sapiens; identical to SEQ ID NO: 336046
  chr19:21579832-21580141
  hyper
  cervical vs. upper_gi,colorectal,bladder_and_urothelial, pancreas_gallbladder,liver_bileduct,breast

SEQ ID NO: 457709 - DNA, 104 bp, Homo sapiens
  chr19:21580233-21580337
  hyper
  cervical vs. bladder_and_urothelial,upper_gi
cggctgcgccaacagccggggccccgggcgtcctgtctcttccctgcactgtgactgtgccctgcctggagtcctctctggcagttctgcacccgcagcgccgc

SEQ ID NO: 457710 - DNA, 159 bp, Homo sapiens; identical to SEQ ID NO: 336048
  chr19:21688303-21688462
  hyper
  cervical vs. breast,ovary,prostate,uterine, bladder_and_urothelial

SEQ ID NO: 457711 - DNA, 77 bp, Homo sapiens
  chr19:21688738-21688815
  hyper
  cervical vs. liver_bileduct,breast,ovary, pancreas_gallbladder,uterine
cgactgtgctgacagccgggccccgggcgtcctgtcttccctccgcagtgactgtgcctgacgtgtagccctgtctg

SEQ ID NO: 457712 - DNA, 24 bp, Homo sapiens
  chr19:21688893-21688917
  hyper
  cervical vs. liver_bileduct,breast,ovary, pancreas_gallbladder,uterine
gactcgggatgcgggttcatgagc

SEQ ID NO: 457713 - DNA, 18 bp, Homo sapiens
  chr19:22018891-22018909
  hyper
  cervical vs. bladder_and_urothelial,prostate,renal
cgcaggtcacagagccac

SEQ ID NO: 457714 - DNA, 61 bp, Homo sapiens; identical to SEQ ID NO: 453000
  chr19:22019028-22019089
  hyper
  cervical vs. bladder_and_urothelial,prostate,renal

SEQ ID NO: 457715 - DNA, 102 bp, Homo sapiens; identical to SEQ ID NO: 336054
  chr19:23432614-23432716
  hyper
  cervical vs. lung,bladder_and_urothelial,colorectal, breast,liver_bileduct,anorectal,uterine,melanoma, pancreas_gallbladder

SEQ ID NO: 457716 - DNA, 130 bp, Homo sapiens; identical to SEQ ID NO: 453001
  chr19:23432833-23432963
  hyper
  cervical vs. bladder_and_urothelial,breast,colorectal, uterine,lung,prostate,multiple_myeloma,liver_bileduct,sarcoma, renal,ovary,non_cancer

SEQ ID NO: 457717 - DNA, 121 bp, Homo sapiens; identical to SEQ ID NO: 453002
  chr19:23433023-23433144
  hyper
  cervical vs. bladder_and_urothelial,breast,colorectal, uterine,lung,prostate,multiple_myeloma,liver_bileduct,sarcoma, renal,ovary,non_cancer

SEQ ID NO: 457718 - DNA, 118 bp, Homo sapiens; identical to SEQ ID NO: 347577
  chr19:23433296-23433414
  hyper
  cervical vs. bladder_and_urothelial,breast,colorectal, uterine,lung,prostate,multiple_myeloma,liver_bileduct,sarcoma, renal,ovary,non_cancer

SEQ ID NO: 457719 - DNA, 106 bp, Homo sapiens; identical to SEQ ID NO: 453004
  chr19:23456510-23456616
  hyper
  cervical vs. bladder_and_urothelial,breast, liver_bileduct,colorectal,sarcoma,uterine,ovary,prostate,lung, renal,multiple_myeloma,non_cancer

SEQ ID NO: 457720 - DNA, 216 bp, Homo sapiens; identical to SEQ ID NO: 347579
  chr19:23456881-23457097
  hyper
  cervical vs. bladder_and_urothelial,breast, liver_bileduct,colorectal,sarcoma,uterine,ovary,prostate,lung, renal,multiple_myeloma,non_cancer

SEQ ID NO: 457721 - DNA, 39 bp, Homo sapiens; identical to SEQ ID NO: 453006
  chr19:23577711-23577750
  hyper
  cervical vs. liver_bileduct,colorectal, pancreas_gallbladder,ovary

SEQ ID NO: 457722 - DNA, 68 bp, Homo sapiens; identical to SEQ ID NO: 336059
  chr19:23578240-23578308
  hyper
  cervical vs. liver_bileduct,colorectal, pancreas_gallbladder,upper_gi,bladder_and_urothelial,ovary, uterine,prostate,melanoma,breast,lung,sarcoma

SEQ ID NO: 457723 - DNA, 68 bp, Homo sapiens; identical to SEQ ID NO: 347581
  chr19:23598868-23598936
  hyper
  cervical vs. ovary,colorectal

SEQ ID NO: 457724 - DNA, 702 bp, Homo sapiens; identical to SEQ ID NO: 453008
  chr19:24216103-24216805
  hyper
  cervical vs. breast,bladder_and_urothelial,sarcoma,lung, colorectal,ovary,liver_bileduct,uterine,prostate

SEQ ID NO: 457725 - DNA, 3 bp, Homo sapiens
  chr19:24216915-24216918
  hyper
  cervical vs. lung,bladder_and_urothelial
cgc

SEQ ID NO: 457726 - DNA, 770 bp, Homo sapiens; identical to SEQ ID NO: 336063
  chr19:28284358-28285128
  hyper
  cervical vs. liver_bileduct,pancreas_gallbladder,lung, bladder_and_urothelial,lymphoid_neoplasm,breast,colorectal, ovary,uterine,renal,melanoma,myeloid_neoplasm,prostate,thyroid

SEQ ID NO: 457727 - DNA, 13 bp, Homo sapiens
  chr19:30019101-30019114
  hyper
  cervical vs. ovary,myeloid_neoplasm,uterine,prostate, non_cancer,melanoma,bladder_and_urothelial,thyroid
cggcaggtgtgca

SEQ ID NO: 457728 - DNA, 23 bp, Homo sapiens
  chr19:30716181-30716204
  hyper
  cervical vs. thyroid
cgcaagacctatctagttgctgt

SEQ ID NO: 457729 - DNA, 61 bp, Homo sapiens; identical to SEQ ID NO: 455841
  chr19:30718934-30718995
  hyper
  cervical vs. melanoma,thyroid,bladder_and_urothelial, prostate,ovary,uterine,non_cancer,renal,myeloid_neoplasm, sarcoma,multiple_myeloma

SEQ ID NO: 457730 - DNA, 61 bp, Homo sapiens; identical to SEQ ID NO: 455841
  chr19:30718934-30718995
  hyper
  cervical vs. melanoma,prostate,thyroid

SEQ ID NO: 457731 - DNA, 4 bp, Homo sapiens
  chr19:36909065-36909069
  hyper
  cervical vs. sarcoma
cgcc

SEQ ID NO: 457732 - DNA, 209 bp, Homo sapiens; identical to SEQ ID NO: 345589
  chr19:36980725-36980934
  hyper
  cervical vs. pancreas_gallbladder

SEQ ID NO: 457733 - DNA, 105 bp, Homo sapiens; identical to SEQ ID NO: 347589
  chr19:37096594-37096699
  hyper
  cervical vs. uterine,breast

SEQ ID NO: 457734 - DNA, 12 bp, Homo sapiens
  chr19:37158182-37158194
  hyper
  cervical vs. ovary,breast
gccaaggcgggc

SEQ ID NO: 457735 - DNA, 4 bp, Homo sapiens
  chr19:37288206-37288210
  hyper
  cervical vs. myeloid_neoplasm,thyroid,prostate,sarcoma, breast,ovary
cgtg

SEQ ID NO: 457736 - DNA, 3 bp, Homo sapiens
  chr19:37288807-37288810
  hyper
  cervical vs. myeloid_neoplasm,thyroid,prostate,sarcoma, breast,ovary
acc

SEQ ID NO: 457737 - DNA, 3 bp, Homo sapiens
  chr19:37341258-37341261
  hyper
  cervical vs. breast
ggc

SEQ ID NO: 457738 - DNA, 142 bp, Homo sapiens; identical to SEQ ID NO: 347590
  chr19:37342189-37342331
  hyper
  cervical vs. breast,melanoma

SEQ ID NO: 457739 - DNA, 35 bp, Homo sapiens
  chr19:37406731-37406766
  hyper
  cervical vs. head_and_neck
cgtgatcctcctgcctcggcctcccaaacacaacc

SEQ ID NO: 457740 - DNA, 170 bp, Homo sapiens; identical to SEQ ID NO: 361562
  chr19:37407590-37407760
  hyper
  cervical vs. bladder_and_urothelial,breast

SEQ ID NO: 457741 - DNA, 296 bp, Homo sapiens; identical to SEQ ID NO: 453019
  chr19:37568994-37569290
  hyper
  cervical vs. breast,bladder_and_urothelial

SEQ ID NO: 457742 - DNA, 182 bp, Homo sapiens; identical to SEQ ID NO: 345591
  chr19:37569554-37569736
  hyper
  cervical vs. breast,bladder_and_urothelial

SEQ ID NO: 457743 - DNA, 187 bp, Homo sapiens; identical to SEQ ID NO: 336109
  chr19:37708883-37709070
  hyper
  cervical vs. pancreas_gallbladder,bladder_and_urothelial, breast

SEQ ID NO: 457744 - DNA, 84 bp, Homo sapiens
  chr19:37957588-37957672
  hyper
  cervical vs. breast,melanoma,uterine,sarcoma,prostate, myeloid_neoplasm,non_cancer,thyroid,ovary,renal, bladder_and_urothelial,lung
cgctggcacaaacgccaagtctcacacatctacacccacaagcacaccctaccttgtatccacagtttttcattcattcaagat

SEQ ID NO: 457745 - DNA, 7 bp, Homo sapiens
  chr19:37959780-37959787
  hyper
  cervical vs. sarcoma,prostate,breast,uterine,melanoma, thyroid,ovary,bladder_and_urothelial,non_cancer,lung, myeloid_neoplasm,renal,multiple_myeloma
cgctccc

SEQ ID NO: 457746 - DNA, 38 bp, Homo sapiens; identical to SEQ ID NO: 453024
  chr19:38182720-38182758
  hyper
  cervical vs. prostate,breast,sarcoma,myeloid_neoplasm, ovary,non_cancer,bladder_and_urothelial

SEQ ID NO: 457747 - DNA, 188 bp, Homo sapiens; identical to SEQ ID NO: 352300
  chr19:38210751-38210939
  hyper
  cervical vs. bladder_and_urothelial,uterine,breast,ovary, sarcoma,colorectal

SEQ ID NO: 457748 - DNA, 296 bp, Homo sapiens; identical to SEQ ID NO: 455842
  chr19:38701255-38701551
  hyper
  cervical vs. anorectal

SEQ ID NO: 457749 - DNA, 86 bp, Homo sapiens
  chr19:38719834-38719920
  hyper
  cervical vs. head_and_neck,anorectal
cgagctttcagccccggccggggcaggcccggcacctccggagaccctgagggagagatggaggagagggaaacccctacccccac

SEQ ID NO: 457750 - DNA, 264 bp, Homo sapiens
  chr19:38719956-38720220
  hyper
  cervical vs. head_and_neck,anorectal
gcgccgcattccttcactgacagcgacaaagaagaggcgcccccgcgaccctggaggggctcccgcccccaaccccagggggcgacagggggtggggacccccggggcaagggttcgcgctgggggcccccattcaactacggtccgcgcgctgcgtccccctcctcagccccagggcgggcgggggaagggctcctggtgggggggtctggacagggggcggggacggcagggacactcacgacttgagcgggttctgaatgg

SEQ ID NO: 457751 - DNA, 187 bp, Homo sapiens; identical to SEQ ID NO: 352306
  chr19:38720439-38720626
  hyper
  cervical vs. head_and_neck,anorectal

SEQ ID NO: 457752 - DNA, 121 bp, Homo sapiens; identical to SEQ ID NO: 352319
  chr19:42498155-42498276
  hyper
  cervical vs. lung,head_and_neck,anorectal, lymphoid_neoplasm,bladder_and_urothelial,breast

SEQ ID NO: 457753 - DNA, 13 bp, Homo sapiens
  chr19:44488115-44488128
  hyper
  cervical vs. pancreas_gallbladder
cgaaacgcctgcg

SEQ ID NO: 457754 - DNA, 270 bp, Homo sapiens; identical to SEQ ID NO: 453031
  chr19:44529438-44529708
  hyper
  cervical vs. pancreas_gallbladder,liver_bileduct, upper_gi,bladder_and_urothelial,lung,breast,colorectal

SEQ ID NO: 457755 - DNA, 48 bp, Homo sapiens; identical to SEQ ID NO: 347605
  chr19:44529774-44529822
  hyper
  cervical vs. pancreas_gallbladder,liver_bileduct, upper_gi,bladder_and_urothelial,lung,breast,colorectal

SEQ ID NO: 457756 - DNA, 68 bp, Homo sapiens; identical to SEQ ID NO: 345595
  chr19:44711963-44712031
  hyper
  cervical vs. pancreas_gallbladder,liver_bileduct, colorectal,upper_gi,prostate,myeloid_neoplasm,thyroid

SEQ ID NO: 457757 - DNA, 38 bp, Homo sapiens
  chr19:45931075-45931113
  hyper
  cervical vs. pancreas_gallbladder,bladder_and_urothelial, upper_gi,multiple_myeloma,colorectal
cggggcctctctgctccgccagaacccagcgggggcag

SEQ ID NO: 457758 - DNA, 57 bp, Homo sapiens; identical to SEQ ID NO: 453034
  chr19:46929939-46929996
  hyper
  cervical vs. ovary,multiple_myeloma,renal,uterine, non_cancer,thyroid,prostate

SEQ ID NO: 457759 - DNA, 259 bp, Homo sapiens; identical to SEQ ID NO: 352348
  chr19:47523724-47523983
  hyper
  cervical vs. anorectal

SEQ ID NO: 457760 - DNA, 196 bp, Homo sapiens; identical to SEQ ID NO: 352353
  chr19:49014625-49014821
  hyper
  cervical vs. lung,upper_gi

SEQ ID NO: 457761 - DNA, 219 bp, Homo sapiens; identical to SEQ ID NO: 453035
  chr19:50553779-50553998
  hyper
  cervical vs. bladder_and_urothelial,uterine

SEQ ID NO: 457762 - DNA, 231 bp, Homo sapiens
  chr19:51161455-51161686
  hyper
  cervical vs. melanoma
gtggttggttttagagcgctgagggacgtggccaagagtgaaagcatgaatgggcggggcccggggcgactagataagagcgtggttggtgtaagggtgctgaggggcgggccccggagccactagataagagcgtggttggtgtaagggtgttgtgaggcggggcgacagtggagtgacagcttgggggggcggggccaggagggactagataagagcgagattggtgca

SEQ ID NO: 457763 - DNA, 71 bp, Homo sapiens
  chr19:51161615-51161686
  hyper
  cervical vs. melanoma
cggggcgacagtggagtgacagcttgggggggcggggccaggagggactagataagagcgagattggtgca

SEQ ID NO: 457764 - DNA, 12 bp, Homo sapiens
  chr19:51925116-51925128
  hyper
  cervical vs. upper_gi
cgcaggtgcggc

SEQ ID NO: 457765 - DNA, 88 bp, Homo sapiens; identical to SEQ ID NO: 352381
  chr19:51925272-51925360
  hyper
  cervical vs. upper_gi

SEQ ID NO: 457766 - DNA, 78 bp, Homo sapiens; identical to SEQ ID NO: 453036
  chr19:52531282-52531360
  hyper
  cervical vs. bladder_and_urothelial,breast,uterine,ovary, lymphoid_neoplasm,prostate,myeloid_neoplasm,non_cancer,lung, renal,thyroid,sarcoma

SEQ ID NO: 457767 - DNA, 208 bp, Homo sapiens; identical to SEQ ID NO: 345609
  chr19:52531884-52532092
  hyper
  cervical vs. bladder_and_urothelial,breast,uterine,ovary, lymphoid_neoplasm,prostate,myeloid_neoplasm,non_cancer,lung, renal,thyroid,sarcoma

SEQ ID NO: 457768 - DNA, 8 bp, Homo sapiens
  chr19:52839404-52839412
  hyper
  cervical vs. bladder_and_urothelial,breast,uterine,renal, sarcoma,prostate
cggaaaac

SEQ ID NO: 457769 - DNA, 32 bp, Homo sapiens
  chr19:53030704-53030736
  hyper
  cervical vs. colorectal,bladder_and_urothelial,breast
cgctctcgcctccacaacctaaaaacagagac

SEQ ID NO: 457770 - DNA, 396 bp, Homo sapiens
  chr19:53030790-53031186
  hyper
  cervical vs. colorectal,bladder_and_urothelial,breast
cgccctctgccggttctaaagggcaaggtctcagcgcctcgcgccccgccgctacctcgcccaggccccgcccacctcctcccacctcccgcccaggcctggcttccgtcctgcgcgcggagattaacgcaaacccggaagcggatcgggtggagtgaaggtcacgtcgccatggtgagttttgctctgtgttgcattaagtctccgcttcccaggtccccgccgcttctgtccctgggacgtggggtccccacagacctggaaattctcgcccgtcttccttcgcccagagcaaattgagacagcccagtgagaggccgggtgtcgcttcctttcgggtttaaagtcgtctggaggctggtcccgtcccgggtctgtctgctatagggcaatgta

SEQ ID NO: 457771 - DNA, 80 bp, Homo sapiens
  chr19:53031215-53031295
  hyper
  cervical vs. colorectal,bladder_and_urothelial,breast
caaaaccttcttctgactcttccctcctcgcgctatttaaagtcttcacccacgaggtggattcttgcccggggcgcacc

SEQ ID NO: 457772 - DNA, 164 bp, Homo sapiens; identical to SEQ ID NO: 361715
  chr19:53031347-53031511
  hyper
  cervical vs. colorectal,bladder_and_urothelial,breast

SEQ ID NO: 457773 - DNA, 61 bp, Homo sapiens; identical to SEQ ID NO: 453044
  chr19:53141353-53141414
  hyper
  cervical vs. breast,bladder_and_urothelial,ovary, pancreas_gallbladder,uterine,prostate,sarcoma,renal,non_cancer, myeloid_neoplasm,lung,thyroid

SEQ ID NO: 457774 - DNA, 819 bp, Homo sapiens; identical to SEQ ID NO: 453045
  chr19:53237625-53238444
  hyper
  cervical vs. bladder_and_urothelial,colorectal, pancreas_gallbladder

SEQ ID NO: 457775 - DNA, 149 bp, Homo sapiens; identical to SEQ ID NO: 453049
  chr19:53465713-53465862
  hyper
  cervical vs. bladder_and_urothelial,breast,ovary,lung

SEQ ID NO: 457776 - DNA, 140 bp, Homo sapiens; identical to SEQ ID NO: 453051
  chr19:53606073-53606213
  hyper
  cervical vs. colorectal,bladder_and_urothelial,melanoma, lung,breast,uterine,sarcoma,prostate,ovary

SEQ ID NO: 457777 - DNA, 222 bp, Homo sapiens; identical to SEQ ID NO: 453052
  chr19:53606354-53606576
  hyper
  cervical vs. colorectal,bladder_and_urothelial,melanoma, lung,breast,uterine,sarcoma,prostate,ovary

SEQ ID NO: 457778 - DNA, 289 bp, Homo sapiens; identical to SEQ ID NO: 453053
  chr19:53606605-53606894
  hyper
  cervical vs. colorectal,bladder_and_urothelial,melanoma, lung,breast,uterine,sarcoma,prostate,ovary

SEQ ID NO: 457779 - DNA, 176 bp, Homo sapiens; identical to SEQ ID NO: 453054
  chr19:53606400-53606576
  hyper
  cervical vs. bladder_and_urothelial,colorectal,breast, melanoma,lung,uterine

SEQ ID NO: 457780 - DNA, 428 bp, Homo sapiens; identical to SEQ ID NO: 453055
  chr19:53606605-53607033
  hyper
  cervical vs. bladder_and_urothelial,colorectal,breast, melanoma,lung,uterine

SEQ ID NO: 457781 - DNA, 111 bp, Homo sapiens; identical to SEQ ID NO: 347634
  chr19:53607111-53607222
  hyper
  cervical vs. bladder_and_urothelial,colorectal,breast, melanoma,lung,uterine

SEQ ID NO: 457782 - DNA, 84 bp, Homo sapiens
  chr19:53696029-53696113
  hyper
  cervical vs. sarcoma
cgggcacctccccaacgcgggctcaggggaaacggtgactgcgaaggggaggcctagggagcagcagggcccggcacgaggagg

SEQ ID NO: 457783 - DNA, 198 bp, Homo sapiens
  chr19:53700110-53700308
  hyper
  cervical vs. breast,bladder_and_urothelial,thyroid,ovary, prostate
cgcaggctcccacccgccttccttaggtccctcccggccccgccccctgcctgtccaggccccgccccacccttcgcgttttctccccagcccactccctgtgccggtcacgccccgcctaggccccgcccctaggccacctcagtcccctccggccccgccccctgccggtctctccctggccaggccccgcccctt

SEQ ID NO: 457784 - DNA, 16 bp, Homo sapiens
  chr19:53700699-53700715
  hyper
  cervical vs. breast,bladder_and_urothelial,thyroid,ovary, prostate
tttaagacggagtctc

SEQ ID NO: 457785 - DNA, 292 bp, Homo sapiens
  chr19:53868337-53868629
  hyper
  cervical vs. bladder_and_urothelial
cgaggaagggagccctgcgggagggggtgttactttgtcgcccaggctggcctggacccccaggttcagcgatcctcccgccctgcttcctgagtagatgggacctcaggctcccgcgcccgcgtccgcatccttgctgtgtttatccggcaggtggtgacctcactcctcgctggcctgagcactccgtccagcatcccaggcggtggctttagggaagtctctgcagctgagcacagggtggactctccctccggagtgaatggagaatagaaagggagaggatttctat

SEQ ID NO: 457786 - DNA, 578 bp, Homo sapiens; identical to SEQ ID NO: 336278
  chr19:54385484-54386062
  hyper
  cervical vs. breast

SEQ ID NO: 457787 - DNA, 4 bp, Homo sapiens
  chr19:54409948-54409952
  hyper
  cervical vs. bladder_and_urothelial,sarcoma,uterine, multiple_myeloma
cgtc

SEQ ID NO: 457788 - DNA, 2 bp, Homo sapiens
  chr19:54411124-54411126
  hyper
  cervical vs. ovary,bladder_and_urothelial,uterine, prostate
cg

SEQ ID NO: 457789 - DNA, 20 bp, Homo sapiens
  chr19:54411897-54411917
  hyper
  cervical vs. ovary,bladder_and_urothelial,uterine, prostate
actccgctctgcgcccgccc

SEQ ID NO: 457790 - DNA, 85 bp, Homo sapiens
  chr19:54412564-54412649
  hyper
  cervical vs. sarcoma,multiple_myeloma
cggctccgtccgccgagtgaggccgcggccgcggggggtggggggtgggaggccgggagggggccgggacgccgggctccggggc

SEQ ID NO: 457791 - DNA, 25 bp, Homo sapiens
  chr19:55690206-55690231
  hyper
  cervical vs. ovary,uterine
cgacccgggatcccagccggatttt

SEQ ID NO: 457792 - DNA, 182 bp, Homo sapiens; identical to SEQ ID NO: 347636
  chr19:55691158-55691340
  hyper
  cervical vs. anorectal,ovary,uterine

SEQ ID NO: 457793 - DNA, 132 bp, Homo sapiens; identical to SEQ ID NO: 345612
  chr19:55952964-55953096
  hyper
  cervical vs. anorectal

SEQ ID NO: 457794 - DNA, 134 bp, Homo sapiens; identical to SEQ ID NO: 336290
  chr19:56112791-56112925
  hyper
  cervical vs. multiple_myeloma,renal

SEQ ID NO: 457795 - DNA, 1 bp, Homo sapiens
  chr19:56879394-56879395
  hyper
  cervical vs. breast
c

SEQ ID NO: 457796 - DNA, 18 bp, Homo sapiens
  chr19:56915935-56915953
  hyper
  cervical vs. prostate,myeloid_neoplasm,uterine, non_cancer,thyroid,breast,ovary,sarcoma,bladder_and_urothelial, lymphoid_neoplasm,lung
gtttgacagtgtggaatc

SEQ ID NO: 457797 - DNA, 47 bp, Homo sapiens
  chr19:57079253-57079300
  hyper
  cervical vs. ovary,sarcoma
gggcaaagtcctagagcccggggaagttgcccgggcggggcagcctc

SEQ ID NO: 457798 - DNA, 61 bp, Homo sapiens; identical to SEQ ID NO: 361754
  chr19:57276931-57276992
  hyper
  cervical vs. melanoma

SEQ ID NO: 457799 - DNA, 86 bp, Homo sapiens
  chr19:57751590-57751676
  hyper
  cervical vs. bladder_and_urothelial
cggaggggaaataatgcaaggtggaagtcagagtccggagcctggtccagggtctctgcactggccctgaccctggcaaatgtccc

SEQ ID NO: 457800 - DNA, 373 bp, Homo sapiens; identical to SEQ ID NO: 361760
  chr19:57751755-57752128
  hyper
  cervical vs. bladder_and_urothelial

SEQ ID NO: 457801 - DNA, 14 bp, Homo sapiens
  chr19:57863221-57863235
  hyper
  cervical vs. breast,lung,ovary
cgcaggggcagttc

SEQ ID NO: 457802 - DNA, 461 bp, Homo sapiens; identical to SEQ ID NO: 453068
  chr19:57874412-57874873
  hyper
  cervical vs. bladder_and_urothelial,upper_gi,breast,lung, melanoma,pancreas_gallbladder,uterine,ovary,multiple_myeloma, prostate,sarcoma,non_cancer

SEQ ID NO: 457803 - DNA, 218 bp, Homo sapiens; identical to SEQ ID NO: 453069
  chr19:57875005-57875223
  hyper
  cervical vs. bladder_and_urothelial,upper_gi,breast,lung, melanoma,pancreas_gallbladder,uterine,ovary,multiple_myeloma, prostate,sarcoma,non_cancer

SEQ ID NO: 457804 - DNA, 43 bp, Homo sapiens; identical to SEQ ID NO: 345616
  chr19:57875252-57875295
  hyper
  cervical vs. bladder_and_urothelial,upper_gi,breast,lung, melanoma,pancreas_gallbladder,uterine,ovary,multiple_myeloma, prostate,sarcoma,non_cancer

SEQ ID NO: 457805 - DNA, 63 bp, Homo sapiens; identical to SEQ ID NO: 453071
  chr19:57998890-57998953
  hyper
  cervical vs. lung,uterine,breast,bladder_and_urothelial, ovary,pancreas_gallbladder,prostate

SEQ ID NO: 457806 - DNA, 3 bp, Homo sapiens
  chr19:57999359-57999362
  hyper
  cervical vs. lung,uterine,breast,bladder_and_urothelial, ovary,pancreas_gallbladder,prostate
cgc

SEQ ID NO: 457807 - DNA, 2 bp, Homo sapiens
  chr19:58011548-58011550
  hyper
  cervical vs. prostate,multiple_myeloma,sarcoma,ovary, myeloid_neoplasm,non_cancer,thyroid,bladder_and_urothelial, pancreas_gallbladder,breast,lung,uterine,lymphoid_neoplasm, melanoma,renal
cc

SEQ ID NO: 457808 - DNA, 11 bp, Homo sapiens
  chr19:58039267-58039278
  hyper
  cervical vs. myeloid_neoplasm,sarcoma,prostate,uterine, bladder_and_urothelial,breast,thyroid,non_cancer
cctgagcaacc

SEQ ID NO: 457809 - DNA, 35 bp, Homo sapiens
  chr19:58070535-58070570
  hyper
  cervical vs. ovary,breast,pancreas_gallbladder
cggaaacaacatcctgagcgacgtccccggaccgt

SEQ ID NO: 457810 - DNA, 81 bp, Homo sapiens; identical to SEQ ID NO: 336313
  chr19:58090396-58090477
  hyper
  cervical vs. pancreas_gallbladder,anorectal,breast, head_and_neck,bladder_and_urothelial,lung,upper_gi,ovary

SEQ ID NO: 457811 - DNA, 38 bp, Homo sapiens
  chr19:58094924-58094962
  hyper
  cervical vs. myeloid_neoplasm
cgcctcccgcctctgggtacagtcaaagggctcaggtc

SEQ ID NO: 457812 - DNA, 31 bp, Homo sapiens; identical to SEQ ID NO: 453076
  chr19:58125385-58125416
  hyper
  cervical vs. bladder_and_urothelial,lung,uterine,sarcoma, ovary,myeloid_neoplasm,breast,prostate,thyroid,non_cancer, melanoma,pancreas_gallbladder

SEQ ID NO: 457813 - DNA, 170 bp, Homo sapiens; identical to SEQ ID NO: 453077
  chr19:58144201-58144371
  hyper
  cervical vs. bladder_and_urothelial,upper_gi, pancreas_gallbladder,melanoma,breast,colorectal,sarcoma,lung, prostate,ovary,uterine,non_cancer,myeloid_neoplasm,thyroid

SEQ ID NO: 457814 - DNA, 210 bp, Homo sapiens; identical to SEQ ID NO: 453078
  chr19:58144745-58144955
  hyper
  cervical vs. bladder_and_urothelial,upper_gi, pancreas_gallbladder,melanoma,breast,colorectal,sarcoma,lung, prostate,ovary,uterine,non_cancer,myeloid_neoplasm,thyroid

SEQ ID NO: 457815 - DNA, 11 bp, Homo sapiens
  chr19:58144987-58144998
  hyper
  cervical vs. bladder_and_urothelial,upper_gi, pancreas_gallbladder,melanoma,breast,colorectal,sarcoma,lung, prostate,ovary,uterine,non_cancer,myeloid_neoplasm,thyroid
gacgggcaacc

SEQ ID NO: 457816 - DNA, 295 bp, Homo sapiens
  chr19:58193143-58193438
  hyper
  cervical vs. ovary,breast,pancreas_gallbladder, bladder_and_urothelial,prostate,upper_gi,uterine,sarcoma
cgaagtcgccatttccctgcacggggcacagcacctcagaatacaagttcgcagaggtcaaagcagtggacacactccgaagagctccgtggagttttggaaactacattatccagagtgcagagcgcaaaacggcggcggagttgagccaatgacagcccaggatagcaacacttccgcgcacgcgcagcgcgacgggccggaacttccggcgtcctcctcgtggcggtcattttggcctctgtcctgtttgtccagcccgccagtttctgcagtggaggtcgcgactgaggga

SEQ ID NO: 457817 - DNA, 345 bp, Homo sapiens; identical to SEQ ID NO: 352431
  chr19:58193585-58193930
  hyper
  cervical vs. ovary,breast,pancreas_gallbladder, bladder_and_urothelial,prostate,upper_gi,uterine,sarcoma

SEQ ID NO: 457818 - DNA, 29 bp, Homo sapiens
  chr19:58239193-58239222
  hyper
  cervical vs. myeloid_neoplasm,lymphoid_neoplasm, multiple_myeloma,prostate,non_cancer,thyroid,melanoma,sarcoma, renal,uterine
ccgagtttcaaagggctgacaggacttcc

SEQ ID NO: 457819 - DNA, 627 bp, Homo sapiens; identical to SEQ ID NO: 336321
  chr19:58258088-58258715
  hyper
  cervical vs. lung,upper_gi,pancreas_gallbladder, bladder_and_urothelial,liver_bileduct,colorectal,breast, melanoma,prostate,renal,multiple_myeloma,sarcoma,ovary,uterine, lymphoid_neoplasm,non_cancer,myeloid_neoplasm,thyroid

SEQ ID NO: 457820 - DNA, 146 bp, Homo sapiens; identical to SEQ ID NO: 453082
  chr19:58280766-58280912
  hyper
  cervical vs. bladder_and_urothelial,melanoma,breast, liver_bileduct,multiple_myeloma,prostate,upper_gi,sarcoma

SEQ ID NO: 457821 - DNA, 176 bp, Homo sapiens; identical to SEQ ID NO: 352434
  chr19:58281371-58281547
  hyper
  cervical vs. bladder_and_urothelial,melanoma,breast, liver_bileduct,multiple_myeloma,prostate,upper_gi,sarcoma

SEQ ID NO: 457822 - DNA, 53 bp, Homo sapiens; identical to SEQ ID NO: 374992
  chr19:58459305-58459358
  hyper
  cervical vs. ovary

SEQ ID NO: 457823 - DNA, 344 bp, Homo sapiens
  chr19:58694209-58694553
  hyper
  cervical vs. anorectal
cgcgacttccgtcttccagtccccctccttccccaaaagttgcgtggactctagccccgcctcctacattctccccgccctccctgtccccgcccctccacccagatggacggccagttaggcccgccccctgcacttccggccctacccgcccttcctcttcccaagggacgtcataattaatcccgcccccaccgccacccaaccaagcatcacccattccagcacttccggcctgacccctgtccagcgcctttcctttctccagcttctgctctgccccaagagtggtcgccttcgtggcagggcacgactctctcccagctcgggtcgccgcccacatt

SEQ ID NO: 457824 - DNA, 52 bp, Homo sapiens
  chr19:58694501-58694553
  hyper
  cervical vs. anorectal
cgccttcgtggcagggcacgactctctcccagctcgggtcgccgcccacatt

SEQ ID NO: 457825 - DNA, 1 bp, Homo sapiens
  chr19:58952140-58952141
  hyper
  cervical vs. myeloid_neoplasm,prostate,sarcoma,thyroid
c

SEQ ID NO: 457826 - DNA, 29 bp, Homo sapiens
  chr2:10151694-10151723
  hyper
  cervical vs. melanoma
cgggtcaggtggacagtattggcgtgcgt

SEQ ID NO: 457827 - DNA, 29 bp, Homo sapiens
  chr2:10151842-10151871
  hyper
  cervical vs. melanoma
gtacaggcgggtcaggtggacaggcgtgc

SEQ ID NO: 457828 - DNA, 4 bp, Homo sapiens
  chr2:10151899-10151903
  hyper
cgta

SEQ ID NO: 457829 - DNA, 2 bp, Homo sapiens
  chr2:10152022-10152024
  hyper
gc

SEQ ID NO: 457830 - DNA, 166 bp, Homo sapiens; identical to SEQ ID NO: 331200
  chr2:10152421-10152587
  hyper
  cervical vs. liver_bileduct,lymphoid_neoplasm,breast, uterine,prostate

SEQ ID NO: 457831 - DNA, 160 bp, Homo sapiens
  chr2:17721363-17721523
  hyper
  cervical vs. head_and_neck,anorectal,lung, bladder_and_urothelial
cggctcccagtactcctagcagaagaccctctgatgaaatggcccatgacaaaatgaccaccataaccgttccttcagtaagccaggtagacgtgctcacagcttgctgggaagtcttctttcggagatttctgcagttttctccttcaccttacagcct

SEQ ID NO: 457832 - DNA, 241 bp, Homo sapiens; identical to SEQ ID NO: 349461
  chr2:17721867-17722108
  hyper
  cervical vs. head_and_neck,anorectal,lung, bladder_and_urothelial

SEQ ID NO: 457833 - DNA, 511 bp, Homo sapiens; identical to SEQ ID NO: 453094
  chr2:21022197-21022708
  hyper
  cervical vs. liver_bileduct,pancreas_gallbladder,renal, upper_gi,colorectal,bladder_and_urothelial,lymphoid_neoplasm, sarcoma,lung,myeloid_neoplasm,thyroid,non_cancer,melanoma, multiple_myeloma

SEQ ID NO: 457834 - DNA, 54 bp, Homo sapiens; identical to SEQ ID NO: 357134
  chr2:27069931-27069985
  hyper
  cervical vs. bladder_and_urothelial

SEQ ID NO: 457835 - DNA, 7 bp, Homo sapiens
  chr2:27070281-27070288
  hyper
  cervical vs. anorectal,head_and_neck,prostate, bladder_and_urothelial,sarcoma
cgctctg

SEQ ID NO: 457836 - DNA, 38 bp, Homo sapiens; identical to SEQ ID NO: 454314
  chr2:30453530-30453568
  hyper
  cervical vs. myeloid_neoplasm,ovary,non_cancer

SEQ ID NO: 457837 - DNA, 9 bp, Homo sapiens
  chr2:40679688-40679697
  hyper
  cervical vs. bladder_and_urothelial
cgcctaccc

SEQ ID NO: 457838 - DNA, 5 bp, Homo sapiens
  chr2:45172149-45172154
  hyper
  cervical vs. anorectal
cggcc

SEQ ID NO: 457839 - DNA, 2 bp, Homo sapiens
  chr2:45172424-45172426
  hyper
  cervical vs. anorectal
tc

SEQ ID NO: 457840 - DNA, 542 bp, Homo sapiens; identical to SEQ ID NO: 453098
  chr2:60783811-60784353
  hyper
  cervical vs. upper_gi

SEQ ID NO: 457841 - DNA, 77 bp, Homo sapiens; identical to SEQ ID NO: 346438
  chr2:60784505-60784582
  hyper
  cervical vs. upper_gi

SEQ ID NO: 457842 - DNA, 234 bp, Homo sapiens; identical to SEQ ID NO: 453100
  chr2:60784119-60784353
  hyper

SEQ ID NO: 457843 - DNA, 373 bp, Homo sapiens; identical to SEQ ID NO: 349503
  chr2:60784505-60784878
  hyper

SEQ ID NO: 457844 - DNA, 5 bp, Homo sapiens
  chr2:63275188-63275193
  hyper
  cervical vs. anorectal
ggctc

SEQ ID NO: 457845 - DNA, 136 bp, Homo sapiens
  chr2:73520107-73520243
  hyper
  cervical vs. breast,prostate,bladder_and_urothelial, non_cancer
cgctccgataaccgcacaggttcctgcggaggcgctggcggcccagtgtgggtgggaatgggggtgcgcaccccaggactcctaagcttcccatcgcccctattctcatagctccaatgtcccagtccctcctggt

SEQ ID NO: 457846 - DNA, 236 bp, Homo sapiens; identical to SEQ ID NO: 453103
  chr2:74781700-74781936
  hyper
  cervical vs. upper_gi,colorectal,lymphoid_neoplasm, pancreas_gallbladder

SEQ ID NO: 457847 - DNA, 123 bp, Homo sapiens; identical to SEQ ID NO: 453104
  chr2:74782349-74782472
  hyper
  cervical vs. upper_gi,colorectal,lymphoid_neoplasm, pancreas_gallbladder

SEQ ID NO: 457848 - DNA, 140 bp, Homo sapiens
  chr2:91635538-91635678
  hyper
  cervical vs. anorectal
cgcggctttttgcccccgccgtcgcggctttttgcccccaatgctgcggctttttacggctttttgtgcccatcaccgtagctttttgcctccgccaccacagctttttgcctccgccaccgcggctttttgaccccgcc

SEQ ID NO: 457849 - DNA, 147 bp, Homo sapiens
  chr2:101033445-101033592
  hyper
  cervical vs. anorectal,lymphoid_neoplasm,melanoma, prostate,ovary,sarcoma,breast
cgcaccgaagctgcacatgctccttcttccctgccttcctctgcatgctccttggacccaagctgaaccctttcttcctctctccatctacaattacaaacgcaaattctcagccaaggatgaaagaagtaaattgtaggctcgcac

SEQ ID NO: 457850 - DNA, 111 bp, Homo sapiens
  chr2:105460811-105460922
  hyper
  cervical vs. renal
cgggatccgccacatgcccctcgaccctctcccaagagaaggaccctatttgacaaacaataacagagcagtaactcttgcaatctgcccacacctttgggggtggctggg

SEQ ID NO: 457851 - DNA, 97 bp, Homo sapiens; identical to SEQ ID NO: 453106
  chr2:105468467-105468564
  hyper
  cervical vs. melanoma

SEQ ID NO: 457852 - DNA, 144 bp, Homo sapiens; identical to SEQ ID NO: 345031
  chr2:105471069-105471213
  hyper
  cervical vs. melanoma

SEQ ID NO: 457853 - DNA, 338 bp, Homo sapiens; identical to SEQ ID NO: 453108
  chr2:105489278-105489616
  hyper
  cervical vs. ovary,uterine,breast

SEQ ID NO: 457854 - DNA, 31 bp, Homo sapiens; identical to SEQ ID NO: 453113
  chr2:118981062-118981093
  hyper
  cervical vs. multiple_myeloma,non_cancer, myeloid_neoplasm,thyroid,prostate

SEQ ID NO: 457855 - DNA, 179 bp, Homo sapiens
  chr2:121494270-121494449
  hyper
  cervical vs. upper_gi
gagcgtgtctgcgggcgtactgagcgcggaggggctgcagccagccacttgagaacttcgaactccacttctccgcgctgcgcgtcccggagccctgcctttctttcttccttcctcaatccttcctccccctcgcccggcccggccgccccctccccctctgctgggctctcctcctc

SEQ ID NO: 457856 - DNA, 6 bp, Homo sapiens
  chr2:127535179-127535185
  hyper
  cervical vs. melanoma,sarcoma,breast, bladder_and_urothelial,non_cancer
aagggc

SEQ ID NO: 457857 - DNA, 44 bp, Homo sapiens
  chr2:127643937-127643981
  hyper
  cervical vs. breast
cgtggccgaccctcccagccccctaaccccggtcgggcccatca

SEQ ID NO: 457858 - DNA, 49 bp, Homo sapiens; identical to SEQ ID NO: 453114
  chr2:127782995-127783044
  hyper
  cervical vs. renal,thyroid,non_cancer,lung,ovary, melanoma,prostate,sarcoma

SEQ ID NO: 457859 - DNA, 105 bp, Homo sapiens; identical to SEQ ID NO: 357301
  chr2:128459397-128459502
  hyper
  cervical vs. head_and_neck

SEQ ID NO: 457860 - DNA, 2 bp, Homo sapiens
  chr2:131792026-131792028
  hyper
  cervical vs. anorectal,ovary
cg

SEQ ID NO: 457861 - DNA, 136 bp, Homo sapiens
  chr2:131792037-131792173
  hyper
  cervical vs. anorectal,ovary
gtcagtgaagaggggcccctcagggtggatcgctcccaccggagtttaaatcctgcctccgccatccctgcattcctgcgcgattttatgactgagcagaatccctaacctttcagagccacgtttactcatctgt

SEQ ID NO: 457862 - DNA, 129 bp, Homo sapiens
  chr2:136873862-136873991
  hyper
  cervical vs. head_and_neck,breast,lymphoid_neoplasm, uterine,prostate,multiple_myeloma
cggcgtggggggtggggtgggtgctgctaggaggggcagtgattaactttttgtaagaagtttttcgcccagggagggaagaggggagaagggaggatcacggggggagggcgggggcgttgcaaagac

SEQ ID NO: 457863 - DNA, 792 bp, Homo sapiens; identical to SEQ ID NO: 345040
  chr2:136874020-136874812
  hyper
  cervical vs. head_and_neck,breast,lymphoid_neoplasm, uterine,prostate,multiple_myeloma

SEQ ID NO: 457864 - DNA, 588 bp, Homo sapiens
  chr2:136874345-136874933
  hyper
  cervical vs. lymphoid_neoplasm,breast,ovary, multiple_myeloma,uterine,prostate,head_and_neck,non_cancer, myeloid_neoplasm,thyroid,renal
cgccactgatccagttaacccggccggaggtgggcagctggaagcctccaggcggtgggcacgcggggggccgggtcgtccagccccgggccgccgcggctgcccactacacccacgccaaccgcccgcaagcagcgctgcaggggctccgctgggcgacacgccaggctctgtcccacagggtgctggggagcgactgggcggctccgccgcgagcgtctttgaattgcgcgccgctgcaggaaaccaaaaactccctagcaagagggtttcaaaaggtttctggaaaccaccgacggttaaacatcacaactggactcggagagagccaaacggtttccccacttgcacctgccagtcttcgcggcggcgacctggcagcccaggtgcggtcttaaccgcccccgcccctcaccccgtacccgctcctatccccggagcgcaaatctcagggctggcagctgcgcggtgtcaaaggggaggtcaaaccactccgctgacctctgcacgaccccaaactctcgaactgcaggacccactcgcggccgtggggaagaggcgcgcttcggacggcgggaaggttttccc

SEQ ID NO: 457865 - DNA, 94 bp, Homo sapiens
  chr2:136874839-136874933
  hyper
  cervical vs. lymphoid_neoplasm,breast,multiple_myeloma, ovary,prostate,head_and_neck,sarcoma,uterine,non_cancer, myeloid_neoplasm,renal,thyroid,lung
cgctgacctctgcacgaccccaaactctcgaactgcaggacccactcgcggccgtggggaagaggcgcgcttcggacggcgggaaggttttccc

SEQ ID NO: 457866 - DNA, 427 bp, Homo sapiens
  chr2:136875399-136875826
  hyper
  cervical vs. lymphoid_neoplasm,breast,multiple_myeloma, ovary,prostate,head_and_neck,sarcoma,uterine,non_cancer, myeloid_neoplasm,renal,thyroid,lung
tttctcctcgactcacagagaaaaagattccaatcctgctccccccccacccacccgcactatataggcatggtcaagaaaactcctttcggtgacccttttttggagtacgggtacctccaatgtcctggccgcttctgcccgctcggagaggggctgcgctctaagttcaaacgtttgtacatttatgacaaagcaggttgaaactggacttacactgatcccctccatggtaaccgctggttctccagatgcggtggctactggagcactcaggccctcggcgtcactttgctacctgctgccgcagccaacaaactgaagtttctggccgcggccggacttttataaaaacacgctccgagcgcggcgcatgcgccgctggggcggggagggagaaggcggggtgggggagaggggcagacgc

SEQ ID NO: 457867 - DNA, 483 bp, Homo sapiens; identical to SEQ ID NO: 453118
  chr2:136875399-136875882
  hyper
  cervical vs. lymphoid_neoplasm,multiple_myeloma,prostate, breast,uterine,myeloid_neoplasm,non_cancer,thyroid,ovary,renal, head_and_neck

SEQ ID NO: 457868 - DNA, 85 bp, Homo sapiens; identical to SEQ ID NO: 453119
  chr2:136876145-136876230
  hyper
  cervical vs. lymphoid_neoplasm,multiple_myeloma,prostate, breast,uterine,myeloid_neoplasm,non_cancer,thyroid,ovary,renal, head_and_neck

SEQ ID NO: 457869 - DNA, 44 bp, Homo sapiens; identical to SEQ ID NO: 453120
  chr2:136875838-136875882
  hyper
  cervical vs. multiple_myeloma,lymphoid_neoplasm,uterine, myeloid_neoplasm,non_cancer,breast,thyroid,prostate,ovary

SEQ ID NO: 457870 - DNA, 218 bp, Homo sapiens; identical to SEQ ID NO: 453121
  chr2:136876145-136876363
  hyper
  cervical vs. multiple_myeloma,lymphoid_neoplasm,uterine, myeloid_neoplasm,non_cancer,breast,thyroid,prostate,ovary

SEQ ID NO: 457871 - DNA, 1 bp, Homo sapiens
  chr2:145282267-145282268
  hyper
  cervical vs. melanoma
c

SEQ ID NO: 457872 - DNA, 51 bp, Homo sapiens; identical to SEQ ID NO: 453124
  chr2:149632592-149632643
  hyper
  cervical vs. ovary,sarcoma,prostate,thyroid,non_cancer, breast,uterine

SEQ ID NO: 457873 - DNA, 238 bp, Homo sapiens; identical to SEQ ID NO: 345045
  chr2:149634146-149634384
  hyper
  cervical vs. prostate,sarcoma,breast,ovary

SEQ ID NO: 457874 - DNA, 544 bp, Homo sapiens; identical to SEQ ID NO: 357323
  chr2:149634146-149634690
  hyper
  cervical vs. prostate

SEQ ID NO: 457875 - DNA, 115 bp, Homo sapiens; identical to SEQ ID NO: 453125
  chr2:149645382-149645497
  hyper
  cervical vs. ovary,myeloid_neoplasm,non_cancer

SEQ ID NO: 457876 - DNA, 64 bp, Homo sapiens; identical to SEQ ID NO: 349598
  chr2:149645987-149646051
  hyper
  cervical vs. ovary,myeloid_neoplasm,non_cancer

SEQ ID NO: 457877 - DNA, 456 bp, Homo sapiens
  chr2:155554232-155554688
  hyper
  cervical vs. upper_gi
cgcctggaaggagggcacagcgccaaggaacccacgagcccccgctcgagtcattctgtgctctgtgcgccaaggatctttctggcagggacagcgcggtgccctcagggaggtgcggagcttgggggacctgcattggcgcccatcgtggtacaccaggaaaagtgggaacgaggaaaacagccgtgagcgcagagtgcgaggccaggctgccgctaccgcccgctgcgccgcctcctgccctctcccgctgggtgagtgcccaggcttcgcgcactgccgtgtctcagctgagcgcgggggcggcctgcgggcccttgagggtccgccggagggccccggtggcgcccgcggaaactcggcggtcgggggacgccaggcggacaggtctctggagtccggaacccgggaatctgagcccggagggcgtgggtagggggcgttgcaccagtgccc

SEQ ID NO: 457878 - DNA, 349 bp, Homo sapiens
  chr2:155554690-155555039
  hyper
  cervical vs. upper_gi
cagacatgcctttgggcgggattttggctaaaagataggagacaggtgcgccgggggtgcggggagcggtcccagggggcgggagattggggagcggcggggaggggggagggtctggtccaggcaggtaaaggcagcttcttaggcagccagcgagttggcaggtgggttgggactcgcttgtcaactcattaattttaagcagtcagtttgggggtactgcaggataatcaggagggccgtggggagtcaagaggtgacccgggatgccggtggtggggaaagaaaagaggagcctctggaagcttggaggcaaaattgcgcttgggttcctgttccttgcatccct

SEQ ID NO: 457879 - DNA, 95 bp, Homo sapiens
  chr2:162930102-162930197
  hyper
  cervical vs. colorectal,pancreas_gallbladder,uterine
cgttagaagagggagaccgcgggctgggggtgggggtggcgtctggagtgcgccagttggagttctctaaggcgggtgcccttgaacttgtgcct

SEQ ID NO: 457880 - DNA, 263 bp, Homo sapiens
  chr2:162930659-162930922
  hyper
  cervical vs. colorectal,pancreas_gallbladder,uterine
taaaggcgccgcgggcaggctgcagggcaggcggcgcgggagcaggcgcgcgtggcgcggggcactggcatcccggccggggggagcccgcgagggccccctgagggcggtgtagggcgctgggcggcagccggggcgcagagtgcggggcccggaggagccgtgggggaggggaaagggcgcgcggcctcggatgcgcagaccctgggccggcgactcggggaccctgctccctcttagctaaaaatgacgtcggcgttcag

SEQ ID NO: 457881 - DNA, 205 bp, Homo sapiens; identical to SEQ ID NO: 331488
  chr2:165873413-165873618
  hyper
  cervical vs. bladder_and_urothelial,lymphoid_neoplasm

SEQ ID NO: 457882 - DNA, 101 bp, Homo sapiens; identical to SEQ ID NO: 453132
  chr2:168148871-168148972
  hyper
  cervical vs. lung,pancreas_gallbladder,breast,melanoma, colorectal

SEQ ID NO: 457883 - DNA, 240 bp, Homo sapiens; identical to SEQ ID NO: 453133
  chr2:168149264-168149504
  hyper
  cervical vs. lung,pancreas_gallbladder,breast,melanoma, colorectal

SEQ ID NO: 457884 - DNA, 152 bp, Homo sapiens; identical to SEQ ID NO: 453134
  chr2:168149556-168149708
  hyper
  cervical vs. lung,pancreas_gallbladder,breast,melanoma, colorectal

SEQ ID NO: 457885 - DNA, 89 bp, Homo sapiens; identical to SEQ ID NO: 357355
  chr2:168150962-168151051
  hyper
  cervical vs. ovary

SEQ ID NO: 457886 - DNA, 231 bp, Homo sapiens
  chr2:172950233-172950464
  hyper
  cervical vs. head_and_neck,anorectal
cagcagcatcatgcttagacttttcaaagagacaaactccattttcttatgaatggaaagtgaaaacccctgttccgcttaaattgggttccttcctgtcctgagaaacatagagacccccaaaagggaagcagaggagagaaagtcccacacccagaccccgcgagaagagatgaccatgaccaccatgccagaaagtctcaacagccccgtgtcgggcaaggcggtgtt

SEQ ID NO: 457887 - DNA, 233 bp, Homo sapiens; identical to SEQ ID NO: 349624
  chr2:172950493-172950726
  hyper
  cervical vs. head_and_neck,anorectal

SEQ ID NO: 457888 - DNA, 86 bp, Homo sapiens; identical to SEQ ID NO: 453138
  chr2:173099596-173099682
  hyper
  cervical vs. colorectal,upper_gi,pancreas_gallbladder, myeloid_neoplasm,uterine,non_cancer,renal,sarcoma,thyroid,ovary, prostate

SEQ ID NO: 457889 - DNA, 150 bp, Homo sapiens
  chr2:175198369-175198519
  hyper
  cervical vs. bladder_and_urothelial
cgcccacgtgtggcctggtcctccgccctcccgggtgaaagtcctggagagatttctcgggcgcgtccgtgaaagcagggcactaatggggagcctacctcttaaaacagcgcacttgccctacggacgagcctctaggccctggtggtc

SEQ ID NO: 457890 - DNA, 297 bp, Homo sapiens; identical to SEQ ID NO: 346496
  chr2:175199018-175199315
  hyper
  cervical vs. bladder_and_urothelial

SEQ ID NO: 457891 - DNA, 85 bp, Homo sapiens; identical to SEQ ID NO: 453139
  chr2:176975945-176976030
  hyper
  cervical vs. renal,myeloid_neoplasm,multiple_myeloma, uterine,thyroid,colorectal,breast,non_cancer

SEQ ID NO: 457892 - DNA, 22 bp, Homo sapiens
  chr2:177001081-177001103
  hyper
  cervical vs. anorectal
cgggggagagagaaagcagaag

SEQ ID NO: 457893 - DNA, 5 bp, Homo sapiens
  chr2:182321353-182321358
  hyper
  cervical vs. sarcoma,multiple_myeloma,lymphoid_neoplasm, myeloid_neoplasm,non_cancer,thyroid
cgtgg

SEQ ID NO: 457894 - DNA, 34 bp, Homo sapiens; identical to SEQ ID NO: 345053
  chr2:182323095-182323129
  hyper
  cervical vs. thyroid,myeloid_neoplasm,non_cancer, lymphoid_neoplasm

SEQ ID NO: 457895 - DNA, 72 bp, Homo sapiens; identical to SEQ ID NO: 453142
  chr2:182818959-182819031
  hyper
  cervical vs. renal,liver_bileduct,multiple_myeloma, pancreas_gallbladder,prostate,myeloid_neoplasm, lymphoid_neoplasm,non_cancer,thyroid

SEQ ID NO: 457896 - DNA, 5 bp, Homo sapiens
  chr2:208029816-208029821
  hyper
  cervical vs. pancreas_gallbladder,lung,liver_bileduct
cgtgg

SEQ ID NO: 457897 - DNA, 740 bp, Homo sapiens
  chr2:208031094-208031834
  hyper
  cervical vs. head_and_neck,lung,anorectal, bladder_and_urothelial
cggccgcccggcggccgggcagcgcgagcgcaagggacagggagggtcgtggcgacactcgcgccagctcccgggacggctgggctcgggctggtcgccgacctccgaccctccactagatgcctggcagagcccggcgcgtccggagcccgcgcccctcagagggaaggggtcgcgcgtcgccgcggcggccctgaggctgacggtcgggaggtgaaaggccggagtgcggggtcaggacgcctcctggagggggcgcggcgcagggggccgcggggaagccgccgagggcgcggagcgggaaggaaggacagtggccaccccgcctccgcctgggcacggggcagggacccgcgcgaggcggtgccggggaggtcctcacgtactcaaaaacaagcagaaaaggcatccagggccccttcccgaactccccacgggctgccagggtgcagagaagaagcgcctgaggaggaagtgccacacaatgggagagaacaaaggggagcggagcgagaccgcggcctgcgcccgccccccgcttgcgcacagtccccgccccgccccgcgggcgccgccgccgccgccctccctcccgcgcctccttctgaccccgagcgagagacctggtcgggagtccggcggctagagttgattgcaaggggcctgttgctcgactgtgcgttaaagaggctagagggagcctaggtagacgtggggcgcaagctggagccggcagcttg

SEQ ID NO: 457898 - DNA, 56 bp, Homo sapiens; identical to SEQ ID NO: 349670
  chr2:208031939-208031995
  hyper
  cervical vs. head_and_neck,lung,anorectal, bladder_and_urothelial

SEQ ID NO: 457899 - DNA, 394 bp, Homo sapiens; identical to SEQ ID NO: 455913
  chr2:220348591-220348985
  hyper
  cervical vs. multiple_myeloma,myeloid_neoplasm,melanoma

SEQ ID NO: 457900 - DNA, 61 bp, Homo sapiens
  chr2:223170211-223170272
  hyper
  cervical vs. anorectal
tacgacccacacagggacacaaacaaccacacatgtacacacacacacacacacacacact

SEQ ID NO: 457901 - DNA, 560 bp, Homo sapiens
  chr2:228028714-228029274
  hyper
cgccttacctgtggggacgcccgcagcgccaggagctgccgccttgccaccccacgggacgcgcacctccagccccaatccacccgcgccccgctgcctcttcgcggcgctctcgcagccaagcccggcggccgcaagttggaggcgggctggaggcggggaacgcggaccgccgcgggcgcggggaacaagcggggcctcccgagtgcagacgcccggcgcgcctcccgcttaatctgggcagggccgctggccactccctccaccctgcgcagccacctccccaccgcgcagccacctccccaccgcacacccccaaacgccccacctccgaccgcaccccacttccccgcctgggcccccggaccttgggagcatcacctccttaaccccttaccctggatccgcgcccacctgcccctcaggcgcccagccctttctcgcctcctgggcacgatgcccgggtagaagggacactgcctggtaagttgggagggagggggtatgagggcgggacctgagccacgtcttccctcccttgaagccacaaccaaaaagcc

SEQ ID NO: 457902 - DNA, 51 bp, Homo sapiens; identical to SEQ ID NO: 369976
  chr2:232651379-232651430
  hyper
  cervical vs. upper_gi

SEQ ID NO: 457903 - DNA, 624 bp, Homo sapiens
  chr2:232790030-232790654
  hyper
  cervical vs. head_and_neck,anorectal,lung
cggctcgcgcgcctccgaaggccggctgggcggcgggcggtcccgggccgggctggggctgggcgtcgggtgggccgtactcaccgccgccagggggcgccgcactaacatcccaggccgctcatggagccgattcggtccagcttgaggccgaagcagcccttggacaagcccttcttgttggctcctttgtatttgcgcgcgttggggtgctcttgcagaaggcgagcccacgctgcccgcgacttggtgtccacgcgcaggtcccggagcagtcgcgaccggtcgcccttgagattggcgcccccgcccccgggagccttgtcgcccttcttctgaccgccgcccgcagcctgcggctcggccagctcctctgccggcggggttcgcgggacctgtccgaggaaagagcgggcaggtgaagggacacgcggctgcagcacgggggactctgatgctccagccccacgcgcccgccggcgcggggtgtccctcccaagcccagagccgcccccaccgatgccggccagcttggccccgcatccacctgccacgcggccgccttcgccgctccctccggaagccccctgccctccctttgctgctcgccgggcaggccacact

SEQ ID NO: 457904 - DNA, 20 bp, Homo sapiens
  chr2:232790784-232790804
  hyper
  cervical vs. head_and_neck,anorectal,lung
tctcctgggtcctgcgcgcc

SEQ ID NO: 457905 - DNA, 226 bp, Homo sapiens; identical to SEQ ID NO: 331671
  chr2:238617178-238617404
  hyper
  cervical vs. liver_bileduct

SEQ ID NO: 457906 - DNA, 82 bp, Homo sapiens; identical to SEQ ID NO: 331676
  chr2:242269474-242269556
  hyper
  cervical vs. colorectal

SEQ ID NO: 457907 - DNA, 210 bp, Homo sapiens; identical to SEQ ID NO: 352439
  chr20:657125-657335
  hyper
  cervical vs. bladder_and_urothelial,ovary

SEQ ID NO: 457908 - DNA, 47 bp, Homo sapiens
  chr20:708554-708601
  hyper
  cervical vs. ovary
cgggagccaccgcgcccggcgggatattatatttccataaggccctc

SEQ ID NO: 457909 - DNA, 52 bp, Homo sapiens
  chr20:708851-708903
  hyper
  cervical vs. ovary
gccgggccgggtccgcagctgacggtgggggtggggagcagacgggcggggc

SEQ ID NO: 457910 - DNA, 460 bp, Homo sapiens; identical to SEQ ID NO: 375005
  chr20:708944-709404
  hyper
  cervical vs. ovary

SEQ ID NO: 457911 - DNA, 17 bp, Homo sapiens
  chr20:2668754-2668771
  hyper
  cervical vs. bladder_and_urothelial,multiple_myeloma
cggggatctgacaggaa

SEQ ID NO: 457912 - DNA, 68 bp, Homo sapiens
  chr20:3052452-3052520
  hyper
  cervical vs. anorectal
cggggagggagggacccgcagccacaggggcgcgccccgctccggcctcgcctgagaactccaggagc

SEQ ID NO: 457913 - DNA, 63 bp, Homo sapiens
  chr20:20344267-20344330
  hyper
  cervical vs. anorectal
cgggagaagagggaaaggcggaggagagaggaacggcggtggggggggaggagcacccgccaa

SEQ ID NO: 457914 - DNA, 206 bp, Homo sapiens; identical to SEQ ID NO: 453161
  chr20:21080357-21080563
  hyper
  cervical vs. colorectal,non_cancer,thyroid, lymphoid_neoplasm,upper_gi,multiple_myeloma,myeloid_neoplasm

SEQ ID NO: 457915 - DNA, 185 bp, Homo sapiens
  chr20:21086682-21086867
  hyper
  cervical vs. anorectal,ovary
ctctaagcccccgtggcagagaaaagaggaatttttaaaaacaaatcttcccttgcctgaggccattttccagccttccacgcgcctttgccggggaaagagtcgatgactcgccctgctcatcggctcagaccagagctaccctgagcccacacctctcctcctctctgcaagacatcccttcc

SEQ ID NO: 457916 - DNA, 222 bp, Homo sapiens; identical to SEQ ID NO: 453162
  chr20:21686742-21686964
  hyper
  cervical vs. sarcoma

SEQ ID NO: 457917 - DNA, 69 bp, Homo sapiens
  chr20:22565361-22565430
  hyper
  cervical vs. lung,upper_gi
cgcggagcggacaagtgccgcagtgacgtgggaggctggtgatatagcgcggcgcgctggcgcgggcct

SEQ ID NO: 457918 - DNA, 144 bp, Homo sapiens
  chr20:22565459-22565603
  hyper
  cervical vs. lung,upper_gi
gaataatcagctcacacctaggtgagaggtagccgcagccggcgctccgcacctgcccctcagcgcctgccgtccgccccaccgccgcggcgccccgcactcctgggcgggccaggggagcgggctgggcgggcgatcgggcac

SEQ ID NO: 457919 - DNA, 319 bp, Homo sapiens
  chr20:22565634-22565953
  hyper
  cervical vs. lung,upper_gi
cgggtccacagcgagtcccctgaggaaggagggacctgggaggaaaccaccctctggggcggctccggcctccagcccccgccccgtctcatcgcgccgggcgcccggtgcgcctgtcggagggcgcgtccagcctcagtgcccggcagatccctatgaaagccggatttatttatgccgggtttcttcgctctcagtgctcattctctgtcaaaacagcaagtccatgacagccaatttgcaaagcgctgtcctatttagaaaaactacgtacacacctttaactcgcccgctgctgctcctgcgaggcccctccctg

SEQ ID NO: 457920 - DNA, 1 bp, Homo sapiens
  chr20:22567354-22567355
  hyper
  cervical vs. pancreas_gallbladder,upper_gi
c

SEQ ID NO: 457921 - DNA, 67 bp, Homo sapiens; identical to SEQ ID NO: 453167
  chr20:22567768-22567835
  hyper
  cervical vs. pancreas_gallbladder,upper_gi

SEQ ID NO: 457922 - DNA, 62 bp, Homo sapiens; identical to SEQ ID NO: 453168
  chr20:30639044-30639106
  hyper
  cervical vs. multiple_myeloma,non_cancer,thyroid

SEQ ID NO: 457923 - DNA, 139 bp, Homo sapiens; identical to SEQ ID NO: 453169
  chr20:30639494-30639633
  hyper
  cervical vs. multiple_myeloma,non_cancer,thyroid

SEQ ID NO: 457924 - DNA, 139 bp, Homo sapiens; identical to SEQ ID NO: 453169
  chr20:30639494-30639633
  hyper
  cervical vs. anorectal

SEQ ID NO: 457925 - DNA, 2 bp, Homo sapiens
  chr20:30640769-30640771
  hyper
  cervical vs. anorectal
cc

SEQ ID NO: 457926 - DNA, 95 bp, Homo sapiens
  chr20:30946060-30946155
  hyper
  cervical vs. head_and_neck
cgactcccaggcgccctttcggtttgtttttgttcaaaaaaaaaaaaccccacactccccctcctcactcttcacacacactcacacacacccac

SEQ ID NO: 457927 - DNA, 113 bp, Homo sapiens
  chr20:30946218-30946331
  hyper
  cervical vs. head_and_neck
cggtcctgtctcagtccctcagcagagcgggaaagcggaggccggagccgtgacctctgaccccgtggttatgcggagccgccgcattccttagcgatcgcggggcagccgcc

SEQ ID NO: 457928 - DNA, 285 bp, Homo sapiens; identical to SEQ ID NO: 361863
  chr20:30946345-30946630
  hyper
  cervical vs. head_and_neck

SEQ ID NO: 457929 - DNA, 202 bp, Homo sapiens; identical to SEQ ID NO: 375108
  chr20:40321525-40321727
  hyper
  cervical vs. anorectal

SEQ ID NO: 457930 - DNA, 135 bp, Homo sapiens; identical to SEQ ID NO: 336443
  chr20:43104449-43104584
  hyper
  cervical vs. head_and_neck

SEQ ID NO: 457931 - DNA, 51 bp, Homo sapiens
  chr20:47934774-47934825
  hyper
  cervical vs. sarcoma,prostate,breast,thyroid,ovary, bladder_and_urothelial
cgaggaggggtcgggtctgggagcctccgcccccaactcaaggcaggctac

SEQ ID NO: 457932 - DNA, 535 bp, Homo sapiens; identical to SEQ ID NO: 352516
  chr20:55964187-55964722
  hyper
  cervical vs. anorectal

SEQ ID NO: 457933 - DNA, 431 bp, Homo sapiens; identical to SEQ ID NO: 336494
  chr20:56784811-56785242
  hyper
  cervical vs. head_and_neck,lung

SEQ ID NO: 457934 - DNA, 327 bp, Homo sapiens; identical to SEQ ID NO: 336499
  chr20:57797949-57798276
  hyper
  cervical vs. head_and_neck,upper_gi,lung, pancreas_gallbladder

SEQ ID NO: 457935 - DNA, 3 bp, Homo sapiens
  chr20:57875361-57875364
  hyper
  cervical vs. pancreas_gallbladder
cgc

SEQ ID NO: 457936 - DNA, 176 bp, Homo sapiens
  chr20:57875366-57875542
  hyper
  cervical vs. pancreas_gallbladder
gtgtgcgtgtgtgcgcgcgctctcgtggccttccggcagctggcagctgtcccggcccccaccccaccctaccccaccccacccagccgcgccacgccacgccgcccccgcccctcgctgtcctgggtgcgcctcgggccgctgcgctcctggccagctccccccagcgcctggga

SEQ ID NO: 457937 - DNA, 220 bp, Homo sapiens; identical to SEQ ID NO: 352521
  chr20:57875889-57876109
  hyper
  cervical vs. pancreas_gallbladder

SEQ ID NO: 457938 - DNA, 233 bp, Homo sapiens; identical to SEQ ID NO: 347690
  chr20:57978841-57979074
  hyper
  cervical vs. bladder_and_urothelial,colorectal, pancreas_gallbladder,melanoma,upper_gi,ovary,multiple_myeloma, sarcoma,prostate,non_cancer,lymphoid_neoplasm,renal, myeloid_neoplasm,uterine,thyroid

SEQ ID NO: 457939 - DNA, 115 bp, Homo sapiens; identical to SEQ ID NO: 345644
  chr20:58514400-58514515
  hyper
  cervical vs. colorectal,pancreas_gallbladder,renal, uterine,lymphoid_neoplasm,sarcoma,upper_gi,prostate,non_cancer

SEQ ID NO: 457940 - DNA, 44 bp, Homo sapiens
  chr20:60794658-60794702
  hyper
  cervical vs. anorectal
cgggtcccctggtggggcgtgtgcctgcgggagccacccaggtc

SEQ ID NO: 457941 - DNA, 123 bp, Homo sapiens
  chr21:27011487-27011610
  hyper
  cervical vs. sarcoma,lymphoid_neoplasm,uterine, head_and_neck,multiple_myeloma
ccatctcctcagagcgccaccccctcagcttcgcccgttgggcagaattttccaaatatctccacccctaggctgaaaagccagaaagaagttttgagccaacgaggggaagaaaggagttgg

SEQ ID NO: 457942 - DNA, 134 bp, Homo sapiens
  chr21:27011639-27011773
  hyper
  cervical vs. sarcoma,lymphoid_neoplasm,uterine, head_and_neck,multiple_myeloma
atacatccccgtccccgagacacccaatccccccacccccagcctgcccgcgcctcccgcccccagctcctcgccctggggacagctggcagccccgcgcggaccagacacaaagccgatcaatcccggaggcg

SEQ ID NO: 457943 - DNA, 153 bp, Homo sapiens; identical to SEQ ID NO: 345649
  chr21:27012725-27012878
  hyper
  cervical vs. sarcoma

SEQ ID NO: 457944 - DNA, 130 bp, Homo sapiens; identical to SEQ ID NO: 454357
  chr22:19706042-19706172
  hyper
  cervical vs. anorectal

SEQ ID NO: 457945 - DNA, 391 bp, Homo sapiens; identical to SEQ ID NO: 454358
  chr22:21319195-21319586
  hyper
  cervical vs. anorectal

SEQ ID NO: 457946 - DNA, 20 bp, Homo sapiens
  chr22:21319891-21319911
  hyper
  cervical vs. anorectal
agcgcggagcccccacactc

SEQ ID NO: 457947 - DNA, 68 bp, Homo sapiens
  chr22:21368234-21368302
  hyper
  cervical vs. anorectal
cgccccgcagagggctacgtgccctgctggacagaggtctcctgcctcctcggcggcgccagcccacc

SEQ ID NO: 457948 - DNA, 94 bp, Homo sapiens; identical to SEQ ID NO: 362020
  chr22:21368697-21368791
  hyper
  cervical vs. anorectal

SEQ ID NO: 457949 - DNA, 137 bp, Homo sapiens; identical to SEQ ID NO: 453177
  chr22:22862472-22862609
  hyper
  cervical vs. uterine,prostate,myeloid_neoplasm, multiple_myeloma,lymphoid_neoplasm,non_cancer,colorectal, melanoma,ovary,renal,thyroid

SEQ ID NO: 457950 - DNA, 31 bp, Homo sapiens; identical to SEQ ID NO: 362028
  chr22:24819665-24819696
  hyper
  cervical vs. head_and_neck

SEQ ID NO: 457951 - DNA, 174 bp, Homo sapiens
  chr22:24819901-24820075
  hyper
  cervical vs. anorectal
cgggagccggcgtgcgagcggcaggtcagccggggtgctaggtctggcgtgcggggtcctgggtgccgggtccggggtgcggggtgccgggggtccggggctggtggccgggcggcgtggggccgtcgggggtgcggggccgggaggactgggaggctggggttctgctcccct

SEQ ID NO: 457952 - DNA, 61 bp, Homo sapiens; identical to SEQ ID NO: 295272
  chr22:24820486-24820547
  hyper
  cervical vs. anorectal

SEQ ID NO: 457953 - DNA, 97 bp, Homo sapiens; identical to SEQ ID NO: 455955
  chr22:27053098-27053195
  hyper
  cervical vs. anorectal

SEQ ID NO: 457954 - DNA, 268 bp, Homo sapiens; identical to SEQ ID NO: 455956
  chr22:27053250-27053518
  hyper
  cervical vs. anorectal

SEQ ID NO: 457955 - DNA, 171 bp, Homo sapiens; identical to SEQ ID NO: 453187
  chr22:29550509-29550680
  hyper
  cervical vs. liver_bileduct,pancreas_gallbladder, upper_gi,colorectal

SEQ ID NO: 457956 - DNA, 14 bp, Homo sapiens
  chr22:29550707-29550721
  hyper
  cervical vs. liver_bileduct,pancreas_gallbladder, upper_gi,colorectal
cagcgcggtgatgc

SEQ ID NO: 457957 - DNA, 224 bp, Homo sapiens; identical to SEQ ID NO: 336634
  chr22:33192959-33193183
  hyper
  cervical vs. upper_gi,liver_bileduct

SEQ ID NO: 457958 - DNA, 135 bp, Homo sapiens
  chr22:35420072-35420207
  hyper
  cervical vs. colorectal
cgagggcacggacacggtagaatcccaggtggaagaaggcaaagtgggcgggaggggagaacttgcatgttttaacctttttcctgcacccaaccccgccatccggacgccaagcttccagtcaaacctgagacc

SEQ ID NO: 457959 - DNA, 73 bp, Homo sapiens; identical to SEQ ID NO: 352607
  chr22:35420315-35420388
  hyper
  cervical vs. colorectal

SEQ ID NO: 457960 - DNA, 14 bp, Homo sapiens
  chr22:42354024-42354038
  hyper
  cervical vs. lymphoid_neoplasm,multiple_myeloma
gcctgggccctccc

SEQ ID NO: 457961 - DNA, 560 bp, Homo sapiens
  chr22:44419919-44420479
  hyper
  cervical vs. melanoma,multiple_myeloma,uterine, bladder_and_urothelial,non_cancer,renal
ccggcaccactagcggagccgagcagagcccagggctccaacgcgtagggaaaaggctgcgccgctcccggggtggccccacgccccttctctgagcttgagcggcggcgcgggacggggacggctctggccgggaccagcaggcctcgggcatccgggacgccggggccgcgctccaggccaggggcgggggcgggaccggggcgggggccggcggcggggccgcgccctcggcctctccccggggcgaccgggcggctccacacgcgctgcgcccgccgccggccccacgcgcggcccatgtcctccgcgccgcgctcgcccaccccgcggccccgcaggatgaagaaggacgagtcgttcctgggcaagctgggcggcaccctggccaggaagcggagggcgcgcgagggtgagtgcgcgcccgcgcccgccgacccccggggacctgcccggcggtgcccgccctcggccctagagccccacgaggccgcccccgccctcccccacgcaccccgcccggcccacgcggctgcgcgaccttcgggacaggccaggcc

SEQ ID NO: 457962 - DNA, 109 bp, Homo sapiens; identical to SEQ ID NO: 352624
  chr22:44420680-44420789
  hyper
  cervical vs. melanoma,multiple_myeloma,uterine, bladder_and_urothelial,non_cancer,renal

SEQ ID NO: 457963 - DNA, 59 bp, Homo sapiens; identical to SEQ ID NO: 453192
  chr22:50170525-50170584
  hyper
  cervical vs. melanoma

SEQ ID NO: 457964 - DNA, 28 bp, Homo sapiens
  chr22:50623263-50623291
  hyper
  cervical vs. non_cancer,multiple_myeloma, myeloid_neoplasm
cgccagcgccaggtcagccaagaacccg

SEQ ID NO: 457965 - DNA, 15 bp, Homo sapiens
  chr22:50624022-50624037
  hyper
  cervical vs. non_cancer,multiple_myeloma, myeloid_neoplasm
ctgtggacgccgtgc

SEQ ID NO: 457966 - DNA, 413 bp, Homo sapiens; identical to SEQ ID NO: 455963
  chr3:10206343-10206756
  hyper
  cervical vs. liver_bileduct

SEQ ID NO: 457967 - DNA, 370 bp, Homo sapiens; identical to SEQ ID NO: 455964
  chr3:16553609-16553979
  hyper
  cervical vs. lymphoid_neoplasm,multiple_myeloma

SEQ ID NO: 457968 - DNA, 78 bp, Homo sapiens; identical to SEQ ID NO: 345081
  chr3:16555426-16555504
  hyper
  cervical vs. anorectal,lymphoid_neoplasm,ovary, multiple_myeloma,lung,sarcoma,head_and_neck, bladder_and_urothelial

SEQ ID NO: 457969 - DNA, 559 bp, Homo sapiens; identical to SEQ ID NO: 453194
  chr3:32433054-32433613
  hyper
  cervical vs. pancreas_gallbladder,bladder_and_urothelial, ovary,lung,renal

SEQ ID NO: 457970 - DNA, 180 bp, Homo sapiens; identical to SEQ ID NO: 453195
  chr3:32433665-32433845
  hyper
  cervical vs. pancreas_gallbladder,bladder_and_urothelial, ovary,lung,renal

SEQ ID NO: 457971 - DNA, 247 bp, Homo sapiens; identical to SEQ ID NO: 453196
  chr3:32433366-32433613
  hyper
  cervical vs. pancreas_gallbladder,ovary,upper_gi

SEQ ID NO: 457972 - DNA, 201 bp, Homo sapiens; identical to SEQ ID NO: 453197
  chr3:32433665-32433866
  hyper
  cervical vs. pancreas_gallbladder,ovary,upper_gi

SEQ ID NO: 457973 - DNA, 81 bp, Homo sapiens; identical to SEQ ID NO: 345086
  chr3:32434068-32434149
  hyper
  cervical vs. pancreas_gallbladder,ovary,upper_gi

SEQ ID NO: 457974 - DNA, 88 bp, Homo sapiens; identical to SEQ ID NO: 331740
  chr3:40350800-40350888
  hyper
  cervical vs. head_and_neck

SEQ ID NO: 457975 - DNA, 190 bp, Homo sapiens; identical to SEQ ID NO: 357603
  chr3:49066961-49067151
  hyper
  cervical vs. head_and_neck,lung,upper_gi

SEQ ID NO: 457976 - DNA, 234 bp, Homo sapiens; identical to SEQ ID NO: 453203
  chr3:49906737-49906971
  hyper
  cervical vs. head_and_neck

SEQ ID NO: 457977 - DNA, 49 bp, Homo sapiens; identical to SEQ ID NO: 349768
  chr3:49907379-49907428
  hyper
  cervical vs. head_and_neck

SEQ ID NO: 457978 - DNA, 202 bp, Homo sapiens
  chr3:54156155-54156357
  hyper
  cervical vs. head_and_neck
gccgcccgcaaagtgcggagcgccgcgccctgccctcggcttccctcccgcgcccccaacccccaccctggctagggtcgcccggcccggggccagccccagagtcgcgcccgcggtggcggactgcggagttgtaaagaactcagcggccgcagtagcccgggtggggcagggcgcgctccgccgcggccaaggacactgg

SEQ ID NO: 457979 - DNA, 202 bp, Homo sapiens; identical to SEQ ID NO: 457978
  chr3:54156155-54156357
  hyper
  cervical vs. head_and_neck

SEQ ID NO: 457980 - DNA, 196 bp, Homo sapiens
  chr3:55521390-55521586
  hyper
  cervical vs. head_and_neck,lung,anorectal
tccaaccccaaatgtgggcgtgattgtgcaaaagaccttacgacaaataataataaaaagaaattcttcacaagagggtgaaaaaaatgtaccactactcaactgtggcccggggcgggggaaggggggcgatctgtgcgcccaggtgcccccagttcattcacaccacagattctgcaaactcttggcggctcac

SEQ ID NO: 457981 - DNA, 347 bp, Homo sapiens
  chr3:55521390-55521737
  hyper
  cervical vs. head_and_neck,anorectal,lung
tccaaccccaaatgtgggcgtgattgtgcaaaagaccttacgacaaataataataaaaagaaattcttcacaagagggtgaaaaaaatgtaccactactcaactgtggcccggggcgggggaaggggggcgatctgtgcgcccaggtgcccccagttcattcacaccacagattctgcaaactcttggcggctcacgcctcctgatctccagctcctcctctctgggtctgtagccgaaacgtctgcttccagacgctgatcctgcagccgcgagttagtgtggacgtctctgtacacacacagacacacaccccaacacacacacccccgctgcagctttggggcc

SEQ ID NO: 457982 - DNA, 112 bp, Homo sapiens
  chr3:55521625-55521737
  hyper
  cervical vs. head_and_neck,anorectal,lung
cgaaacgtctgcttccagacgctgatcctgcagccgcgagttagtgtggacgtctctgtacacacacagacacacaccccaacacacacacccccgctgcagctttggggcc

SEQ ID NO: 457983 - DNA, 128 bp, Homo sapiens
  chr3:57204027-57204155
  hyper
  cervical vs. pancreas_gallbladder,bladder_and_urothelial
cgcctggcctgggaccgccttgcctgggacgaaaggccccagactcagctgattcctccagactcttcctgtctaggacgccaaaaacatggccttcctaaacccagccttggcgcctcctgcacagc

SEQ ID NO: 457984 - DNA, 322 bp, Homo sapiens; identical to SEQ ID NO: 357623
  chr3:57204208-57204530
  hyper
  cervical vs. pancreas_gallbladder,bladder_and_urothelial

SEQ ID NO: 457985 - DNA, 447 bp, Homo sapiens; identical to SEQ ID NO: 453205
  chr3:62859445-62859892
  hyper
  cervical vs. upper_gi,colorectal,pancreas_gallbladder, lung

SEQ ID NO: 457986 - DNA, 206 bp, Homo sapiens; identical to SEQ ID NO: 453206
  chr3:62859964-62860170
  hyper
  cervical vs. upper_gi,colorectal,pancreas_gallbladder, lung

SEQ ID NO: 457987 - DNA, 136 bp, Homo sapiens
  chr3:62859756-62859892
  hyper
  cervical vs. colorectal
cgagcggagcgctgctccaagacgctcttctccctccacctcggcgcccccacctgccgttgcccccgcccgccgaacgcacgcccaggagggcgggcccggagttgagcgcagccgcccgccgctggagagcgct

SEQ ID NO: 457988 - DNA, 206 bp, Homo sapiens; identical to SEQ ID NO: 453206
  chr3:62859964-62860170
  hyper
  cervical vs. colorectal

SEQ ID NO: 457989 - DNA, 86 bp, Homo sapiens
  chr3:63264169-63264255
  hyper
  cervical vs. bladder_and_urothelial
aaaagaactggtggatgagaagagcgagcgagggcgagctatggaccctgtgagtcaggtgagacagaactgggcagggcggctgg

SEQ ID NO: 457990 - DNA, 138 bp, Homo sapiens; identical to SEQ ID NO: 370129
  chr3:63264840-63264978
  hyper
  cervical vs. bladder_and_urothelial

SEQ ID NO: 457991 - DNA, 786 bp, Homo sapiens
  chr3:67048291-67049077
  hyper
  cervical vs. upper_gi,lymphoid_neoplasm,head_and_neck, colorectal,pancreas_gallbladder
cggaagctagtcactggcaggaagtttacggaagaagaaaaaggtaaaaaaatgtgccgggggccaggagagaggcctaaaatggggaaattcgcacttgaagagctttccctaccccagcccctcagaatgacagttctcctccgccagaagactacctctcccggcaggcactgcgcgctcgacggccacaggctggccagctccctgctctccacctccatccgaatcagccaataggaattcccggcttgggcctccgcccgacccggaccacgcgggagccggggcaatcaaactacatttcccgacacgcatgtgctcgcgtcgtggccaatcagcgccaggaattcggaggctaggggtggagccagatgcacaggacaccccattggccaggggaagcttagaagagccggaacccgggagctagagaagcgaaatgacatttcctttttaaatagctggagtcggggccccatcgagaaatggccgcgtcggcaggtgggtcgtgtggtggccagggcggcgtggagggaggtgagggggaaggtgggccggggccggccacaggcagtgggatgaggacgtagcggtgcggagctagagggaaggatgaagcggtggaggggaatgagaagagggaggatgaatggtgcggagggcggtgggcggtccggcgggaccgggatggggaggctgggtacccgccggcgctgcgccccaggaggcagcgggaggcggcttgagggggcaccggcggccgccgttgttcgagcttccctc

SEQ ID NO: 457992 - DNA, 768 bp, Homo sapiens; identical to SEQ ID NO: 454376
  chr3:67048599-67049367
  hyper
  cervical vs. lymphoid_neoplasm,colorectal, pancreas_gallbladder

SEQ ID NO: 457993 - DNA, 311 bp, Homo sapiens; identical to SEQ ID NO: 357643
  chr3:73674224-73674535
  hyper
  cervical vs. head_and_neck

SEQ ID NO: 457994 - DNA, 167 bp, Homo sapiens; identical to SEQ ID NO: 370150
  chr3:79815913-79816080
  hyper
  cervical vs. anorectal

SEQ ID NO: 457995 - DNA, 174 bp, Homo sapiens; identical to SEQ ID NO: 357644
  chr3:85008817-85008991
  hyper
  cervical vs. lung

SEQ ID NO: 457996 - DNA, 238 bp, Homo sapiens; identical to SEQ ID NO: 370164
  chr3:106959642-106959880
  hyper
  cervical vs. head_and_neck

SEQ ID NO: 457997 - DNA, 228 bp, Homo sapiens
  chr3:107148769-107148997
  hyper
cgcccaggctgggaggcccaagtcccggcagctgctgcggtggacttagaggcagcagctcctgcttctgccccaaacgttcagtgtagtcggattcccggggacagcagggcagtctgcgcgcacatccccggggcatcgcaggacacctgctgccccctatcggtggtgagaacaataacccgaacccggttggaatcaactggaagaggccttttgaaaaaaaga

SEQ ID NO: 457998 - DNA, 25 bp, Homo sapiens
  chr3:107149063-107149088
  hyper
ctgcctcgttttaatgcagtttttc

SEQ ID NO: 457999 - DNA, 49 bp, Homo sapiens; identical to SEQ ID NO: 453209
  chr3:115231437-115231486
  hyper
  cervical vs. ovary,bladder_and_urothelial, multiple_myeloma,prostate,sarcoma,non_cancer,breast,thyroid, uterine,lung,renal,myeloid_neoplasm

SEQ ID NO: 458000 - DNA, 127 bp, Homo sapiens; identical to SEQ ID NO: 281391
  chr3:119422082-119422209
  hyper
  cervical vs. pancreas_gallbladder

SEQ ID NO: 458001 - DNA, 129 bp, Homo sapiens
  chr3:120626737-120626866
  hyper
  cervical vs. anorectal
cgacccccagcatactggccaataccgctgtcaatcaaatacctcacctacttctctaaattcccccctcccactgtcattggctttaccttcggcctatccacagatttcttctgccctggagaccac

SEQ ID NO: 458002 - DNA, 60 bp, Homo sapiens; identical to SEQ ID NO: 229708
  chr3:120627258-120627318
  hyper
  cervical vs. anorectal

SEQ ID NO: 458003 - DNA, 60 bp, Homo sapiens; identical to SEQ ID NO: 229708
  chr3:120627258-120627318
  hyper
  cervical vs. anorectal

SEQ ID NO: 458004 - DNA, 1 bp, Homo sapiens
  chr3:120628011-120628012
  hyper
  cervical vs. anorectal
c

SEQ ID NO: 458005 - DNA, 49 bp, Homo sapiens; identical to SEQ ID NO: 453213
  chr3:129694299-129694348
  hyper
  cervical vs. multiple_myeloma,non_cancer

SEQ ID NO: 458006 - DNA, 30 bp, Homo sapiens; identical to SEQ ID NO: 453214
  chr3:130064848-130064878
  hyper
  cervical vs. sarcoma

SEQ ID NO: 458007 - DNA, 604 bp, Homo sapiens
  chr3:131753369-131753973
  hyper
  cervical vs. lung,renal,melanoma,breast
cgccccaggaacacaggaatgaagagttggcatttacttacctgggtgtgccaatctcgaagagtggagagagaattcagcccgggacgaggtctgtcccgcccccaggatgcaaaatccggctttgaagtggaggtggttggtgtggtagttttgtactgatgtaaggggcgtcgcacctccttcccctctcgtcctccgaggtcagtttagcaacagcggctgggaaaggtgctgagagcagagttcggtctctccggaaaccctgactccattctcggtgatgggggtgggggaagagggtgaaaatgttggagatgtcaggtcggctctcagttaactcggagagtaaagaggagggtactgagaaaagagggagggagtggagtggagcgagggaggaaggaaaggagggtggcagaaagagaaggggacgagcgggtggcggggagatggcagcttctcacagagagatttccaccttctgacgaatcccatgcacccagcaacccggcaagagactggttccgaaacctccgcgcgagcgccccctgggggttgctgacggagacgagcattgccccgggaacccgagctcaggccc

SEQ ID NO: 458008 - DNA, 9 bp, Homo sapiens
  chr3:132756962-132756971
  hyper
  cervical vs. lung
cgaaaacag

SEQ ID NO: 458009 - DNA, 65 bp, Homo sapiens; identical to SEQ ID NO: 357691
  chr3:132757908-132757973
  hyper
  cervical vs. lung,anorectal

SEQ ID NO: 458010 - DNA, 323 bp, Homo sapiens
  chr3:134513748-134514071
  hyper
  cervical vs. head_and_neck
cgaaggctcgtttgatcatttaaagcggatccagtcctgggtgggatgtaagggcacgaggcctccccagctccttcgctgggcaccctatggggggacagggtgagttgggcgggccgctgcggttctccgagagcaccacgagggggagcccggacccctcctagcgccttccgagccctcccgcacagccttgcaagcaaaagtttttcttaaactaacaatgccagtgtaaggaggtgctcgcgcctgattggccgggggaattttgcaggtttgattccttgattggacaggaggtgttaggggtggggagagagctg

SEQ ID NO: 458011 - DNA, 36 bp, Homo sapiens; identical to SEQ ID NO: 453216
  chr3:136751341-136751377
  hyper
  cervical vs. ovary,bladder_and_urothelial, multiple_myeloma,breast,upper_gi,uterine,prostate,renal, lymphoid_neoplasm,colorectal,non_cancer,thyroid,lung,sarcoma, pancreas_gallbladder

SEQ ID NO: 458012 - DNA, 192 bp, Homo sapiens
  chr3:137480764-137480956
  hyper
  cervical vs. sarcoma
gtcggggggtcagctggcgccctgcccaccatcgaacgcccttcgtatcactccgctcctcattgcgaattggactgcgcattggctgcgacccaaggctgaacacaagaagcttggagaggagctcgggcgtttgaggagaaggaaatatgaggaattgcaggaaggcgctcgcctgcccgaactgcctcc

SEQ ID NO: 458013 - DNA, 24 bp, Homo sapiens
  chr3:137485846-137485870
  hyper
cgacattgtcatggctcaggcaag

SEQ ID NO: 458014 - DNA, 181 bp, Homo sapiens
  chr3:137488090-137488271
  hyper
  cervical vs. liver_bileduct
cgccggcgcggcaggagcagagttgtttgggttttacctaggtttgctttcttaaaccttggctgccatctggctcaggggtacactggctacatcttcagagagatgtggaattcttgacccctttccgcctctggcctccctcattccgagaactccgtcagcctttcatgcacttctc

SEQ ID NO: 458015 - DNA, 79 bp, Homo sapiens; identical to SEQ ID NO: 346596
  chr3:139655101-139655180
  hyper
  cervical vs. anorectal,breast

SEQ ID NO: 458016 - DNA, 15 bp, Homo sapiens
  chr3:142837817-142837832
  hyper
  cervical vs. ovary
cgggacaagtatttt

SEQ ID NO: 458017 - DNA, 86 bp, Homo sapiens
  chr3:150802802-150802888
  hyper
  cervical vs. lung,breast,multiple_myeloma
cgtgggttcaaattccgactcgtttcgtggctttcggcaagtgagtggtcctctctgagctggctcaatttctccatccataaaaa

SEQ ID NO: 458018 - DNA, 98 bp, Homo sapiens; identical to SEQ ID NO: 349842
  chr3:152553725-152553823
  hyper
  cervical vs. anorectal

SEQ ID NO: 458019 - DNA, 32 bp, Homo sapiens; identical to SEQ ID NO: 370246
  chr3:152878837-152878869
  hyper
  cervical vs. head_and_neck

SEQ ID NO: 458020 - DNA, 192 bp, Homo sapiens
  chr3:152879611-152879803
  hyper
  cervical vs. head_and_neck,upper_gi
cggggctgagtgaatggcgtccttgggcctttgataacgggagttggcaagaccacagcctactccatccctgaggcggcccgccgcgcccacgtgcttctcgcagagccgccgcccttgtccaccactcccacagctgtaaaataaagcggcctgcatgcttcctacagcgctttcctcgctcccatatac

SEQ ID NO: 458021 - DNA, 1 bp, Homo sapiens
  chr3:152879855-152879856
  hyper
  cervical vs. head_and_neck,upper_gi
c

SEQ ID NO: 458022 - DNA, 64 bp, Homo sapiens; identical to SEQ ID NO: 453219
  chr3:154797121-154797185
  hyper
  cervical vs. ovary,melanoma,sarcoma,prostate, bladder_and_urothelial

SEQ ID NO: 458023 - DNA, 121 bp, Homo sapiens; identical to SEQ ID NO: 453220
  chr3:154797214-154797335
  hyper
  cervical vs. ovary,melanoma,sarcoma,prostate, bladder_and_urothelial

SEQ ID NO: 458024 - DNA, 4 bp, Homo sapiens
  chr3:157812151-157812155
  hyper
  cervical vs. non_cancer,thyroid,myeloid_neoplasm
cgca

SEQ ID NO: 458025 - DNA, 271 bp, Homo sapiens; identical to SEQ ID NO: 349862
  chr3:169379645-169379916
  hyper
  cervical vs. upper_gi

SEQ ID NO: 458026 - DNA, 108 bp, Homo sapiens; identical to SEQ ID NO: 453226
  chr3:170626349-170626457
  hyper
  cervical vs. colorectal

SEQ ID NO: 458027 - DNA, 508 bp, Homo sapiens; identical to SEQ ID NO: 357752
  chr3:170626710-170627218
  hyper
  cervical vs. colorectal

SEQ ID NO: 458028 - DNA, 87 bp, Homo sapiens; identical to SEQ ID NO: 453229
  chr3:179754092-179754179
  hyper
  cervical vs. breast

SEQ ID NO: 458029 - DNA, 4 bp, Homo sapiens
  chr3:180319831-180319835
  hyper
  cervical vs. pancreas_gallbladder
cgta

SEQ ID NO: 458030 - DNA, 135 bp, Homo sapiens
  chr3:180319921-180320056
  hyper
  cervical vs. pancreas_gallbladder
gtgctgtctgtgtacttccggcagcctccagacagtttcttccgcttcctgtaccacccggctcaagtagcggacacggaacagggaactatcagcccgtcggcctccgggccctgcattctctagccatggacc

SEQ ID NO: 458031 - DNA, 170 bp, Homo sapiens
  chr3:180320087-180320257
  hyper
  cervical vs. pancreas_gallbladder
cgggtcgtctttgctctctctacttcggagcgaacagcaggacaatccacacttccgtagcctcctggggtcggccgccgagccagcccggggcccgccgccccagcacccgttgcagggcaggtaatgagacgttggtgccactgcgccacggaagaggggacgcagct

SEQ ID NO: 458032 - DNA, 98 bp, Homo sapiens; identical to SEQ ID NO: 349870
  chr3:180320294-180320392
  hyper
  cervical vs. pancreas_gallbladder

SEQ ID NO: 458033 - DNA, 207 bp, Homo sapiens; identical to SEQ ID NO: 453230
  chr3:180397104-180397311
  hyper
  cervical vs. lung,sarcoma,breast,ovary

SEQ ID NO: 458034 - DNA, 48 bp, Homo sapiens; identical to SEQ ID NO: 454385
  chr3:181444767-181444815
  hyper
  cervical vs. anorectal,upper_gi

SEQ ID NO: 458035 - DNA, 809 bp, Homo sapiens; identical to SEQ ID NO: 345120
  chr3:183165024-183165833
  hyper
  cervical vs. liver_bileduct,bladder_and_urothelial,lung, ovary,renal,melanoma,uterine

SEQ ID NO: 458036 - DNA, 939 bp, Homo sapiens; identical to SEQ ID NO: 331970
  chr3:184278877-184279816
  hyper
  cervical vs. upper_gi

SEQ ID NO: 458037 - DNA, 253 bp, Homo sapiens; identical to SEQ ID NO: 357777
  chr3:184322331-184322584
  hyper
  cervical vs. pancreas_gallbladder

SEQ ID NO: 458038 - DNA, 3 bp, Homo sapiens
  chr3:186078710-186078713
  hyper
  cervical vs. non_cancer,thyroid
cgt

SEQ ID NO: 458039 - DNA, 133 bp, Homo sapiens; identical to SEQ ID NO: 453234
  chr3:186079331-186079464
  hyper
  cervical vs. non_cancer,thyroid

SEQ ID NO: 458040 - DNA, 291 bp, Homo sapiens; identical to SEQ ID NO: 453235
  chr3:186079331-186079622
  hyper
  cervical vs. prostate,myeloid_neoplasm,multiple_myeloma, non_cancer,lymphoid_neoplasm,thyroid,breast,sarcoma,ovary

SEQ ID NO: 458041 - DNA, 125 bp, Homo sapiens; identical to SEQ ID NO: 453236
  chr3:186079497-186079622
  hyper
  cervical vs. ovary,multiple_myeloma,prostate,non_cancer, myeloid_neoplasm,uterine,thyroid,lymphoid_neoplasm,sarcoma, breast

SEQ ID NO: 458042 - DNA, 46 bp, Homo sapiens; identical to SEQ ID NO: 454388
  chr3:187455297-187455343
  hyper
  cervical vs. renal

SEQ ID NO: 458043 - DNA, 447 bp, Homo sapiens; identical to SEQ ID NO: 454389
  chr3:187456666-187457113
  hyper
  cervical vs. colorectal,lymphoid_neoplasm

SEQ ID NO: 458044 - DNA, 380 bp, Homo sapiens; identical to SEQ ID NO: 454390
  chr3:187456733-187457113
  hyper
  cervical vs. pancreas_gallbladder,colorectal

SEQ ID NO: 458045 - DNA, 60 bp, Homo sapiens; identical to SEQ ID NO: 454391
  chr3:187457654-187457714
  hyper
  cervical vs. pancreas_gallbladder,colorectal

SEQ ID NO: 458046 - DNA, 509 bp, Homo sapiens; identical to SEQ ID NO: 345125
  chr3:187457654-187458163
  hyper
  cervical vs. pancreas_gallbladder,colorectal

SEQ ID NO: 458047 - DNA, 56 bp, Homo sapiens; identical to SEQ ID NO: 349888
  chr3:192128140-192128196
  hyper
  cervical vs. renal,sarcoma,ovary,myeloid_neoplasm, thyroid,multiple_myeloma,non_cancer

SEQ ID NO: 458048 - DNA, 211 bp, Homo sapiens; identical to SEQ ID NO: 331997
  chr3:197023975-197024186
  hyper
  cervical vs. pancreas_gallbladder

SEQ ID NO: 458049 - DNA, 151 bp, Homo sapiens
  chr3:197807078-197807229
  hyper
cgctctgagggtgcccagcgccctccaaggcccccgtcccaggggctgcggggctgcggggaagccgggcctggggaccccctcccaccccggctgagcccccgctacctgtcctgggcatccacgtcccggcacctgcgcgccaggcggc

SEQ ID NO: 458050 - DNA, 368 bp, Homo sapiens; identical to SEQ ID NO: 357800
  chr3:197807545-197807913
  hyper

SEQ ID NO: 458051 - DNA, 285 bp, Homo sapiens; identical to SEQ ID NO: 370354
  chr4:2042731-2043016
  hyper
  cervical vs. anorectal

SEQ ID NO: 458052 - DNA, 80 bp, Homo sapiens; identical to SEQ ID NO: 453239
  chr4:6201800-6201880
  hyper
  cervical vs. lung,ovary,breast,renal

SEQ ID NO: 458053 - DNA, 65 bp, Homo sapiens; identical to SEQ ID NO: 346630
  chr4:6202658-6202723
  hyper
  cervical vs. lung,ovary,breast,renal

SEQ ID NO: 458054 - DNA, 115 bp, Homo sapiens; identical to SEQ ID NO: 332040
  chr4:8609457-8609572
  hyper
  cervical vs. pancreas_gallbladder,liver_bileduct, upper_gi,anorectal

SEQ ID NO: 458055 - DNA, 153 bp, Homo sapiens; identical to SEQ ID NO: 357842
  chr4:13546756-13546909
  hyper
  cervical vs. breast,anorectal,lung

SEQ ID NO: 458056 - DNA, 57 bp, Homo sapiens; identical to SEQ ID NO: 454399
  chr4:15780742-15780799
  hyper
  cervical vs. multiple_myeloma,uterine

SEQ ID NO: 458057 - DNA, 353 bp, Homo sapiens; identical to SEQ ID NO: 349919
  chr4:15780742-15781095
  hyper
  cervical vs. multiple_myeloma

SEQ ID NO: 458058 - DNA, 3 bp, Homo sapiens
  chr4:42155097-42155100
  hyper
  cervical vs. thyroid,prostate,non_cancer, myeloid_neoplasm,uterine
gac

SEQ ID NO: 458059 - DNA, 25 bp, Homo sapiens
  chr4:42401057-42401082
  hyper
  cervical vs. uterine,ovary
ctgacttcagagcggaataaatcac

SEQ ID NO: 458060 - DNA, 196 bp, Homo sapiens
  chr4:46391158-46391354
  hyper
  cervical vs. colorectal
cgccacaaccccctcaaccaagaccacctccgcaaccacagcgggaaaagctaggggcaggcagcccacttttgcaattactctacattacagtgaactgcggtcctcacgtcttcttttcttcactccccttaacaaaataaaataaataatttcccttcctgcccacccacggttgcccaagaccaagtcttag

SEQ ID NO: 458061 - DNA, 9 bp, Homo sapiens
  chr4:46391383-46391392
  hyper
  cervical vs. colorectal
aaacgacgc

SEQ ID NO: 458062 - DNA, 285 bp, Homo sapiens
  chr4:46391394-46391679
  hyper
  cervical vs. colorectal
ttgacagctgctctggagccgaggatcacaataagagaaggcgcgtgaggctccggcagcaaacaccagccaggcaggcagcggtaatcacagtgagcaaagttgaagactataaaagagccaggctaacgtgctgccgagcaggtgtcctggattttattgtagttgcaaatatgcttctggtgataagtatcgaaattattttttaagtgcgctggggaggagggaggtgcgggaattgagcctcctccgtttccagggagcctctgaaagtggggtgggggg

SEQ ID NO: 458063 - DNA, 431 bp, Homo sapiens
  chr4:46391710-46392141
  hyper
  cervical vs. colorectal
caggaaagtgtctctatcgggaccaacgtgtgcgaccctacctgaaacggcaagcagaattcggtgttttcttccttttgccctgatcttgacgagataggaaacttgggagagagagagagagagagagagagagagagagagagagagagagagagagagagagagaccgagactgcagcagccaagagagcgtggagcgatgggctggtggaagccggagaggagcgctaggagccgcggcggcggcgcgaggtgtagaaggaggcgaaggcgttcgtagtggcggtgatgggcggaggaggaggaagaggaggaggaggaagaggaggagggggaaaacgatgacaggagctggggccggggggggaaattggggggacgcgggcggaggcgcggtgcgcgccggcggtggcgggcacgagccccgc

SEQ ID NO: 458064 - DNA, 354 bp, Homo sapiens; identical to SEQ ID NO: 357880
  chr4:54967511-54967865
  hyper
  cervical vs. anorectal

SEQ ID NO: 458065 - DNA, 94 bp, Homo sapiens
  chr4:57687545-57687639
  hyper
  cervical vs. anorectal
cgaagcccaagcaagaactaaagagggtggctgactccacaaagccacccccacaacccccagttcgcgttcctccacctggcaggtcctctgg

SEQ ID NO: 458066 - DNA, 205 bp, Homo sapiens; identical to SEQ ID NO: 346643
  chr4:57687887-57688092
  hyper
  cervical vs. anorectal

SEQ ID NO: 458067 - DNA, 428 bp, Homo sapiens
  chr4:58029764-58030192
  hyper
  cervical vs. head_and_neck,bladder_and_urothelial
cgtgagtcagtgattcccagtgttgctgtgcctgaaaacccaccactaatgtcagcgccttgtgctgttgagttgcacgcggcgcccctgcagtccagggctggggctagcccggcgagcgcgcggcaggcagagcattcccggacgagtccggtagatggtagcattgtgcagccgatgcgtcctctcccagcttgcgtctcatttttccctctccccctttcctgggctcagcggtgaggctcaggtaccggcgccgccctgatgcctactatgccgcgccatctccagatggtccgcacctggcgggtcacgacgagtctcaatccacagcatggggctgactcggactcaggagtttttgtggctccaggcgtaaccgttgctttggataaaattggtccagttcacttgaccaaggagaagtg

SEQ ID NO: 458068 - DNA, 1 bp, Homo sapiens
  chr4:58030524-58030525
  hyper
  cervical vs. head_and_neck,bladder_and_urothelial
c

SEQ ID NO: 458069 - DNA, 230 bp, Homo sapiens
  chr4:73433670-73433900
  hyper
  cervical vs. lung,anorectal
cgggcttcaccttgagcctccaaagggttgggggcagggccgaaaagaaacagagctgcactcaacttagctttaaaaagaggaggagttgtgcagagggggaggggagaaggcggccggcgcctgcagcctctgcccaggaaaacggagggcaggaaacgtctccagcccccctccccaactgtcaaatcctagcccggccgtggtactcccaggacacgtgtctactg

SEQ ID NO: 458070 - DNA, 125 bp, Homo sapiens; identical to SEQ ID NO: 349938
  chr4:73434163-73434288
  hyper
  cervical vs. lung,anorectal

SEQ ID NO: 458071 - DNA, 133 bp, Homo sapiens; identical to SEQ ID NO: 199452
  chr4:76555905-76556038
  hyper
  cervical vs. lung

SEQ ID NO: 458072 - DNA, 780 bp, Homo sapiens; identical to SEQ ID NO: 332123
  chr4:80993254-80994034
  hyper
  cervical vs. lung,colorectal,uterine, pancreas_gallbladder,anorectal

SEQ ID NO: 458073 - DNA, 616 bp, Homo sapiens; identical to SEQ ID NO: 332148
  chr4:90228673-90229289
  hyper
  cervical vs. colorectal,ovary,bladder_and_urothelial, pancreas_gallbladder,uterine

SEQ ID NO: 458074 - DNA, 135 bp, Homo sapiens
  chr4:100729543-100729678
  hyper
  cervical vs. liver_bileduct,upper_gi, pancreas_gallbladder
cgatggatctaatcttgacttcaggtaaaacagctcccccgcgcccaccaacgcggtattactgccacctagtgatagcatatcctcatcacagaggtcctgcctgtggaagtggaggggaagaggtgtagtaag

SEQ ID NO: 458075 - DNA, 11 bp, Homo sapiens
  chr4:113443992-113444003
  hyper
  cervical vs. non_cancer,thyroid,myeloid_neoplasm
cgtgtctacag

SEQ ID NO: 458076 - DNA, 106 bp, Homo sapiens
  chr4:113627471-113627577
  hyper
  cervical vs. head_and_neck,anorectal
cggggccgacacgagccaacttggctacatcgcccggcccaggaccattctctaaacctcttttctcagtctcacttcacacacagacacacatacagacacacac

SEQ ID NO: 458077 - DNA, 260 bp, Homo sapiens
  chr4:121993736-121993996
  hyper
  cervical vs. lung
tcccagccctaacccctcccgcctcaccgctgcccgcccgccccctccctcctctgcccgttgcctccccctccgtccctccttctctccctcccgctgcgcgccagcgcgcacgcacacacacacacacacacacacactcatacacatacacacactcacacacagacaccctctccctccttttctctctccctgtagccctccctccctctctttctctcacacacacaccaccctgctcagcgacccagcgctcc

SEQ ID NO: 458078 - DNA, 36 bp, Homo sapiens; identical to SEQ ID NO: 370546
  chr4:121994354-121994390
  hyper
  cervical vs. lung

SEQ ID NO: 458079 - DNA, 71 bp, Homo sapiens
  chr4:123747655-123747726
  hyper
  cervical vs. head_and_neck,sarcoma,renal
cgtggtttgggtggtgcgggggttgggcgggggtgacttttgggggataaggggcggtggagcccagggaa

SEQ ID NO: 458080 - DNA, 225 bp, Homo sapiens; identical to SEQ ID NO: 357959
  chr4:123748993-123749218
  hyper
  cervical vs. anorectal

SEQ ID NO: 458081 - DNA, 353 bp, Homo sapiens
  chr4:141293964-141294317
  hyper
  cervical vs. anorectal,head_and_neck, bladder_and_urothelial,melanoma,breast,liver_bileduct,uterine
cgaatattaaagcaggatgccgctttgtgtcaagtactagattacgatgaacggtgtcacgaagaacactccactcttgataccgtatatgtgaccttgagcaagaaatgtgttcacgctcaggcttcagttcctttctgtgggttgctgtgaggctccacaggggtaaggtaagcacaagtgctatgcctcagtaccactagggtattttctcaattctaaaatattaaatggccacgcactacagatttaataatagtttcggaggaggggcgtgaggagaggaacattccactagctcaactataagctttccgatttcggaaataagaaaaatatgaaaaagtctgctt

SEQ ID NO: 458082 - DNA, 104 bp, Homo sapiens
  chr4:141294418-141294522
  hyper
  cervical vs. anorectal,head_and_neck, bladder_and_urothelial,melanoma,breast,liver_bileduct,uterine
ctttcctgaatgacttctctgtcgctcataccagcctctttcctgattttccacactgggattctcactccaattctcaggtttcctgatagacctgatgagcc

SEQ ID NO: 458083 - DNA, 89 bp, Homo sapiens
  chr4:141294545-141294634
  hyper
  cervical vs. anorectal,head_and_neck, bladder_and_urothelial,melanoma,breast,liver_bileduct,uterine
cgcttctttactgtcattggctgtcgctgttccaggtcccgcccacagcgacctcaatcctgattggatgtcagtgtccttttgttatg

SEQ ID NO: 458084 - DNA, 104 bp, Homo sapiens; identical to SEQ ID NO: 458082
  chr4:141294418-141294522
  hyper
  cervical vs. head_and_neck,liver_bileduct

SEQ ID NO: 458085 - DNA, 89 bp, Homo sapiens; identical to SEQ ID NO: 458083
  chr4:141294545-141294634
  hyper
  cervical vs. head_and_neck,liver_bileduct

SEQ ID NO: 458086 - DNA, 40 bp, Homo sapiens; identical to SEQ ID NO: 345144
  chr4:141295287-141295327
  hyper
  cervical vs. head_and_neck,liver_bileduct

SEQ ID NO: 458087 - DNA, 3 bp, Homo sapiens
  chr4:147559188-147559191
  hyper
  cervical vs. melanoma
cgg

SEQ ID NO: 458088 - DNA, 40 bp, Homo sapiens; identical to SEQ ID NO: 350004
  chr4:156298073-156298113
  hyper
  cervical vs. breast,lung,uterine,ovary

SEQ ID NO: 458089 - DNA, 54 bp, Homo sapiens; identical to SEQ ID NO: 453263
  chr4:158142705-158142759
  hyper
  cervical vs. multiple_myeloma,sarcoma,uterine

SEQ ID NO: 458090 - DNA, 269 bp, Homo sapiens; identical to SEQ ID NO: 453264
  chr4:158143023-158143292
  hyper
  cervical vs. multiple_myeloma,sarcoma,uterine

SEQ ID NO: 458091 - DNA, 269 bp, Homo sapiens; identical to SEQ ID NO: 453264
  chr4:158143023-158143292
  hyper
  cervical vs. uterine

SEQ ID NO: 458092 - DNA, 213 bp, Homo sapiens; identical to SEQ ID NO: 370599
  chr4:158143704-158143917
  hyper
  cervical vs. uterine

SEQ ID NO: 458093 - DNA, 71 bp, Homo sapiens; identical to SEQ ID NO: 350015
  chr4:175750738-175750809
  hyper
  cervical vs. lung,anorectal,breast

SEQ ID NO: 458094 - DNA, 69 bp, Homo sapiens; identical to SEQ ID NO: 453270
  chr4:176922585-176922654
  hyper
  cervical vs. lung,breast,ovary

SEQ ID NO: 458095 - DNA, 43 bp, Homo sapiens; identical to SEQ ID NO: 453271
  chr4:176986744-176986787
  hyper
  cervical vs. melanoma,ovary,lung,myeloid_neoplasm,renal, non_cancer,sarcoma,thyroid,breast,prostate,lymphoid_neoplasm, bladder_and_urothelial,multiple_myeloma

SEQ ID NO: 458096 - DNA, 315 bp, Homo sapiens; identical to SEQ ID NO: 345152
  chr5:1645162-1645477
  hyper
  cervical vs. lung,bladder_and_urothelial,ovary,breast, renal,melanoma,liver_bileduct,prostate,sarcoma,uterine, multiple_myeloma,colorectal,pancreas_gallbladder,non_cancer, lymphoid_neoplasm

SEQ ID NO: 458097 - DNA, 74 bp, Homo sapiens
  chr5:11903295-11903369
  hyper
  cervical vs. melanoma,bladder_and_urothelial,prostate
cggcgctttctggagcctggctgtctattgtcagcacgcagaagcccccgaaacctgtgaagccggctgcaaag

SEQ ID NO: 458098 - DNA, 188 bp, Homo sapiens; identical to SEQ ID NO: 453277
  chr5:22853256-22853444
  hyper
  cervical vs. multiple_myeloma,bladder_and_urothelial, thyroid

SEQ ID NO: 458099 - DNA, 11 bp, Homo sapiens
  chr5:22853508-22853519
  hyper
  cervical vs. multiple_myeloma,bladder_and_urothelial, thyroid
ccaggattccc

SEQ ID NO: 458100 - DNA, 100 bp, Homo sapiens; identical to SEQ ID NO: 350052
  chr5:22853569-22853669
  hyper
  cervical vs. multiple_myeloma,bladder_and_urothelial, thyroid

SEQ ID NO: 458101 - DNA, 99 bp, Homo sapiens; identical to SEQ ID NO: 453281
  chr5:42950747-42950846
  hyper
  cervical vs. sarcoma,non_cancer,multiple_myeloma, myeloid_neoplasm,thyroid,lymphoid_neoplasm,renal,prostate

SEQ ID NO: 458102 - DNA, 175 bp, Homo sapiens; identical to SEQ ID NO: 346682
  chr5:42995428-42995603
  hyper
  cervical vs. lymphoid_neoplasm

SEQ ID NO: 458103 - DNA, 50 bp, Homo sapiens; identical to SEQ ID NO: 345162
  chr5:49737299-49737349
  hyper
  cervical vs. multiple_myeloma,pancreas_gallbladder, bladder_and_urothelial,lymphoid_neoplasm,prostate

SEQ ID NO: 458104 - DNA, 76 bp, Homo sapiens; identical to SEQ ID NO: 454408
  chr5:54518558-54518634
  hyper
  cervical vs. myeloid_neoplasm,multiple_myeloma, non_cancer

SEQ ID NO: 458105 - DNA, 2 bp, Homo sapiens
  chr5:57877796-57877798
  hyper
  cervical vs. bladder_and_urothelial,sarcoma,breast, melanoma,myeloid_neoplasm,lung,pancreas_gallbladder,renal, upper_gi,prostate,ovary,thyroid,non_cancer,uterine, multiple_myeloma
cg

SEQ ID NO: 458106 - DNA, 38 bp, Homo sapiens; identical to SEQ ID NO: 453283
  chr5:57878673-57878711
  hyper
  cervical vs. melanoma,sarcoma,breast,renal,lung,ovary, pancreas_gallbladder,myeloid_neoplasm,bladder_and_urothelial, multiple_myeloma,non_cancer,upper_gi,uterine,prostate, liver_bileduct,thyroid,colorectal

SEQ ID NO: 458107 - DNA, 159 bp, Homo sapiens; identical to SEQ ID NO: 453284
  chr5:57878752-57878911
  hyper
  cervical vs. melanoma,sarcoma,breast,renal,lung,ovary, pancreas_gallbladder,myeloid_neoplasm,bladder_and_urothelial, multiple_myeloma,non_cancer,upper_gi,uterine,prostate, liver_bileduct,thyroid,colorectal

SEQ ID NO: 458108 - DNA, 38 bp, Homo sapiens; identical to SEQ ID NO: 453283
  chr5:57878673-57878711
  hyper
  cervical vs. renal,sarcoma,lung,ovary,breast, myeloid_neoplasm,prostate,multiple_myeloma,thyroid,melanoma, uterine,non_cancer,liver_bileduct,bladder_and_urothelial, upper_gi,pancreas_gallbladder,colorectal

SEQ ID NO: 458109 - DNA, 159 bp, Homo sapiens; identical to SEQ ID NO: 453284
  chr5:57878752-57878911
  hyper
  cervical vs. renal,sarcoma,lung,ovary,breast, myeloid_neoplasm,prostate,multiple_myeloma,thyroid,melanoma, uterine,non_cancer,liver_bileduct,bladder_and_urothelial, upper_gi,pancreas_gallbladder,colorectal

SEQ ID NO: 458110 - DNA, 227 bp, Homo sapiens; identical to SEQ ID NO: 345168
  chr5:57879190-57879417
  hyper
  cervical vs. renal,sarcoma,lung,ovary,breast, myeloid_neoplasm,prostate,multiple_myeloma,thyroid,melanoma, uterine,non_cancer,liver_bileduct,bladder_and_urothelial, upper_gi,pancreas_gallbladder,colorectal

SEQ ID NO: 458111 - DNA, 3 bp, Homo sapiens
  chr5:77147514-77147517
  hyper
  cervical vs. multiple_myeloma
cgc

SEQ ID NO: 458112 - DNA, 23 bp, Homo sapiens
  chr5:77148195-77148218
  hyper
  cervical vs. multiple_myeloma
gtttctgcaattatggcttaaac

SEQ ID NO: 458113 - DNA, 192 bp, Homo sapiens; identical to SEQ ID NO: 453297
  chr5:77148195-77148387
  hyper
  cervical vs. sarcoma

SEQ ID NO: 458114 - DNA, 158 bp, Homo sapiens; identical to SEQ ID NO: 350105
  chr5:82767810-82767968
  hyper
  cervical vs. ovary,renal,sarcoma,uterine, myeloid_neoplasm

SEQ ID NO: 458115 - DNA, 314 bp, Homo sapiens; identical to SEQ ID NO: 345177
  chr5:82769369-82769683
  hyper
  cervical vs. lung,anorectal

SEQ ID NO: 458116 - DNA, 542 bp, Homo sapiens
  chr5:82769369-82769911
  hyper
  cervical vs. lung,pancreas_gallbladder,breast,ovary, uterine
agctgacaaatgaatggctagtgtgaaatccctgcctttcccgtgctccaaggcagcagggagggaggagcgagggaggcggtgcgctccttcggatctgcccccagttcagctcacaagacttgcagaacctagatgtctaggaattgggagttttgcggcgggtgtgggcgccccctgatggagaagtcccgcacaggcggagaaaaacaagccccccagaccaagcgagcatctttcacaaccttgtgttcaaggatggaaggccctagttttcccttaagtcattcattttgcactccacaatctgcggcgtacatctaggagtttggaggaccctgaaaaaaggtcttggtctgtgcaaagtgcagagatgccttctcgcgagtcggctggaacgcacgcggcgccctgggtccagttcgccgcttagtggacgaacgcacatggccagggtggagccaggtttcggaggtctagacgcgccaccctgggcgtctttaagaaagataatacacataccgtgctctcaaaacccatga

SEQ ID NO: 458117 - DNA, 160 bp, Homo sapiens
  chr5:82769751-82769911
  hyper
  cervical vs. lung,melanoma,pancreas_gallbladder,renal
cgcgagtcggctggaacgcacgcggcgccctgggtccagttcgccgcttagtggacgaacgcacatggccagggtggagccaggtttcggaggtctagacgcgccaccctgggcgtctttaagaaagataatacacataccgtgctctcaaaacccatga

SEQ ID NO: 458118 - DNA, 246 bp, Homo sapiens
  chr5:82770318-82770564
  hyper
  cervical vs. lung,melanoma,pancreas_gallbladder,renal
ggtctggggcccgcccccactcgctcacctcgcgccaagggaggacccgcaacgggcgctccccgcagcggctgggttagccagccgccacgtgggttggcgcttcggctcccagccgagacgggtgtgacttcctgggctcagagactgcagtacagccgcacaggcggccggcgcagccgaggcccccacccaccgaggccaatgggggcggggcggggaaggcagggcccagcttaaccgaga

SEQ ID NO: 458119 - DNA, 25 bp, Homo sapiens
  chr5:82770612-82770637
  hyper
  cervical vs. lung,melanoma,pancreas_gallbladder,renal
ctgacccgagttccatccagacagc

SEQ ID NO: 458120 - DNA, 46 bp, Homo sapiens; identical to SEQ ID NO: 453298
  chr5:87436549-87436595
  hyper
  cervical vs. lung,bladder_and_urothelial,colorectal, uterine,breast,ovary

SEQ ID NO: 458121 - DNA, 735 bp, Homo sapiens; identical to SEQ ID NO: 345179
  chr5:87436769-87437504
  hyper
  cervical vs. lung,bladder_and_urothelial,colorectal, uterine,breast,ovary

SEQ ID NO: 458122 - DNA, 80 bp, Homo sapiens; identical to SEQ ID NO: 345180
  chr5:87957200-87957280
  hyper
  cervical vs. myeloid_neoplasm,thyroid,melanoma,prostate, non_cancer,uterine,breast,ovary,lung,renal,sarcoma, multiple_myeloma

SEQ ID NO: 458123 - DNA, 157 bp, Homo sapiens; identical to SEQ ID NO: 453301
  chr5:87969885-87970042
  hyper
  cervical vs. uterine,sarcoma,non_cancer,thyroid, myeloid_neoplasm,ovary,prostate,breast,multiple_myeloma,renal, melanoma

SEQ ID NO: 458124 - DNA, 317 bp, Homo sapiens; identical to SEQ ID NO: 453302
  chr5:87970918-87971235
  hyper
  cervical vs. uterine,myeloid_neoplasm,thyroid,non_cancer, sarcoma,ovary,breast,melanoma,multiple_myeloma,prostate,renal

SEQ ID NO: 458125 - DNA, 600 bp, Homo sapiens; identical to SEQ ID NO: 453303
  chr5:87970918-87971518
  hyper
  cervical vs. uterine,myeloid_neoplasm,thyroid,non_cancer, ovary,multiple_myeloma,sarcoma,breast

SEQ ID NO: 458126 - DNA, 254 bp, Homo sapiens; identical to SEQ ID NO: 453304
  chr5:87971264-87971518
  hyper
  cervical vs. uterine,ovary,melanoma,non_cancer, myeloid_neoplasm,thyroid,breast,multiple_myeloma,sarcoma

SEQ ID NO: 458127 - DNA, 38 bp, Homo sapiens; identical to SEQ ID NO: 453305
  chr5:87975991-87976029
  hyper
  cervical vs. ovary,melanoma,breast,lung,colorectal, uterine,renal,sarcoma,prostate,multiple_myeloma,liver_bileduct, non_cancer,bladder_and_urothelial,thyroid,myeloid_neoplasm

SEQ ID NO: 458128 - DNA, 243 bp, Homo sapiens; identical to SEQ ID NO: 345184
  chr5:87976663-87976906
  hyper
  cervical vs. ovary,melanoma,breast,lung,colorectal, uterine,renal,sarcoma,prostate,multiple_myeloma,liver_bileduct, non_cancer,bladder_and_urothelial,thyroid,myeloid_neoplasm

SEQ ID NO: 458129 - DNA, 138 bp, Homo sapiens; identical to SEQ ID NO: 332428
  chr5:87982673-87982811
  hyper

SEQ ID NO: 458130 - DNA, 454 bp, Homo sapiens
  chr5:88178399-88178853
  hyper
  cervical vs. lung,lymphoid_neoplasm,melanoma,breast, uterine,renal,ovary,bladder_and_urothelial,prostate,sarcoma
cgtctacttcaaggtcacagaacatgctgtgaaatattaaaatccaccaggctccacacgctccaccatatcaaacatgctaatgacgtgaactaacttcatgaaactttaaatacactggtgtgacaggaacgagtcaggagtgatttcaatagctgatggcaaacggatacgactatctaaaaagttacttttagcaacaaacaaggaaatcatggaatctaacgaaaaagaatgcacaacgagcctcaacttcagccttcaaaaaaggcacagggatagatagacacagtgccgtggaatatattgatgcagattttagagacaatacccgggttttctatttcctcgagaaatatcaggggtacttacatgaaggaagacccgatcagattagtccttgggatattttcctttcttaagagagagagagagagaaaaaaaaaataacaac

SEQ ID NO: 458131 - DNA, 4 bp, Homo sapiens
  chr5:88179111-88179115
  hyper
  cervical vs. lung,lymphoid_neoplasm,melanoma,breast, uterine,renal,ovary,bladder_and_urothelial,prostate,sarcoma
gctc

SEQ ID NO: 458132 - DNA, 423 bp, Homo sapiens; identical to SEQ ID NO: 453309
  chr5:88179429-88179852
  hyper
  cervical vs. bladder_and_urothelial,lung,melanoma, sarcoma,prostate,multiple_myeloma,lymphoid_neoplasm,breast, uterine,renal,ovary,non_cancer,myeloid_neoplasm,thyroid

SEQ ID NO: 458133 - DNA, 312 bp, Homo sapiens; identical to SEQ ID NO: 453310
  chr5:88179540-88179852
  hyper
  cervical vs. melanoma,prostate,lung, bladder_and_urothelial,sarcoma,renal,uterine,multiple_myeloma, non_cancer,breast,myeloid_neoplasm,thyroid,ovary, lymphoid_neoplasm

SEQ ID NO: 458134 - DNA, 42 bp, Homo sapiens; identical to SEQ ID NO: 345186
  chr5:88180346-88180388
  hyper
  cervical vs. melanoma,prostate,lung, bladder_and_urothelial,sarcoma,renal,uterine,multiple_myeloma, non_cancer,breast,myeloid_neoplasm,thyroid,ovary, lymphoid_neoplasm

SEQ ID NO: 458135 - DNA, 287 bp, Homo sapiens; identical to SEQ ID NO: 453312
  chr5:89854237-89854524
  hyper
  cervical vs. sarcoma,breast

SEQ ID NO: 458136 - DNA, 10 bp, Homo sapiens
  chr5:89854969-89854979
  hyper
  cervical vs. sarcoma,breast
ccccctaccc

SEQ ID NO: 458137 - DNA, 115 bp, Homo sapiens; identical to SEQ ID NO: 453314
  chr5:100236036-100236151
  hyper
  cervical vs. lung,lymphoid_neoplasm, bladder_and_urothelial,sarcoma,ovary

SEQ ID NO: 458138 - DNA, 87 bp, Homo sapiens; identical to SEQ ID NO: 453315
  chr5:100238197-100238284
  hyper
  cervical vs. lymphoid_neoplasm,multiple_myeloma,lung, non_cancer,renal,thyroid,sarcoma,bladder_and_urothelial, prostate

SEQ ID NO: 458139 - DNA, 345 bp, Homo sapiens; identical to SEQ ID NO: 453316
  chr5:100239724-100240069
  hyper
  cervical vs. lymphoid_neoplasm,sarcoma, bladder_and_urothelial,renal,non_cancer,multiple_myeloma, thyroid,myeloid_neoplasm

SEQ ID NO: 458140 - DNA, 400 bp, Homo sapiens
  chr5:101631635-101632035
  hyper
  cervical vs. lung,renal,breast
agtgaagcagaaagcctccaggtgtgttgcagcgctggagacattgaggatggaagttcctccagccgtaagacccctcctcaaactcggacagcgacagtgaccggagcttctcttcggagacattgggaggggctgaaggcagagatggctctggtgacttctggggctcctggggcttctgaagctcctgtggctgagaattctctctttgggggtcagaggacaaggcagagacttcgatttgggagggcgacgcagacaagcggcgcaggatgtctgggctggaggggacaaaagccaagttctcaatacctttggcgctcttcatgtctggatgggttctcccgactccggtgcttcagagcagcagagccaggtccctctctggctcctccca

SEQ ID NO: 458141 - DNA, 146 bp, Homo sapiens
  chr5:101632074-101632220
  hyper
  cervical vs. lung,renal,breast
ctcctggccctccagcctccagcgcactctccgccaccgcctgaaccttcctactccagctcgcagctgtctggagcgcagagcgctgagcgggggcgttagcgccccagcctgtggctttggcgctcagctgtgcctcacccgtc

SEQ ID NO: 458142 - DNA, 313 bp, Homo sapiens; identical to SEQ ID NO: 453317
  chr5:101631722-101632035
  hyper
  cervical vs. lung

SEQ ID NO: 458143 - DNA, 222 bp, Homo sapiens; identical to SEQ ID NO: 453318
  chr5:101632074-101632296
  hyper
  cervical vs. lung

SEQ ID NO: 458144 - DNA, 17 bp, Homo sapiens
  chr5:112629411-112629428
  hyper
  cervical vs. anorectal
cgcttgcctcaaagact

SEQ ID NO: 458145 - DNA, 470 bp, Homo sapiens
  chr5:112629778-112630248
  hyper
  cervical vs. anorectal
tgagaggttgtttcttttttaagccactcatttcagactgaaatatcaagccagttcaggtcatttcctgagtagcactacaagttaaaacaagatccagaaaatctactaatcttcaattgcgctgcctccagactgggagcacagggggatagggtgtagggctgtggggaggtcgaggggagggggatttgtggaaaagcaaacgcccgagaaaccctagctcccgacctcagctgtttcttacctcactcagctcggccgaggagtcgtttccatatttcatggcaactccggaattcatgatgcacttttcagagctgggctctcagtcccccaggtctcggagcttaagagttggacttcacaggctcaatatccactgcttggtcccttctgccacattttagtctagacagccattttcacccaggacagttgcgaagcgcaaacggaggatgcaggcactc

SEQ ID NO: 458146 - DNA, 348 bp, Homo sapiens
  chr5:112629900-112630248
  hyper
cgctgcctccagactgggagcacagggggatagggtgtagggctgtggggaggtcgaggggagggggatttgtggaaaagcaaacgcccgagaaaccctagctcccgacctcagctgtttcttacctcactcagctcggccgaggagtcgtttccatatttcatggcaactccggaattcatgatgcacttttcagagctgggctctcagtcccccaggtctcggagcttaagagttggacttcacaggctcaatatccactgcttggtcccttctgccacattttagtctagacagccattttcacccaggacagttgcgaagcgcaaacggaggatgcaggcactc

SEQ ID NO: 458147 - DNA, 113 bp, Homo sapiens; identical to SEQ ID NO: 345190
  chr5:112630698-112630811
  hyper

SEQ ID NO: 458148 - DNA, 219 bp, Homo sapiens; identical to SEQ ID NO: 453319
  chr5:113696733-113696952
  hyper
  cervical vs. uterine,prostate,ovary

SEQ ID NO: 458149 - DNA, 139 bp, Homo sapiens
  chr5:113696813-113696952
  hyper
  cervical vs. melanoma,lung,ovary
cgccatcccctcatgttctggagaaggcgcaaatgtgagctggcggtagcggggaaagccctccgcccccgccaggggggacccgggaagcccggccggctctgtcggcagactgcggggatcccctcctccggccccg

SEQ ID NO: 458150 - DNA, 51 bp, Homo sapiens; identical to SEQ ID NO: 350147
  chr5:115911175-115911226
  hyper
  cervical vs. pancreas_gallbladder

SEQ ID NO: 458151 - DNA, 95 bp, Homo sapiens; identical to SEQ ID NO: 453328
  chr5:124082318-124082413
  hyper
  cervical vs. pancreas_gallbladder,upper_gi, liver_bileduct

SEQ ID NO: 458152 - DNA, 642 bp, Homo sapiens; identical to SEQ ID NO: 453329
  chr5:124082442-124083084
  hyper
  cervical vs. pancreas_gallbladder,upper_gi, liver_bileduct

SEQ ID NO: 458153 - DNA, 742 bp, Homo sapiens; identical to SEQ ID NO: 453330
  chr5:124082625-124083367
  hyper
  cervical vs. pancreas_gallbladder,liver_bileduct, upper_gi,colorectal,lymphoid_neoplasm,uterine,ovary,renal,lung

SEQ ID NO: 458154 - DNA, 267 bp, Homo sapiens; identical to SEQ ID NO: 453331
  chr5:124083100-124083367
  hyper
  cervical vs. pancreas_gallbladder,upper_gi, liver_bileduct,colorectal,uterine,lymphoid_neoplasm,renal,ovary, lung,bladder_and_urothelial,myeloid_neoplasm,non_cancer, prostate,thyroid,breast,multiple_myeloma

SEQ ID NO: 458155 - DNA, 38 bp, Homo sapiens; identical to SEQ ID NO: 453332
  chr5:124084158-124084196
  hyper
  cervical vs. pancreas_gallbladder,colorectal,upper_gi, liver_bileduct,lymphoid_neoplasm

SEQ ID NO: 458156 - DNA, 60 bp, Homo sapiens; identical to SEQ ID NO: 346734
  chr5:124084302-124084362
  hyper
  cervical vs. pancreas_gallbladder,colorectal,upper_gi, liver_bileduct,lymphoid_neoplasm

SEQ ID NO: 458157 - DNA, 112 bp, Homo sapiens; identical to SEQ ID NO: 453334
  chr5:124084660-124084772
  hyper
  cervical vs. liver_bileduct,upper_gi, pancreas_gallbladder,colorectal,uterine,renal,ovary, bladder_and_urothelial,prostate,myeloid_neoplasm

SEQ ID NO: 458158 - DNA, 64 bp, Homo sapiens; identical to SEQ ID NO: 345193
  chr5:124084977-124085041
  hyper
  cervical vs. liver_bileduct,upper_gi, pancreas_gallbladder,colorectal,uterine,renal,ovary, bladder_and_urothelial,prostate,myeloid_neoplasm

SEQ ID NO: 458159 - DNA, 95 bp, Homo sapiens; identical to SEQ ID NO: 453336
  chr5:125930492-125930587
  hyper
  cervical vs. liver_bileduct

SEQ ID NO: 458160 - DNA, 170 bp, Homo sapiens; identical to SEQ ID NO: 350157
  chr5:125931062-125931232
  hyper
  cervical vs. liver_bileduct

SEQ ID NO: 458161 - DNA, 27 bp, Homo sapiens
  chr5:127872819-127872846
  hyper
  cervical vs. anorectal
cgcccaacccccggagagagggctttc

SEQ ID NO: 458162 - DNA, 1 bp, Homo sapiens
  chr5:136835144-136835145
  hyper
  cervical vs. anorectal,melanoma,lung, bladder_and_urothelial,breast,sarcoma
c

SEQ ID NO: 458163 - DNA, 185 bp, Homo sapiens
  chr5:148033538-148033723
  hyper
  cervical vs. lung,ovary
cgtcgtgctgccccgcccccgccgcgtccccaccggcacccgtgggctcctggggtcccgacccccggcgcacttgccgcacatacccgctgccagaggcgagggagcgaggtgccctggcagattcgagcggccacccccagccgctgagccgagcttctgctgccgccgctgccgctgcgctc

SEQ ID NO: 458164 - DNA, 194 bp, Homo sapiens; identical to SEQ ID NO: 370925
  chr5:153859808-153860002
  hyper
  cervical vs. anorectal

SEQ ID NO: 458165 - DNA, 2 bp, Homo sapiens
  chr5:158526418-158526420
  hyper
  cervical vs. melanoma
cc

SEQ ID NO: 458166 - DNA, 13 bp, Homo sapiens
  chr5:169063996-169064009
  hyper
  cervical vs. multiple_myeloma
cggcaatcaggaa

SEQ ID NO: 458167 - DNA, 244 bp, Homo sapiens
  chr5:170171140-170171384
  hyper
aagtctcgctcaggggagtggtgtgcatggggcagaggctgccagggacgctgaaggctgatagccgggttggcgcggaaatgggacgccgcagggtgggacaggcgggagggatgggatgggcagggtgtgatgccggacgaaggaaacgggcctgcccggcaggtggcagagagccacagaagagctccgagggggtggtgcgtgagatggcgctgcaggctggaaaggggctgcaggcagg

SEQ ID NO: 458168 - DNA, 388 bp, Homo sapiens; identical to SEQ ID NO: 350214
  chr5:170171413-170171801
  hyper

SEQ ID NO: 458169 - DNA, 210 bp, Homo sapiens
  chr5:176057164-176057374
  hyper
  cervical vs. head_and_neck
cgcgcatcccccgggtctccctccattttccatccccttccccagctccctcctgtcgccccagtcccctctccatcctcatcccgttccccatccccggcgcgcggccgcctcacctggatgcggggccggggctggggatggagcggcggctgcggcgggcggacgcgggggctccgctaggccaggccggggtggaccaggggccgg

SEQ ID NO: 458170 - DNA, 184 bp, Homo sapiens; identical to SEQ ID NO: 358338
  chr5:178594471-178594655
  hyper
  cervical vs. anorectal

SEQ ID NO: 458171 - DNA, 604 bp, Homo sapiens
  chr5:180644001-180644605
  hyper
cgacctagggtagtaactggaactgcaggtatgcaccaccacgctcggctaattaaaaaaatatatatattttttcctagagatggggcggggggcgggggcgggggcggaggggacagtctcactatgttgcctaggctggtctcgaactcttaagcccggtttccgagtcgctggggctacagtagcgcgctgacacgcccgacccttgctttgccacttagatgttgcatttattcgactttcacgtcgggcagaggtgctgggaaagaggcggctggcccctgcgtaagtgtgcgggtgcggtgtgagaaagctggaagcctgttttctaggcggggaagcagcctgcgctgccggggccgcatcatggcacgtgggtttccccgggcttactctcctgccagtagcgctgtcctagggatcccgcccacccctccggcttcttctctgaagcctttgcagcattttccctgagattgctgaagaggcccctggggatcgggctcccaactcacccgccgcgtcccacggcccgaagccgacgagctgcaagtgaggatgggtgcagagggaggccgacggtcacgccttggagaggctg

SEQ ID NO: 458172 - DNA, 48 bp, Homo sapiens; identical to SEQ ID NO: 370998
  chr5:180644634-180644682
  hyper

SEQ ID NO: 458173 - DNA, 61 bp, Homo sapiens; identical to SEQ ID NO: 453345
  chr6:391113-391174
  hyper
  cervical vs. lymphoid_neoplasm,thyroid,non_cancer, myeloid_neoplasm,multiple_myeloma,prostate

SEQ ID NO: 458174 - DNA, 55 bp, Homo sapiens; identical to SEQ ID NO: 346767
  chr6:393764-393819
  hyper
  cervical vs. lymphoid_neoplasm

SEQ ID NO: 458175 - DNA, 478 bp, Homo sapiens; identical to SEQ ID NO: 283717
  chr6:4135305-4135783
  hyper
  cervical vs. upper_gi,pancreas_gallbladder,renal, melanoma,sarcoma,multiple_myeloma

SEQ ID NO: 458176 - DNA, 95 bp, Homo sapiens; identical to SEQ ID NO: 200248
  chr6:4775543-4775638
  hyper
  cervical vs. head_and_neck

SEQ ID NO: 458177 - DNA, 305 bp, Homo sapiens
  chr6:4775640-4775945
  hyper
  cervical vs. head_and_neck
gggccagccctcgctgttctgagcgagggcctgtcgtgtagtccacaccgttccgcgaaaggaaccaccattgacagcctcgttcgattagaacccggacctccctggaatccagactcggtcccttcccagctgcgcttcggaggaggcggacgctccgagaggaacccagaggcctggcgtggggggagctgcgggcagagcggaggcagccgcgccctcgcgccgccctccgccgcgcccggctcccgccccccggatcccacccccggcctgccgcggagccagcgtgccagccggagctc

SEQ ID NO: 458178 - DNA, 80 bp, Homo sapiens; identical to SEQ ID NO: 350268
  chr6:6009552-6009632
  hyper
  cervical vs. colorectal

SEQ ID NO: 458179 - DNA, 190 bp, Homo sapiens
  chr6:7726066-7726256
  hyper
  cervical vs. head_and_neck,bladder_and_urothelial
cggggtattggtcagatcattcttactagcgatgacctcttcgcctttggcacctcgcggctcttcgcatgcctccaagaattcccgggtcttgaaacctacgcgcggcggaggcgacgcctctcgggagagggagggtgaaagaaggggcggggctatttaaatagcccgcgagcttcgcgtccccatt

SEQ ID NO: 458180 - DNA, 291 bp, Homo sapiens
  chr6:26033454-26033745
  hyper
  cervical vs. pancreas_gallbladder
cgcctgaatattaggcaaaacgccaccctgcgcgatggtcacacgccccaagagtttattaagctcctcgtcattgcggatggccaattgcaggtggcgcgggatgatgcgggtcttcttgttgtcgcgggccgcattgcccgccagctccaggatctcggcggtcaggtactcaagcaccgccgcgagatacaccggcgcgccagccccgacgcgctcggagtagttgcctttgcggagcaggcggtgcactcggcccacaggaaactgcaaacctgcacgagaagaccg

SEQ ID NO: 458181 - DNA, 34 bp, Homo sapiens; identical to SEQ ID NO: 371076
  chr6:26034208-26034242
  hyper
  cervical vs. pancreas_gallbladder

SEQ ID NO: 458182 - DNA, 71 bp, Homo sapiens; identical to SEQ ID NO: 453362
  chr6:26331633-26331704
  hyper
  cervical vs. upper_gi,colorectal,uterine,non_cancer, bladder_and_urothelial,myeloid_neoplasm,breast,thyroid, lymphoid_neoplasm,multiple_myeloma

SEQ ID NO: 458183 - DNA, 324 bp, Homo sapiens; identical to SEQ ID NO: 453363
  chr6:26331811-26332135
  hyper
  cervical vs. upper_gi,colorectal,uterine,non_cancer, bladder_and_urothelial,myeloid_neoplasm,breast,thyroid, lymphoid_neoplasm,multiple_myeloma

SEQ ID NO: 458184 - DNA, 243 bp, Homo sapiens; identical to SEQ ID NO: 345222
  chr6:26332283-26332526
  hyper
  cervical vs. upper_gi,colorectal,uterine,non_cancer, bladder_and_urothelial,myeloid_neoplasm,breast,thyroid, lymphoid_neoplasm,multiple_myeloma

SEQ ID NO: 458185 - DNA, 248 bp, Homo sapiens; identical to SEQ ID NO: 453365
  chr6:26577475-26577723
  hyper
  cervical vs. multiple_myeloma

SEQ ID NO: 458186 - DNA, 56 bp, Homo sapiens; identical to SEQ ID NO: 358462
  chr6:27256447-27256503
  hyper
  cervical vs. sarcoma

SEQ ID NO: 458187 - DNA, 141 bp, Homo sapiens; identical to SEQ ID NO: 453368
  chr6:27356293-27356434
  hyper

SEQ ID NO: 458188 - DNA, 223 bp, Homo sapiens; identical to SEQ ID NO: 453369
  chr6:27356463-27356686
  hyper

SEQ ID NO: 458189 - DNA, 541 bp, Homo sapiens; identical to SEQ ID NO: 453370
  chr6:27470822-27471363
  hyper
  cervical vs. lymphoid_neoplasm

SEQ ID NO: 458190 - DNA, 205 bp, Homo sapiens; identical to SEQ ID NO: 453371
  chr6:27560506-27560711
  hyper
  cervical vs. upper_gi

SEQ ID NO: 458191 - DNA, 9 bp, Homo sapiens
  chr6:27640042-27640051
  hyper
  cervical vs. multiple_myeloma,bladder_and_urothelial
cggggattg

SEQ ID NO: 458192 - DNA, 87 bp, Homo sapiens; identical to SEQ ID NO: 358470
  chr6:27640312-27640399
  hyper
  cervical vs. multiple_myeloma,bladder_and_urothelial

SEQ ID NO: 458193 - DNA, 752 bp, Homo sapiens; identical to SEQ ID NO: 454444
  chr6:27655169-27655921
  hyper
  cervical vs. colorectal

SEQ ID NO: 458194 - DNA, 157 bp, Homo sapiens
  chr6:40554364-40554521
  hyper
  cervical vs. bladder_and_urothelial
cggttccatccacccgtggctccccgtctctccatccggctctccagtctcacatggacccggctctccccgctccccgccagagtttcacccccactgtaggaaataaagactaaagaaaggaaaggaaatctctcgcgataaggatgggcgaaaa

SEQ ID NO: 458195 - DNA, 316 bp, Homo sapiens
  chr6:40554860-40555176
  hyper
  cervical vs. bladder_and_urothelial
gagccgcttattcagttatatccatggcatttagcaagaagaaggggggaaaagcacaacttgttctcttctcttccagattaaagaaaaataataataataatccctccctaggaggatgccggtaggattttccggatcgaagaaccccaggcattcccaggaacctcgggcatcttggaatgtggggtgtcttcaagttcagacgagcctgccgggttgtgtatgtgtgagtgtatgtgtgtctcagcgagagggagccaggcactcacacccacacgcacacacaaacacactcccccgtactccccgcatg

SEQ ID NO: 458196 - DNA, 1 bp, Homo sapiens
  chr6:43612825-43612826
  hyper
  cervical vs. anorectal
c

SEQ ID NO: 458197 - DNA, 373 bp, Homo sapiens; identical to SEQ ID NO: 453380
  chr6:46097250-46097623
  hyper
  cervical vs. pancreas_gallbladder,renal,uterine, colorectal,ovary

SEQ ID NO: 458198 - DNA, 521 bp, Homo sapiens; identical to SEQ ID NO: 345237
  chr6:46097694-46098215
  hyper
  cervical vs. pancreas_gallbladder,renal,uterine, colorectal,ovary

SEQ ID NO: 458199 - DNA, 208 bp, Homo sapiens; identical to SEQ ID NO: 453384
  chr6:69344116-69344324
  hyper
  cervical vs. lung,bladder_and_urothelial

SEQ ID NO: 458200 - DNA, 295 bp, Homo sapiens; identical to SEQ ID NO: 453385
  chr6:69344649-69344944
  hyper
  cervical vs. lung,bladder_and_urothelial

SEQ ID NO: 458201 - DNA, 295 bp, Homo sapiens; identical to SEQ ID NO: 453385
  chr6:69344649-69344944
  hyper
  cervical vs. lung,melanoma

SEQ ID NO: 458202 - DNA, 72 bp, Homo sapiens; identical to SEQ ID NO: 350392
  chr6:69346042-69346114
  hyper
  cervical vs. lung

SEQ ID NO: 458203 - DNA, 571 bp, Homo sapiens; identical to SEQ ID NO: 456080
  chr6:71123134-71123705
  hyper
  cervical vs. head_and_neck,upper_gi,pancreas_gallbladder, liver_bileduct

SEQ ID NO: 458204 - DNA, 289 bp, Homo sapiens; identical to SEQ ID NO: 350397
  chr6:71123746-71124035
  hyper
  cervical vs. head_and_neck,upper_gi,pancreas_gallbladder, liver_bileduct

SEQ ID NO: 458205 - DNA, 55 bp, Homo sapiens
  chr6:71665452-71665507
  hyper
  cervical vs. head_and_neck,lung
cggagtgcaaggggcgtgtgactgcagcccggccggcccggaggcccactcccgc

SEQ ID NO: 458206 - DNA, 223 bp, Homo sapiens
  chr6:71665723-71665946
  hyper
  cervical vs. head_and_neck,lung
tgggcagcccggcccgcgccaggaagcggctcaccagctcgctgcgcgccgccgcgtcctccaccaggatccagtgcagctgcgccacctggcggaacgtgttggccaggcgggtcagctccgctttctgcaccgggcggctgtaggtgggcgtgatggcatagatggtgggcagctgcggctccggctgtggctgcggccgagactggttgcgcttttgggt

SEQ ID NO: 458207 - DNA, 141 bp, Homo sapiens
  chr6:71665805-71665946
  hyper
  cervical vs. anorectal
cgccacctggcggaacgtgttggccaggcgggtcagctccgctttctgcaccgggcggctgtaggtgggcgtgatggcatagatggtgggcagctgcggctccggctgtggctgcggccgagactggttgcgcttttgggt

SEQ ID NO: 458208 - DNA, 227 bp, Homo sapiens; identical to SEQ ID NO: 453389
  chr6:72596315-72596542
  hyper
  cervical vs. lung

SEQ ID NO: 458209 - DNA, 9 bp, Homo sapiens
  chr6:73333099-73333108
  hyper
  cervical vs. head_and_neck,anorectal
ttgtggcgc

SEQ ID NO: 458210 - DNA, 390 bp, Homo sapiens; identical to SEQ ID NO: 332846
  chr6:80487617-80488007
  hyper
  cervical vs. pancreas_gallbladder,colorectal, bladder_and_urothelial,upper_gi

SEQ ID NO: 458211 - DNA, 83 bp, Homo sapiens; identical to SEQ ID NO: 350409
  chr6:80657600-80657683
  hyper
  cervical vs. anorectal,head_and_neck

SEQ ID NO: 458212 - DNA, 354 bp, Homo sapiens
  chr6:86159095-86159449
  hyper
  cervical vs. upper_gi
cgcgcgtcgcctctgttttatcactaaggttttaattgtgaataaacaaggaactggattcgaatgatttcttagtttctgagatttttttgtctaagcatcgtagacttcgtgcgttctcaacccaacaggaagcgtcacatctcagtgagcttcggctctcacagcccgaaactgcaaggagctcctctgcccggcctctctttactcctcctctctgcccctcagctcgctcatctttcttcccgccccctctcttttccttctttggttctttgaagtgatgagctagcgcaaccacaaaccatacattccttttgtagaaaaacccgtgcctcgaatgaggcgagactc

SEQ ID NO: 458213 - DNA, 270 bp, Homo sapiens
  chr6:86159509-86159779
  hyper
  cervical vs. upper_gi
ggcgcaccagcagccgaactgccggcgcccaggctccctggtccggccgggatgcggccggtacccgctccccgccgggaacaacctctccactcttcctgcagggagctggtgccagccgacagccgcgccagggccgctccgggtaccagggtcggatcgggtgacgtcgcgaacttgcgcctggccgccaagccggcctccaggctgaagaaggacccgccccggccttgacccgggccccgcccctccagccggggcaccgagccc

SEQ ID NO: 458214 - DNA, 89 bp, Homo sapiens
  chr6:86159903-86159992
  hyper
  cervical vs. upper_gi
tgggcgcggtgctgtggcctgcggctggcgcctgggagcttacgattttgcacaccaacgacgtgcacagccggctggagcagaccagc

SEQ ID NO: 458215 - DNA, 218 bp, Homo sapiens
  chr6:99272867-99273085
  hyper
  cervical vs. anorectal
ctgcggactgccccaaggaatggaaaacctgcactcagaagccaccccccaccccgcctctgccgtatctgctaactttgctaacactccccttcccctgccttgtaagtcactatttacgaccgcgtcgactcgcgctcacgcacgcctgcccttttctccagaagcctgaaagtggctgaattcaaacactgacacgtgaaaactctattctgagt

SEQ ID NO: 458216 - DNA, 209 bp, Homo sapiens
  chr6:99273114-99273323
  hyper
  cervical vs. anorectal
atcttgatccgccggtcctgcccaaagttcagagcagctgtccgaaaggtccccgcatttgctgtccctaggaaaggtgaggctaggaggaagggggaggcaacgcagggaatgtgagaggactggggccacactgtgtatctaggaggaaactctgaatcctaatctcaagaatgtaagtctttgcgcagtttccaaatcgagtccat

SEQ ID NO: 458217 - DNA, 5 bp, Homo sapiens
  chr6:99273602-99273607
  hyper
  cervical vs. anorectal
ccagc

SEQ ID NO: 458218 - DNA, 327 bp, Homo sapiens; identical to SEQ ID NO: 332867
  chr6:99873227-99873554
  hyper
  cervical vs. head_and_neck

SEQ ID NO: 458219 - DNA, 97 bp, Homo sapiens; identical to SEQ ID NO: 358614
  chr6:100039474-100039571
  hyper
  cervical vs. bladder_and_urothelial,thyroid

SEQ ID NO: 458220 - DNA, 945 bp, Homo sapiens; identical to SEQ ID NO: 346853
  chr6:112193858-112194803
  hyper
  cervical vs. lung,anorectal,head_and_neck, bladder_and_urothelial,ovary,renal,uterine,melanoma, pancreas_gallbladder

SEQ ID NO: 458221 - DNA, 133 bp, Homo sapiens; identical to SEQ ID NO: 358639
  chr6:118241526-118241659
  hyper
  cervical vs. liver_bileduct

SEQ ID NO: 458222 - DNA, 18 bp, Homo sapiens
  chr6:122931153-122931171
  hyper
  cervical vs. anorectal,head_and_neck,colorectal, pancreas_gallbladder
cgcgtacaaccggaggga

SEQ ID NO: 458223 - DNA, 547 bp, Homo sapiens; identical to SEQ ID NO: 350454
  chr6:122931206-122931753
  hyper
  cervical vs. anorectal,head_and_neck,colorectal, pancreas_gallbladder

SEQ ID NO: 458224 - DNA, 41 bp, Homo sapiens
  chr6:122932019-122932060
  hyper
  cervical vs. anorectal
cggctctcgcgccagcaatgccaagtctttcccctgggcgg

SEQ ID NO: 458225 - DNA, 28 bp, Homo sapiens
  chr6:122932470-122932498
  hyper
  cervical vs. anorectal
tccccggggaacgcagccaacggaactc

SEQ ID NO: 458226 - DNA, 291 bp, Homo sapiens; identical to SEQ ID NO: 350459
  chr6:130088466-130088757
  hyper

SEQ ID NO: 458227 - DNA, 97 bp, Homo sapiens
  chr6:134499457-134499554
  hyper
  cervical vs. upper_gi
cggatacgtgatgggtggagcaggcgccccctgttctgtcccagcaacctactaagacttccgaacaggaaggtgacacacggcggaggggtgcttg

SEQ ID NO: 458228 - DNA, 3 bp, Homo sapiens
  chr6:134638705-134638708
  hyper
  cervical vs. head_and_neck
cgg

SEQ ID NO: 458229 - DNA, 160 bp, Homo sapiens; identical to SEQ ID NO: 346856
  chr6:134639003-134639163
  hyper
  cervical vs. head_and_neck

SEQ ID NO: 458230 - DNA, 47 bp, Homo sapiens
  chr6:137808706-137808753
  hyper
  cervical vs. multiple_myeloma
cggagtagacggaagggaggcgagatggtgggaggctgaataaccag

SEQ ID NO: 458231 - DNA, 57 bp, Homo sapiens
  chr6:146349455-146349512
  hyper
  cervical vs. bladder_and_urothelial,liver_bileduct,renal, prostate
cgggtcagggaattgcaactcactggtcaaagcgtcccttgcaggccctgccaggga

SEQ ID NO: 458232 - DNA, 140 bp, Homo sapiens; identical to SEQ ID NO: 350494
  chr6:166298522-166298662
  hyper
  cervical vs. colorectal,upper_gi,bladder_and_urothelial

SEQ ID NO: 458233 - DNA, 21 bp, Homo sapiens
  chr6:166421891-166421912
  hyper
  cervical vs. sarcoma
cgggaggccaggtcccgtttt

SEQ ID NO: 458234 - DNA, 60 bp, Homo sapiens; identical to SEQ ID NO: 358700
  chr6:166422281-166422341
  hyper
  cervical vs. sarcoma

SEQ ID NO: 458235 - DNA, 5 bp, Homo sapiens
  chr6:166579711-166579716
  hyper
  cervical vs. multiple_myeloma
cgact

SEQ ID NO: 458236 - DNA, 28 bp, Homo sapiens
  chr6:166583394-166583422
  hyper
  cervical vs. multiple_myeloma
gcggccgcttttcccacagtcgggaagc

SEQ ID NO: 458237 - DNA, 143 bp, Homo sapiens
  chr6:169653496-169653639
  hyper
cgtttacccgggttcccaggcaggtatatacattgaaatagcagcagccacaaccctcagagaggaaggggtgcccggctggtgaaagcacagccacggaggaaaagctgaggagcggccacgtgccttgctcttcaagcggg

SEQ ID NO: 458238 - DNA, 12 bp, Homo sapiens
  chr7:1703861-1703873
  hyper
  cervical vs. anorectal
cgggctcggccc

SEQ ID NO: 458239 - DNA, 95 bp, Homo sapiens; identical to SEQ ID NO: 346873
  chr7:1705153-1705248
  hyper
  cervical vs. anorectal,melanoma,head_and_neck,renal, breast,bladder_and_urothelial,uterine,prostate,lung

SEQ ID NO: 458240 - DNA, 322 bp, Homo sapiens; identical to SEQ ID NO: 345260
  chr7:8476750-8477072
  hyper
  cervical vs. upper_gi,colorectal,ovary,uterine,renal, prostate,pancreas_gallbladder,multiple_myeloma,myeloid_neoplasm, bladder_and_urothelial,thyroid,breast,lymphoid_neoplasm, non_cancer

SEQ ID NO: 458241 - DNA, 77 bp, Homo sapiens
  chr7:19146849-19146926
  hyper
  cervical vs. myeloid_neoplasm,uterine,multiple_myeloma
cgctgtaaatttcctatacaaatctcaaaatttttcttagcattgtcaactaccttcttggagacaggctacagcgc

SEQ ID NO: 458242 - DNA, 60 bp, Homo sapiens; identical to SEQ ID NO: 454474
  chr7:19156644-19156704
  hyper
  cervical vs. anorectal

SEQ ID NO: 458243 - DNA, 210 bp, Homo sapiens; identical to SEQ ID NO: 456111
  chr7:23052818-23053028
  hyper
  cervical vs. lung

SEQ ID NO: 458244 - DNA, 595 bp, Homo sapiens; identical to SEQ ID NO: 346883
  chr7:23053080-23053675
  hyper
  cervical vs. lung

SEQ ID NO: 458245 - DNA, 599 bp, Homo sapiens; identical to SEQ ID NO: 456113
  chr7:23053195-23053794
  hyper
  cervical vs. lung

SEQ ID NO: 458246 - DNA, 246 bp, Homo sapiens; identical to SEQ ID NO: 350530
  chr7:23053819-23054065
  hyper
  cervical vs. lung

SEQ ID NO: 458247 - DNA, 196 bp, Homo sapiens; identical to SEQ ID NO: 456123
  chr7:25896938-25897134
  hyper
  cervical vs. anorectal

SEQ ID NO: 458248 - DNA, 109 bp, Homo sapiens; identical to SEQ ID NO: 345266
  chr7:25897246-25897355
  hyper
  cervical vs. anorectal

SEQ ID NO: 458249 - DNA, 296 bp, Homo sapiens
  chr7:25901811-25902107
  hyper
  cervical vs. colorectal,anorectal,head_and_neck
cgtttccggaagacactctacacctctccgcctcttcataaatatttaaaccgcttctttctagatttgtcatttaaatctactagggaatgtgcctcaagggctcatctttcactgggtcgctcacacagaggtggggcgagagggaggaggcgcattagccctgcgctctcatttgcttaaacggccttcttacgtcatcgtaagcctaagccaatccgtgaagtgcactttgacaagctacccgcccctaatttgtcctttcaccgccagcctaagccaatagtgtggctgca

SEQ ID NO: 458250 - DNA, 208 bp, Homo sapiens
  chr7:25902138-25902346
  hyper
  cervical vs. colorectal,anorectal,head_and_neck
gcccccggctccgcccaatttcccacctcttcccggagcgcacagacgccagctgagtgggaggggcctagctgcgggcggagcacggaggaggaagggcacgaggaagaggcggagcgggccgaggcgcgcggagctgggtttgctgagtgcttccttcctcggccccacctcccgccgggcaggatgccgtttgatcattggctgg

SEQ ID NO: 458251 - DNA, 16 bp, Homo sapiens
  chr7:33943436-33943452
  hyper
  cervical vs. uterine
cgtcacagcaacgtgc

SEQ ID NO: 458252 - DNA, 308 bp, Homo sapiens; identical to SEQ ID NO: 333118
  chr7:35576961-35577269
  hyper
  cervical vs. lung,head_and_neck,upper_gi,liver_bileduct, anorectal,pancreas_gallbladder,colorectal

SEQ ID NO: 458253 - DNA, 7 bp, Homo sapiens
  chr7:37487365-37487372
  hyper
  cervical vs. lymphoid_neoplasm,uterine,myeloid_neoplasm, non_cancer,thyroid,ovary,multiple_myeloma,breast,prostate,renal
cgctcgc

SEQ ID NO: 458254 - DNA, 168 bp, Homo sapiens; identical to SEQ ID NO: 345273
  chr7:37960958-37961126
  hyper
  cervical vs. liver_bileduct,pancreas_gallbladder,lung, renal,ovary

SEQ ID NO: 458255 - DNA, 27 bp, Homo sapiens
  chr7:39453515-39453542
  hyper
  cervical vs. sarcoma
cgcttcgggaaaataacgagcccctca

SEQ ID NO: 458256 - DNA, 46 bp, Homo sapiens; identical to SEQ ID NO: 350567
  chr7:39454304-39454350
  hyper
  cervical vs. sarcoma

SEQ ID NO: 458257 - DNA, 52 bp, Homo sapiens; identical to SEQ ID NO: 453417
  chr7:42927739-42927791
  hyper
  cervical vs. pancreas_gallbladder,colorectal

SEQ ID NO: 458258 - DNA, 412 bp, Homo sapiens; identical to SEQ ID NO: 346903
  chr7:42928175-42928587
  hyper
  cervical vs. pancreas_gallbladder,colorectal

SEQ ID NO: 458259 - DNA, 102 bp, Homo sapiens; identical to SEQ ID NO: 345274
  chr7:50344738-50344840
  hyper
  cervical vs. anorectal

SEQ ID NO: 458260 - DNA, 110 bp, Homo sapiens; identical to SEQ ID NO: 333146
  chr7:64254700-64254810
  hyper
  cervical vs. lung,liver_bileduct,upper_gi

SEQ ID NO: 458261 - DNA, 57 bp, Homo sapiens; identical to SEQ ID NO: 453420
  chr7:64734140-64734197
  hyper
  cervical vs. uterine,ovary

SEQ ID NO: 458262 - DNA, 5 bp, Homo sapiens
  chr7:64974264-64974269
  hyper
  cervical vs. breast,sarcoma,uterine
cggcg

SEQ ID NO: 458263 - DNA, 61 bp, Homo sapiens
  chr7:64974448-64974509
  hyper
  cervical vs. breast,sarcoma,uterine
cggcgggggaaaaagccgcggcggagtggggcgaaaagcagtgggagctggggcaaaaaaa

SEQ ID NO: 458264 - DNA, 5 bp, Homo sapiens
  chr7:64974988-64974993
  hyper
  cervical vs. breast,sarcoma,uterine
tcggc

SEQ ID NO: 458265 - DNA, 59 bp, Homo sapiens
  chr7:76145303-76145362
  hyper
  cervical vs. lymphoid_neoplasm,melanoma
cgtcaccccagtaggctctccaggacccaggagcctccatcacctggaaggaccctctg

SEQ ID NO: 458266 - DNA, 168 bp, Homo sapiens
  chr7:87563203-87563371
  hyper
  cervical vs. head_and_neck
cgatgcagatgaatactggctgctgtaacggcccagttggtgcatctcggatgccaggaggcggtccagtgctgatctctttcttttgcccttccctcccgcccttccagtctgtgggatatagaggacctcacagtcacgaggtcgcgacggtccgtgccgtcgtgg

SEQ ID NO: 458267 - DNA, 216 bp, Homo sapiens
  chr7:87563614-87563830
  hyper
  cervical vs. head_and_neck
cactgagccgcggtggaggttgcagcgccacggccgccgcagcaccggccggggctgggtggaggtggccgcggggaccccgggggcgcggagcgagggaaacggactcggcggcgccggcatgaggagctgagcgtctcgggcgaggcgggctgacggcagcaccatgcaggcggcagtggctgtgtccgtgcccttcttgctgctctgtgtcct

SEQ ID NO: 458268 - DNA, 176 bp, Homo sapiens
  chr7:87563890-87564066
  hyper
  cervical vs. head_and_neck
tgggccataccatttcccgggaatctttggagccctcaggcgtattgaaaagggggcatccccatttcccgagtgcgcggggagattttttttttttttttttttaattcgggagggtggtgagaagtggagcaaaaatatatgtgtggaggcgcgcagatgcactggaagccttc

SEQ ID NO: 458269 - DNA, 191 bp, Homo sapiens
  chr7:87563639-87563830
  hyper
  cervical vs. anorectal
cgccacggccgccgcagcaccggccggggctgggtggaggtggccgcggggaccccgggggcgcggagcgagggaaacggactcggcggcgccggcatgaggagctgagcgtctcgggcgaggcgggctgacggcagcaccatgcaggcggcagtggctgtgtccgtgcccttcttgctgctctgtgtcct

SEQ ID NO: 458270 - DNA, 440 bp, Homo sapiens
  chr7:87563890-87564330
  hyper
  cervical vs. anorectal
tgggccataccatttcccgggaatctttggagccctcaggcgtattgaaaagggggcatccccatttcccgagtgcgcggggagattttttttttttttttttttaattcgggagggtggtgagaagtggagcaaaaatatatgtgtggaggcgcgcagatgcactggaagccttcggtcaaagcctgtttttctccttctgaagaggaatggggagaatgggaaaggggtgccctgcttctgggccccgctcctggttgctctcggatgagctggtccaaggctctcgggctggtgtctctgcgtccttcccagttgggttccgagagggagggggcggtggggattttcgtaggggagacgtaggactgcaggatggaggagtgagggtcagggtcattattttcgccttttctctccactccctcctttcccggttc

SEQ ID NO: 458271 - DNA, 207 bp, Homo sapiens; identical to SEQ ID NO: 350608
  chr7:87564359-87564566
  hyper
  cervical vs. anorectal

SEQ ID NO: 458272 - DNA, 204 bp, Homo sapiens; identical to SEQ ID NO: 358894
  chr7:93203842-93204046
  hyper
  cervical vs. lung

SEQ ID NO: 458273 - DNA, 170 bp, Homo sapiens
  chr7:93204048-93204218
  hyper
  cervical vs. lung
aaacttctcctgacttaagagtctcaatcctagcctgcgctcccgccccacccccgcccgcctcccgacaggcggcagaggaggtggcagcagaattgatgagagccagccccccttcccggaccccgccaccccagtcagccccctcctgtcccaggagagggaggggc

SEQ ID NO: 458274 - DNA, 39 bp, Homo sapiens
  chr7:94536809-94536848
  hyper
  cervical vs. lung,ovary,pancreas_gallbladder
cggagccaacacccgaacaggaaggggccttgccccagg

SEQ ID NO: 458275 - DNA, 280 bp, Homo sapiens
  chr7:94537598-94537878
  hyper
  cervical vs. lung
tgggatctattgtttcctggcacattgggaggaaaaacaaagggatttattttcattaccctgtaattttttttcttttctatttttttaaatgtggccagggagctcgtctctctccgtgtcacagtgggatccgcctggcagccgccgggagctgcagccaatgtgttaggacttcaggtgcttcttggcacaaagctagactgcgacctcctaccatagcgcttggcgtcacctgctctcccggtcctgccccagggccgagggattgcgtcccgaa

SEQ ID NO: 458276 - DNA, 221 bp, Homo sapiens; identical to SEQ ID NO: 346927
  chr7:106685920-106686141
  hyper
  cervical vs. bladder_and_urothelial

SEQ ID NO: 458277 - DNA, 240 bp, Homo sapiens
  chr7:112726614-112726854
  hyper
  cervical vs. bladder_and_urothelial
cgcaggggccgcggcggcggcggctgcggtggcgagggcggcggcggggctgcttcagcctctgtggaaccagcaggaacccctacctgactccagagctggctgggtttattgactgccctgtccaatccaactggcagcattaagcttttgtcccttcgtggctgcttctgaacttttccctccccgcatttgtagtggggggctggaaaggccctttcaggacctcaggcccatcct

SEQ ID NO: 458278 - DNA, 230 bp, Homo sapiens
  chr7:113725472-113725702
  hyper
  cervical vs. head_and_neck
actccttggcccaagtgagacaggaaccagggcaacaatgaagagaaagacactcggcctctctccaccccaggccgcagaggcgcacaccgtgaaaagaaaggccaatcagcgctttaacgcacgctcgggtctccctttccgactaccatgtacttttaactccctgccaccgagggctttggatcccttcgaggctttctgcacttcaagtggaatcccctgtttca

SEQ ID NO: 458279 - DNA, 68 bp, Homo sapiens; identical to SEQ ID NO: 346929
  chr7:113725858-113725926
  hyper
  cervical vs. head_and_neck

SEQ ID NO: 458280 - DNA, 230 bp, Homo sapiens; identical to SEQ ID NO: 458278
  chr7:113725472-113725702
  hyper
  cervical vs. head_and_neck,anorectal

SEQ ID NO: 458281 - DNA, 230 bp, Homo sapiens
  chr7:113725858-113726088
  hyper
  cervical vs. head_and_neck,anorectal
ggagcaggaggtggggagaagggtgggggtgggggaaggtctggcgtagcacaaacaagttctccagcgggttgtttacatagcaggtggacctgacgtcagccaggaggctccgctgcaaatccgaacaatattcttccccgcgtttccccctccttaaagaagttagggaacggggggagataggtggacgggggagaaaggcatcctaaccagctggttccaaacct

SEQ ID NO: 458282 - DNA, 483 bp, Homo sapiens
  chr7:113726887-113727370
  hyper
  cervical vs. head_and_neck,anorectal
cacttgttgttctctttcattttgctttgtgatgggggaaaaaggggtggagaggggagatttgctgttggctcacggatgatttttagtttggataatgcaaaatgttgcttcgtccggagagacctcggctggaggagaatgtgtgtcgaaacaccagatgtgtgtttgtttactctcttctttttaattgtttgttgtcttttccccttcctccccgcacccccacccccaacctcgggaggagaaacaacagtaaaaacatctggcggttagaagcacacactttattgatccaactgctgacctttatttactcagttgggcaagtgcacgcttctcgcgtctaagttgggcacttcagcgttcatctcagaagtacttctccaggaaggagagagatggaaaggggacactcctgtttctggagtcaagaaactcctgggccctactgacgcttcgggataaccgtgcacagggatg

SEQ ID NO: 458283 - DNA, 83 bp, Homo sapiens
  chr7:140771242-140771325
  hyper
  cervical vs. head_and_neck,bladder_and_urothelial
cgcctcgttcgcgcttttcaaaatgcaggaagggcgggggagagagagagagagagagagggaaaaaaaaaaagacaaaaaga

SEQ ID NO: 458284 - DNA, 220 bp, Homo sapiens
  chr7:140771550-140771770
  hyper
  cervical vs. head_and_neck,bladder_and_urothelial
ggggctgaagttgggatgaagcggggcttgcctggggcccacccgctcaaggtctggggtccggcgctacctcccagagcccctgcagagcctaaatccagcggccacccttacaaaatgacaaaccctgcatcgaggtttcttttaaccccaccttccctcaacgctcgagctctccagcgttttcaaaatatctactaacggaccaccccccatccac

SEQ ID NO: 458285 - DNA, 203 bp, Homo sapiens; identical to SEQ ID NO: 345288
  chr7:140771841-140772044
  hyper
  cervical vs. head_and_neck,bladder_and_urothelial

SEQ ID NO: 458286 - DNA, 107 bp, Homo sapiens; identical to SEQ ID NO: 350665
  chr7:145814199-145814306
  hyper

SEQ ID NO: 458287 - DNA, 669 bp, Homo sapiens; identical to SEQ ID NO: 333286
  chr7:148036392-148037061
  hyper
  cervical vs. colorectal,breast

SEQ ID NO: 458288 - DNA, 168 bp, Homo sapiens; identical to SEQ ID NO: 333288
  chr7:148523540-148523708
  hyper
  cervical vs. head_and_neck

SEQ ID NO: 458289 - DNA, 846 bp, Homo sapiens; identical to SEQ ID NO: 333298
  chr7:150671471-150672317
  hyper
  cervical vs. lung,colorectal

SEQ ID NO: 458290 - DNA, 217 bp, Homo sapiens
  chr7:157476655-157476872
  hyper
  cervical vs. anorectal
gatttttccccatgaatgcctggccggcctattcattatctctcttctattagtaattttctgctccgtattcagcctcccaactcttcatttcctcccgtctcccagcgtacacagtgcctcttatgtcaggccgggcccgtttttatcttgtaatcataaaggccaccaaagcaattatcgccggtcttgactggaaaagctggtcattaattag

SEQ ID NO: 458291 - DNA, 2 bp, Homo sapiens
  chr8:12989380-12989382
  hyper
  cervical vs. lung
cg

SEQ ID NO: 458292 - DNA, 325 bp, Homo sapiens
  chr8:12989711-12990036
  hyper
  cervical vs. lung
aactgtgtgtgtgtgtgtgtgtgtgtgtgtgtgtgtgtgtttcctagcaagaagcacgtttgcaagccacggggcttgctaaactaccccaacactctccaggtacctgcggccaccaaaccgagacttccctggccaggtctgagttaattcccagcgcttaaagtatcttacccaaaaatggttgaaaaggaaaacaagtttttggtgaactttcaggcagtgatgaaaaaaaaaaatttccaagcgccactagggtctaaaatgttcccaaacagtaaactctcccggagttcactttgattttggactaagctggtgaatg

SEQ ID NO: 458293 - DNA, 30 bp, Homo sapiens
  chr8:12990148-12990178
  hyper
  cervical vs. lung
agtgaaccagggcttcccttcacgggttgc

SEQ ID NO: 458294 - DNA, 5 bp, Homo sapiens
  chr8:16884178-16884183
  hyper
  cervical vs. lung,melanoma
cggaa

SEQ ID NO: 458295 - DNA, 85 bp, Homo sapiens
  chr8:16884239-16884324
  hyper
  cervical vs. lung,melanoma
caaatgcttatacctcatttgtgtcgtatatgtgaagatacaattgcaaatcgttcacgaccttgagtcaagaccttgagtttcc

SEQ ID NO: 458296 - DNA, 260 bp, Homo sapiens
  chr8:24814801-24815061
  hyper
  cervical vs. anorectal
cgtgaaactgcggcactactgcaggtattggtttagcatttttaaacctttacagcagttaatccgcctgttagtgtttctagattttcacatttcttaactgagaatgaagccgcagatggctttaacgtgttgcagtgtgtgggtggtggagggcagagaaagagttggaaacacagagactgacttgctgaggcagccgcgcgctccgcagccgggagcttcaagctgcctggatcctcaccaagctaaattcctgc

SEQ ID NO: 458297 - DNA, 39 bp, Homo sapiens; identical to SEQ ID NO: 350723
  chr8:24815435-24815474
  hyper
  cervical vs. anorectal

SEQ ID NO: 458298 - DNA, 88 bp, Homo sapiens; identical to SEQ ID NO: 350729
  chr8:25904367-25904455
  hyper
  cervical vs. melanoma

SEQ ID NO: 458299 - DNA, 372 bp, Homo sapiens; identical to SEQ ID NO: 346973
  chr8:28347825-28348197
  hyper
  cervical vs. upper_gi,lung,pancreas_gallbladder, bladder_and_urothelial

SEQ ID NO: 458300 - DNA, 95 bp, Homo sapiens; identical to SEQ ID NO: 359091
  chr8:30890537-30890632
  hyper
  cervical vs. head_and_neck

SEQ ID NO: 458301 - DNA, 231 bp, Homo sapiens; identical to SEQ ID NO: 359092
  chr8:33372206-33372437
  hyper
  cervical vs. pancreas_gallbladder

SEQ ID NO: 458302 - DNA, 6 bp, Homo sapiens
  chr8:38008624-38008630
  hyper
  cervical vs. myeloid_neoplasm
tggggc

SEQ ID NO: 458303 - DNA, 25 bp, Homo sapiens
  chr8:38323132-38323157
  hyper
cggcaaagacggccggcaatagcag

SEQ ID NO: 458304 - DNA, 113 bp, Homo sapiens
  chr8:49834207-49834320
  hyper
  cervical vs. head_and_neck,anorectal,lung,liver_bileduct
cgctcggtgagccccgcccgcgatccacgctctctgggagctaggaggggcgcaggagccggggtctctgccctgcccgcctggcttccagatgtggtgcagcgccagcgcgc

SEQ ID NO: 458305 - DNA, 11 bp, Homo sapiens
  chr8:57069543-57069554
  hyper
  cervical vs. myeloid_neoplasm,prostate
cgaaaagtaga

SEQ ID NO: 458306 - DNA, 606 bp, Homo sapiens; identical to SEQ ID NO: 333447
  chr8:57122656-57123262
  hyper
  cervical vs. pancreas_gallbladder

SEQ ID NO: 458307 - DNA, 200 bp, Homo sapiens; identical to SEQ ID NO: 453449
  chr8:60030947-60031147
  hyper
  cervical vs. ovary,lung,uterine

SEQ ID NO: 458308 - DNA, 115 bp, Homo sapiens; identical to SEQ ID NO: 346983
  chr8:60031791-60031906
  hyper
  cervical vs. ovary,lung,uterine

SEQ ID NO: 458309 - DNA, 350 bp, Homo sapiens; identical to SEQ ID NO: 453451
  chr8:60031791-60032141
  hyper
  cervical vs. uterine,ovary,non_cancer,myeloid_neoplasm, thyroid,lung

SEQ ID NO: 458310 - DNA, 103 bp, Homo sapiens; identical to SEQ ID NO: 453452
  chr8:60032288-60032391
  hyper
  cervical vs. uterine,ovary,non_cancer,myeloid_neoplasm, thyroid,lung

SEQ ID NO: 458311 - DNA, 229 bp, Homo sapiens; identical to SEQ ID NO: 453453
  chr8:60031912-60032141
  hyper
  cervical vs. non_cancer,myeloid_neoplasm, multiple_myeloma,uterine,thyroid,renal,melanoma

SEQ ID NO: 458312 - DNA, 203 bp, Homo sapiens; identical to SEQ ID NO: 453454
  chr8:60032288-60032491
  hyper
  cervical vs. non_cancer,myeloid_neoplasm, multiple_myeloma,uterine,thyroid,renal,melanoma

SEQ ID NO: 458313 - DNA, 212 bp, Homo sapiens; identical to SEQ ID NO: 345302
  chr8:61193765-61193977
  hyper
  cervical vs. ovary,upper_gi,breast,uterine,colorectal, myeloid_neoplasm,multiple_myeloma,bladder_and_urothelial, prostate,melanoma,pancreas_gallbladder,non_cancer,lung

SEQ ID NO: 458314 - DNA, 293 bp, Homo sapiens; identical to SEQ ID NO: 453456
  chr8:61193765-61194058
  hyper
  cervical vs. breast,uterine,ovary,upper_gi,melanoma, prostate

SEQ ID NO: 458315 - DNA, 5 bp, Homo sapiens
  chr8:67026485-67026490
  hyper
  cervical vs. upper_gi,pancreas_gallbladder
cgcat

SEQ ID NO: 458316 - DNA, 235 bp, Homo sapiens; identical to SEQ ID NO: 453461
  chr8:67026578-67026813
  hyper
  cervical vs. upper_gi,pancreas_gallbladder

SEQ ID NO: 458317 - DNA, 436 bp, Homo sapiens; identical to SEQ ID NO: 453464
  chr8:70745324-70745760
  hyper
  cervical vs. uterine,myeloid_neoplasm,thyroid

SEQ ID NO: 458318 - DNA, 898 bp, Homo sapiens
  chr8:70745885-70746783
  hyper
  cervical vs. colorectal,lung
cgtgtgtagaaatgtgtgtgcacactggtgtgcgttggcacgtgtgcgcgactagatttgaatctgtctgctccaccagagacacacattcaaagccgaaggcagcagcaaaaaggtcaacatgcttgcctctttattcccaacaccaaaaataaccccctgaccgaaagaactcttcaattacaaataccaggggcattcgaggctgtggcccgcactaagtcccagagcgcggtatcaaacgaaaccgaaaatccgtctgctttgccgagagctagggaagccacaaccaaacaaagagatcccggcacgctgtcagagagcgcgcgaggagcccacggagccggctgggcgcacgcgggccggcggggaggtgtgctattgactgagcgcaccccgctagcgtgggcctggggagcgtgtgcgcgtgcgcggccacacacacacacacacacacacacacacacacacacacacaccggcgtactggaacctctctcgcgatcccgcacccagcttgaattcagcaagaatcgaaaacaggtgtgcccccgtggtaagaccccgcccctaatcttggggacccccactccactcctccagcctggggcaaggacggggggcggaatatgcaccaggtgggagacagccgagcttcactacactgggtttcattttgcagcgcgcctttgtgatgctgctgagaaaagaaaggaggaagggcaagggagaaaggcagagaggctgggcggccaagggtggccgctccggcatctccctcggctgtgctgggccaaacccgctcccagattcccggcctgccagccactcacaatcccgggcttccccgccgctgccttacccaggcgccttcccggggaaccccaccagccgctgc

SEQ ID NO: 458319 - DNA, 55 bp, Homo sapiens; identical to SEQ ID NO: 346990
  chr8:72756949-72757004
  hyper
  cervical vs. sarcoma,renal,melanoma,non_cancer

SEQ ID NO: 458320 - DNA, 27 bp, Homo sapiens
  chr8:75896528-75896555
  hyper
  cervical vs. lung
cgggcttgggtctcgggagcccaaagc

SEQ ID NO: 458321 - DNA, 77 bp, Homo sapiens; identical to SEQ ID NO: 346991
  chr8:75897394-75897471
  hyper
  cervical vs. lung

SEQ ID NO: 458322 - DNA, 602 bp, Homo sapiens; identical to SEQ ID NO: 359154
  chr8:81399496-81400098
  hyper
  cervical vs. lung

SEQ ID NO: 458323 - DNA, 698 bp, Homo sapiens
  chr8:81399635-81400333
  hyper
  cervical vs. liver_bileduct
cggggcggaaggcggcagctgcagcagcagcaggcggtcgggcggcgatggcggggacgaagtggagggcagcggtgtgggagctggcgaaggagagactgtccagcacttcccgctcgcgcggcccaagtctctaatgcagaagctccaatgctccttccagacctcctggctcaaggactttccctggctgcgctattccaaggatactggtcttatgtcttgcggctggtgccaaaagacccctgcagatgggggaagcgtggaccttcccccagtggggcatgatgagctttcgcgagggacccgcaactacaagaaaaccctcctcctgaggcaccacgtctctaccgagcacaaactccacgaagccaacgcccaggtacagtatatcctgctcctacttttttgagatcttttagggaaaggtttatcagcactcccttcacccccacccacccccgaaaaaaaacctcaaaaccattttcctgggtgaagacatcgttccagttgagaggtgcgggaagcttaggcgtgggggtttagaaagcctgggaacaagttttataaaagttctgtatgtgttgtggggggaaggggatggaatgacaattgtcgtggcgctggattttcttttttatgactcatttcttatcagattgaatcaaaaagaaagtgaggttgaaggttttaaccta

SEQ ID NO: 458324 - DNA, 174 bp, Homo sapiens; identical to SEQ ID NO: 350818
  chr8:110987222-110987396
  hyper
  cervical vs. colorectal

SEQ ID NO: 458325 - DNA, 818 bp, Homo sapiens; identical to SEQ ID NO: 345315
  chr8:114449602-114450420
  hyper
  cervical vs. liver_bileduct,lung

SEQ ID NO: 458326 - DNA, 541 bp, Homo sapiens; identical to SEQ ID NO: 454513
  chr8:121823361-121823902
  hyper
  cervical vs. liver_bileduct,anorectal

SEQ ID NO: 458327 - DNA, 27 bp, Homo sapiens
  chr8:121823930-121823957
  hyper
  cervical vs. liver_bileduct,anorectal
ctcgctgctcagaaccagggcgtcctc

SEQ ID NO: 458328 - DNA, 393 bp, Homo sapiens
  chr8:136469763-136470156
  hyper
  cervical vs. head_and_neck
cgggactggcggggatcgccgtggactgcctcaggggcgccgcagcccgctcggcccgagggcccgcctaaccgcgccgcccgcgcccgctcctcctcggcccgcgcccggagcgcgggggccgccggcgctgggtactcggcggccaccggggatcggggctgagcggtcggttcccgcccccgtgccgccgccgccgccttccggccgaccgcccggcttggccgctgctgccgcgtctggcccccgggtccccgccgctgggggcgcgggcggggtcgggggttgccgggcgccgccccccgtgcgcctggagtccacatcccgggcccggcggccggcgagcatggaggagaagtacctgcccgagctgatggcggagaaggactccct

SEQ ID NO: 458329 - DNA, 206 bp, Homo sapiens; identical to SEQ ID NO: 359234
  chr8:136470313-136470519
  hyper
  cervical vs. head_and_neck

SEQ ID NO: 458330 - DNA, 151 bp, Homo sapiens; identical to SEQ ID NO: 453487
  chr8:140643192-140643343
  hyper
  cervical vs. bladder_and_urothelial,lymphoid_neoplasm, melanoma,renal,upper_gi,multiple_myeloma

SEQ ID NO: 458331 - DNA, 121 bp, Homo sapiens
  chr8:143531858-143531979
  hyper
  cervical vs. anorectal
cgctggcgggggtctaagggagccccccatggcccccaacagccacacatagacgcagcaggctccggagagcccccgagcgtgtccccctcctgctaatcacgtccagggccccctacag

SEQ ID NO: 458332 - DNA, 97 bp, Homo sapiens; identical to SEQ ID NO: 453494
  chr9:19127135-19127232
  hyper
  cervical vs. bladder_and_urothelial,melanoma

SEQ ID NO: 458333 - DNA, 16 bp, Homo sapiens
  chr9:19127549-19127565
  hyper
  cervical vs. bladder_and_urothelial,melanoma
gcagcacgtgacccgc

SEQ ID NO: 458334 - DNA, 72 bp, Homo sapiens; identical to SEQ ID NO: 453496
  chr9:21395928-21396000
  hyper
  cervical vs. pancreas_gallbladder,melanoma,ovary, multiple_myeloma,renal,uterine,liver_bileduct

SEQ ID NO: 458335 - DNA, 36 bp, Homo sapiens; identical to SEQ ID NO: 345322
  chr9:21396327-21396363
  hyper
  cervical vs. pancreas_gallbladder,melanoma,ovary, multiple_myeloma,renal,uterine,liver_bileduct

SEQ ID NO: 458336 - DNA, 894 bp, Homo sapiens; identical to SEQ ID NO: 333655
  chr9:35756575-35757469
  hyper
  cervical vs. pancreas_gallbladder

SEQ ID NO: 458337 - DNA, 22 bp, Homo sapiens
  chr9:36036762-36036784
  hyper
  cervical vs. lung,renal,melanoma,prostate,ovary,sarcoma, multiple_myeloma,uterine,non_cancer,myeloid_neoplasm,thyroid
cgacacacagttgggccataac

SEQ ID NO: 458338 - DNA, 9 bp, Homo sapiens
  chr9:37028066-37028075
  hyper
  cervical vs. lymphoid_neoplasm,prostate,melanoma, non_cancer,myeloid_neoplasm,thyroid
agagcagtc

SEQ ID NO: 458339 - DNA, 63 bp, Homo sapiens; identical to SEQ ID NO: 456188
  chr9:37034135-37034198
  hyper
  cervical vs. lymphoid_neoplasm

SEQ ID NO: 458340 - DNA, 349 bp, Homo sapiens; identical to SEQ ID NO: 333667
  chr9:71320587-71320936
  hyper
  cervical vs. upper_gi,colorectal

SEQ ID NO: 458341 - DNA, 163 bp, Homo sapiens; identical to SEQ ID NO: 333671
  chr9:74640002-74640165
  hyper
  cervical vs. liver_bileduct

SEQ ID NO: 458342 - DNA, 102 bp, Homo sapiens
  chr9:77111662-77111764
  hyper
  cervical vs. anorectal,ovary,head_and_neck
cggacgtttttaaaggaaggggacagctacttccatgggactgcattttagttgtgctaaaagtgatgaaagtgggtttgcattattctaccaccaacaccc

SEQ ID NO: 458343 - DNA, 9 bp, Homo sapiens
  chr9:77112369-77112378
  hyper
  cervical vs. anorectal,ovary,head_and_neck
atccacacc

SEQ ID NO: 458344 - DNA, 244 bp, Homo sapiens
  chr9:87283766-87284010
  hyper
  cervical vs. head_and_neck
cgatctgggaatggctacatcccgtcaggttaaaggatgagagaaaatgacgcggcgccacacatcggacaggccagggtggccaccgagcatttagaatacgcatcaggcgcgctcccttcccctcacatgtctctatttcccgggcgtgtgatggcagaaaacggcaggaaaaagacccacttagagagctagaattgtgtttggagactcccttccctctgcaaaagcaccaacaggaagc

SEQ ID NO: 458345 - DNA, 370 bp, Homo sapiens
  chr9:95570986-95571356
  hyper
  cervical vs. anorectal
cggctgcacaggggcaggaaccggccctcagacccaaccccggtggctgcagagggccactggctagaggtccccagctccagcagaggaggagctgggcgggggcagggcctggcgggctctcaggccaggtgcactcgcgatctagaggcagcccaggccattctccaccacctgggcgcccaagctgcaggcgccctctacctgctggcaacagctgcctggccactcccaagctggctggcgctcccaagcctcgcagaaccggggctagatgtcgccgtggctgcggccaagcccggcggtctgcccggcggcggctgcaccgtggctggaaccgaccccccagtcccatcccccatggctacgg

SEQ ID NO: 458346 - DNA, 3 bp, Homo sapiens
  chr9:95571692-95571695
  hyper
  cervical vs. anorectal
gtc

SEQ ID NO: 458347 - DNA, 175 bp, Homo sapiens
  chr9:96717633-96717808
  hyper
  cervical vs. anorectal
ctgcgccccctccccacgccgccgcgcctcttgcccggccagccccgcgtcaccgccccgccccgccccgccccgcgccgccgcccccaacccctaggctgagccggagggagggacccagaagggagggaggcggaagggaggccaaaaaggagggggccacgtgaaagaggcc

SEQ ID NO: 458348 - DNA, 9 bp, Homo sapiens
  chr9:96717840-96717849
  hyper
  cervical vs. anorectal
cgcacgccc

SEQ ID NO: 458349 - DNA, 11 bp, Homo sapiens
  chr9:96718256-96718267
  hyper
  cervical vs. anorectal
ggtgaggcagc

SEQ ID NO: 458350 - DNA, 15 bp, Homo sapiens
  chr9:99984044-99984059
  hyper
  cervical vs. melanoma
ctggccgtgactccc

SEQ ID NO: 458351 - DNA, 41 bp, Homo sapiens; identical to SEQ ID NO: 359367
  chr9:99984107-99984148
  hyper
  cervical vs. melanoma

SEQ ID NO: 458352 - DNA, 202 bp, Homo sapiens; identical to SEQ ID NO: 453506
  chr9:100610480-100610682
  hyper
  cervical vs. multiple_myeloma,myeloid_neoplasm,sarcoma, thyroid,melanoma,non_cancer

SEQ ID NO: 458353 - DNA, 202 bp, Homo sapiens; identical to SEQ ID NO: 453506
  chr9:100610480-100610682
  hyper
  cervical vs. sarcoma,myeloid_neoplasm

SEQ ID NO: 458354 - DNA, 392 bp, Homo sapiens; identical to SEQ ID NO: 350932
  chr9:122318421-122318813
  hyper
  cervical vs. bladder_and_urothelial,lung,melanoma,breast

SEQ ID NO: 458355 - DNA, 110 bp, Homo sapiens
  chr9:126779038-126779148
  hyper
cggtaggccggtcggtggcgcggatttaagatttgctgaaggcactaccacagatgtagctctctggaacttccatccctcctctcctaccaccccccaaaaaaagacaa

SEQ ID NO: 458356 - DNA, 154 bp, Homo sapiens
  chr9:126780315-126780469
  hyper
  cervical vs. myeloid_neoplasm,uterine
ccagctttttgtgtgtgtgtgcctggcggcgtaattactgatttgattccaatccattatttagacaattgaacctacaatctcgtctttagtaaaatgaggcgaagtcagatttgattacaggttcagtcccagcgacaagagctcgaaaccc

SEQ ID NO: 458357 - DNA, 250 bp, Homo sapiens
  chr9:126780315-126780565
  hyper
  cervical vs. uterine,ovary,multiple_myeloma, myeloid_neoplasm
ccagctttttgtgtgtgtgtgcctggcggcgtaattactgatttgattccaatccattatttagacaattgaacctacaatctcgtctttagtaaaatgaggcgaagtcagatttgattacaggttcagtcccagcgacaagagctcgaaacccgatgggttaataacagatcacgagtaaattattcatgattttacgagctctttagctccattgaatcggcctaattgagaggaaaaaaaaaaaaaa

SEQ ID NO: 458358 - DNA, 470 bp, Homo sapiens
  chr9:136399643-136400113
  hyper
  cervical vs. anorectal
gccgccgccggcagcagccaacaggcagctgggccggcctggccgggctccagaggcgcagagcgggttaaagtgtgcgccaggccggccggcgcgggcgggggagcggcctggtgggaagtgtgagtgttcctccccgtctgcctgacagctataaaggcggccgccggcgcagagccgccactgggctgcgcccctcccgggaaccccctctcttggatgctctttgaagtgggagagggaggcggcgcgggggaggaggggaaggggagagggaggccgggccgcagcctctgcactcacgccgcccccgcacgcacagcgcacctggcgccgtctgccctccgcagcgctcgcccctttctctgggaggacaacctgctgacccgaagccaggtaggccacctcgtccccgtccccctcacgttgcagcgtccaccaggccagcccactgctcagagtggggctgg

SEQ ID NO: 458359 - DNA, 34 bp, Homo sapiens
  chr9:139084513-139084547
  hyper
  cervical vs. anorectal
cgtcccgccaaggggacgccacccagagccctgt

SEQ ID NO: 458360 - DNA, 10 bp, Homo sapiens
  chrX:8698495-8698505
  hyper
  cervical vs. head_and_neck
cgcgaacgcg

SEQ ID NO: 458361 - DNA, 84 bp, Homo sapiens
  chrX:8699223-8699307
  hyper
  cervical vs. head_and_neck
agaccttgaatctttggggttccgaattgaggcgcgcacagccactcgcacccccaacacgcgcatacacgcaccctggaacac

SEQ ID NO: 458362 - DNA, 214 bp, Homo sapiens
  chrX:8699223-8699437
  hyper
  cervical vs. head_and_neck
agaccttgaatctttggggttccgaattgaggcgcgcacagccactcgcacccccaacacgcgcatacacgcaccctggaacacgacttggcacaagtaccctggctggggctccaagggtgggcagcgagctctgagccctcagagagtgaaaaccatctttcaaaagagacaaagtgtcggcccgcgggcacctgcggggctggggctcgag

SEQ ID NO: 458363 - DNA, 13 bp, Homo sapiens
  chrX:8699750-8699763
  hyper
  cervical vs. head_and_neck
aggatcagccggc

SEQ ID NO: 458364 - DNA, 87 bp, Homo sapiens
  chrX:8699350-8699437
  hyper
  cervical vs. head_and_neck
cgagctctgagccctcagagagtgaaaaccatctttcaaaagagacaaagtgtcggcccgcgggcacctgcggggctggggctcgag

SEQ ID NO: 458365 - DNA, 13 bp, Homo sapiens
  chrX:8699750-8699763
  hyper
  cervical vs. head_and_neck
aggatcagccggc

SEQ ID NO: 458366 - DNA, 99 bp, Homo sapiens
  chrX:8699940-8700039
  hyper
  cervical vs. head_and_neck
cgctggacgctcccggcagacagcgactcgtccagccgccgcgcagcagccgcgccggggccggccgccaggcagccgctggaggccgccagccagagg

SEQ ID NO: 458367 - DNA, 99 bp, Homo sapiens; identical to SEQ ID NO: 458366
  chrX:8699940-8700039
  hyper
  cervical vs. head_and_neck

SEQ ID NO: 458368 - DNA, 170 bp, Homo sapiens; identical to SEQ ID NO: 375380
  chrX:8700460-8700630
  hyper
  cervical vs. head_and_neck

SEQ ID NO: 458369 - DNA, 597 bp, Homo sapiens
  chrX:9432830-9433427
  hyper
  cervical vs. head_and_neck,upper_gi,lung
cgtgggggagcggggcgggcttggtagggacgctggtcccccgaccgtgggacaggggctgggttgggacgcgggtccccactaggagccgcgggggaggggcagggccggagtccctaccctcgtaggggaggggctggttcgggacgcggctcccccggggcgcaggggcggggccgggtggtacgccgggtcccctcccacggccgtgagggaggggccggcggcgggggcggacccctggcggtcctcctggctggggtccgcgcgctcgcggcagctccccgtggaggtcactgtccgtgccagtccctcccgctgtcccgccctctcccgctgccgccgccgccgccgccgcgcccgcctcagcgcccccactccgcgcttgggagcgaggagccgccagcgcccccgccccgccgccgccgcagcgccctcaggccgccattcgccaccgaaactttccagcgcccgcgctctctccgggactcggcggcggcggggcgggggcggcccgggggcggcgcgcggctgctccggggcgccgggccctcttcggccgccgcacggccgggactcggaggctgccggctggag

SEQ ID NO: 458370 - DNA, 135 bp, Homo sapiens
  chrX:9433471-9433606
  hyper
  cervical vs. head_and_neck,upper_gi,lung
cgctgctcgcgacgaggtgagtgcgcagggctcggcgggccgggcgcggggtccgcaaacttctgcggggaggcgggtcccgcgctgaccctccagggtccggccggcggctcggggcgcccgaacgctccaccc

SEQ ID NO: 458371 - DNA, 296 bp, Homo sapiens
  chrX:9433131-9433427
  hyper
  cervical vs. head_and_neck,upper_gi,lung,prostate,renal
cgtgccagtccctcccgctgtcccgccctctcccgctgccgccgccgccgccgccgcgcccgcctcagcgcccccactccgcgcttgggagcgaggagccgccagcgcccccgccccgccgccgccgcagcgccctcaggccgccattcgccaccgaaactttccagcgcccgcgctctctccgggactcggcggcggcggggcgggggcggcccgggggcggcgcgcggctgctccggggcgccgggccctcttcggccgccgcacggccgggactcggaggctgccggctggag

SEQ ID NO: 458372 - DNA, 242 bp, Homo sapiens
  chrX:9433471-9433713
  hyper
  cervical vs. head_and_neck,upper_gi,lung,prostate,renal
cgctgctcgcgacgaggtgagtgcgcagggctcggcgggccgggcgcggggtccgcaaacttctgcggggaggcgggtcccgcgctgaccctccagggtccggccggcggctcggggcgcccgaacgctccacccgcccctggaactcctgtaggtgcaggtcgccaactgtccccgcggcgctcggactggggtgcggcgcgctcccaggagcctgaacaataccccgaggtggccgctcc

SEQ ID NO: 458373 - DNA, 284 bp, Homo sapiens; identical to SEQ ID NO: 347738
  chrX:9433838-9434122
  hyper
  cervical vs. head_and_neck,upper_gi,lung,prostate,renal

SEQ ID NO: 458374 - DNA, 80 bp, Homo sapiens; identical to SEQ ID NO: 453513
  chrX:9433633-9433713
  hyper
  cervical vs. head_and_neck,upper_gi,lung

SEQ ID NO: 458375 - DNA, 583 bp, Homo sapiens; identical to SEQ ID NO: 206207
  chrX:9433838-9434421
  hyper
  cervical vs. head_and_neck,upper_gi,lung

SEQ ID NO: 458376 - DNA, 147 bp, Homo sapiens
  chrX:9753679-9753826
  hyper
  cervical vs. head_and_neck
cggacccgcgcccggctcaggctgctggggggcgcccttcccggctctctaagtccagagtgtgagtgcgcgcagggccgcgcgggacgggcggtccctctgccccggggcagcggccacagcgcgggcaccagggcctcccgcggc

SEQ ID NO: 458377 - DNA, 300 bp, Homo sapiens; identical to SEQ ID NO: 362117
  chrX:9753862-9754162
  hyper
  cervical vs. head_and_neck

SEQ ID NO: 458378 - DNA, 305 bp, Homo sapiens; identical to SEQ ID NO: 453515
  chrX:13706949-13707254
  hyper
  cervical vs. head_and_neck,upper_gi,lung,prostate,ovary, renal,sarcoma,bladder_and_urothelial,lymphoid_neoplasm

SEQ ID NO: 458379 - DNA, 274 bp, Homo sapiens; identical to SEQ ID NO: 453516
  chrX:13707434-13707708
  hyper
  cervical vs. head_and_neck,upper_gi,lung,prostate,ovary, renal,sarcoma,bladder_and_urothelial,lymphoid_neoplasm

SEQ ID NO: 458380 - DNA, 25 bp, Homo sapiens
  chrX:13707229-13707254
  hyper
  cervical vs. upper_gi,head_and_neck,lung,prostate, bladder_and_urothelial,renal,sarcoma,ovary,lymphoid_neoplasm, multiple_myeloma
cgccccggcccgtcgccatgttgtt

SEQ ID NO: 458381 - DNA, 562 bp, Homo sapiens; identical to SEQ ID NO: 347739
  chrX:13707434-13707996
  hyper
  cervical vs. upper_gi,head_and_neck,lung,prostate, bladder_and_urothelial,renal,sarcoma,ovary,lymphoid_neoplasm, multiple_myeloma

SEQ ID NO: 458382 - DNA, 958 bp, Homo sapiens; identical to SEQ ID NO: 336691
  chrX:13752377-13753335
  hyper
  cervical vs. head_and_neck,upper_gi,colorectal,lung

SEQ ID NO: 458383 - DNA, 132 bp, Homo sapiens; identical to SEQ ID NO: 453519
  chrX:15511311-15511443
  hyper
  cervical vs. head_and_neck,upper_gi,lung,prostate, bladder_and_urothelial

SEQ ID NO: 458384 - DNA, 140 bp, Homo sapiens; identical to SEQ ID NO: 347741
  chrX:15511544-15511684
  hyper
  cervical vs. head_and_neck,upper_gi,lung,prostate, bladder_and_urothelial

SEQ ID NO: 458385 - DNA, 117 bp, Homo sapiens; identical to SEQ ID NO: 456206
  chrX:15755988-15756105
  hyper
  cervical vs. head_and_neck,upper_gi

SEQ ID NO: 458386 - DNA, 300 bp, Homo sapiens; identical to SEQ ID NO: 352654
  chrX:15756366-15756666
  hyper
  cervical vs. head_and_neck,upper_gi

SEQ ID NO: 458387 - DNA, 52 bp, Homo sapiens; identical to SEQ ID NO: 453521
  chrX:16730628-16730680
  hyper
  cervical vs. head_and_neck,upper_gi,lung,renal,prostate, bladder_and_urothelial

SEQ ID NO: 458388 - DNA, 225 bp, Homo sapiens; identical to SEQ ID NO: 453522
  chrX:16730628-16730853
  hyper
  cervical vs. head_and_neck,upper_gi,lung,renal,prostate, bladder_and_urothelial,sarcoma

SEQ ID NO: 458389 - DNA, 35 bp, Homo sapiens; identical to SEQ ID NO: 345669
  chrX:16730902-16730937
  hyper
  cervical vs. head_and_neck,upper_gi,lung,renal,prostate, bladder_and_urothelial,sarcoma

SEQ ID NO: 458390 - DNA, 187 bp, Homo sapiens; identical to SEQ ID NO: 336699
  chrX:23801086-23801273
  hyper
  cervical vs. head_and_neck,upper_gi

SEQ ID NO: 458391 - DNA, 100 bp, Homo sapiens
  chrX:39871661-39871761
  hyper
  cervical vs. upper_gi
cgcggccaggaatccctctgcccgcagctgccgcggaggggttgagggttaaacagacaccgggcagaggagcgagcctgccggctgcggccggcgcggc

SEQ ID NO: 458392 - DNA, 187 bp, Homo sapiens; identical to SEQ ID NO: 362133
  chrX:39871778-39871965
  hyper
  cervical vs. upper_gi

SEQ ID NO: 458393 - DNA, 510 bp, Homo sapiens
  chrX:39873113-39873623
  hyper
  cervical vs. head_and_neck,upper_gi
cgagctggcccacttggcacggaagggcaggcaggccaggcgacgcggcgcgagattccacagctcccgctccggaccgggggaaatcctggagtgccagagagcccggggagggggcgctccgggagcctctccttgaaaggcgggatgctttccccgttcctcccgcgcacgtgtcctcagcagagcaggcaagcgctgcgcgcctggggctgcgatcctcgggtgacagcgactgagagcgcgccctctccacccccacccccgccgtcgccgcctctcctggggagctccagtctccagggtgcgctcggggcaggccccaagagccagagaaacggaaaagtgccggggaggcgattaggaagagaagacattaaaaagcccagccctgaaagacaggcagccgagctgaaaaagacgcctgcgaacccccaccccgccgcccctcgcctactgcgcccagacggcccctccttgtcccggctgagcgcacccacccccggcctc

SEQ ID NO: 458394 - DNA, 863 bp, Homo sapiens; identical to SEQ ID NO: 336706
  chrX:39931611-39932474
  hyper
  cervical vs. head_and_neck

SEQ ID NO: 458395 - DNA, 654 bp, Homo sapiens
  chrX:39953710-39954364
  hyper
  cervical vs. upper_gi,head_and_neck,prostate
cgggtcctctccagctccggccccccgcgctcccaccagcccggctgccggggcacagtcacagctccgcgcgctgggcagtcctatttttatcttgtctaatcctaaactgggcggggagcacaggcgtcgtgcttagagaacaagagataggcgcgggaggcggggaggagcagccaggcagcgacgcgagcgggagcgagttaaagacacagtggaggcgaccgcgggcaggaagaaagagcgggctgcgcgggcctcgaggcgccgcacgcaacgcgccgccccgcgaagttacactcgcttccccgccgtccctcgctaccggcccctccccacttcccagcggcgctccccgcagcctggacagcgaggccccggcctgtgtgggaggcggaggccaggacggccctgcaaagggctggagagaatcgctaatgagctgtgcagcccattgatccggagaacacttcctaattaactctcagtcacctactggtgacagcgcctcaaaggacagcgctggggccagccgagccccagccgcgacttgccggccgggcgcctgctgcccaaaacccgcgcgctcccctaaacaccccaaggcaattggtgtgcgtggcggtgtatacccgcacactgaaggccagcctc

SEQ ID NO: 458396 - DNA, 744 bp, Homo sapiens; identical to SEQ ID NO: 456210
  chrX:39953894-39954638
  hyper
  cervical vs. head_and_neck,upper_gi

SEQ ID NO: 458397 - DNA, 817 bp, Homo sapiens
  chrX:39954918-39955735
  hyper
  cervical vs. head_and_neck,upper_gi
cgcgttggtttctttttaaggtttgtttctaaatacacataaccctcctccttccttcttcgctcttccattccccccacccccaccctccagacgccggcggcgcgcgccctggcgcgcgggcactcacagcctctagctggagatcgcggactttctggaaaagattcattaacagcaaattacgcctcgcccggccacggcctacacgctgccagactcgtccgtctccgggaccccgggaagggcccactcgagcgtgcgagcggcgggaagcccgccgggaccacgcgtgacttcggccgccctactccacacacggtgccccaaggctctctccgtaaacagcaggcgctcgtcaccgccgccgcgagcccccgagttggcggaggctctgcggcgcagccgcccgccggctccgagcgcgggccccgcggcgcctcgccctccccgccttggccgaggatcttgccccggtgcgcaagttcctcttcgcctacagcctccttgccacacgccctccgagtgggaccaacttcctccggccgcagactttcacacgcccatcagggctacccaccagactccccattgcccagcggagggcccaggtctcgcccgcccccgccctccctccacgacgctgcccccgcacaagcacattctacacccacccctgggggctcataacttaaaacctacgctgaacatcggggagggagaggagggggaaagcgggagggggatcgcagattataatcttaaaagaacatttacaaaacaaagcgtctgacctggctggcgggcgggccaagtc

SEQ ID NO: 458398 - DNA, 973 bp, Homo sapiens
  chrX:39955257-39956230
  hyper
  cervical vs. head_and_neck,upper_gi,prostate
cgtaaacagcaggcgctcgtcaccgccgccgcgagcccccgagttggcggaggctctgcggcgcagccgcccgccggctccgagcgcgggccccgcggcgcctcgccctccccgccttggccgaggatcttgccccggtgcgcaagttcctcttcgcctacagcctccttgccacacgccctccgagtgggaccaacttcctccggccgcagactttcacacgcccatcagggctacccaccagactccccattgcccagcggagggcccaggtctcgcccgcccccgccctccctccacgacgctgcccccgcacaagcacattctacacccacccctgggggctcataacttaaaacctacgctgaacatcggggagggagaggagggggaaagcgggagggggatcgcagattataatcttaaaagaacatttacaaaacaaagcgtctgacctggctggcgggcgggccaagtcggaaccccttgctctgctcgatttcttagtagtttttttttttaatccacgtgattcgtgctttggggcaagccaagaaaaaacgggactcccctcccgagttgcgcggcagcggcggcaggtcgagctcggctcggcccgaggcactcgccacacaccctcgcgcacgcacacgccgacgttccacttggaggaacgaccggcccccggagaggcgagacgaggcggcggtggcggcggctgggggtttttacagttctttcccgagtcgaaaaagaaagcagacggcaacccgctgccctccccttcctgctcgcgagctaacgccgaacccagcttcccagcttccagcccacctcccccccctccgcccgactcgcggcgctcagcggcgaccgcgctcccgcgcacagacacacacaggctgcaaacttccactctgcgaactccctgctctcctcctggcccaccgggaggcgccaggcccccagccgc

SEQ ID NO: 458399 - DNA, 995 bp, Homo sapiens
  chrX:39955753-39956748
  hyper
  cervical vs. head_and_neck
cgatttcttagtagtttttttttttaatccacgtgattcgtgctttggggcaagccaagaaaaaacgggactcccctcccgagttgcgcggcagcggcggcaggtcgagctcggctcggcccgaggcactcgccacacaccctcgcgcacgcacacgccgacgttccacttggaggaacgaccggcccccggagaggcgagacgaggcggcggtggcggcggctgggggtttttacagttctttcccgagtcgaaaaagaaagcagacggcaacccgctgccctccccttcctgctcgcgagctaacgccgaacccagcttcccagcttccagcccacctcccccccctccgcccgactcgcggcgctcagcggcgaccgcgctcccgcgcacagacacacacaggctgcaaacttccactctgcgaactccctgctctcctcctggcccaccgggaggcgccaggcccccagccgcgccccctccctccctggtgcccacgcggggccgcttaggttggctgcattttaaataacatagctatgaaataaaaacgaaagcgagccaagcagccaaagggaagcgcgaggcaaaagcttcgcggggtacgctgcgggagggggccccgggagagggggccgactgcagccctcagcgcgcccgcccgcccacccgtccgcggtctcccgggggaaaggtgttccgggcactgacctgaaatccccggtgggggagtaggcagggagcctgcgatccggctctttgaagttttcccccaagcggactcgaggcggcgagaaggagcggggggcggttgggtgggtggagagagatatgaggggtggggggggttggcgacgttaacgagcggagaaggagccgggccggagaagcgcggcgagcagcaaagtttgcggtccccggctgcccgcagcccgctcgcggcgccgcgctcactcgactccctcgccgtctgctggcagccggctgccctc

SEQ ID NO: 458400 - DNA, 604 bp, Homo sapiens
  chrX:39956253-39956857
  hyper
  cervical vs. head_and_neck
cgcggggccgcttaggttggctgcattttaaataacatagctatgaaataaaaacgaaagcgagccaagcagccaaagggaagcgcgaggcaaaagcttcgcggggtacgctgcgggagggggccccgggagagggggccgactgcagccctcagcgcgcccgcccgcccacccgtccgcggtctcccgggggaaaggtgttccgggcactgacctgaaatccccggtgggggagtaggcagggagcctgcgatccggctctttgaagttttcccccaagcggactcgaggcggcgagaaggagcggggggcggttgggtgggtggagagagatatgaggggtggggggggttggcgacgttaacgagcggagaaggagccgggccggagaagcgcggcgagcagcaaagtttgcggtccccggctgcccgcagcccgctcgcggcgccgcgctcactcgactccctcgccgtctgctggcagccggctgccctcggggtcggccccgccgaggggtgggctctgggccgggtgggggcggggcggggcgggctcggggcctccgggcaggtggcgacagccccgtgcgatcctccgggctccc

SEQ ID NO: 458401 - DNA, 211 bp, Homo sapiens; identical to SEQ ID NO: 352662
  chrX:39957026-39957237
  hyper
  cervical vs. head_and_neck

SEQ ID NO: 458402 - DNA, 104 bp, Homo sapiens; identical to SEQ ID NO: 456211
  chrX:39956753-39956857
  hyper
  cervical vs. head_and_neck

SEQ ID NO: 458403 - DNA, 712 bp, Homo sapiens; identical to SEQ ID NO: 456212
  chrX:39957026-39957738
  hyper
  cervical vs. head_and_neck

SEQ ID NO: 458404 - DNA, 624 bp, Homo sapiens; identical to SEQ ID NO: 456213
  chrX:39957281-39957905
  hyper
  cervical vs. head_and_neck

SEQ ID NO: 458405 - DNA, 151 bp, Homo sapiens; identical to SEQ ID NO: 352664
  chrX:39958064-39958215
  hyper
  cervical vs. head_and_neck

SEQ ID NO: 458406 - DNA, 155 bp, Homo sapiens; identical to SEQ ID NO: 456215
  chrX:39957750-39957905
  hyper
  cervical vs. head_and_neck,upper_gi

SEQ ID NO: 458407 - DNA, 514 bp, Homo sapiens; identical to SEQ ID NO: 362143
  chrX:39958064-39958578
  hyper
  cervical vs. head_and_neck,upper_gi

SEQ ID NO: 458408 - DNA, 634 bp, Homo sapiens
  chrX:39963967-39964601
  hyper
  cervical vs. head_and_neck,upper_gi,prostate
cgcggacggattgtccctggggagctgaaaccgcccagcggggaaacccctcctctcgcccttccccgaaaagcttggccgcggtctaagctccgagcaagcgggtatccgctgacagccgggcctcacgtaaggcccacacgcgtcccattagtcagcccgagttcccctcgggcgagccgcctggcgcggccccaaggccgggctcaggcggggagagggtgcggggccgcagcgagctgcgggcggaggtgcgggctccgcggagcccggccaggctcggttccgcgttcctgggcccgcgggtaagctgagtcggcggggcaggccgctccctggctggcgccggggcgccaagctgcgcttcacgtgcccgccatatcagcagcagcggcggcggcggcgaggagggggtgctgggaggcgcgcggccgttcccgcggggtctccggaccccgcctccccgcccctccccgtgggggctgggccgagaccaccctgcggcccccatcccagcgcaagccgaaagcggcgctgccagacgcagagaggctcctggggcgccgttccgagagccgcgcggcggcagcagccaggggagggtgctcctcgcggccgccccgccgccgccgcc

SEQ ID NO: 458409 - DNA, 285 bp, Homo sapiens; identical to SEQ ID NO: 347745
  chrX:39964630-39964915
  hyper
  cervical vs. head_and_neck,upper_gi,prostate

SEQ ID NO: 458410 - DNA, 907 bp, Homo sapiens
  chrX:39965255-39966162
  hyper
  cervical vs. head_and_neck,upper_gi,lung,prostate
cgggagtaggtcatggcggcaccggtactccacccgcccccctccacgtagggacgtagggtcggctgcggggctcggactttgccactccacctagggaagggccaatggacgctccccgtctcctccgtgtccggaggagatccggcggcggagctgacctgcaaggcttgccctgcctcacccaccccccacctccgtcccaccctccccgactctcctggcccagggcccggcccgggaaggcgttgttttgccagcgggagccgagcgagtgcacagagaaaagcctccctactctaatgagagtgcacacagcgctgcagcgaggaggatgattacccggcgggcggggggcgcgggctcgggccgcgggcggcgtgtgcggcggccccgcgggcccggagtccccgcctgtctggctgctaatcgcacgctttctgctgttacggaggcaggcgggagccggcggccgagcccagcgccgacgactcggcgggtgacacggaaacatggcgcagcgcccctcccccgcccgcgctcccgcctcccgccctccccgcgctcccgcctcccgcctcgcacttcctcccgcccgcgcggcttttgcagttttaatgctctgctttcggcctggcaccattacgctagcagccgcttctccgcggccccgcgcgtctctttcccctttgttttcggggtctatagaaaacgtttgcttttgtcccgagctctcgttaaaccaaacttgtggtggcaacggaaggcggtgcaggcggggaggggtccggggattttggcagtagccggccagagcgtggtggaaacttctctcgctgggttctccgctccctcccactccccctccccaacacagagccgccggcctcccgacgcttctcccttc

SEQ ID NO: 458411 - DNA, 906 bp, Homo sapiens
  chrX:39965666-39966572
  hyper
  cervical vs. head_and_neck,upper_gi,lung,renal,prostate
cgcctgtctggctgctaatcgcacgctttctgctgttacggaggcaggcgggagccggcggccgagcccagcgccgacgactcggcgggtgacacggaaacatggcgcagcgcccctcccccgcccgcgctcccgcctcccgccctccccgcgctcccgcctcccgcctcgcacttcctcccgcccgcgcggcttttgcagttttaatgctctgctttcggcctggcaccattacgctagcagccgcttctccgcggccccgcgcgtctctttcccctttgttttcggggtctatagaaaacgtttgcttttgtcccgagctctcgttaaaccaaacttgtggtggcaacggaaggcggtgcaggcggggaggggtccggggattttggcagtagccggccagagcgtggtggaaacttctctcgctgggttctccgctccctcccactccccctccccaacacagagccgccggcctcccgacgcttctcccttcgcccccgagaggccccagtgctccaggaaggtctgggccacagagactgtgaccaggggtgaagaactcagagtgcgtgtctgtgagccccgaggttttggcactcgatgaccttgctccctgcagccccgacttacctctttccctttggtcattcggggctttgtatcagtcggtgaagaaggggagggaagagaaagtgtttctttcgtgcgtgtggtttttattttaaggatttgttggaatctgtcacccccaactgcacagccccctcccgtataggatctagggcgaaagcggggaaacgtcggatttagggggaaagggtcgggtcagaaacctagccctggaggctggatcgtactctcctggcgggctcagccacacttggtcggcacgcggggcggggc

SEQ ID NO: 458412 - DNA, 622 bp, Homo sapiens
  chrX:39968299-39968921
  hyper
  cervical vs. head_and_neck,upper_gi,lung,prostate, bladder_and_urothelial
cgcacgattcgctcggcggagcgctgcgctgctgggctgggagggcggcggggaggaggagagacgagggggcgggaggcgaacccgggctgcgcgccaagaggcccggagccgcagattagtcaccgctcggctctgcgctcccgggtgcgcccgggaaccgggagggcaggcgtcggccccgctcagccgggctccccggtcctcggcgcgggtgcccccacccccacccccgcgcgctcctggcgcggctggctcgactctcggggacccgcgcagccgagatccacttgtcaggtcaagggcaggacagaaactctgcaagcggagtcttgcttgcgaacaggaaatttctccttgatgaggtgctgcccctcccccacgccgggcttcaaaacaaaactccagagcgggcggccaggtacccagcctcgctcgccatggccggcgacctccgctcctcggccccggccccgggcggcggagccaagccaacagagccggcggacggactcggcgccggccccgcggagggcgccaggctgccaccctccggggcccggacggggtcggcgggggtgcggagccccggagcccccgcgcctccccaggttctacagcc

SEQ ID NO: 458413 - DNA, 247 bp, Homo sapiens; identical to SEQ ID NO: 345671
  chrX:39968950-39969197
  hyper
  cervical vs. head_and_neck,upper_gi,lung,prostate, bladder_and_urothelial

SEQ ID NO: 458414 - DNA, 96 bp, Homo sapiens
  chrX:40005424-40005520
  hyper
  cervical vs. head_and_neck
cgctctccgcacggtagcctgatccatctcgtgggcgcggaggcggggcgcggggctccgctcccgcggaggcgcggagccggggctggggagccc

SEQ ID NO: 458415 - DNA, 230 bp, Homo sapiens; identical to SEQ ID NO: 362150
  chrX:40005842-40006072
  hyper
  cervical vs. head_and_neck

SEQ ID NO: 458416 - DNA, 939 bp, Homo sapiens
  chrX:40012993-40013932
  hyper
  cervical vs. upper_gi,head_and_neck
cggcggcatcagagtgcagccgcgggggttagggggtggcaaaggcccccgcgcggccggaggctcggggccgcagcagccagtgcctctgctctgcgttggggactcggagccgcagcgagaggcagtggagaggcagggctggcctcgtggcgggaggcgaggagggggtgcgagggctgccgcgccgtggggggcagggggcggggacgcagccccggcttcctgggccgcagctgcgaccgagggcgcaagagcagatcgtgctctgcggcggtggcggctcgggcccgccgctctagcagctgagaatcaacaaagggaggcggcgggggaggggcgccaccgagcgttcgctggctgctctggaataataaaaaataattaataatgataataagagaaaaatcccccggctttcatggctctgggtttccgtgtggctgcagcgggaagcgcgctgtccttgaggcggcctctctcgcctggcctgcccgcccctccccctcctcgccccctcccctccccaggaaccgggaagagaaaggtctgcagctgacaaatattatccattctccccatcgatcgcggagtgtacagatgtgagcgcttgatgtgcccgcggagcggcggatcctccctgctcgctcgctctcgcccaggctccgctcgccgtccccctcctccccctttgttctcctcccctttccctctctttaaatagatttcagggcgctgcctgttggagagcagctggcgatctctcccgagagagggagcgagcgaagcccgaggtgccctgtcaccagcctcccctcccccacctcggcttttctctacgtcccccccaccccacctttctccagtttccaaaatagaaaacaccgggaacacccacgtccactgcaccgcgagcccctgggagcctttggacccctc

SEQ ID NO: 458417 - DNA, 990 bp, Homo sapiens; identical to SEQ ID NO: 347749
  chrX:40013475-40014465
  hyper
  cervical vs. head_and_neck,upper_gi,prostate,lung

SEQ ID NO: 458418 - DNA, 544 bp, Homo sapiens
  chrX:40013994-40014538
  hyper
  cervical vs. head_and_neck,upper_gi
cgcggcagaagagccaagggtccggatctttccctggcagcagcagggacgcagcgtgggtcacgctaacagggtacagtttacccattagggaaagtcggcggagacggccctgttattcctcttttgcagatggcagattaatccggcagcacccggcctcaaagggaccggctgctcggcaaagggttaacccgtcggccggtaatcgtggacacgcgcgcacacacacacacgcacgcgcgcgcgcgtcctctccgcctgcccgagcgcccgccgcggcccgcagtgcgcccggggctgggggagtagctgcgggaggggagggggtcgggggaggggcggggcgggcttaaccaggccgctcgactgagccggggccacctcgccgtctgtcacttaaatgattgtcctccgctccgctcagtgcggtcagtacgggctgttaacaggcagttgcaatcagtttccgaaaggtcagccaaggtcctccggctctcgcagacggaaggcattacgaaaccgcttttgtatctgcaggcac

SEQ ID NO: 458419 - DNA, 298 bp, Homo sapiens
  chrX:40014669-40014967
  hyper
  cervical vs. head_and_neck,upper_gi
cggagtgacccagggcctccgggtttcggtggggaagcaggaagggggtggggagcaggcggcaagggaaggaggagtgggaggaagtgggagaggcgtcctggctcctctcctcacccagccaacagcccacacccggacccagacgggagcgggcggccttggacgcgaggagaccccactcggactctcaggccctcctggcgcctggaagtagggagggggtgtgggggggggaaagaccctcgccgagcgagcgagtcccagcgcggtgtctgaagacgctgctgccgccgcc

SEQ ID NO: 458420 - DNA, 145 bp, Homo sapiens
  chrX:40017447-40017592
  hyper
  cervical vs. upper_gi
cgaagtggcaggactggccctcggggtccccgtgggtaaaggaggagcggcttcgcgccctgggacagcgcgcgccccggctgacacggggctgtcgccgcttctcccccggacgcgggcggctgcgcaccggccgccatcttgg

SEQ ID NO: 458421 - DNA, 32 bp, Homo sapiens; identical to SEQ ID NO: 352674
  chrX:40017968-40018000
  hyper
  cervical vs. upper_gi

SEQ ID NO: 458422 - DNA, 187 bp, Homo sapiens; identical to SEQ ID NO: 456217
  chrX:40034239-40034426
  hyper
  cervical vs. head_and_neck,upper_gi

SEQ ID NO: 458423 - DNA, 90 bp, Homo sapiens; identical to SEQ ID NO: 456218
  chrX:40035057-40035147
  hyper
  cervical vs. head_and_neck,upper_gi

SEQ ID NO: 458424 - DNA, 599 bp, Homo sapiens; identical to SEQ ID NO: 456219
  chrX:40035057-40035656
  hyper
  cervical vs. head_and_neck,upper_gi

SEQ ID NO: 458425 - DNA, 564 bp, Homo sapiens; identical to SEQ ID NO: 456220
  chrX:40035161-40035725
  hyper
  cervical vs. upper_gi,head_and_neck

SEQ ID NO: 458426 - DNA, 282 bp, Homo sapiens; identical to SEQ ID NO: 456221
  chrX:40035852-40036134
  hyper
  cervical vs. upper_gi,head_and_neck

SEQ ID NO: 458427 - DNA, 60 bp, Homo sapiens; identical to SEQ ID NO: 456222
  chrX:40035665-40035725
  hyper
  cervical vs. upper_gi,head_and_neck

SEQ ID NO: 458428 - DNA, 721 bp, Homo sapiens; identical to SEQ ID NO: 347751
  chrX:40035852-40036573
  hyper
  cervical vs. upper_gi,head_and_neck

SEQ ID NO: 458429 - DNA, 203 bp, Homo sapiens; identical to SEQ ID NO: 336721
  chrX:40595088-40595291
  hyper
  cervical vs. head_and_neck

SEQ ID NO: 458430 - DNA, 264 bp, Homo sapiens; identical to SEQ ID NO: 336722
  chrX:41112874-41113138
  hyper
  cervical vs. head_and_neck,upper_gi,lung, bladder_and_urothelial,prostate,colorectal,renal

SEQ ID NO: 458431 - DNA, 76 bp, Homo sapiens; identical to SEQ ID NO: 456224
  chrX:68758240-68758316
  hyper
  cervical vs. prostate

SEQ ID NO: 458432 - DNA, 654 bp, Homo sapiens
  chrX:71526230-71526884
  hyper
  cervical vs. head_and_neck
cggcccgcctggcggccgcccactccccatacccgctccacgggagtcctcggccccgccgcccagcccggcgcccagcccggcggcccggcttacctctgagaagccgcctgccctggagagagggaagcgcggagctcggtgagccgcaagagaggcggcggagcccccagcccctggcacgcacgccgccgccaccgctaccgcgaaccggtcgcgctcagcgcccgcggccgcgccgttggccacccgaccccggggcgcctgggaaaagcccgcaccgcgccgcgccgccgctgcaccgcacagtgccgcgccaagcagcccctgaccgagctggtgcccgcccgcccgcccgcagcttcggcgccggactccggggcggtggcggtggcggccaccgcgctcccttcccggcgctggggacccggctctcaagcccccattgccgcccggagagccctgacgcacacgcacacggcagcagactggcctcggctaggaatcccaggaaggacagaccctttttttccctttttttttctcccctcaatttccacgtctttataaccggcttagggcattattagcacatgtcctggctcgtgggcgagttggtggcaaaatctgaactggatactcacggagggcccg

SEQ ID NO: 458433 - DNA, 249 bp, Homo sapiens; identical to SEQ ID NO: 362169
  chrX:71526917-71527166
  hyper
  cervical vs. head_and_neck

SEQ ID NO: 458434 - DNA, 245 bp, Homo sapiens
  chrX:95940048-95940293
  hyper
  cervical vs. upper_gi,head_and_neck
cggagaaagatggagcagcccggggcggcggcgtcgggagcgggaggcggcagcgaggaacccggtgggggccggagcaacaagcggagcgcggggaaccgggccgccaatgaagaggaaacgaaaaacaaacccaaattggtgagtgctcccgcagcccccgccggccttagggacagggagagccccgggatcctcctgccattgaacacgggggcacccggggccccctcccaaggatgacc

SEQ ID NO: 458435 - DNA, 393 bp, Homo sapiens; identical to SEQ ID NO: 336727
  chrX:102862914-102863307
  hyper
  cervical vs. head_and_neck,upper_gi,lung

SEQ ID NO: 458436 - DNA, 84 bp, Homo sapiens
  chrX:110924337-110924421
  hyper
  cervical vs. head_and_neck
cggccattacggatttccgcctccctcacagaaggcagtcactgcaacgtgcgtggcctcagttgcgtcatatccggcccttgc

SEQ ID NO: 458437 - DNA, 157 bp, Homo sapiens; identical to SEQ ID NO: 352689
  chrX:110924466-110924623
  hyper
  cervical vs. head_and_neck

SEQ ID NO: 458438 - DNA, 85 bp, Homo sapiens
  chrX:123094093-123094178
  hyper
  cervical vs. upper_gi
cgcggctcgatcgggtccgcggcggaagcgcggccaaacgaatgagtaagtcaggcgcgggcacggcaccttgtttaccccactc

SEQ ID NO: 458439 - DNA, 87 bp, Homo sapiens; identical to SEQ ID NO: 362175
  chrX:123094335-123094422
  hyper
  cervical vs. upper_gi

SEQ ID NO: 458440 - DNA, 116 bp, Homo sapiens; identical to SEQ ID NO: 336732
  chrX:129171389-129171505
  hyper
  cervical vs. head_and_neck

SEQ ID NO: 458441 - DNA, 158 bp, Homo sapiens; identical to SEQ ID NO: 375448
  chrX:133507338-133507496
  hyper
  cervical vs. upper_gi

SEQ ID NO: 458442 - DNA, 280 bp, Homo sapiens
  JH636052.4:1361829-1362109
  hyper
  cervical vs. uterine,renal
agttacgcagctgagcttcccacgttagagaaaatgacagaacagcacacttgaaatgaaatagttgagtcgggtttaaaagccatttcagtaaccacaatatctgccctgccacataaataagattgcacctatctccgccccgccacagctccatacgcctcaccctttaaacgcacagtcacttgccccagcaccactccagccaatccccaaccaccccgagccctcctagccctaacacacagctgggactctcatgtccagccagtggtcctgg

SEQ ID NO: 458443 - DNA, 61 bp, Homo sapiens
  JH636052.4:1362132-1362193
  hyper
  cervical vs. uterine,renal
tccttcgtggcgaagcagcagcccctgcgctgcctcatctacatagaaacgccctatcggt

SEQ ID NO: 458444 - DNA, 410 bp, Homo sapiens; identical to SEQ ID NO: 453535
  chr1:898245-898655
  hypo
  cervical vs. breast

SEQ ID NO: 458445 - DNA, 39 bp, Homo sapiens; identical to SEQ ID NO: 453536
  chr1:898690-898729
  hypo
  cervical vs. breast

SEQ ID NO: 458446 - DNA, 88 bp, Homo sapiens; identical to SEQ ID NO: 352707
  chr1:898776-898864
  hypo
  cervical vs. breast

SEQ ID NO: 458447 - DNA, 41 bp, Homo sapiens
  chr1:913463-913504
  hypo
  cervical vs. lymphoid_neoplasm
cgcttcccccgcaaccccgggaaccacctgccccgcacacg

SEQ ID NO: 458448 - DNA, 76 bp, Homo sapiens; identical to SEQ ID NO: 453538
  chr1:1168275-1168351
  hypo
  cervical vs. renal,melanoma,lung,bladder_and_urothelial, pancreas_gallbladder,lymphoid_neoplasm,breast,colorectal, non_cancer,thyroid

SEQ ID NO: 458449 - DNA, 114 bp, Homo sapiens; identical to SEQ ID NO: 453539
  chr1:1168984-1169098
  hypo
  cervical vs. renal,melanoma,lung,bladder_and_urothelial, pancreas_gallbladder,lymphoid_neoplasm,breast,colorectal, non_cancer,thyroid

SEQ ID NO: 458450 - DNA, 462 bp, Homo sapiens; identical to SEQ ID NO: 345682
  chr1:1168984-1169446
  hypo
  cervical vs. renal,melanoma,lung,bladder_and_urothelial, pancreas_gallbladder,lymphoid_neoplasm,colorectal,breast, non_cancer

SEQ ID NO: 458451 - DNA, 575 bp, Homo sapiens; identical to SEQ ID NO: 345683
  chr1:1562211-1562786
  hypo
  cervical vs. liver_bileduct,pancreas_gallbladder,breast, lymphoid_neoplasm,renal,uterine,prostate,colorectal

SEQ ID NO: 458452 - DNA, 330 bp, Homo sapiens; identical to SEQ ID NO: 375588
  chr1:3344504-3344834
  hypo
  cervical vs. head_and_neck

SEQ ID NO: 458453 - DNA, 4 bp, Homo sapiens
  chr1:3606857-3606861
  hypo
cgga

SEQ ID NO: 458454 - DNA, 200 bp, Homo sapiens; identical to SEQ ID NO: 457244
  chr1:7764988-7765188
  hypo
  cervical vs. head_and_neck,anorectal,lung, pancreas_gallbladder

SEQ ID NO: 458455 - DNA, 426 bp, Homo sapiens; identical to SEQ ID NO: 457245
  chr1:9711649-9712075
  hypo
  cervical vs. head_and_neck,lymphoid_neoplasm

SEQ ID NO: 458456 - DNA, 39 bp, Homo sapiens; identical to SEQ ID NO: 375667
  chr1:11139801-11139840
  hypo
  cervical vs. upper_gi

SEQ ID NO: 458457 - DNA, 112 bp, Homo sapiens; identical to SEQ ID NO: 336923
  chr1:11982519-11982631
  hypo
  cervical vs. head_and_neck

SEQ ID NO: 458458 - DNA, 64 bp, Homo sapiens; identical to SEQ ID NO: 346318
  chr1:12123950-12124014
  hypo
  cervical vs. lymphoid_neoplasm

SEQ ID NO: 458459 - DNA, 77 bp, Homo sapiens; identical to SEQ ID NO: 454554
  chr1:14125492-14125569
  hypo
  cervical vs. lymphoid_neoplasm

SEQ ID NO: 458460 - DNA, 54 bp, Homo sapiens; identical to SEQ ID NO: 352807
  chr1:14125622-14125676
  hypo
  cervical vs. lymphoid_neoplasm

SEQ ID NO: 458461 - DNA, 125 bp, Homo sapiens; identical to SEQ ID NO: 336945
  chr1:16270113-16270238
  hypo
  cervical vs. head_and_neck

SEQ ID NO: 458462 - DNA, 205 bp, Homo sapiens; identical to SEQ ID NO: 457247
  chr1:18434105-18434310
  hypo
  cervical vs. melanoma

SEQ ID NO: 458463 - DNA, 37 bp, Homo sapiens; identical to SEQ ID NO: 349182
  chr1:18434816-18434853
  hypo
  cervical vs. melanoma

SEQ ID NO: 458464 - DNA, 5 bp, Homo sapiens
  chr1:21573347-21573352
  hypo
  cervical vs. liver_bileduct
cgcca

SEQ ID NO: 458465 - DNA, 235 bp, Homo sapiens; identical to SEQ ID NO: 456274
  chr1:21573434-21573669
  hypo
  cervical vs. liver_bileduct

SEQ ID NO: 458466 - DNA, 242 bp, Homo sapiens; identical to SEQ ID NO: 336974
  chr1:22191349-22191591
  hypo
  cervical vs. head_and_neck

SEQ ID NO: 458467 - DNA, 158 bp, Homo sapiens; identical to SEQ ID NO: 362397
  chr1:23693515-23693673
  hypo
  cervical vs. lymphoid_neoplasm

SEQ ID NO: 458468 - DNA, 256 bp, Homo sapiens; identical to SEQ ID NO: 336993
  chr1:27220862-27221118
  hypo
  cervical vs. ovary,upper_gi,colorectal

SEQ ID NO: 458469 - DNA, 117 bp, Homo sapiens
  chr1:29463499-29463616
  hypo
  cervical vs. liver_bileduct
cgatcctcctgtctcagtctcctgtgttgttctgactacaggaatgcaccactgtaccccactttggaaccctttttattgtgaatataatacacctccaggaaattacataaaact

SEQ ID NO: 458470 - DNA, 317 bp, Homo sapiens; identical to SEQ ID NO: 352840
  chr1:32826720-32827037
  hypo
  cervical vs. lymphoid_neoplasm,liver_bileduct,colorectal

SEQ ID NO: 458471 - DNA, 225 bp, Homo sapiens; identical to SEQ ID NO: 457259
  chr1:34629913-34630138
  hypo
  cervical vs. melanoma

SEQ ID NO: 458472 - DNA, 27 bp, Homo sapiens
  chr1:35394588-35394615
  hypo
  cervical vs. ovary
cggcacacacaatcgcccacagaccca

SEQ ID NO: 458473 - DNA, 253 bp, Homo sapiens; identical to SEQ ID NO: 457261
  chr1:35394790-35395043
  hypo
  cervical vs. ovary

SEQ ID NO: 458474 - DNA, 148 bp, Homo sapiens; identical to SEQ ID NO: 337042
  chr1:44132677-44132825
  hypo
  cervical vs. upper_gi,pancreas_gallbladder,breast,ovary, liver_bileduct,lymphoid_neoplasm

SEQ ID NO: 458475 - DNA, 60 bp, Homo sapiens; identical to SEQ ID NO: 453555
  chr1:44351032-44351092
  hypo
  cervical vs. liver_bileduct

SEQ ID NO: 458476 - DNA, 106 bp, Homo sapiens
  chr1:44726788-44726894
  hypo
  cervical vs. liver_bileduct
cgacaggcctcgacttgaaaagggtgctaaaagcaatgatgtctccaagtgtgatgggagatatttgtgtctgctttacccttggctttttgctccggttcaggta

SEQ ID NO: 458477 - DNA, 14 bp, Homo sapiens
  chr1:44727316-44727330
  hypo
  cervical vs. liver_bileduct
atgcgctccgctcc

SEQ ID NO: 458478 - DNA, 24 bp, Homo sapiens
  chr1:45156613-45156637
  hypo
  cervical vs. lymphoid_neoplasm
cgcgcccagtgaagcttcttgaaa

SEQ ID NO: 458479 - DNA, 49 bp, Homo sapiens; identical to SEQ ID NO: 456281
  chr1:46744609-46744658
  hypo
  cervical vs. upper_gi

SEQ ID NO: 458480 - DNA, 12 bp, Homo sapiens
  chr1:47749597-47749609
  hypo
tctccctctgtc

SEQ ID NO: 458481 - DNA, 605 bp, Homo sapiens; identical to SEQ ID NO: 349244
  chr1:54204704-54205309
  hypo
  cervical vs. anorectal

SEQ ID NO: 458482 - DNA, 211 bp, Homo sapiens; identical to SEQ ID NO: 337094
  chr1:61601555-61601766
  hypo
  cervical vs. liver_bileduct

SEQ ID NO: 458483 - DNA, 154 bp, Homo sapiens; identical to SEQ ID NO: 356828
  chr1:91183993-91184147
  hypo
  cervical vs. melanoma

SEQ ID NO: 458484 - DNA, 289 bp, Homo sapiens; identical to SEQ ID NO: 452731
  chr1:101702081-101702370
  hypo
  cervical vs. sarcoma,uterine

SEQ ID NO: 458485 - DNA, 152 bp, Homo sapiens; identical to SEQ ID NO: 452732
  chr1:101702796-101702948
  hypo
  cervical vs. sarcoma,uterine

SEQ ID NO: 458486 - DNA, 393 bp, Homo sapiens; identical to SEQ ID NO: 452733
  chr1:101702796-101703189
  hypo
  cervical vs. sarcoma,uterine

SEQ ID NO: 458487 - DNA, 79 bp, Homo sapiens
  chr1:112084812-112084891
  hypo
  cervical vs. lymphoid_neoplasm
cgtttagaccagcttaatgaaacagacatccttcgcgtactgacggaaacactggcggcacatattgaggccgtatttc

SEQ ID NO: 458488 - DNA, 142 bp, Homo sapiens; identical to SEQ ID NO: 337142
  chr1:113059805-113059947
  hypo
  cervical vs. pancreas_gallbladder

SEQ ID NO: 458489 - DNA, 253 bp, Homo sapiens; identical to SEQ ID NO: 347831
  chr1:153540242-153540495
  hypo
  cervical vs. breast

SEQ ID NO: 458490 - DNA, 448 bp, Homo sapiens; identical to SEQ ID NO: 457286
  chr1:154297543-154297991
  hypo
  cervical vs. lymphoid_neoplasm,melanoma,lung

SEQ ID NO: 458491 - DNA, 73 bp, Homo sapiens; identical to SEQ ID NO: 457287
  chr1:154298038-154298111
  hypo
  cervical vs. lymphoid_neoplasm,melanoma,lung

SEQ ID NO: 458492 - DNA, 7 bp, Homo sapiens
  chr1:154954406-154954413
  hypo
  cervical vs. liver_bileduct
cgtgagt

SEQ ID NO: 458493 - DNA, 140 bp, Homo sapiens; identical to SEQ ID NO: 352914
  chr1:154954433-154954573
  hypo
  cervical vs. liver_bileduct

SEQ ID NO: 458494 - DNA, 40 bp, Homo sapiens; identical to SEQ ID NO: 375919
  chr1:155954396-155954436
  hypo

SEQ ID NO: 458495 - DNA, 21 bp, Homo sapiens
  chr1:156233262-156233283
  hypo
  cervical vs. upper_gi
cggccatcaggacctgaagct

SEQ ID NO: 458496 - DNA, 158 bp, Homo sapiens; identical to SEQ ID NO: 337206
  chr1:161367435-161367593
  hypo
  cervical vs. melanoma

SEQ ID NO: 458497 - DNA, 349 bp, Homo sapiens; identical to SEQ ID NO: 457292
  chr1:166135586-166135935
  hypo
  cervical vs. thyroid

SEQ ID NO: 458498 - DNA, 629 bp, Homo sapiens; identical to SEQ ID NO: 356926
  chr1:166135586-166136215
  hypo
  cervical vs. sarcoma

SEQ ID NO: 458499 - DNA, 32 bp, Homo sapiens; identical to SEQ ID NO: 453566
  chr1:167393552-167393584
  hypo
  cervical vs. upper_gi,ovary,melanoma

SEQ ID NO: 458500 - DNA, 187 bp, Homo sapiens; identical to SEQ ID NO: 352930
  chr1:167393613-167393800
  hypo
  cervical vs. upper_gi,ovary,melanoma

SEQ ID NO: 458501 - DNA, 3 bp, Homo sapiens
  chr1:168150738-168150741
  hypo
  cervical vs. liver_bileduct,pancreas_gallbladder,renal, colorectal,lymphoid_neoplasm,upper_gi,prostate,anorectal,ovary
cgc

SEQ ID NO: 458502 - DNA, 160 bp, Homo sapiens; identical to SEQ ID NO: 352932
  chr1:168150817-168150977
  hypo
  cervical vs. liver_bileduct,pancreas_gallbladder,renal, colorectal,lymphoid_neoplasm,upper_gi,prostate,anorectal,ovary

SEQ ID NO: 458503 - DNA, 70 bp, Homo sapiens; identical to SEQ ID NO: 453568
  chr1:171554936-171555006
  hypo
  cervical vs. liver_bileduct,sarcoma,colorectal,breast, renal,upper_gi,pancreas_gallbladder,prostate,lymphoid_neoplasm, melanoma

SEQ ID NO: 458504 - DNA, 122 bp, Homo sapiens; identical to SEQ ID NO: 347839
  chr1:171555061-171555183
  hypo
  cervical vs. liver_bileduct,sarcoma,colorectal,breast, renal,upper_gi,pancreas_gallbladder,prostate,lymphoid_neoplasm, melanoma

SEQ ID NO: 458505 - DNA, 13 bp, Homo sapiens
  chr1:180925259-180925272
  hypo
  cervical vs. liver_bileduct
cgctctctggctg

SEQ ID NO: 458506 - DNA, 3 bp, Homo sapiens
  chr1:180925402-180925405
  hypo
  cervical vs. liver_bileduct
gct

SEQ ID NO: 458507 - DNA, 14 bp, Homo sapiens
  chr1:203298449-203298463
  hypo
  cervical vs. breast
aaaggtgtggcgcc

SEQ ID NO: 458508 - DNA, 63 bp, Homo sapiens; identical to SEQ ID NO: 337325
  chr1:224300452-224300515
  hypo
  cervical vs. pancreas_gallbladder

SEQ ID NO: 458509 - DNA, 64 bp, Homo sapiens; identical to SEQ ID NO: 337327
  chr1:224368640-224368704
  hypo
  cervical vs. upper_gi,liver_bileduct

SEQ ID NO: 458510 - DNA, 264 bp, Homo sapiens; identical to SEQ ID NO: 337348
  chr1:228112950-228113214
  hypo

SEQ ID NO: 458511 - DNA, 109 bp, Homo sapiens; identical to SEQ ID NO: 337365
  chr1:229606426-229606535
  hypo
  cervical vs. head_and_neck

SEQ ID NO: 458512 - DNA, 51 bp, Homo sapiens; identical to SEQ ID NO: 452753
  chr1:241520533-241520584
  hypo
  cervical vs. uterine,ovary,colorectal,thyroid

SEQ ID NO: 458513 - DNA, 148 bp, Homo sapiens; identical to SEQ ID NO: 452754
  chr1:241520612-241520760
  hypo
  cervical vs. uterine,ovary,colorectal,thyroid

SEQ ID NO: 458514 - DNA, 91 bp, Homo sapiens; identical to SEQ ID NO: 349442
  chr1:241520789-241520880
  hypo
  cervical vs. uterine,ovary,colorectal,thyroid

SEQ ID NO: 458515 - DNA, 102 bp, Homo sapiens; identical to SEQ ID NO: 453581
  chr10:524407-524509
  hypo
  cervical vs. upper_gi,colorectal,lymphoid_neoplasm, pancreas_gallbladder,melanoma,breast,renal,prostate

SEQ ID NO: 458516 - DNA, 84 bp, Homo sapiens; identical to SEQ ID NO: 453582
  chr10:524671-524755
  hypo
  cervical vs. upper_gi,colorectal,lymphoid_neoplasm, pancreas_gallbladder,melanoma,breast,renal,prostate

SEQ ID NO: 458517 - DNA, 9 bp, Homo sapiens
  chr10:524784-524793
  hypo
  cervical vs. upper_gi,colorectal,lymphoid_neoplasm, pancreas_gallbladder,melanoma,breast,renal,prostate
gatagcaac

SEQ ID NO: 458518 - DNA, 142 bp, Homo sapiens; identical to SEQ ID NO: 453584
  chr10:851108-851250
  hypo
  cervical vs. liver_bileduct,melanoma,renal

SEQ ID NO: 458519 - DNA, 175 bp, Homo sapiens; identical to SEQ ID NO: 354474
  chr10:851504-851679
  hypo
  cervical vs. liver_bileduct,melanoma,renal

SEQ ID NO: 458520 - DNA, 381 bp, Homo sapiens; identical to SEQ ID NO: 453589
  chr10:5540271-5540652
  hypo
  cervical vs. colorectal,renal,melanoma, pancreas_gallbladder,uterine,prostate,liver_bileduct,upper_gi

SEQ ID NO: 458521 - DNA, 198 bp, Homo sapiens; identical to SEQ ID NO: 348416
  chr10:5541528-5541726
  hypo
  cervical vs. colorectal,sarcoma,renal,melanoma,uterine, pancreas_gallbladder,prostate,lymphoid_neoplasm

SEQ ID NO: 458522 - DNA, 76 bp, Homo sapiens; identical to SEQ ID NO: 359505
  chr10:14646259-14646335
  hypo
  cervical vs. head_and_neck,upper_gi

SEQ ID NO: 458523 - DNA, 87 bp, Homo sapiens; identical to SEQ ID NO: 359506
  chr10:14646653-14646740
  hypo
  cervical vs. head_and_neck,upper_gi

SEQ ID NO: 458524 - DNA, 209 bp, Homo sapiens; identical to SEQ ID NO: 452758
  chr10:17270445-17270654
  hypo
  cervical vs. uterine,melanoma

SEQ ID NO: 458525 - DNA, 209 bp, Homo sapiens; identical to SEQ ID NO: 452758
  chr10:17270445-17270654
  hypo
  cervical vs. melanoma,uterine

SEQ ID NO: 458526 - DNA, 63 bp, Homo sapiens; identical to SEQ ID NO: 454116
  chr10:22540645-22540708
  hypo
  cervical vs. anorectal

SEQ ID NO: 458527 - DNA, 56 bp, Homo sapiens; identical to SEQ ID NO: 340612
  chr10:27144571-27144627
  hypo
  cervical vs. liver_bileduct,lymphoid_neoplasm

SEQ ID NO: 458528 - DNA, 137 bp, Homo sapiens; identical to SEQ ID NO: 340620
  chr10:30736731-30736868
  hypo
  cervical vs. pancreas_gallbladder,colorectal

SEQ ID NO: 458529 - DNA, 791 bp, Homo sapiens; identical to SEQ ID NO: 457329
  chr10:31607954-31608745
  hypo
  cervical vs. liver_bileduct

SEQ ID NO: 458530 - DNA, 467 bp, Homo sapiens; identical to SEQ ID NO: 457330
  chr10:31608278-31608745
  hypo
  cervical vs. lymphoid_neoplasm,anorectal

SEQ ID NO: 458531 - DNA, 94 bp, Homo sapiens; identical to SEQ ID NO: 351040
  chr10:50606762-50606856
  hypo
  cervical vs. melanoma

SEQ ID NO: 458532 - DNA, 180 bp, Homo sapiens; identical to SEQ ID NO: 340643
  chr10:52180055-52180235
  hypo
  cervical vs. liver_bileduct

SEQ ID NO: 458533 - DNA, 124 bp, Homo sapiens; identical to SEQ ID NO: 340732
  chr10:105403473-105403597
  hypo
  cervical vs. upper_gi,colorectal,pancreas_gallbladder, breast

SEQ ID NO: 458534 - DNA, 99 bp, Homo sapiens; identical to SEQ ID NO: 454629
  chr10:116045880-116045979
  hypo
  cervical vs. colorectal

SEQ ID NO: 458535 - DNA, 180 bp, Homo sapiens; identical to SEQ ID NO: 354592
  chr10:116046022-116046202
  hypo
  cervical vs. colorectal

SEQ ID NO: 458536 - DNA, 22 bp, Homo sapiens
  chr10:116852626-116852648
  hypo
  cervical vs. head_and_neck
cggcggacgggaaggacttctt

SEQ ID NO: 458537 - DNA, 231 bp, Homo sapiens; identical to SEQ ID NO: 454633
  chr10:134733835-134734066
  hypo
  cervical vs. anorectal

SEQ ID NO: 458538 - DNA, 513 bp, Homo sapiens; identical to SEQ ID NO: 340902
  chr11:993208-993721
  hypo
  cervical vs. breast,colorectal

SEQ ID NO: 458539 - DNA, 227 bp, Homo sapiens; identical to SEQ ID NO: 354668
  chr11:1521171-1521398
  hypo
  cervical vs. upper_gi,liver_bileduct,colorectal,breast

SEQ ID NO: 458540 - DNA, 189 bp, Homo sapiens; identical to SEQ ID NO: 340925
  chr11:1795707-1795896
  hypo
  cervical vs. head_and_neck

SEQ ID NO: 458541 - DNA, 565 bp, Homo sapiens; identical to SEQ ID NO: 457353
  chr11:2398759-2399324
  hypo
  cervical vs. head_and_neck,anorectal

SEQ ID NO: 458542 - DNA, 112 bp, Homo sapiens; identical to SEQ ID NO: 457354
  chr11:2399399-2399511
  hypo
  cervical vs. head_and_neck,anorectal

SEQ ID NO: 458543 - DNA, 286 bp, Homo sapiens; identical to SEQ ID NO: 457355
  chr11:2399038-2399324
  hypo
  cervical vs. head_and_neck

SEQ ID NO: 458544 - DNA, 401 bp, Homo sapiens; identical to SEQ ID NO: 351145
  chr11:2399399-2399800
  hypo
  cervical vs. head_and_neck

SEQ ID NO: 458545 - DNA, 94 bp, Homo sapiens
  chr11:3164459-3164553
  hypo
  cervical vs. breast
cggggggggcagaggaggcaggtgcggagcggggcagaggaggcaggtacagcccagtgcgtggaccagcgaccggctccaggggcccatgggg

SEQ ID NO: 458546 - DNA, 4 bp, Homo sapiens
  chr11:8041149-8041153
  hypo
  cervical vs. head_and_neck
tagc

SEQ ID NO: 458547 - DNA, 129 bp, Homo sapiens; identical to SEQ ID NO: 351149
  chr11:8615887-8616016
  hypo
  cervical vs. ovary

SEQ ID NO: 458548 - DNA, 61 bp, Homo sapiens; identical to SEQ ID NO: 359822
  chr11:43965299-43965360
  hypo
  cervical vs. lung,bladder_and_urothelial,anorectal

SEQ ID NO: 458549 - DNA, 42 bp, Homo sapiens; identical to SEQ ID NO: 457371
  chr11:43965463-43965505
  hypo
  cervical vs. lung,bladder_and_urothelial

SEQ ID NO: 458550 - DNA, 16 bp, Homo sapiens
  chr11:44748871-44748887
  hypo
ccgccgccgcgccccc

SEQ ID NO: 458551 - DNA, 314 bp, Homo sapiens; identical to SEQ ID NO: 457378
  chr11:44748871-44749185
  hypo
  cervical vs. anorectal

SEQ ID NO: 458552 - DNA, 279 bp, Homo sapiens; identical to SEQ ID NO: 457380
  chr11:44748906-44749185
  hypo
  cervical vs. anorectal

SEQ ID NO: 458553 - DNA, 17 bp, Homo sapiens
  chr11:47358910-47358927
  hypo
  cervical vs. prostate,lymphoid_neoplasm
cggggggcaggaccagg

SEQ ID NO: 458554 - DNA, 106 bp, Homo sapiens; identical to SEQ ID NO: 348490
  chr11:47359237-47359343
  hypo
  cervical vs. prostate,lymphoid_neoplasm

SEQ ID NO: 458555 - DNA, 383 bp, Homo sapiens; identical to SEQ ID NO: 334300
  chr11:66176338-66176721
  hypo
  cervical vs. head_and_neck

SEQ ID NO: 458556 - DNA, 6 bp, Homo sapiens
  chr11:66637058-66637064
  hypo
  cervical vs. renal,breast,melanoma,sarcoma,prostate
cgcgac

SEQ ID NO: 458557 - DNA, 269 bp, Homo sapiens; identical to SEQ ID NO: 341136
  chr11:66677377-66677646
  hypo
  cervical vs. head_and_neck

SEQ ID NO: 458558 - DNA, 510 bp, Homo sapiens; identical to SEQ ID NO: 452797
  chr11:76381512-76382022
  hypo
  cervical vs. bladder_and_urothelial,multiple_myeloma, lymphoid_neoplasm,non_cancer,myeloid_neoplasm,thyroid

SEQ ID NO: 458559 - DNA, 30 bp, Homo sapiens; identical to SEQ ID NO: 452798
  chr11:76382264-76382294
  hypo
  cervical vs. bladder_and_urothelial,multiple_myeloma, lymphoid_neoplasm,non_cancer,myeloid_neoplasm,thyroid

SEQ ID NO: 458560 - DNA, 131 bp, Homo sapiens; identical to SEQ ID NO: 347179
  chr11:106889091-106889222
  hypo
  cervical vs. head_and_neck,anorectal

SEQ ID NO: 458561 - DNA, 48 bp, Homo sapiens; identical to SEQ ID NO: 454666
  chr11:120008024-120008072
  hypo
  cervical vs. sarcoma,lymphoid_neoplasm

SEQ ID NO: 458562 - DNA, 17 bp, Homo sapiens
  chr11:133938756-133938773
  hypo
  cervical vs. melanoma,sarcoma,myeloid_neoplasm,thyroid, non_cancer,prostate,renal
cgccaagttcattgaaa

SEQ ID NO: 458563 - DNA, 161 bp, Homo sapiens; identical to SEQ ID NO: 345407
  chr11:133939437-133939598
  hypo
  cervical vs. melanoma,sarcoma,myeloid_neoplasm,thyroid, non_cancer,prostate,renal

SEQ ID NO: 458564 - DNA, 86 bp, Homo sapiens; identical to SEQ ID NO: 452813
  chr12:4377809-4377895
  hypo
  cervical vs. lymphoid_neoplasm,colorectal

SEQ ID NO: 458565 - DNA, 142 bp, Homo sapiens; identical to SEQ ID NO: 452814
  chr12:4378558-4378700
  hypo
  cervical vs. lymphoid_neoplasm,colorectal

SEQ ID NO: 458566 - DNA, 245 bp, Homo sapiens; identical to SEQ ID NO: 452815
  chr12:4378558-4378803
  hypo
  cervical vs. lymphoid_neoplasm,colorectal,non_cancer, myeloid_neoplasm

SEQ ID NO: 458567 - DNA, 88 bp, Homo sapiens; identical to SEQ ID NO: 454142
  chr12:4378715-4378803
  hypo
  cervical vs. colorectal,melanoma

SEQ ID NO: 458568 - DNA, 285 bp, Homo sapiens; identical to SEQ ID NO: 455642
  chr12:4380196-4380481
  hypo
  cervical vs. anorectal,colorectal

SEQ ID NO: 458569 - DNA, 266 bp, Homo sapiens; identical to SEQ ID NO: 455643
  chr12:4380215-4380481
  hypo
  cervical vs. anorectal

SEQ ID NO: 458570 - DNA, 117 bp, Homo sapiens; identical to SEQ ID NO: 347220
  chr12:21681020-21681137
  hypo
  cervical vs. ovary,uterine,breast,renal,sarcoma, myeloid_neoplasm,prostate,thyroid,non_cancer,multiple_myeloma

SEQ ID NO: 458571 - DNA, 6 bp, Homo sapiens
  chr12:22488262-22488268
  hypo
  cervical vs. anorectal
gcgccc

SEQ ID NO: 458572 - DNA, 118 bp, Homo sapiens; identical to SEQ ID NO: 347221
  chr12:22488705-22488823
  hypo
  cervical vs. head_and_neck

SEQ ID NO: 458573 - DNA, 62 bp, Homo sapiens; identical to SEQ ID NO: 454679
  chr12:27742262-27742324
  hypo
  cervical vs. colorectal

SEQ ID NO: 458574 - DNA, 77 bp, Homo sapiens; identical to SEQ ID NO: 452819
  chr12:40618264-40618341
  hypo
  cervical vs. lung,sarcoma

SEQ ID NO: 458575 - DNA, 35 bp, Homo sapiens; identical to SEQ ID NO: 351336
  chr12:40619048-40619083
  hypo
  cervical vs. lung,sarcoma

SEQ ID NO: 458576 - DNA, 494 bp, Homo sapiens; identical to SEQ ID NO: 457433
  chr12:48576976-48577470
  hypo
  cervical vs. anorectal,bladder_and_urothelial, head_and_neck,lung,sarcoma

SEQ ID NO: 458577 - DNA, 409 bp, Homo sapiens; identical to SEQ ID NO: 457434
  chr12:48577061-48577470
  hypo
  cervical vs. anorectal,sarcoma

SEQ ID NO: 458578 - DNA, 3 bp, Homo sapiens
  chr12:52401537-52401540
  hypo
  cervical vs. anorectal,head_and_neck
tcc

SEQ ID NO: 458579 - DNA, 156 bp, Homo sapiens; identical to SEQ ID NO: 334530
  chr12:53272458-53272614
  hypo
  cervical vs. pancreas_gallbladder

SEQ ID NO: 458580 - DNA, 432 bp, Homo sapiens; identical to SEQ ID NO: 334559
  chr12:54400009-54400441
  hypo
  cervical vs. bladder_and_urothelial

SEQ ID NO: 458581 - DNA, 105 bp, Homo sapiens; identical to SEQ ID NO: 457456
  chr12:94541793-94541898
  hypo
  cervical vs. anorectal

SEQ ID NO: 458582 - DNA, 758 bp, Homo sapiens; identical to SEQ ID NO: 457457
  chr12:94541957-94542715
  hypo
  cervical vs. anorectal

SEQ ID NO: 458583 - DNA, 851 bp, Homo sapiens; identical to SEQ ID NO: 457458
  chr12:94542238-94543089
  hypo
  cervical vs. melanoma,sarcoma,ovary,multiple_myeloma, prostate,breast,non_cancer

SEQ ID NO: 458584 - DNA, 373 bp, Homo sapiens; identical to SEQ ID NO: 457459
  chr12:94542716-94543089
  hypo
  cervical vs. non_cancer,multiple_myeloma,melanoma, prostate

SEQ ID NO: 458585 - DNA, 31 bp, Homo sapiens; identical to SEQ ID NO: 452825
  chr12:94543992-94544023
  hypo
  cervical vs. non_cancer,thyroid,sarcoma,multiple_myeloma, melanoma,prostate,ovary,lymphoid_neoplasm,breast

SEQ ID NO: 458586 - DNA, 86 bp, Homo sapiens; identical to SEQ ID NO: 345430
  chr12:94544052-94544138
  hypo
  cervical vs. non_cancer,thyroid,sarcoma,multiple_myeloma, melanoma,prostate,ovary,lymphoid_neoplasm,breast

SEQ ID NO: 458587 - DNA, 107 bp, Homo sapiens; identical to SEQ ID NO: 360176
  chr12:96183929-96184036
  hypo
  cervical vs. head_and_neck

SEQ ID NO: 458588 - DNA, 423 bp, Homo sapiens; identical to SEQ ID NO: 341493
  chr12:110778337-110778760
  hypo

SEQ ID NO: 458589 - DNA, 145 bp, Homo sapiens; identical to SEQ ID NO: 341505
  chr12:112196497-112196642
  hypo

SEQ ID NO: 458590 - DNA, 413 bp, Homo sapiens; identical to SEQ ID NO: 366069
  chr12:118198873-118199286
  hypo
  cervical vs. pancreas_gallbladder

SEQ ID NO: 458591 - DNA, 27 bp, Homo sapiens
  chr12:121667904-121667931
  hypo
  cervical vs. sarcoma,prostate,melanoma
ttaaaaaggaagcgctccaggccgggc

SEQ ID NO: 458592 - DNA, 704 bp, Homo sapiens; identical to SEQ ID NO: 453635
  chr12:121687598-121688302
  hypo
  cervical vs. melanoma

SEQ ID NO: 458593 - DNA, 239 bp, Homo sapiens; identical to SEQ ID NO: 348574
  chr12:121688331-121688570
  hypo
  cervical vs. melanoma

SEQ ID NO: 458594 - DNA, 276 bp, Homo sapiens; identical to SEQ ID NO: 354973
  chr12:122439511-122439787
  hypo

SEQ ID NO: 458595 - DNA, 147 bp, Homo sapiens; identical to SEQ ID NO: 457467
  chr12:126018005-126018152
  hypo
  cervical vs. liver_bileduct,lung,colorectal

SEQ ID NO: 458596 - DNA, 33 bp, Homo sapiens; identical to SEQ ID NO: 360237
  chr12:126018265-126018298
  hypo
  cervical vs. liver_bileduct,lung,colorectal

SEQ ID NO: 458597 - DNA, 662 bp, Homo sapiens; identical to SEQ ID NO: 454708
  chr12:131272765-131273427
  hypo
  cervical vs. liver_bileduct

SEQ ID NO: 458598 - DNA, 154 bp, Homo sapiens
  chr12:132076273-132076427
  hypo
cgcagcccagtcaccagggccatgcggctccacggcttctacgcttgggcactgaggaccgaggggttcaatcaggtcccagctccagtccaaccttggaagccaagtgttgggaagggagcatccgaggacagacagagccagggcccctgag

SEQ ID NO: 458599 - DNA, 160 bp, Homo sapiens
  chr12:132643296-132643456
  hypo
  cervical vs. renal
cggatctcacgggggctaacgtgtcccccggaaagagatgtccccgtcctggcccccagcatcggcgagtggaccttatttggaaatagggtctttgcagattaaggagccagctgagatcatcctgcattcagggtgggccatcagtccggtggccggt

SEQ ID NO: 458600 - DNA, 321 bp, Homo sapiens
  chr12:132643525-132643846
  hypo
  cervical vs. renal
ggcctctgggagctggaaaaggcaggaatgggtcctccctgagtctctgagggccccgcctgcccacacctgcccatatttgccccaacctgcccacacctgcctcaggacagcatctcggtctcctggctgccagactgtgatgaagatgcatggttctaggccactggcttgtggtgacttgttgcatcagctgtggggagctcacacggtagcgcctgtcttggggggtgctgggcgggtgaccttcaggagacccctggggccccgctgccctcccaatgcctccagtcccagtgtctctgtggtggcatcctgtgc

SEQ ID NO: 458601 - DNA, 92 bp, Homo sapiens; identical to SEQ ID NO: 366183
  chr12:132644008-132644100
  hypo
  cervical vs. renal

SEQ ID NO: 458602 - DNA, 201 bp, Homo sapiens; identical to SEQ ID NO: 452842
  chr13:29292491-29292692
  hypo
  cervical vs. ovary,lung,colorectal,uterine, lymphoid_neoplasm,non_cancer,multiple_myeloma,thyroid,breast, renal,pancreas_gallbladder,sarcoma,upper_gi

SEQ ID NO: 458603 - DNA, 242 bp, Homo sapiens; identical to SEQ ID NO: 345442
  chr13:29293342-29293584
  hypo
  cervical vs. ovary,lung,multiple_myeloma,colorectal, lymphoid_neoplasm,uterine,renal,non_cancer,breast, pancreas_gallbladder,thyroid,sarcoma,upper_gi,myeloid_neoplasm

SEQ ID NO: 458604 - DNA, 1 bp, Homo sapiens
  chr13:108518657-108518658
  hypo
  cervical vs. liver_bileduct,melanoma, bladder_and_urothelial
c

SEQ ID NO: 458605 - DNA, 68 bp, Homo sapiens; identical to SEQ ID NO: 452856
  chr13:108520309-108520377
  hypo
  cervical vs. lung

SEQ ID NO: 458606 - DNA, 30 bp, Homo sapiens; identical to SEQ ID NO: 457504
  chr13:108520915-108520945
  hypo
  cervical vs. lung

SEQ ID NO: 458607 - DNA, 33 bp, Homo sapiens; identical to SEQ ID NO: 457505
  chr13:108520947-108520980
  hypo
  cervical vs. lung

SEQ ID NO: 458608 - DNA, 77 bp, Homo sapiens; identical to SEQ ID NO: 341796
  chr13:111911450-111911527
  hypo
  cervical vs. liver_bileduct

SEQ ID NO: 458609 - DNA, 162 bp, Homo sapiens; identical to SEQ ID NO: 341820
  chr13:113507123-113507285
  hypo
  cervical vs. upper_gi

SEQ ID NO: 458610 - DNA, 39 bp, Homo sapiens; identical to SEQ ID NO: 454743
  chr13:114188365-114188404
  hypo
  cervical vs. liver_bileduct

SEQ ID NO: 458611 - DNA, 3 bp, Homo sapiens
  chr13:114807499-114807502
  hypo
  cervical vs. melanoma,colorectal,lymphoid_neoplasm, pancreas_gallbladder,renal
cgc

SEQ ID NO: 458612 - DNA, 92 bp, Homo sapiens; identical to SEQ ID NO: 346082
  chr13:114807847-114807939
  hypo
  cervical vs. melanoma,colorectal,lymphoid_neoplasm, pancreas_gallbladder,renal

SEQ ID NO: 458613 - DNA, 39 bp, Homo sapiens; identical to SEQ ID NO: 452862
  chr14:23355352-23355391
  hypo
  cervical vs. bladder_and_urothelial

SEQ ID NO: 458614 - DNA, 53 bp, Homo sapiens; identical to SEQ ID NO: 351522
  chr14:23355484-23355537
  hypo
  cervical vs. bladder_and_urothelial

SEQ ID NO: 458615 - DNA, 20 bp, Homo sapiens
  chr14:23777239-23777259
  hypo
  cervical vs. multiple_myeloma,lymphoid_neoplasm
agggggccccaactggggcc

SEQ ID NO: 458616 - DNA, 56 bp, Homo sapiens
  chr14:32597657-32597713
  hypo
  cervical vs. colorectal,lymphoid_neoplasm
agaccctgagaaagtcccttcacctcgctgggctctggtttcctcattccaaggat

SEQ ID NO: 458617 - DNA, 224 bp, Homo sapiens; identical to SEQ ID NO: 457524
  chr14:51562012-51562236
  hypo
  cervical vs. bladder_and_urothelial

SEQ ID NO: 458618 - DNA, 80 bp, Homo sapiens; identical to SEQ ID NO: 452877
  chr14:60097114-60097194
  hypo
  cervical vs. breast,myeloid_neoplasm,melanoma,prostate, multiple_myeloma,renal,thyroid,colorectal,non_cancer,uterine, bladder_and_urothelial

SEQ ID NO: 458619 - DNA, 45 bp, Homo sapiens; identical to SEQ ID NO: 452878
  chr14:60385935-60385980
  hypo
  cervical vs. myeloid_neoplasm,thyroid

SEQ ID NO: 458620 - DNA, 7 bp, Homo sapiens
  chr14:60386737-60386744
  hypo
  cervical vs. myeloid_neoplasm,thyroid
caaaccc

SEQ ID NO: 458621 - DNA, 9 bp, Homo sapiens
  chr14:70654358-70654367
  hypo
  cervical vs. multiple_myeloma,myeloid_neoplasm,thyroid, non_cancer,sarcoma
cgcgcgcgc

SEQ ID NO: 458622 - DNA, 56 bp, Homo sapiens; identical to SEQ ID NO: 457538
  chr14:73358909-73358965
  hypo
  cervical vs. sarcoma,ovary

SEQ ID NO: 458623 - DNA, 255 bp, Homo sapiens; identical to SEQ ID NO: 457539
  chr14:73359040-73359295
  hypo
  cervical vs. sarcoma,ovary

SEQ ID NO: 458624 - DNA, 139 bp, Homo sapiens; identical to SEQ ID NO: 360482
  chr14:73359490-73359629
  hypo
  cervical vs. sarcoma,ovary

SEQ ID NO: 458625 - DNA, 464 bp, Homo sapiens; identical to SEQ ID NO: 334962
  chr14:73359779-73360243
  hypo
  cervical vs. colorectal,ovary,pancreas_gallbladder, uterine,renal,head_and_neck

SEQ ID NO: 458626 - DNA, 1 bp, Homo sapiens
  chr14:73602342-73602343
  hypo
  cervical vs. renal,melanoma,sarcoma
c

SEQ ID NO: 458627 - DNA, 198 bp, Homo sapiens; identical to SEQ ID NO: 457543
  chr14:88789765-88789963
  hypo
  cervical vs. anorectal

SEQ ID NO: 458628 - DNA, 111 bp, Homo sapiens; identical to SEQ ID NO: 341982
  chr14:89875711-89875822
  hypo
  cervical vs. liver_bileduct

SEQ ID NO: 458629 - DNA, 486 bp, Homo sapiens; identical to SEQ ID NO: 457545
  chr14:90085312-90085798
  hypo

SEQ ID NO: 458630 - DNA, 144 bp, Homo sapiens; identical to SEQ ID NO: 360512
  chr14:90527180-90527324
  hypo
  cervical vs. head_and_neck

SEQ ID NO: 458631 - DNA, 227 bp, Homo sapiens; identical to SEQ ID NO: 457547
  chr14:90527931-90528158
  hypo
  cervical vs. anorectal

SEQ ID NO: 458632 - DNA, 206 bp, Homo sapiens; identical to SEQ ID NO: 342009
  chr14:94404864-94405070
  hypo
  cervical vs. pancreas_gallbladder

SEQ ID NO: 458633 - DNA, 599 bp, Homo sapiens; identical to SEQ ID NO: 453658
  chr14:104048314-104048913
  hypo
  cervical vs. liver_bileduct,melanoma,breast,renal

SEQ ID NO: 458634 - DNA, 127 bp, Homo sapiens; identical to SEQ ID NO: 346089
  chr14:104048982-104049109
  hypo
  cervical vs. liver_bileduct,melanoma,breast,renal

SEQ ID NO: 458635 - DNA, 121 bp, Homo sapiens; identical to SEQ ID NO: 456499
  chr14:104159197-104159318
  hypo
  cervical vs. melanoma

SEQ ID NO: 458636 - DNA, 106 bp, Homo sapiens; identical to SEQ ID NO: 355199
  chr14:104159437-104159543
  hypo
  cervical vs. melanoma

SEQ ID NO: 458637 - DNA, 336 bp, Homo sapiens; identical to SEQ ID NO: 454784
  chr14:104202370-104202706
  hypo
  cervical vs. liver_bileduct

SEQ ID NO: 458638 - DNA, 507 bp, Homo sapiens; identical to SEQ ID NO: 351653
  chr15:31774606-31775113
  hypo
  cervical vs. pancreas_gallbladder

SEQ ID NO: 458639 - DNA, 113 bp, Homo sapiens; identical to SEQ ID NO: 342153
  chr15:39971441-39971554
  hypo
  cervical vs. upper_gi

SEQ ID NO: 458640 - DNA, 88 bp, Homo sapiens
  chr15:41091052-41091140
  hypo
  cervical vs. lymphoid_neoplasm
cgttaactcacgacttaatccttcattctggcagccgtggtgccccgccttgtgagtgtgtgtgtaagaatttggcgcttgctggctg

SEQ ID NO: 458641 - DNA, 2 bp, Homo sapiens
  chr15:43467925-43467927
  hypo
  cervical vs. liver_bileduct,colorectal,upper_gi, pancreas_gallbladder
cc

SEQ ID NO: 458642 - DNA, 338 bp, Homo sapiens; identical to SEQ ID NO: 457559
  chr15:45722600-45722938
  hypo
  cervical vs. pancreas_gallbladder

SEQ ID NO: 458643 - DNA, 78 bp, Homo sapiens; identical to SEQ ID NO: 452897
  chr15:48936649-48936727
  hypo
  cervical vs. head_and_neck,sarcoma

SEQ ID NO: 458644 - DNA, 5 bp, Homo sapiens
  chr15:51202468-51202473
  hypo
  cervical vs. colorectal,renal,pancreas_gallbladder, prostate,melanoma,uterine,multiple_myeloma,liver_bileduct, myeloid_neoplasm,non_cancer
cgcgc

SEQ ID NO: 458645 - DNA, 78 bp, Homo sapiens; identical to SEQ ID NO: 454799
  chr15:54191760-54191838
  hypo

SEQ ID NO: 458646 - DNA, 620 bp, Homo sapiens; identical to SEQ ID NO: 342206
  chr15:63086996-63087616
  hypo
  cervical vs. colorectal

SEQ ID NO: 458647 - DNA, 1 bp, Homo sapiens
  chr15:67545486-67545487
  hypo
  cervical vs. lymphoid_neoplasm,multiple_myeloma,sarcoma, melanoma,prostate,renal,uterine
c

SEQ ID NO: 458648 - DNA, 39 bp, Homo sapiens
  chr15:71164697-71164736
  hypo
  cervical vs. pancreas_gallbladder
cggctcggcatcagagggagaccgcggaaagtgggagac

SEQ ID NO: 458649 - DNA, 96 bp, Homo sapiens; identical to SEQ ID NO: 342245
  chr15:76558876-76558972
  hypo
  cervical vs. upper_gi,lung,pancreas_gallbladder, liver_bileduct

SEQ ID NO: 458650 - DNA, 60 bp, Homo sapiens; identical to SEQ ID NO: 454806
  chr15:79208280-79208340
  hypo
  cervical vs. lymphoid_neoplasm,upper_gi,colorectal,lung, pancreas_gallbladder,breast

SEQ ID NO: 458651 - DNA, 107 bp, Homo sapiens; identical to SEQ ID NO: 342273
  chr15:90378787-90378894
  hypo
  cervical vs. upper_gi,liver_bileduct

SEQ ID NO: 458652 - DNA, 497 bp, Homo sapiens; identical to SEQ ID NO: 335245
  chr15:101458286-101458783
  hypo
  cervical vs. head_and_neck,pancreas_gallbladder,lung, anorectal,bladder_and_urothelial,colorectal

SEQ ID NO: 458653 - DNA, 664 bp, Homo sapiens; identical to SEQ ID NO: 457578
  chr15:101459313-101459977
  hypo
  cervical vs. anorectal,colorectal,head_and_neck

SEQ ID NO: 458654 - DNA, 196 bp, Homo sapiens
  chr16:410000-410196
  hypo
  cervical vs. pancreas_gallbladder,colorectal,prostate, renal
cgcctctccgggcgctgccgcccccccgttggtgctcatctgtccttctgcccactatccccagcggccccgatacctgcacaccccagtgcccagcggttccccctcgagctggcaaggggacattaaatgggaggtgaggaagtgcggcccccagcgggcagctgcctttgccccggcccacctgcgcccccgc

SEQ ID NO: 458655 - DNA, 140 bp, Homo sapiens; identical to SEQ ID NO: 355321
  chr16:410714-410854
  hypo
  cervical vs. pancreas_gallbladder,colorectal,prostate, renal

SEQ ID NO: 458656 - DNA, 282 bp, Homo sapiens; identical to SEQ ID NO: 454818
  chr16:410714-410996
  hypo
  cervical vs. prostate

SEQ ID NO: 458657 - DNA, 101 bp, Homo sapiens; identical to SEQ ID NO: 454819
  chr16:410895-410996
  hypo
  cervical vs. renal,lymphoid_neoplasm,prostate,thyroid, non_cancer,melanoma,breast,sarcoma

SEQ ID NO: 458658 - DNA, 111 bp, Homo sapiens; identical to SEQ ID NO: 346109
  chr16:411606-411717
  hypo
  cervical vs. renal,lymphoid_neoplasm,prostate,thyroid, non_cancer,melanoma,breast,sarcoma

SEQ ID NO: 458659 - DNA, 512 bp, Homo sapiens; identical to SEQ ID NO: 342349
  chr16:717202-717714
  hypo
  cervical vs. liver_bileduct,colorectal, pancreas_gallbladder

SEQ ID NO: 458660 - DNA, 90 bp, Homo sapiens
  chr16:1265061-1265151
  hypo
  cervical vs. anorectal
cgtcggttcttcaaggacaggtgtgtgtggtggggccgtcttgggttctgggggcccctcagggctctgggggctgggggcaggtgaggc

SEQ ID NO: 458661 - DNA, 224 bp, Homo sapiens; identical to SEQ ID NO: 366740
  chr16:1265333-1265557
  hypo
  cervical vs. anorectal

SEQ ID NO: 458662 - DNA, 131 bp, Homo sapiens; identical to SEQ ID NO: 355361
  chr16:1753650-1753781
  hypo
  cervical vs. melanoma

SEQ ID NO: 458663 - DNA, 184 bp, Homo sapiens
  chr16:1813299-1813483
  hypo
  cervical vs. liver_bileduct,melanoma, bladder_and_urothelial,colorectal,uterine,multiple_myeloma, lymphoid_neoplasm,prostate,non_cancer,lung,upper_gi
cgtttcaggcgtctgtccagcagggagtcgctggtcatgcctgtgccccggcggcactccaggtcccggtctgtggaaccctcagtgactgtggcagcagagcagcctctgggtcgagcaggggccagctgtggcctccaagcccaggggcatagccggtgccaggaaagccacccttcccagc

SEQ ID NO: 458664 - DNA, 90 bp, Homo sapiens; identical to SEQ ID NO: 346118
  chr16:1814037-1814127
  hypo
  cervical vs. liver_bileduct,melanoma, bladder_and_urothelial,colorectal,uterine,multiple_myeloma, lymphoid_neoplasm,prostate,non_cancer,lung,upper_gi

SEQ ID NO: 458665 - DNA, 217 bp, Homo sapiens
  chr16:1814037-1814254
  hypo
  cervical vs. liver_bileduct,melanoma,lymphoid_neoplasm, bladder_and_urothelial,uterine
gccctacctgtctcagatttctggagggatgggtaggagccagggttcgtgcccacggcgcctccctgctccctgcagctgagtcccaacgggggccaggaggacacgcggatgaagaacgtgccggtgccggtgtactgccgccctctggtggagaaggaccccaccatgaaggtgagcccgcgaggaccccgctcaggctggctgggcgagcggg

SEQ ID NO: 458666 - DNA, 112 bp, Homo sapiens; identical to SEQ ID NO: 355365
  chr16:1814369-1814481
  hypo
  cervical vs. liver_bileduct,melanoma,lymphoid_neoplasm, bladder_and_urothelial,uterine

SEQ ID NO: 458667 - DNA, 1 bp, Homo sapiens
  chr16:2029207-2029208
  hypo
  cervical vs. lymphoid_neoplasm
c

SEQ ID NO: 458668 - DNA, 228 bp, Homo sapiens; identical to SEQ ID NO: 348700
  chr16:2042997-2043225
  hypo
  cervical vs. liver_bileduct,bladder_and_urothelial, pancreas_gallbladder

SEQ ID NO: 458669 - DNA, 371 bp, Homo sapiens; identical to SEQ ID NO: 342419
  chr16:2226433-2226804
  hypo
  cervical vs. liver_bileduct

SEQ ID NO: 458670 - DNA, 266 bp, Homo sapiens; identical to SEQ ID NO: 453687
  chr16:2230223-2230489
  hypo
  cervical vs. lymphoid_neoplasm,pancreas_gallbladder, renal

SEQ ID NO: 458671 - DNA, 389 bp, Homo sapiens; identical to SEQ ID NO: 453689
  chr16:2280815-2281204
  hypo
  cervical vs. colorectal

SEQ ID NO: 458672 - DNA, 238 bp, Homo sapiens; identical to SEQ ID NO: 453690
  chr16:2281402-2281640
  hypo
  cervical vs. colorectal

SEQ ID NO: 458673 - DNA, 61 bp, Homo sapiens; identical to SEQ ID NO: 346128
  chr16:2281702-2281763
  hypo
  cervical vs. colorectal

SEQ ID NO: 458674 - DNA, 482 bp, Homo sapiens; identical to SEQ ID NO: 342427
  chr16:2485948-2486430
  hypo
  cervical vs. upper_gi

SEQ ID NO: 458675 - DNA, 173 bp, Homo sapiens; identical to SEQ ID NO: 346133
  chr16:2806405-2806578
  hypo
  cervical vs. anorectal

SEQ ID NO: 458676 - DNA, 430 bp, Homo sapiens; identical to SEQ ID NO: 452918
  chr16:12897365-12897795
  hypo
  cervical vs. ovary

SEQ ID NO: 458677 - DNA, 10 bp, Homo sapiens
  chr16:15738995-15739005
  hypo
  cervical vs. renal
cgaactccta

SEQ ID NO: 458678 - DNA, 95 bp, Homo sapiens
  chr16:18804320-18804415
  hypo
  cervical vs. breast,lymphoid_neoplasm
cgctgggtaagaaaagtcaaaacactaatgagttgtccatgaagccaactgctaagaacgcgctcaactatacgcgacatgaagacactatgcac

SEQ ID NO: 458679 - DNA, 713 bp, Homo sapiens; identical to SEQ ID NO: 342529
  chr16:24837143-24837856
  hypo
  cervical vs. liver_bileduct

SEQ ID NO: 458680 - DNA, 276 bp, Homo sapiens; identical to SEQ ID NO: 355443
  chr16:29170096-29170372
  hypo
  cervical vs. colorectal,lymphoid_neoplasm

SEQ ID NO: 458681 - DNA, 61 bp, Homo sapiens
  chr16:30017168-30017229
  hypo
  cervical vs. lymphoid_neoplasm,sarcoma
cgacctcctccctgttgggggagagggacggggcagcgtggagaggcaggagtgaggagcg

SEQ ID NO: 458682 - DNA, 42 bp, Homo sapiens; identical to SEQ ID NO: 366899
  chr16:30017858-30017900
  hypo
  cervical vs. lymphoid_neoplasm,sarcoma

SEQ ID NO: 458683 - DNA, 2 bp, Homo sapiens
  chr16:58427482-58427484
  hypo
ac

SEQ ID NO: 458684 - DNA, 109 bp, Homo sapiens; identical to SEQ ID NO: 342605
  chr16:67175573-67175682
  hypo
  cervical vs. head_and_neck

SEQ ID NO: 458685 - DNA, 94 bp, Homo sapiens; identical to SEQ ID NO: 453706
  chr16:67313759-67313853
  hypo
  cervical vs. pancreas_gallbladder,renal

SEQ ID NO: 458686 - DNA, 115 bp, Homo sapiens; identical to SEQ ID NO: 348747
  chr16:67313958-67314073
  hypo
  cervical vs. pancreas_gallbladder,renal

SEQ ID NO: 458687 - DNA, 61 bp, Homo sapiens; identical to SEQ ID NO: 453709
  chr16:75148493-75148554
  hypo
  cervical vs. lymphoid_neoplasm,liver_bileduct,colorectal, renal

SEQ ID NO: 458688 - DNA, 136 bp, Homo sapiens; identical to SEQ ID NO: 348759
  chr16:75149151-75149287
  hypo
  cervical vs. lymphoid_neoplasm,liver_bileduct,colorectal, renal

SEQ ID NO: 458689 - DNA, 205 bp, Homo sapiens; identical to SEQ ID NO: 457590
  chr16:77247511-77247716
  hypo
  cervical vs. lymphoid_neoplasm

SEQ ID NO: 458690 - DNA, 49 bp, Homo sapiens; identical to SEQ ID NO: 452920
  chr16:77822069-77822118
  hypo
  cervical vs. sarcoma,renal

SEQ ID NO: 458691 - DNA, 133 bp, Homo sapiens; identical to SEQ ID NO: 342660
  chr16:78409056-78409189
  hypo
  cervical vs. head_and_neck

SEQ ID NO: 458692 - DNA, 31 bp, Homo sapiens; identical to SEQ ID NO: 457594
  chr16:80837324-80837355
  hypo

SEQ ID NO: 458693 - DNA, 539 bp, Homo sapiens; identical to SEQ ID NO: 457595
  chr16:80837424-80837963
  hypo

SEQ ID NO: 458694 - DNA, 107 bp, Homo sapiens; identical to SEQ ID NO: 342664
  chr16:81361640-81361747
  hypo
  cervical vs. liver_bileduct

SEQ ID NO: 458695 - DNA, 261 bp, Homo sapiens; identical to SEQ ID NO: 453712
  chr16:81563939-81564200
  hypo
  cervical vs. colorectal

SEQ ID NO: 458696 - DNA, 163 bp, Homo sapiens; identical to SEQ ID NO: 453713
  chr16:81564229-81564392
  hypo
  cervical vs. colorectal

SEQ ID NO: 458697 - DNA, 240 bp, Homo sapiens; identical to SEQ ID NO: 355499
  chr16:81564541-81564781
  hypo
  cervical vs. colorectal

SEQ ID NO: 458698 - DNA, 92 bp, Homo sapiens; identical to SEQ ID NO: 355506
  chr16:85033902-85033994
  hypo
  cervical vs. lymphoid_neoplasm,melanoma,multiple_myeloma

SEQ ID NO: 458699 - DNA, 772 bp, Homo sapiens; identical to SEQ ID NO: 335399
  chr16:85590112-85590884
  hypo
  cervical vs. upper_gi

SEQ ID NO: 458700 - DNA, 43 bp, Homo sapiens
  chr16:85731408-85731451
  hypo
  cervical vs. colorectal
cgggagcgtcacctgaggttggatccccaaacaggatccaagt

SEQ ID NO: 458701 - DNA, 13 bp, Homo sapiens
  chr16:85731613-85731626
  hypo
  cervical vs. colorectal
cccgtggaccatc

SEQ ID NO: 458702 - DNA, 178 bp, Homo sapiens; identical to SEQ ID NO: 452923
  chr16:85932121-85932299
  hypo
  cervical vs. upper_gi

SEQ ID NO: 458703 - DNA, 32 bp, Homo sapiens
  chr16:88757496-88757528
  hypo
  cervical vs. breast
cccttgggcctgcggcagatgaggtgagactt

SEQ ID NO: 458704 - DNA, 31 bp, Homo sapiens; identical to SEQ ID NO: 355535
  chr16:88757686-88757717
  hypo
  cervical vs. breast

SEQ ID NO: 458705 - DNA, 662 bp, Homo sapiens; identical to SEQ ID NO: 342759
  chr16:88898125-88898787
  hypo
  cervical vs. breast

SEQ ID NO: 458706 - DNA, 179 bp, Homo sapiens; identical to SEQ ID NO: 342809
  chr16:89947451-89947630
  hypo
  cervical vs. liver_bileduct

SEQ ID NO: 458707 - DNA, 299 bp, Homo sapiens; identical to SEQ ID NO: 342824
  chr17:1454071-1454370
  hypo
  cervical vs. upper_gi,pancreas_gallbladder

SEQ ID NO: 458708 - DNA, 115 bp, Homo sapiens; identical to SEQ ID NO: 342837
  chr17:2326357-2326472
  hypo
  cervical vs. colorectal,lymphoid_neoplasm,upper_gi, liver_bileduct,uterine,breast,melanoma

SEQ ID NO: 458709 - DNA, 122 bp, Homo sapiens; identical to SEQ ID NO: 457600
  chr17:3599052-3599174
  hypo
  cervical vs. bladder_and_urothelial

SEQ ID NO: 458710 - DNA, 392 bp, Homo sapiens; identical to SEQ ID NO: 457601
  chr17:3599244-3599636
  hypo
  cervical vs. bladder_and_urothelial

SEQ ID NO: 458711 - DNA, 213 bp, Homo sapiens; identical to SEQ ID NO: 342859
  chr17:5269074-5269287
  hypo
  cervical vs. liver_bileduct

SEQ ID NO: 458712 - DNA, 73 bp, Homo sapiens; identical to SEQ ID NO: 342868
  chr17:7493149-7493222
  hypo
  cervical vs. liver_bileduct

SEQ ID NO: 458713 - DNA, 200 bp, Homo sapiens; identical to SEQ ID NO: 381519
  chr17:7690145-7690345
  hypo
  cervical vs. liver_bileduct

SEQ ID NO: 458714 - DNA, 212 bp, Homo sapiens; identical to SEQ ID NO: 355592
  chr17:8383605-8383817
  hypo
  cervical vs. head_and_neck

SEQ ID NO: 458715 - DNA, 208 bp, Homo sapiens; identical to SEQ ID NO: 342905
  chr17:17224346-17224554
  hypo
  cervical vs. breast,prostate,uterine,renal

SEQ ID NO: 458716 - DNA, 112 bp, Homo sapiens; identical to SEQ ID NO: 342918
  chr17:19513145-19513257
  hypo
  cervical vs. liver_bileduct,pancreas_gallbladder

SEQ ID NO: 458717 - DNA, 4 bp, Homo sapiens
  chr17:25676867-25676871
  hypo
  cervical vs. sarcoma
cgag

SEQ ID NO: 458718 - DNA, 126 bp, Homo sapiens; identical to SEQ ID NO: 453730
  chr17:27909050-27909176
  hypo
  cervical vs. liver_bileduct,upper_gi

SEQ ID NO: 458719 - DNA, 157 bp, Homo sapiens; identical to SEQ ID NO: 355624
  chr17:27909205-27909362
  hypo
  cervical vs. liver_bileduct,upper_gi

SEQ ID NO: 458720 - DNA, 329 bp, Homo sapiens; identical to SEQ ID NO: 457603
  chr17:37782857-37783186
  hypo
  cervical vs. pancreas_gallbladder

SEQ ID NO: 458721 - DNA, 170 bp, Homo sapiens; identical to SEQ ID NO: 345520
  chr17:42092357-42092527
  hypo
  cervical vs. liver_bileduct,upper_gi,anorectal

SEQ ID NO: 458722 - DNA, 9 bp, Homo sapiens
  chr17:42787526-42787535
  hypo
  cervical vs. prostate
cgagactcc

SEQ ID NO: 458723 - DNA, 111 bp, Homo sapiens; identical to SEQ ID NO: 343000
  chr17:43121686-43121797
  hypo
  cervical vs. upper_gi,ovary,colorectal,uterine, lymphoid_neoplasm,renal

SEQ ID NO: 458724 - DNA, 284 bp, Homo sapiens; identical to SEQ ID NO: 343021
  chr17:48565138-48565422
  hypo
  cervical vs. melanoma

SEQ ID NO: 458725 - DNA, 25 bp, Homo sapiens
  chr17:49229457-49229482
  hypo
  cervical vs. renal,lymphoid_neoplasm,melanoma, multiple_myeloma,non_cancer,prostate,thyroid,uterine, myeloid_neoplasm
cgcgggaagctgagtcacgagaatc

SEQ ID NO: 458726 - DNA, 216 bp, Homo sapiens; identical to SEQ ID NO: 457619
  chr17:56327007-56327223
  hypo
  cervical vs. anorectal

SEQ ID NO: 458727 - DNA, 136 bp, Homo sapiens; identical to SEQ ID NO: 348819
  chr17:56743008-56743144
  hypo

SEQ ID NO: 458728 - DNA, 48 bp, Homo sapiens; identical to SEQ ID NO: 348820
  chr17:57297129-57297177
  hypo
  cervical vs. lymphoid_neoplasm,melanoma

SEQ ID NO: 458729 - DNA, 146 bp, Homo sapiens
  chr17:57787150-57787296
  hypo
cgtcatgtattgtcacttcagaacttccaagtgcagaaaaagctgaagttttttgcctacgtatagttaactaaagagtagaagtagtcctatcttacttacattaaataagaaaccttattattgggccgggcgcggtggttcac

SEQ ID NO: 458730 - DNA, 198 bp, Homo sapiens
  chr17:72220057-72220255
  hypo
  cervical vs. anorectal
cgcaggcgagacgctaaagcagccttgtggggcggacaaagctctgagcacaaggaaggggaccaaggctgctgcaatacatggccggggctgaaataagagactcagaggacagagttctggacaggccgggaggtcacagtcgagtgcggttcccagtacagtggaagagctttgagaagtgactggtgttaaaaa

SEQ ID NO: 458731 - DNA, 153 bp, Homo sapiens; identical to SEQ ID NO: 355708
  chr17:73808671-73808824
  hypo
  cervical vs. liver_bileduct

SEQ ID NO: 458732 - DNA, 17 bp, Homo sapiens
  chr17:73811168-73811185
  hypo
  cervical vs. colorectal,lymphoid_neoplasm, pancreas_gallbladder,anorectal,upper_gi,prostate
cgcactcatgctggagg

SEQ ID NO: 458733 - DNA, 194 bp, Homo sapiens; identical to SEQ ID NO: 355709
  chr17:73811214-73811408
  hypo
  cervical vs. colorectal,lymphoid_neoplasm, pancreas_gallbladder,anorectal,upper_gi,prostate

SEQ ID NO: 458734 - DNA, 185 bp, Homo sapiens; identical to SEQ ID NO: 343121
  chr17:74042063-74042248
  hypo
  cervical vs. lymphoid_neoplasm,melanoma

SEQ ID NO: 458735 - DNA, 148 bp, Homo sapiens; identical to SEQ ID NO: 343148
  chr17:76034983-76035131
  hypo
  cervical vs. colorectal,breast,uterine,prostate,melanoma, lymphoid_neoplasm,renal

SEQ ID NO: 458736 - DNA, 4 bp, Homo sapiens
  chr17:80294440-80294444
  hypo
  cervical vs. pancreas_gallbladder
cgtg

SEQ ID NO: 458737 - DNA, 520 bp, Homo sapiens; identical to SEQ ID NO: 367468
  chr17:80294473-80294993
  hypo
  cervical vs. pancreas_gallbladder

SEQ ID NO: 458738 - DNA, 175 bp, Homo sapiens; identical to SEQ ID NO: 343257
  chr17:80519712-80519887
  hypo
  cervical vs. head_and_neck

SEQ ID NO: 458739 - DNA, 63 bp, Homo sapiens; identical to SEQ ID NO: 453749
  chr17:80747754-80747817
  hypo
  cervical vs. upper_gi,colorectal,liver_bileduct, pancreas_gallbladder,breast,uterine

SEQ ID NO: 458740 - DNA, 95 bp, Homo sapiens; identical to SEQ ID NO: 355783
  chr17:80747890-80747985
  hypo
  cervical vs. upper_gi,colorectal,liver_bileduct, pancreas_gallbladder,breast,uterine

SEQ ID NO: 458741 - DNA, 74 bp, Homo sapiens; identical to SEQ ID NO: 343295
  chr18:635725-635799
  hypo
  cervical vs. pancreas_gallbladder

SEQ ID NO: 458742 - DNA, 113 bp, Homo sapiens; identical to SEQ ID NO: 343321
  chr18:9196896-9197009
  hypo
  cervical vs. upper_gi

SEQ ID NO: 458743 - DNA, 81 bp, Homo sapiens; identical to SEQ ID NO: 343325
  chr18:9514129-9514210
  hypo
  cervical vs. lymphoid_neoplasm

SEQ ID NO: 458744 - DNA, 5 bp, Homo sapiens
  chr18:12375948-12375953
  hypo
cggcc

SEQ ID NO: 458745 - DNA, 1 bp, Homo sapiens
  chr18:12376072-12376073
  hypo
c

SEQ ID NO: 458746 - DNA, 199 bp, Homo sapiens; identical to SEQ ID NO: 343355
  chr18:13491241-13491440
  hypo
  cervical vs. anorectal

SEQ ID NO: 458747 - DNA, 94 bp, Homo sapiens; identical to SEQ ID NO: 452939
  chr18:13823932-13824026
  hypo
  cervical vs. bladder_and_urothelial,colorectal, pancreas_gallbladder,uterine

SEQ ID NO: 458748 - DNA, 113 bp, Homo sapiens; identical to SEQ ID NO: 452940
  chr18:13824102-13824215
  hypo
  cervical vs. bladder_and_urothelial,colorectal, pancreas_gallbladder,uterine

SEQ ID NO: 458749 - DNA, 21 bp, Homo sapiens
  chr18:15197980-15198001
  hypo
cgggggcaaaaaggagcggcg

SEQ ID NO: 458750 - DNA, 5 bp, Homo sapiens
  chr18:15198101-15198106
  hypo
gtgac

SEQ ID NO: 458751 - DNA, 311 bp, Homo sapiens
  chr18:20911034-20911345
  hypo
  cervical vs. melanoma
cgttcagcgagaggcagagccccggaacagcggtgttcactcagttaaacctcatggtctgagagagtggcaggtgtgccgttttccataattagtcacagcccctgaaggaaaagcgcgcccgtgtggggcaggaccaaaggaagaaacgcttctgcaatgctaccgggaagtctgagctcaccttctttaccttggcaccgagctgaagatctgttagaaaccctctccaaccaggactttcaggagaaacggtggccaccgcccagaataacaaggccccagcagcaaggtgtccttttcccagcaag

SEQ ID NO: 458752 - DNA, 2 bp, Homo sapiens
  chr18:29521126-29521128
  hypo
  cervical vs. lymphoid_neoplasm,liver_bileduct,renal,lung, uterine
cg

SEQ ID NO: 458753 - DNA, 3 bp, Homo sapiens
  chr18:29521162-29521165
  hypo
  cervical vs. lymphoid_neoplasm,liver_bileduct,renal,lung, uterine
tgc

SEQ ID NO: 458754 - DNA, 891 bp, Homo sapiens; identical to SEQ ID NO: 452951
  chr18:32556625-32557516
  hypo
  cervical vs. upper_gi,colorectal,lung,ovary, pancreas_gallbladder,renal,uterine

SEQ ID NO: 458755 - DNA, 769 bp, Homo sapiens; identical to SEQ ID NO: 452952
  chr18:32557064-32557833
  hypo
  cervical vs. upper_gi,colorectal,pancreas_gallbladder, lung,liver_bileduct,renal,myeloid_neoplasm,breast,prostate, non_cancer

SEQ ID NO: 458756 - DNA, 18 bp, Homo sapiens
  chr18:32557864-32557882
  hypo
  cervical vs. upper_gi,colorectal,pancreas_gallbladder, lung,liver_bileduct,renal,myeloid_neoplasm,breast,prostate, non_cancer
tctgaacctggggcgctc

SEQ ID NO: 458757 - DNA, 45 bp, Homo sapiens; identical to SEQ ID NO: 452954
  chr18:32557884-32557929
  hypo
  cervical vs. upper_gi,colorectal,pancreas_gallbladder, lung,liver_bileduct,renal,myeloid_neoplasm,breast,prostate, non_cancer

SEQ ID NO: 458758 - DNA, 291 bp, Homo sapiens; identical to SEQ ID NO: 452955
  chr18:32557542-32557833
  hypo
  cervical vs. upper_gi,colorectal,pancreas_gallbladder, lung,renal,liver_bileduct,breast,non_cancer,myeloid_neoplasm, prostate,multiple_myeloma,ovary,uterine

SEQ ID NO: 458759 - DNA, 18 bp, Homo sapiens
  chr18:32557864-32557882
  hypo
  cervical vs. upper_gi,colorectal,pancreas_gallbladder, lung,renal,liver_bileduct,breast,non_cancer,myeloid_neoplasm, prostate,multiple_myeloma,ovary,uterine
tctgaacctggggcgctc

SEQ ID NO: 458760 - DNA, 45 bp, Homo sapiens; identical to SEQ ID NO: 452954
  chr18:32557884-32557929
  hypo
  cervical vs. upper_gi,colorectal,pancreas_gallbladder, lung,renal,liver_bileduct,breast,non_cancer,myeloid_neoplasm, prostate,multiple_myeloma,ovary,uterine

SEQ ID NO: 458761 - DNA, 14 bp, Homo sapiens
  chr18:44337138-44337152
  hypo
  cervical vs. thyroid,sarcoma,myeloid_neoplasm,non_cancer, breast
caggggctgggcgc

SEQ ID NO: 458762 - DNA, 128 bp, Homo sapiens; identical to SEQ ID NO: 343407
  chr18:60609821-60609949
  hypo
  cervical vs. colorectal

SEQ ID NO: 458763 - DNA, 291 bp, Homo sapiens; identical to SEQ ID NO: 454270
  chr19:813406-813697
  hypo
  cervical vs. lymphoid_neoplasm

SEQ ID NO: 458764 - DNA, 322 bp, Homo sapiens; identical to SEQ ID NO: 352133
  chr19:813830-814152
  hypo
  cervical vs. lymphoid_neoplasm

SEQ ID NO: 458765 - DNA, 24 bp, Homo sapiens
  chr19:814406-814430
  hypo
  cervical vs. renal,multiple_myeloma,lymphoid_neoplasm
cgacccccatcagaacctgccact

SEQ ID NO: 458766 - DNA, 102 bp, Homo sapiens; identical to SEQ ID NO: 355922
  chr19:814741-814843
  hypo
  cervical vs. renal,multiple_myeloma,lymphoid_neoplasm

SEQ ID NO: 458767 - DNA, 119 bp, Homo sapiens; identical to SEQ ID NO: 343535
  chr19:874809-874928
  hypo
  cervical vs. pancreas_gallbladder,bladder_and_urothelial

SEQ ID NO: 458768 - DNA, 159 bp, Homo sapiens; identical to SEQ ID NO: 453776
  chr19:883424-883583
  hypo
  cervical vs. melanoma,sarcoma,prostate,multiple_myeloma, myeloid_neoplasm,non_cancer

SEQ ID NO: 458769 - DNA, 45 bp, Homo sapiens; identical to SEQ ID NO: 453777
  chr19:884311-884356
  hypo
  cervical vs. melanoma,sarcoma,prostate,multiple_myeloma, myeloid_neoplasm,non_cancer

SEQ ID NO: 458770 - DNA, 544 bp, Homo sapiens; identical to SEQ ID NO: 346191
  chr19:884311-884855
  hypo
  cervical vs. melanoma,lymphoid_neoplasm,prostate

SEQ ID NO: 458771 - DNA, 229 bp, Homo sapiens; identical to SEQ ID NO: 456692
  chr19:1004547-1004776
  hypo
  cervical vs. renal

SEQ ID NO: 458772 - DNA, 279 bp, Homo sapiens; identical to SEQ ID NO: 218770
  chr19:1005441-1005720
  hypo
  cervical vs. renal,multiple_myeloma

SEQ ID NO: 458773 - DNA, 319 bp, Homo sapiens; identical to SEQ ID NO: 343553
  chr19:1128115-1128434
  hypo
  cervical vs. liver_bileduct,melanoma,lymphoid_neoplasm

SEQ ID NO: 458774 - DNA, 198 bp, Homo sapiens; identical to SEQ ID NO: 453779
  chr19:1226490-1226688
  hypo
  cervical vs. lymphoid_neoplasm

SEQ ID NO: 458775 - DNA, 317 bp, Homo sapiens; identical to SEQ ID NO: 355935
  chr19:1226828-1227145
  hypo
  cervical vs. lymphoid_neoplasm

SEQ ID NO: 458776 - DNA, 306 bp, Homo sapiens; identical to SEQ ID NO: 453784
  chr19:1977026-1977332
  hypo
  cervical vs. lymphoid_neoplasm,colorectal,liver_bileduct, melanoma

SEQ ID NO: 458777 - DNA, 233 bp, Homo sapiens; identical to SEQ ID NO: 453785
  chr19:1978023-1978256
  hypo
  cervical vs. liver_bileduct,lymphoid_neoplasm,melanoma, renal

SEQ ID NO: 458778 - DNA, 116 bp, Homo sapiens; identical to SEQ ID NO: 345560
  chr19:1979018-1979134
  hypo
  cervical vs. liver_bileduct,lymphoid_neoplasm,melanoma, renal

SEQ ID NO: 458779 - DNA, 89 bp, Homo sapiens; identical to SEQ ID NO: 343596
  chr19:2204172-2204261
  hypo
  cervical vs. liver_bileduct

SEQ ID NO: 458780 - DNA, 219 bp, Homo sapiens; identical to SEQ ID NO: 457663
  chr19:2273763-2273982
  hypo
  cervical vs. pancreas_gallbladder,liver_bileduct, colorectal

SEQ ID NO: 458781 - DNA, 10 bp, Homo sapiens
  chr19:2274020-2274030
  hypo
  cervical vs. pancreas_gallbladder,liver_bileduct, colorectal
ccgtctgagc

SEQ ID NO: 458782 - DNA, 73 bp, Homo sapiens; identical to SEQ ID NO: 452976
  chr19:2702445-2702518
  hypo
  cervical vs. melanoma,ovary,uterine,breast, bladder_and_urothelial,prostate,lung,non_cancer, myeloid_neoplasm,multiple_myeloma,thyroid,sarcoma

SEQ ID NO: 458783 - DNA, 453 bp, Homo sapiens; identical to SEQ ID NO: 347529
  chr19:2702553-2703006
  hypo
  cervical vs. melanoma,ovary,uterine,breast, bladder_and_urothelial,prostate,lung,non_cancer, myeloid_neoplasm,multiple_myeloma,thyroid,sarcoma

SEQ ID NO: 458784 - DNA, 758 bp, Homo sapiens
  chr19:3490855-3491613
  hypo
  cervical vs. upper_gi
cgctctgaggtctgcttgtccctccctggcccctgtgccctacctgacccactcagggaccaccaccctgtccctacccaggcctcggggtgggggagtcagaggcccccagaccctgtgtcccattcctagtgaagctgaagccaccataacgtcagcctcttcccagagccccagctctgcccctggcttccctcgcgatcctcccctggctcccctcgcgatcctcccttggcttccctcgcgatcctcccctggcttccctcgcgatcctcccctggcttccctcgcgatcctcccctggcttccctcgcgatcctcccctggcttccctcgcaatcctcccctgtcctgagccgggcatcccagagcctcccgcagagtcccaccccaagcctggaaacttccacgctacagccctgcgccaggccccgaggagcagtcaggggactcagggagtcacagcacaacggcagctcctcggtcccagacggaggagggggacagcaaccatgcgcccagcaagacacaagcgatgacaccgatttacacacacccggtttagacgccaaagctctgcgggggaggagcggccctcaagagtcctccgggagctccgggtgagggtggggccctaggagggggccccgcgcagctgctccaggccgtccgcgtactggaaggcccgcccggtctcgtgctcatacatgtccagagccacctcgcagctctcacgcaccacgcgctctgggtcgtcc

SEQ ID NO: 458785 - DNA, 751 bp, Homo sapiens; identical to SEQ ID NO: 453791
  chr19:3491120-3491871
  hypo
  cervical vs. upper_gi

SEQ ID NO: 458786 - DNA, 134 bp, Homo sapiens
  chr19:3571360-3571494
  hypo
cgtgagccactgcgcccggcccatggcggataatattctgttgtaaggatatatcccgtcatcgatccatgcatcattagcagacgtttgagttgttttcactttttggctattatgaatcacgctgctaccga

SEQ ID NO: 458787 - DNA, 381 bp, Homo sapiens; identical to SEQ ID NO: 367806
  chr19:3576162-3576543
  hypo
  cervical vs. pancreas_gallbladder

SEQ ID NO: 458788 - DNA, 571 bp, Homo sapiens; identical to SEQ ID NO: 343638
  chr19:4094519-4095090
  hypo
  cervical vs. liver_bileduct

SEQ ID NO: 458789 - DNA, 133 bp, Homo sapiens
  chr19:5789558-5789691
  hypo
  cervical vs. pancreas_gallbladder
cgggcctcaggtgggccccagcgaagcggcaggtcacgccgtaggggcaccggccgaaggtctcgaagagcacgcagcgggggcccaggtcggccggcttggtctccaggtagcgccccacgtcgtgcagaaa

SEQ ID NO: 458790 - DNA, 242 bp, Homo sapiens
  chr19:5789927-5790169
  hypo
  cervical vs. pancreas_gallbladder
cggaatggcatcagagcaagctcactgctcgttgctgaaggcccaggagctttctaacaattacccgctgccaggaaacacaccctgctcctgcctgccccggcaggaatgctcacgtggccgcacttgcctggattagggagggacacagcctgttcttgtcgtagttcgtgggcttcacatggggccggcccttgttttgtccccgggccctcttctgagtctgtagctgctccccgggc

SEQ ID NO: 458791 - DNA, 138 bp, Homo sapiens; identical to SEQ ID NO: 355994
  chr19:5790213-5790351
  hypo
  cervical vs. pancreas_gallbladder

SEQ ID NO: 458792 - DNA, 631 bp, Homo sapiens; identical to SEQ ID NO: 457670
  chr19:10530654-10531285
  hypo
  cervical vs. melanoma,breast

SEQ ID NO: 458793 - DNA, 139 bp, Homo sapiens; identical to SEQ ID NO: 457671
  chr19:10531146-10531285
  hypo
  cervical vs. sarcoma

SEQ ID NO: 458794 - DNA, 116 bp, Homo sapiens; identical to SEQ ID NO: 452980
  chr19:10691764-10691880
  hypo
  cervical vs. lymphoid_neoplasm

SEQ ID NO: 458795 - DNA, 177 bp, Homo sapiens; identical to SEQ ID NO: 356025
  chr19:11003087-11003264
  hypo
  cervical vs. lymphoid_neoplasm

SEQ ID NO: 458796 - DNA, 485 bp, Homo sapiens; identical to SEQ ID NO: 347547
  chr19:12595307-12595792
  hypo
  cervical vs. lung,breast,colorectal,ovary,melanoma

SEQ ID NO: 458797 - DNA, 112 bp, Homo sapiens; identical to SEQ ID NO: 343801
  chr19:14815869-14815981
  hypo
  cervical vs. head_and_neck

SEQ ID NO: 458798 - DNA, 439 bp, Homo sapiens
  chr19:15271811-15272250
  hypo
  cervical vs. upper_gi
cgggggccgctcctgcggggagacgggggtccctgggttgagcagctggggtcccggcgccagtggcagcaggaacgaggggcctggaggggcaggtgggggcagccgggcccaatcgaggggcacagccacagggttcagcaggcccaggctgagtacacatcctccagggggctggcgccctagacccgcccggcctgggccaccaagctgtgccagagacactgcagtggcagtggcagctgcatagggcccctcaagggggaagccaccaggggaagcagggggcccaccgaaaggccgcggggagtccagcgagtccacgggcgacagcgtgaccgagctgtcagccagggggcccgggcaggccagcgtcagcttcttgccccgcccccggggcccctgcggccccagccccgccttcccggggggcctcctg

SEQ ID NO: 458799 - DNA, 803 bp, Homo sapiens
  chr19:17837853-17838656
  hypo
  cervical vs. head_and_neck
cgaatgcccaggcggcacccaagccccgcaaagcgcccagcacgtcccactctggcttcccgccggtggcaaatggaccccgcagcccgcccagcctccgatgtggagaagccagcccccccagtgcagcctgcggctctccggcctcccagctggtggccacgcccagcctggagctggggccgatcccagccggggaggagaaggcactggagctgcctttggccgccagctcaatcccaaggccacgcacaccctcccctgagtcccaccggagccccgcagagggcagcgagcggctgtcgctgagcccactgcggggcggggaggccgggccagacgcctcacccacagtgaccacacccacggtgaccacgccctcactacccgcagaggtgggctccccgcactcgaccgaggtggacgagtccctgtcggtgtcctttgagcaggtgctgccgccatccgcccccaccagtgaggctgggctgagcctcccgctgcgtggcccccgggcgcggcgctcggcttccccacacgatgtggacctgtgcctggtgtcaccctgtgaatttgagcatcgcaaggcggtgccaatggcaccggcacctgcgtcccccggcagctcgaatgacagcagtgcccggtcacaggaacgggcaggtgggctgggggccgaggagacgccacccacatcggtcagcgagtccctgcccaccctgtctgactcggatcccgtgcccctggcccccggtgcggcagactcagacgaagacacagagggctttggagtccctcgccac

SEQ ID NO: 458800 - DNA, 1 bp, Homo sapiens
  chr19:18054252-18054253
  hypo
  cervical vs. liver_bileduct
c

SEQ ID NO: 458801 - DNA, 10 bp, Homo sapiens
  chr19:18055035-18055045
  hypo
  cervical vs. liver_bileduct
aggtggaggc

SEQ ID NO: 458802 - DNA, 4 bp, Homo sapiens
  chr19:18880002-18880006
  hypo
  cervical vs. head_and_neck
cgag

SEQ ID NO: 458803 - DNA, 262 bp, Homo sapiens; identical to SEQ ID NO: 452993
  chr19:19843330-19843592
  hypo
  cervical vs. breast,melanoma,uterine,ovary, bladder_and_urothelial,sarcoma,prostate,renal

SEQ ID NO: 458804 - DNA, 47 bp, Homo sapiens; identical to SEQ ID NO: 352250
  chr19:19844044-19844091
  hypo
  cervical vs. breast,melanoma,uterine,ovary, bladder_and_urothelial,sarcoma,prostate,renal

SEQ ID NO: 458805 - DNA, 54 bp, Homo sapiens; identical to SEQ ID NO: 457704
  chr19:20162601-20162655
  hypo
  cervical vs. breast,sarcoma,bladder_and_urothelial, prostate,renal,uterine

SEQ ID NO: 458806 - DNA, 187 bp, Homo sapiens; identical to SEQ ID NO: 343887
  chr19:30155060-30155247
  hypo
  cervical vs. colorectal

SEQ ID NO: 458807 - DNA, 61 bp, Homo sapiens; identical to SEQ ID NO: 455841
  chr19:30718934-30718995
  hypo
  cervical vs. melanoma,thyroid,bladder_and_urothelial, prostate,ovary,uterine,non_cancer,renal,myeloid_neoplasm, sarcoma,multiple_myeloma

SEQ ID NO: 458808 - DNA, 61 bp, Homo sapiens; identical to SEQ ID NO: 455841
  chr19:30718934-30718995
  hypo
  cervical vs. melanoma,prostate,thyroid

SEQ ID NO: 458809 - DNA, 52 bp, Homo sapiens; identical to SEQ ID NO: 343916
  chr19:34963061-34963113
  hypo
  cervical vs. liver_bileduct

SEQ ID NO: 458810 - DNA, 566 bp, Homo sapiens; identical to SEQ ID NO: 343932
  chr19:36592549-36593115
  hypo
  cervical vs. melanoma

SEQ ID NO: 458811 - DNA, 296 bp, Homo sapiens; identical to SEQ ID NO: 453019
  chr19:37568994-37569290
  hypo
  cervical vs. breast,bladder_and_urothelial

SEQ ID NO: 458812 - DNA, 182 bp, Homo sapiens; identical to SEQ ID NO: 345591
  chr19:37569554-37569736
  hypo
  cervical vs. breast,bladder_and_urothelial

SEQ ID NO: 458813 - DNA, 264 bp, Homo sapiens; identical to SEQ ID NO: 457750
  chr19:38719956-38720220
  hypo
  cervical vs. head_and_neck,anorectal

SEQ ID NO: 458814 - DNA, 187 bp, Homo sapiens; identical to SEQ ID NO: 352306
  chr19:38720439-38720626
  hypo
  cervical vs. head_and_neck,anorectal

SEQ ID NO: 458815 - DNA, 246 bp, Homo sapiens; identical to SEQ ID NO: 343959
  chr19:39277459-39277705
  hypo
  cervical vs. upper_gi,colorectal

SEQ ID NO: 458816 - DNA, 86 bp, Homo sapiens; identical to SEQ ID NO: 455009
  chr19:39289891-39289977
  hypo

SEQ ID NO: 458817 - DNA, 57 bp, Homo sapiens; identical to SEQ ID NO: 453811
  chr19:39329516-39329573
  hypo
  cervical vs. lymphoid_neoplasm,multiple_myeloma

SEQ ID NO: 458818 - DNA, 84 bp, Homo sapiens; identical to SEQ ID NO: 344013
  chr19:45903713-45903797
  hypo
  cervical vs. colorectal,melanoma

SEQ ID NO: 458819 - DNA, 168 bp, Homo sapiens; identical to SEQ ID NO: 344026
  chr19:47482472-47482640
  hypo
  cervical vs. liver_bileduct

SEQ ID NO: 458820 - DNA, 259 bp, Homo sapiens; identical to SEQ ID NO: 352348
  chr19:47523724-47523983
  hypo
  cervical vs. anorectal

SEQ ID NO: 458821 - DNA, 196 bp, Homo sapiens; identical to SEQ ID NO: 352353
  chr19:49014625-49014821
  hypo
  cervical vs. lung,upper_gi

SEQ ID NO: 458822 - DNA, 457 bp, Homo sapiens; identical to SEQ ID NO: 453817
  chr19:49971410-49971867
  hypo
  cervical vs. renal,sarcoma,melanoma

SEQ ID NO: 458823 - DNA, 219 bp, Homo sapiens; identical to SEQ ID NO: 453035
  chr19:50553779-50553998
  hypo
  cervical vs. bladder_and_urothelial,uterine

SEQ ID NO: 458824 - DNA, 10 bp, Homo sapiens
  chr19:52077692-52077702
  hypo
cgaggcgggc

SEQ ID NO: 458825 - DNA, 78 bp, Homo sapiens; identical to SEQ ID NO: 453036
  chr19:52531282-52531360
  hypo
  cervical vs. bladder_and_urothelial,breast,uterine,ovary, lymphoid_neoplasm,prostate,myeloid_neoplasm,non_cancer,lung, renal,thyroid,sarcoma

SEQ ID NO: 458826 - DNA, 208 bp, Homo sapiens; identical to SEQ ID NO: 345609
  chr19:52531884-52532092
  hypo
  cervical vs. bladder_and_urothelial,breast,uterine,ovary, lymphoid_neoplasm,prostate,myeloid_neoplasm,non_cancer,lung, renal,thyroid,sarcoma

SEQ ID NO: 458827 - DNA, 32 bp, Homo sapiens; identical to SEQ ID NO: 457769
  chr19:53030704-53030736
  hypo
  cervical vs. colorectal,bladder_and_urothelial,breast

SEQ ID NO: 458828 - DNA, 396 bp, Homo sapiens; identical to SEQ ID NO: 457770
  chr19:53030790-53031186
  hypo
  cervical vs. colorectal,bladder_and_urothelial,breast

SEQ ID NO: 458829 - DNA, 819 bp, Homo sapiens; identical to SEQ ID NO: 453045
  chr19:53237625-53238444
  hypo
  cervical vs. bladder_and_urothelial,colorectal, pancreas_gallbladder

SEQ ID NO: 458830 - DNA, 140 bp, Homo sapiens; identical to SEQ ID NO: 453051
  chr19:53606073-53606213
  hypo
  cervical vs. colorectal,bladder_and_urothelial,melanoma, lung,breast,uterine,sarcoma,prostate,ovary

SEQ ID NO: 458831 - DNA, 222 bp, Homo sapiens; identical to SEQ ID NO: 453052
  chr19:53606354-53606576
  hypo
  cervical vs. colorectal,bladder_and_urothelial,melanoma, lung,breast,uterine,sarcoma,prostate,ovary

SEQ ID NO: 458832 - DNA, 176 bp, Homo sapiens; identical to SEQ ID NO: 453054
  chr19:53606400-53606576
  hypo
  cervical vs. bladder_and_urothelial,colorectal,breast, melanoma,lung,uterine

SEQ ID NO: 458833 - DNA, 578 bp, Homo sapiens; identical to SEQ ID NO: 336278
  chr19:54385484-54386062
  hypo
  cervical vs. breast

SEQ ID NO: 458834 - DNA, 2 bp, Homo sapiens
  chr19:54411124-54411126
  hypo
  cervical vs. ovary,bladder_and_urothelial,uterine, prostate
cg

SEQ ID NO: 458835 - DNA, 20 bp, Homo sapiens
  chr19:54411897-54411917
  hypo
  cervical vs. ovary,bladder_and_urothelial,uterine, prostate
actccgctctgcgcccgccc

SEQ ID NO: 458836 - DNA, 85 bp, Homo sapiens; identical to SEQ ID NO: 457790
  chr19:54412564-54412649
  hypo
  cervical vs. sarcoma,multiple_myeloma

SEQ ID NO: 458837 - DNA, 134 bp, Homo sapiens; identical to SEQ ID NO: 336290
  chr19:56112791-56112925
  hypo
  cervical vs. multiple_myeloma,renal

SEQ ID NO: 458838 - DNA, 171 bp, Homo sapiens; identical to SEQ ID NO: 344121
  chr19:56807013-56807184
  hypo
  cervical vs. liver_bileduct,colorectal,uterine,sarcoma

SEQ ID NO: 458839 - DNA, 18 bp, Homo sapiens
  chr19:56915935-56915953
  hypo
  cervical vs. prostate,myeloid_neoplasm,uterine, non_cancer,thyroid,breast,ovary,sarcoma,bladder_and_urothelial, lymphoid_neoplasm,lung
gtttgacagtgtggaatc

SEQ ID NO: 458840 - DNA, 11 bp, Homo sapiens
  chr19:58039267-58039278
  hypo
  cervical vs. myeloid_neoplasm,sarcoma,prostate,uterine, bladder_and_urothelial,breast,thyroid,non_cancer
cctgagcaacc

SEQ ID NO: 458841 - DNA, 31 bp, Homo sapiens; identical to SEQ ID NO: 453076
  chr19:58125385-58125416
  hypo
  cervical vs. bladder_and_urothelial,lung,uterine,sarcoma, ovary,myeloid_neoplasm,breast,prostate,thyroid,non_cancer, melanoma,pancreas_gallbladder

SEQ ID NO: 458842 - DNA, 344 bp, Homo sapiens; identical to SEQ ID NO: 457823
  chr19:58694209-58694553
  hypo
  cervical vs. anorectal

SEQ ID NO: 458843 - DNA, 52 bp, Homo sapiens; identical to SEQ ID NO: 457824
  chr19:58694501-58694553
  hypo
  cervical vs. anorectal

SEQ ID NO: 458844 - DNA, 1 bp, Homo sapiens
  chr19:58952140-58952141
  hypo
  cervical vs. myeloid_neoplasm,prostate,sarcoma,thyroid
c

SEQ ID NO: 458845 - DNA, 425 bp, Homo sapiens; identical to SEQ ID NO: 337456
  chr2:319186-319611
  hypo
  cervical vs. pancreas_gallbladder,renal,uterine

SEQ ID NO: 458846 - DNA, 314 bp, Homo sapiens; identical to SEQ ID NO: 337496
  chr2:3582036-3582350
  hypo
  cervical vs. upper_gi

SEQ ID NO: 458847 - DNA, 46 bp, Homo sapiens; identical to SEQ ID NO: 337512
  chr2:8868792-8868838
  hypo
  cervical vs. pancreas_gallbladder,renal,upper_gi, colorectal

SEQ ID NO: 458848 - DNA, 60 bp, Homo sapiens
  chr2:8978298-8978358
  hypo
  cervical vs. lymphoid_neoplasm
tggtgcggggtggggacaatggctcactcctgtaatcccagcattttgggaggccaagac

SEQ ID NO: 458849 - DNA, 123 bp, Homo sapiens; identical to SEQ ID NO: 337524
  chr2:10047588-10047711
  hypo
  cervical vs. liver_bileduct,colorectal

SEQ ID NO: 458850 - DNA, 29 bp, Homo sapiens
  chr2:10151694-10151723
  hypo
  cervical vs. melanoma
cgggtcaggtggacagtattggcgtgcgt

SEQ ID NO: 458851 - DNA, 29 bp, Homo sapiens
  chr2:10151842-10151871
  hypo
  cervical vs. melanoma
gtacaggcgggtcaggtggacaggcgtgc

SEQ ID NO: 458852 - DNA, 4 bp, Homo sapiens
  chr2:10151899-10151903
  hypo
cgta

SEQ ID NO: 458853 - DNA, 2 bp, Homo sapiens
  chr2:10152022-10152024
  hypo
gc

SEQ ID NO: 458854 - DNA, 166 bp, Homo sapiens; identical to SEQ ID NO: 331200
  chr2:10152421-10152587
  hypo
  cervical vs. liver_bileduct,lymphoid_neoplasm,breast, uterine,prostate

SEQ ID NO: 458855 - DNA, 91 bp, Homo sapiens; identical to SEQ ID NO: 455044
  chr2:10152958-10153049
  hypo
  cervical vs. lymphoid_neoplasm,breast,renal,prostate, melanoma

SEQ ID NO: 458856 - DNA, 20 bp, Homo sapiens
  chr2:10153468-10153488
  hypo
  cervical vs. lymphoid_neoplasm,breast,renal,prostate, melanoma
atatgggtatgtgtatgggc

SEQ ID NO: 458857 - DNA, 327 bp, Homo sapiens; identical to SEQ ID NO: 455046
  chr2:10153562-10153889
  hypo
  cervical vs. lymphoid_neoplasm,breast,prostate,renal

SEQ ID NO: 458858 - DNA, 19 bp, Homo sapiens
  chr2:10154188-10154207
  hypo
  cervical vs. lymphoid_neoplasm,breast,prostate,renal
gacaggcgtgcatatgagc

SEQ ID NO: 458859 - DNA, 30 bp, Homo sapiens; identical to SEQ ID NO: 455048
  chr2:10154879-10154909
  hypo
  cervical vs. renal,lymphoid_neoplasm,melanoma

SEQ ID NO: 458860 - DNA, 63 bp, Homo sapiens; identical to SEQ ID NO: 455051
  chr2:10156251-10156314
  hypo
  cervical vs. lymphoid_neoplasm,melanoma,sarcoma

SEQ ID NO: 458861 - DNA, 7 bp, Homo sapiens
  chr2:27070281-27070288
  hypo
  cervical vs. anorectal,head_and_neck,prostate, bladder_and_urothelial,sarcoma
cgctctg

SEQ ID NO: 458862 - DNA, 38 bp, Homo sapiens; identical to SEQ ID NO: 454314
  chr2:30453530-30453568
  hypo
  cervical vs. myeloid_neoplasm,ovary,non_cancer

SEQ ID NO: 458863 - DNA, 34 bp, Homo sapiens; identical to SEQ ID NO: 337593
  chr2:32367753-32367787
  hypo
  cervical vs. lymphoid_neoplasm,ovary

SEQ ID NO: 458864 - DNA, 226 bp, Homo sapiens; identical to SEQ ID NO: 345742
  chr2:39186687-39186913
  hypo
  cervical vs. bladder_and_urothelial,colorectal,upper_gi, renal,liver_bileduct,lung,pancreas_gallbladder,uterine,melanoma, breast,lymphoid_neoplasm,prostate,sarcoma

SEQ ID NO: 458865 - DNA, 40 bp, Homo sapiens
  chr2:39188224-39188264
  hypo
  cervical vs. upper_gi,colorectal
cgtttctatgttgagaatatggaacacggtgcgccagcct

SEQ ID NO: 458866 - DNA, 9 bp, Homo sapiens
  chr2:40679688-40679697
  hypo
  cervical vs. bladder_and_urothelial
cgcctaccc

SEQ ID NO: 458867 - DNA, 125 bp, Homo sapiens
  chr2:60706396-60706521
  hypo
  cervical vs. upper_gi
cgtggggactcagcctatggacacctggcctctgcgggcacagcggccacacaccacggtgggacccggagaccattttttgttttgagtctctctaagactgcttgggaaatgaggtctctcag

SEQ ID NO: 458868 - DNA, 208 bp, Homo sapiens
  chr2:60706550-60706758
  hypo
  cervical vs. upper_gi
gaggctgaccagaggccaccaacgtcaagctctctcaggtctactaggaacaggaaagaataactctcccttaacaagcccctcaggctgaaatccttttgcttccagggcctcaaccttctactgctgggtagaaagccccctctgtcaccggcccacagatctcagctgccatcgcactcaaaccctgtcaggcggtggagagtgt

SEQ ID NO: 458869 - DNA, 77 bp, Homo sapiens; identical to SEQ ID NO: 346438
  chr2:60784505-60784582
  hypo
  cervical vs. upper_gi

SEQ ID NO: 458870 - DNA, 373 bp, Homo sapiens; identical to SEQ ID NO: 349503
  chr2:60784505-60784878
  hypo

SEQ ID NO: 458871 - DNA, 91 bp, Homo sapiens
  chr2:61505030-61505121
  hypo
  cervical vs. liver_bileduct
cgctttcgcttggttctcattctttttttgcctgccgccatccacataagatgcgacttgctcggacttgcccggacttgccttccggcac

SEQ ID NO: 458872 - DNA, 92 bp, Homo sapiens; identical to SEQ ID NO: 337630
  chr2:64538788-64538880
  hypo
  cervical vs. colorectal,liver_bileduct

SEQ ID NO: 458873 - DNA, 123 bp, Homo sapiens; identical to SEQ ID NO: 455068
  chr2:69928507-69928630
  hypo
  cervical vs. upper_gi,melanoma

SEQ ID NO: 458874 - DNA, 136 bp, Homo sapiens; identical to SEQ ID NO: 457845
  chr2:73520107-73520243
  hypo
  cervical vs. breast,prostate,bladder_and_urothelial, non_cancer

SEQ ID NO: 458875 - DNA, 236 bp, Homo sapiens; identical to SEQ ID NO: 453103
  chr2:74781700-74781936
  hypo
  cervical vs. upper_gi,colorectal,lymphoid_neoplasm, pancreas_gallbladder

SEQ ID NO: 458876 - DNA, 64 bp, Homo sapiens; identical to SEQ ID NO: 337669
  chr2:86914559-86914623
  hypo
  cervical vs. upper_gi,liver_bileduct

SEQ ID NO: 458877 - DNA, 147 bp, Homo sapiens; identical to SEQ ID NO: 457849
  chr2:101033445-101033592
  hypo
  cervical vs. anorectal,lymphoid_neoplasm,melanoma, prostate,ovary,sarcoma,breast

SEQ ID NO: 458878 - DNA, 97 bp, Homo sapiens; identical to SEQ ID NO: 453106
  chr2:105468467-105468564
  hypo
  cervical vs. melanoma

SEQ ID NO: 458879 - DNA, 144 bp, Homo sapiens; identical to SEQ ID NO: 345031
  chr2:105471069-105471213
  hypo
  cervical vs. melanoma

SEQ ID NO: 458880 - DNA, 11 bp, Homo sapiens
  chr2:106016109-106016120
  hypo
  cervical vs. lymphoid_neoplasm
cgggaaaacca

SEQ ID NO: 458881 - DNA, 64 bp, Homo sapiens; identical to SEQ ID NO: 362948
  chr2:106016398-106016462
  hypo
  cervical vs. lymphoid_neoplasm

SEQ ID NO: 458882 - DNA, 144 bp, Homo sapiens; identical to SEQ ID NO: 453845
  chr2:120005222-120005366
  hypo
  cervical vs. colorectal,melanoma,liver_bileduct,upper_gi, sarcoma,lymphoid_neoplasm

SEQ ID NO: 458883 - DNA, 6 bp, Homo sapiens
  chr2:127535179-127535185
  hypo
  cervical vs. melanoma,sarcoma,breast, bladder_and_urothelial,non_cancer
aagggc

SEQ ID NO: 458884 - DNA, 164 bp, Homo sapiens; identical to SEQ ID NO: 337759
  chr2:128127780-128127944
  hypo
  cervical vs. colorectal,upper_gi,lymphoid_neoplasm

SEQ ID NO: 458885 - DNA, 105 bp, Homo sapiens; identical to SEQ ID NO: 357301
  chr2:128459397-128459502
  hypo
  cervical vs. head_and_neck

SEQ ID NO: 458886 - DNA, 792 bp, Homo sapiens; identical to SEQ ID NO: 345040
  chr2:136874020-136874812
  hypo
  cervical vs. head_and_neck,breast,lymphoid_neoplasm, uterine,prostate,multiple_myeloma

SEQ ID NO: 458887 - DNA, 588 bp, Homo sapiens; identical to SEQ ID NO: 457864
  chr2:136874345-136874933
  hypo
  cervical vs. lymphoid_neoplasm,breast,ovary, multiple_myeloma,uterine,prostate,head_and_neck,non_cancer, myeloid_neoplasm,thyroid,renal

SEQ ID NO: 458888 - DNA, 94 bp, Homo sapiens; identical to SEQ ID NO: 457865
  chr2:136874839-136874933
  hypo
  cervical vs. lymphoid_neoplasm,breast,multiple_myeloma, ovary,prostate,head_and_neck,sarcoma,uterine,non_cancer, myeloid_neoplasm,renal,thyroid,lung

SEQ ID NO: 458889 - DNA, 427 bp, Homo sapiens; identical to SEQ ID NO: 457866
  chr2:136875399-136875826
  hypo
  cervical vs. lymphoid_neoplasm,breast,multiple_myeloma, ovary,prostate,head_and_neck,sarcoma,uterine,non_cancer, myeloid_neoplasm,renal,thyroid,lung

SEQ ID NO: 458890 - DNA, 483 bp, Homo sapiens; identical to SEQ ID NO: 453118
  chr2:136875399-136875882
  hypo
  cervical vs. lymphoid_neoplasm,multiple_myeloma,prostate, breast,uterine,myeloid_neoplasm,non_cancer,thyroid,ovary,renal, head_and_neck

SEQ ID NO: 458891 - DNA, 44 bp, Homo sapiens; identical to SEQ ID NO: 453120
  chr2:136875838-136875882
  hypo
  cervical vs. multiple_myeloma,lymphoid_neoplasm,uterine, myeloid_neoplasm,non_cancer,breast,thyroid,prostate,ovary

SEQ ID NO: 458892 - DNA, 51 bp, Homo sapiens; identical to SEQ ID NO: 453124
  chr2:149632592-149632643
  hypo
  cervical vs. ovary,sarcoma,prostate,thyroid,non_cancer, breast,uterine

SEQ ID NO: 458893 - DNA, 456 bp, Homo sapiens; identical to SEQ ID NO: 457877
  chr2:155554232-155554688
  hypo
  cervical vs. upper_gi

SEQ ID NO: 458894 - DNA, 349 bp, Homo sapiens; identical to SEQ ID NO: 457878
  chr2:155554690-155555039
  hypo
  cervical vs. upper_gi

SEQ ID NO: 458895 - DNA, 263 bp, Homo sapiens; identical to SEQ ID NO: 457880
  chr2:162930659-162930922
  hypo
  cervical vs. colorectal,pancreas_gallbladder,uterine

SEQ ID NO: 458896 - DNA, 101 bp, Homo sapiens; identical to SEQ ID NO: 453132
  chr2:168148871-168148972
  hypo
  cervical vs. lung,pancreas_gallbladder,breast,melanoma, colorectal

SEQ ID NO: 458897 - DNA, 240 bp, Homo sapiens; identical to SEQ ID NO: 453133
  chr2:168149264-168149504
  hypo
  cervical vs. lung,pancreas_gallbladder,breast,melanoma, colorectal

SEQ ID NO: 458898 - DNA, 152 bp, Homo sapiens; identical to SEQ ID NO: 453134
  chr2:168149556-168149708
  hypo
  cervical vs. lung,pancreas_gallbladder,breast,melanoma, colorectal

SEQ ID NO: 458899 - DNA, 98 bp, Homo sapiens; identical to SEQ ID NO: 337807
  chr2:171815760-171815858
  hypo
  cervical vs. colorectal

SEQ ID NO: 458900 - DNA, 624 bp, Homo sapiens; identical to SEQ ID NO: 457903
  chr2:232790030-232790654
  hypo
  cervical vs. head_and_neck,anorectal,lung

SEQ ID NO: 458901 - DNA, 20 bp, Homo sapiens
  chr2:232790784-232790804
  hypo
  cervical vs. head_and_neck,anorectal,lung
tctcctgggtcctgcgcgcc

SEQ ID NO: 458902 - DNA, 226 bp, Homo sapiens; identical to SEQ ID NO: 331671
  chr2:238617178-238617404
  hypo
  cervical vs. liver_bileduct

SEQ ID NO: 458903 - DNA, 158 bp, Homo sapiens; identical to SEQ ID NO: 337932
  chr2:238625990-238626148
  hypo
  cervical vs. liver_bileduct

SEQ ID NO: 458904 - DNA, 82 bp, Homo sapiens; identical to SEQ ID NO: 331676
  chr2:242269474-242269556
  hypo
  cervical vs. colorectal

SEQ ID NO: 458905 - DNA, 47 bp, Homo sapiens; identical to SEQ ID NO: 457908
  chr20:708554-708601
  hypo
  cervical vs. ovary

SEQ ID NO: 458906 - DNA, 52 bp, Homo sapiens; identical to SEQ ID NO: 457909
  chr20:708851-708903
  hypo
  cervical vs. ovary

SEQ ID NO: 458907 - DNA, 460 bp, Homo sapiens; identical to SEQ ID NO: 375005
  chr20:708944-709404
  hypo
  cervical vs. ovary

SEQ ID NO: 458908 - DNA, 266 bp, Homo sapiens
  chr20:3202153-3202419
  hypo
tttctttctgtctatctttcaaagtagcctcattgttcttcagtgatgtcccaatttgtcccgggtgtggctggcgagggcgcgtggccccggaggtgctggtggtcctgtgggtccatgcctcctccctgtgtgtgagggaagagctgccccgctctgctttttattgtattcagcaaacatttgcaggtgctgtaggggccttgcaactacattttgcgtaagttgggtcaaatcaaattcacagactcaccaaactcatactg

SEQ ID NO: 458909 - DNA, 11 bp, Homo sapiens
  chr20:3820920-3820931
  hypo
  cervical vs. lymphoid_neoplasm,colorectal
cgtcccactgc

SEQ ID NO: 458910 - DNA, 222 bp, Homo sapiens; identical to SEQ ID NO: 453162
  chr20:21686742-21686964
  hypo
  cervical vs. sarcoma

SEQ ID NO: 458911 - DNA, 2 bp, Homo sapiens
  chr20:30640769-30640771
  hypo
  cervical vs. anorectal
cc

SEQ ID NO: 458912 - DNA, 95 bp, Homo sapiens; identical to SEQ ID NO: 457926
  chr20:30946060-30946155
  hypo
  cervical vs. head_and_neck

SEQ ID NO: 458913 - DNA, 113 bp, Homo sapiens; identical to SEQ ID NO: 457927
  chr20:30946218-30946331
  hypo
  cervical vs. head_and_neck

SEQ ID NO: 458914 - DNA, 285 bp, Homo sapiens; identical to SEQ ID NO: 361863
  chr20:30946345-30946630
  hypo
  cervical vs. head_and_neck

SEQ ID NO: 458915 - DNA, 155 bp, Homo sapiens; identical to SEQ ID NO: 344206
  chr20:31334709-31334864
  hypo

SEQ ID NO: 458916 - DNA, 161 bp, Homo sapiens; identical to SEQ ID NO: 344232
  chr20:36802873-36803034
  hypo
  cervical vs. liver_bileduct

SEQ ID NO: 458917 - DNA, 110 bp, Homo sapiens; identical to SEQ ID NO: 344239
  chr20:37657005-37657115
  hypo
  cervical vs. pancreas_gallbladder,upper_gi,colorectal, renal

SEQ ID NO: 458918 - DNA, 202 bp, Homo sapiens; identical to SEQ ID NO: 375108
  chr20:40321525-40321727
  hypo
  cervical vs. anorectal

SEQ ID NO: 458919 - DNA, 55 bp, Homo sapiens; identical to SEQ ID NO: 368349
  chr20:42833281-42833336
  hypo
  cervical vs. lymphoid_neoplasm

SEQ ID NO: 458920 - DNA, 63 bp, Homo sapiens; identical to SEQ ID NO: 368352
  chr20:44602364-44602427
  hypo
  cervical vs. liver_bileduct

SEQ ID NO: 458921 - DNA, 51 bp, Homo sapiens; identical to SEQ ID NO: 457931
  chr20:47934774-47934825
  hypo
  cervical vs. sarcoma,prostate,breast,thyroid,ovary, bladder_and_urothelial

SEQ ID NO: 458922 - DNA, 174 bp, Homo sapiens; identical to SEQ ID NO: 344302
  chr20:52374073-52374247
  hypo
  cervical vs. liver_bileduct,pancreas_gallbladder

SEQ ID NO: 458923 - DNA, 32 bp, Homo sapiens
  chr20:52484682-52484714
  hypo
  cervical vs. renal
cgctaatatttacgactagaacattctttatt

SEQ ID NO: 458924 - DNA, 91 bp, Homo sapiens; identical to SEQ ID NO: 356315
  chr20:56772299-56772390
  hypo
  cervical vs. melanoma,sarcoma

SEQ ID NO: 458925 - DNA, 431 bp, Homo sapiens; identical to SEQ ID NO: 336494
  chr20:56784811-56785242
  hypo
  cervical vs. head_and_neck,lung

SEQ ID NO: 458926 - DNA, 307 bp, Homo sapiens; identical to SEQ ID NO: 344313
  chr20:56941603-56941910
  hypo
  cervical vs. head_and_neck

SEQ ID NO: 458927 - DNA, 164 bp, Homo sapiens; identical to SEQ ID NO: 346239
  chr20:57268976-57269140
  hypo
  cervical vs. liver_bileduct,pancreas_gallbladder, colorectal,sarcoma,lymphoid_neoplasm,multiple_myeloma,uterine, prostate,non_cancer

SEQ ID NO: 458928 - DNA, 327 bp, Homo sapiens; identical to SEQ ID NO: 336499
  chr20:57797949-57798276
  hypo
  cervical vs. head_and_neck,upper_gi,lung, pancreas_gallbladder

SEQ ID NO: 458929 - DNA, 3 bp, Homo sapiens
  chr20:57875361-57875364
  hypo
  cervical vs. pancreas_gallbladder
cgc

SEQ ID NO: 458930 - DNA, 176 bp, Homo sapiens; identical to SEQ ID NO: 457936
  chr20:57875366-57875542
  hypo
  cervical vs. pancreas_gallbladder

SEQ ID NO: 458931 - DNA, 220 bp, Homo sapiens; identical to SEQ ID NO: 352521
  chr20:57875889-57876109
  hypo
  cervical vs. pancreas_gallbladder

SEQ ID NO: 458932 - DNA, 233 bp, Homo sapiens; identical to SEQ ID NO: 347690
  chr20:57978841-57979074
  hypo
  cervical vs. bladder_and_urothelial,colorectal, pancreas_gallbladder,melanoma,upper_gi,ovary,multiple_myeloma, sarcoma,prostate,non_cancer,lymphoid_neoplasm,renal, myeloid_neoplasm,uterine,thyroid

SEQ ID NO: 458933 - DNA, 354 bp, Homo sapiens; identical to SEQ ID NO: 344328
  chr20:58507061-58507415
  hypo

SEQ ID NO: 458934 - DNA, 3 bp, Homo sapiens
  chr20:58507727-58507730
  hypo
  cervical vs. bladder_and_urothelial,colorectal,uterine, pancreas_gallbladder,lung,lymphoid_neoplasm,upper_gi
cgg

SEQ ID NO: 458935 - DNA, 260 bp, Homo sapiens; identical to SEQ ID NO: 356329
  chr20:58508063-58508323
  hypo
  cervical vs. bladder_and_urothelial,colorectal,uterine, pancreas_gallbladder,lung,lymphoid_neoplasm,upper_gi

SEQ ID NO: 458936 - DNA, 57 bp, Homo sapiens; identical to SEQ ID NO: 453879
  chr20:58514041-58514098
  hypo
  cervical vs. colorectal,pancreas_gallbladder,renal, uterine,lymphoid_neoplasm,sarcoma,upper_gi,prostate,non_cancer

SEQ ID NO: 458937 - DNA, 115 bp, Homo sapiens; identical to SEQ ID NO: 345644
  chr20:58514400-58514515
  hypo
  cervical vs. colorectal,pancreas_gallbladder,renal, uterine,lymphoid_neoplasm,sarcoma,upper_gi,prostate,non_cancer

SEQ ID NO: 458938 - DNA, 176 bp, Homo sapiens
  chr20:60781114-60781290
  hypo
  cervical vs. lymphoid_neoplasm,multiple_myeloma,renal
cgtgaaatgccctctagtcaaaaagccaaagacagccacacgcgcccaggctctgcacagttgggcccaccaccctctcgtgcacgcactttccacacttcacgttagccgccgtcgcccccccgccctaagctcctggagaacagagacctcgtttgtctgtatgcagtgcccgg

SEQ ID NO: 458939 - DNA, 256 bp, Homo sapiens; identical to SEQ ID NO: 356341
  chr20:60781567-60781823
  hypo
  cervical vs. lymphoid_neoplasm,multiple_myeloma,renal

SEQ ID NO: 458940 - DNA, 64 bp, Homo sapiens; identical to SEQ ID NO: 344363
  chr20:60842033-60842097
  hypo
  cervical vs. liver_bileduct

SEQ ID NO: 458941 - DNA, 237 bp, Homo sapiens; identical to SEQ ID NO: 455124
  chr20:61287746-61287983
  hypo
  cervical vs. colorectal,lymphoid_neoplasm

SEQ ID NO: 458942 - DNA, 60 bp, Homo sapiens; identical to SEQ ID NO: 356344
  chr20:61288557-61288617
  hypo
  cervical vs. colorectal,lymphoid_neoplasm

SEQ ID NO: 458943 - DNA, 58 bp, Homo sapiens; identical to SEQ ID NO: 455130
  chr21:19274771-19274829
  hypo
  cervical vs. lymphoid_neoplasm

SEQ ID NO: 458944 - DNA, 123 bp, Homo sapiens; identical to SEQ ID NO: 457941
  chr21:27011487-27011610
  hypo
  cervical vs. sarcoma,lymphoid_neoplasm,uterine, head_and_neck,multiple_myeloma

SEQ ID NO: 458945 - DNA, 134 bp, Homo sapiens; identical to SEQ ID NO: 457942
  chr21:27011639-27011773
  hypo
  cervical vs. sarcoma,lymphoid_neoplasm,uterine, head_and_neck,multiple_myeloma

SEQ ID NO: 458946 - DNA, 246 bp, Homo sapiens; identical to SEQ ID NO: 344473
  chr21:38603108-38603354
  hypo
  cervical vs. liver_bileduct

SEQ ID NO: 458947 - DNA, 79 bp, Homo sapiens
  chr21:38918381-38918460
  hypo
  cervical vs. head_and_neck,anorectal,melanoma
cgtggatatgatgagcggttatgcgggctctgcttcttgccacctacttgcaggttgaaggatgtgcctattccacatc

SEQ ID NO: 458948 - DNA, 169 bp, Homo sapiens; identical to SEQ ID NO: 356382
  chr21:38918561-38918730
  hypo
  cervical vs. head_and_neck,anorectal,melanoma

SEQ ID NO: 458949 - DNA, 749 bp, Homo sapiens; identical to SEQ ID NO: 344480
  chr21:40316188-40316937
  hypo
  cervical vs. head_and_neck

SEQ ID NO: 458950 - DNA, 66 bp, Homo sapiens; identical to SEQ ID NO: 344549
  chr21:45736431-45736497
  hypo
  cervical vs. lung

SEQ ID NO: 458951 - DNA, 731 bp, Homo sapiens; identical to SEQ ID NO: 344649
  chr21:47832850-47833581
  hypo
  cervical vs. upper_gi,colorectal

SEQ ID NO: 458952 - DNA, 130 bp, Homo sapiens; identical to SEQ ID NO: 454357
  chr22:19706042-19706172
  hypo
  cervical vs. anorectal

SEQ ID NO: 458953 - DNA, 10 bp, Homo sapiens
  chr22:21154023-21154033
  hypo
  cervical vs. renal,sarcoma
tgggtccacc

SEQ ID NO: 458954 - DNA, 7 bp, Homo sapiens
  chr22:21982786-21982793
  hypo
  cervical vs. renal,liver_bileduct,thyroid
cgtcgag

SEQ ID NO: 458955 - DNA, 46 bp, Homo sapiens; identical to SEQ ID NO: 356490
  chr22:21983041-21983087
  hypo
  cervical vs. renal,liver_bileduct,thyroid

SEQ ID NO: 458956 - DNA, 192 bp, Homo sapiens; identical to SEQ ID NO: 344688
  chr22:22324565-22324757
  hypo
  cervical vs. liver_bileduct,pancreas_gallbladder,breast

SEQ ID NO: 458957 - DNA, 137 bp, Homo sapiens; identical to SEQ ID NO: 453177
  chr22:22862472-22862609
  hypo
  cervical vs. uterine,prostate,myeloid_neoplasm, multiple_myeloma,lymphoid_neoplasm,non_cancer,colorectal, melanoma,ovary,renal,thyroid

SEQ ID NO: 458958 - DNA, 31 bp, Homo sapiens; identical to SEQ ID NO: 362028
  chr22:24819665-24819696
  hypo
  cervical vs. head_and_neck

SEQ ID NO: 458959 - DNA, 174 bp, Homo sapiens; identical to SEQ ID NO: 457951
  chr22:24819901-24820075
  hypo
  cervical vs. anorectal

SEQ ID NO: 458960 - DNA, 61 bp, Homo sapiens; identical to SEQ ID NO: 295272
  chr22:24820486-24820547
  hypo
  cervical vs. anorectal

SEQ ID NO: 458961 - DNA, 64 bp, Homo sapiens
  chr22:26999530-26999594
  hypo
  cervical vs. anorectal
cgtgggattgtcatggctactcaactcacggttcagtccaactataaaacaggcctggccgggc

SEQ ID NO: 458962 - DNA, 4 bp, Homo sapiens
  chr22:29167694-29167698
  hypo
  cervical vs. pancreas_gallbladder
cggt

SEQ ID NO: 458963 - DNA, 2 bp, Homo sapiens
  chr22:29167817-29167819
  hypo
  cervical vs. pancreas_gallbladder
gc

SEQ ID NO: 458964 - DNA, 8 bp, Homo sapiens
  chr22:29446643-29446651
  hypo
  cervical vs. liver_bileduct
gagccagc

SEQ ID NO: 458965 - DNA, 86 bp, Homo sapiens; identical to SEQ ID NO: 344714
  chr22:29587127-29587213
  hypo
  cervical vs. ovary,pancreas_gallbladder,colorectal, upper_gi,breast

SEQ ID NO: 458966 - DNA, 96 bp, Homo sapiens; identical to SEQ ID NO: 346280
  chr22:36902565-36902661
  hypo
  cervical vs. pancreas_gallbladder,renal, lymphoid_neoplasm,uterine,non_cancer,colorectal, bladder_and_urothelial,thyroid,lung,prostate,multiple_myeloma

SEQ ID NO: 458967 - DNA, 391 bp, Homo sapiens; identical to SEQ ID NO: 368791
  chr22:38694593-38694984
  hypo
  cervical vs. anorectal

SEQ ID NO: 458968 - DNA, 317 bp, Homo sapiens; identical to SEQ ID NO: 344781
  chr22:40804031-40804348
  hypo
  cervical vs. upper_gi

SEQ ID NO: 458969 - DNA, 106 bp, Homo sapiens; identical to SEQ ID NO: 349116
  chr22:41634855-41634961
  hypo
  cervical vs. melanoma,renal

SEQ ID NO: 458970 - DNA, 366 bp, Homo sapiens; identical to SEQ ID NO: 344785
  chr22:41639303-41639669
  hypo
  cervical vs. liver_bileduct

SEQ ID NO: 458971 - DNA, 143 bp, Homo sapiens; identical to SEQ ID NO: 344789
  chr22:41669366-41669509
  hypo
  cervical vs. colorectal

SEQ ID NO: 458972 - DNA, 23 bp, Homo sapiens
  chr22:41839279-41839302
  hypo
  cervical vs. lymphoid_neoplasm,sarcoma
cgcgcgcgcatgtgtctgcctgc

SEQ ID NO: 458973 - DNA, 2 bp, Homo sapiens
  chr22:41839382-41839384
  hypo
  cervical vs. lymphoid_neoplasm,sarcoma
gc

SEQ ID NO: 458974 - DNA, 8 bp, Homo sapiens
  chr22:42395143-42395151
  hypo
  cervical vs. renal,lymphoid_neoplasm
cgcatgtc

SEQ ID NO: 458975 - DNA, 50 bp, Homo sapiens; identical to SEQ ID NO: 368819
  chr22:42395290-42395340
  hypo
  cervical vs. renal,lymphoid_neoplasm

SEQ ID NO: 458976 - DNA, 33 bp, Homo sapiens; identical to SEQ ID NO: 453905
  chr22:42667137-42667170
  hypo
  cervical vs. lymphoid_neoplasm,melanoma,multiple_myeloma, renal

SEQ ID NO: 458977 - DNA, 78 bp, Homo sapiens; identical to SEQ ID NO: 456932
  chr22:42995235-42995313
  hypo
  cervical vs. liver_bileduct,pancreas_gallbladder

SEQ ID NO: 458978 - DNA, 16 bp, Homo sapiens
  chr22:42995331-42995347
  hypo
  cervical vs. liver_bileduct,pancreas_gallbladder
gggcgcagtggcttac

SEQ ID NO: 458979 - DNA, 107 bp, Homo sapiens
  chr22:42995599-42995706
  hypo
  cervical vs. liver_bileduct,pancreas_gallbladder
cgagatgtcgtctcaaaacaaaaaaaacaacaggttctattcaacacgacctctcccacctgcctgatcagacacgcagtgtaagaaaacatgaaatgccataccat

SEQ ID NO: 458980 - DNA, 187 bp, Homo sapiens; identical to SEQ ID NO: 453906
  chr22:43570061-43570248
  hypo
  cervical vs. liver_bileduct

SEQ ID NO: 458981 - DNA, 298 bp, Homo sapiens; identical to SEQ ID NO: 368828
  chr22:43570314-43570612
  hypo
  cervical vs. liver_bileduct

SEQ ID NO: 458982 - DNA, 560 bp, Homo sapiens; identical to SEQ ID NO: 457961
  chr22:44419919-44420479
  hypo
  cervical vs. melanoma,multiple_myeloma,uterine, bladder_and_urothelial,non_cancer,renal

SEQ ID NO: 458983 - DNA, 116 bp, Homo sapiens; identical to SEQ ID NO: 383541
  chr22:45123856-45123972
  hypo
  cervical vs. head_and_neck

SEQ ID NO: 458984 - DNA, 404 bp, Homo sapiens; identical to SEQ ID NO: 453908
  chr22:45593240-45593644
  hypo
  cervical vs. liver_bileduct

SEQ ID NO: 458985 - DNA, 258 bp, Homo sapiens; identical to SEQ ID NO: 346288
  chr22:45593715-45593973
  hypo
  cervical vs. liver_bileduct

SEQ ID NO: 458986 - DNA, 567 bp, Homo sapiens; identical to SEQ ID NO: 344821
  chr22:45808579-45809146
  hypo
  cervical vs. bladder_and_urothelial,colorectal,prostate, pancreas_gallbladder,uterine

SEQ ID NO: 458987 - DNA, 225 bp, Homo sapiens
  chr22:46929401-46929626
  hypo
  cervical vs. lymphoid_neoplasm
gcagagttgcccgggcccggcccaattgcgccccggcatgccaggcggagcccttggcgggttcctgaggctctccaggaggcccatcaggagctactcctcccaccccgacggccactcaccagacacagacacctccatgagcgcctccagcggccggttgttgtccaggtcgcggctgagctgcagttcgcccgtggcggggtccagcagcaacaggcgcag

SEQ ID NO: 458988 - DNA, 204 bp, Homo sapiens
  chr22:46929718-46929922
  hypo
  cervical vs. lymphoid_neoplasm
tggacttgttggtgacatagttgttgaagaggatctggaagtcgggcagcacaggcgggttgtcattctggtccacgagaaggatgtgcaccgtggctcggctcaccagcggagccgacgtggcctgcaccaccagcacatactcccgccggacctcaaagtccagctccaccatggcacgcaggtccccgttgagcaggtcca

SEQ ID NO: 458989 - DNA, 282 bp, Homo sapiens
  chr22:46931438-46931720
  hypo
  cervical vs. upper_gi,pancreas_gallbladder,colorectal, lymphoid_neoplasm,renal,prostate,melanoma
cgggggccggcccccatcctgggccttaatgctcagcgagtatttctggacatcctcgaaatccaaggggttgatcacatccaggatcccgctcagcgagtgcaggtagaactggccggccacgttcccgctgaggatgctgtagtgaatggccgcgttctggccctggtcccggtccgtggcctgcactcgcagcacagccgtgttgagccccacgtcctcgggcacctggaccacgtagttctgctcgctgaactgggggtagttgtcgttctcgtcctc

SEQ ID NO: 458990 - DNA, 68 bp, Homo sapiens; identical to SEQ ID NO: 349124
  chr22:46932128-46932196
  hypo
  cervical vs. upper_gi,pancreas_gallbladder,colorectal, lymphoid_neoplasm,renal,prostate,melanoma

SEQ ID NO: 458991 - DNA, 359 bp, Homo sapiens; identical to SEQ ID NO: 356572
  chr22:46979972-46980331
  hypo
  cervical vs. liver_bileduct

SEQ ID NO: 458992 - DNA, 135 bp, Homo sapiens; identical to SEQ ID NO: 453912
  chr22:47022417-47022552
  hypo
  cervical vs. liver_bileduct,lung

SEQ ID NO: 458993 - DNA, 413 bp, Homo sapiens; identical to SEQ ID NO: 453913
  chr22:47022632-47023045
  hypo
  cervical vs. liver_bileduct,lung

SEQ ID NO: 458994 - DNA, 58 bp, Homo sapiens; identical to SEQ ID NO: 356575
  chr22:47023191-47023249
  hypo
  cervical vs. liver_bileduct,lung

SEQ ID NO: 458995 - DNA, 263 bp, Homo sapiens; identical to SEQ ID NO: 344836
  chr22:47054031-47054294
  hypo
  cervical vs. colorectal,liver_bileduct,upper_gi, lymphoid_neoplasm,lung,ovary,bladder_and_urothelial, pancreas_gallbladder,melanoma,uterine,multiple_myeloma

SEQ ID NO: 458996 - DNA, 237 bp, Homo sapiens
  chr22:47327916-47328153
  hypo
  cervical vs. colorectal,upper_gi,lymphoid_neoplasm
cgaggaatgccttattctgatgttacgcggtttctttcctggctcatgcatgcccccatttgtgcgtttatagaaagtgtaagtcctgtgctagtcagagcaagactctgtcagtgaagacgatggtgactagtggcgggttcaccgtgtcagacactgcgctaagcaggtcattacatgatcacctggaattcttaaatgccctctggcgacaccaccatacatgactgttgtgac

SEQ ID NO: 458997 - DNA, 6 bp, Homo sapiens
  chr22:47328182-47328188
  hypo
  cervical vs. colorectal,upper_gi,lymphoid_neoplasm
gtgacc

SEQ ID NO: 458998 - DNA, 350 bp, Homo sapiens; identical to SEQ ID NO: 344841
  chr22:47436589-47436939
  hypo
  cervical vs. liver_bileduct,pancreas_gallbladder

SEQ ID NO: 458999 - DNA, 59 bp, Homo sapiens; identical to SEQ ID NO: 453192
  chr22:50170525-50170584
  hypo
  cervical vs. melanoma

SEQ ID NO: 459000 - DNA, 160 bp, Homo sapiens; identical to SEQ ID NO: 356591
  chr22:50170790-50170950
  hypo
  cervical vs. melanoma

SEQ ID NO: 459001 - DNA, 110 bp, Homo sapiens; identical to SEQ ID NO: 453918
  chr22:50177139-50177249
  hypo
  cervical vs. liver_bileduct

SEQ ID NO: 459002 - DNA, 50 bp, Homo sapiens; identical to SEQ ID NO: 368896
  chr22:50177299-50177349
  hypo
  cervical vs. liver_bileduct

SEQ ID NO: 459003 - DNA, 28 bp, Homo sapiens
  chr22:50623263-50623291
  hypo
  cervical vs. non_cancer,multiple_myeloma, myeloid_neoplasm
cgccagcgccaggtcagccaagaacccg

SEQ ID NO: 459004 - DNA, 152 bp, Homo sapiens
  chr22:50873262-50873414
  hypo
  cervical vs. head_and_neck
cggacactgggcaggggccgggcacttgctctccgaagtgaacctggaggcctctgccacttggctctctgggtcgtgggtctggcaaggtcggggccaggaggccgccccgatggtgcctgttgctttcagggcagcgggtggcatgagac

SEQ ID NO: 459005 - DNA, 153 bp, Homo sapiens; identical to SEQ ID NO: 356600
  chr22:50899708-50899861
  hypo
  cervical vs. lymphoid_neoplasm

SEQ ID NO: 459006 - DNA, 379 bp, Homo sapiens; identical to SEQ ID NO: 453923
  chr22:50942715-50943094
  hypo
  cervical vs. liver_bileduct,upper_gi,colorectal, pancreas_gallbladder,breast,uterine

SEQ ID NO: 459007 - DNA, 117 bp, Homo sapiens; identical to SEQ ID NO: 453924
  chr22:50942977-50943094
  hypo
  cervical vs. liver_bileduct,colorectal, pancreas_gallbladder,upper_gi,breast,renal

SEQ ID NO: 459008 - DNA, 308 bp, Homo sapiens; identical to SEQ ID NO: 356602
  chr22:50943412-50943720
  hypo
  cervical vs. liver_bileduct,colorectal, pancreas_gallbladder,upper_gi,breast,renal

SEQ ID NO: 459009 - DNA, 59 bp, Homo sapiens; identical to SEQ ID NO: 455195
  chr3:5165842-5165901
  hypo

SEQ ID NO: 459010 - DNA, 78 bp, Homo sapiens; identical to SEQ ID NO: 345081
  chr3:16555426-16555504
  hypo
  cervical vs. anorectal,lymphoid_neoplasm,ovary, multiple_myeloma,lung,sarcoma,head_and_neck, bladder_and_urothelial

SEQ ID NO: 459011 - DNA, 559 bp, Homo sapiens; identical to SEQ ID NO: 453194
  chr3:32433054-32433613
  hypo
  cervical vs. pancreas_gallbladder,bladder_and_urothelial, ovary,lung,renal

SEQ ID NO: 459012 - DNA, 180 bp, Homo sapiens; identical to SEQ ID NO: 453195
  chr3:32433665-32433845
  hypo
  cervical vs. pancreas_gallbladder,bladder_and_urothelial, ovary,lung,renal

SEQ ID NO: 459013 - DNA, 247 bp, Homo sapiens; identical to SEQ ID NO: 453196
  chr3:32433366-32433613
  hypo
  cervical vs. pancreas_gallbladder,ovary,upper_gi

SEQ ID NO: 459014 - DNA, 201 bp, Homo sapiens; identical to SEQ ID NO: 453197
  chr3:32433665-32433866
  hypo
  cervical vs. pancreas_gallbladder,ovary,upper_gi

SEQ ID NO: 459015 - DNA, 81 bp, Homo sapiens; identical to SEQ ID NO: 345086
  chr3:32434068-32434149
  hypo
  cervical vs. pancreas_gallbladder,ovary,upper_gi

SEQ ID NO: 459016 - DNA, 234 bp, Homo sapiens; identical to SEQ ID NO: 453203
  chr3:49906737-49906971
  hypo
  cervical vs. head_and_neck

SEQ ID NO: 459017 - DNA, 49 bp, Homo sapiens; identical to SEQ ID NO: 349768
  chr3:49907379-49907428
  hypo
  cervical vs. head_and_neck

SEQ ID NO: 459018 - DNA, 333 bp, Homo sapiens; identical to SEQ ID NO: 455208
  chr3:53032401-53032734
  hypo
  cervical vs. head_and_neck,lymphoid_neoplasm,sarcoma

SEQ ID NO: 459019 - DNA, 786 bp, Homo sapiens; identical to SEQ ID NO: 457991
  chr3:67048291-67049077
  hypo
  cervical vs. upper_gi,lymphoid_neoplasm,head_and_neck, colorectal,pancreas_gallbladder

SEQ ID NO: 459020 - DNA, 768 bp, Homo sapiens; identical to SEQ ID NO: 454376
  chr3:67048599-67049367
  hypo
  cervical vs. lymphoid_neoplasm,colorectal, pancreas_gallbladder

SEQ ID NO: 459021 - DNA, 60 bp, Homo sapiens; identical to SEQ ID NO: 229708
  chr3:120627258-120627318
  hypo
  cervical vs. anorectal

SEQ ID NO: 459022 - DNA, 60 bp, Homo sapiens; identical to SEQ ID NO: 229708
  chr3:120627258-120627318
  hypo
  cervical vs. anorectal

SEQ ID NO: 459023 - DNA, 185 bp, Homo sapiens; identical to SEQ ID NO: 338187
  chr3:128737561-128737746
  hypo
  cervical vs. pancreas_gallbladder

SEQ ID NO: 459024 - DNA, 30 bp, Homo sapiens; identical to SEQ ID NO: 453214
  chr3:130064848-130064878
  hypo
  cervical vs. sarcoma

SEQ ID NO: 459025 - DNA, 216 bp, Homo sapiens; identical to SEQ ID NO: 338193
  chr3:130424529-130424745
  hypo
  cervical vs. lymphoid_neoplasm

SEQ ID NO: 459026 - DNA, 323 bp, Homo sapiens; identical to SEQ ID NO: 458010
  chr3:134513748-134514071
  hypo
  cervical vs. head_and_neck

SEQ ID NO: 459027 - DNA, 12 bp, Homo sapiens
  chr3:136583060-136583072
  hypo
tcggtggctcac

SEQ ID NO: 459028 - DNA, 147 bp, Homo sapiens; identical to SEQ ID NO: 338213
  chr3:141622422-141622569
  hypo
  cervical vs. melanoma

SEQ ID NO: 459029 - DNA, 15 bp, Homo sapiens
  chr3:142837817-142837832
  hypo
  cervical vs. ovary
cgggacaagtatttt

SEQ ID NO: 459030 - DNA, 216 bp, Homo sapiens; identical to SEQ ID NO: 338226
  chr3:148804777-148804993
  hypo
  cervical vs. bladder_and_urothelial

SEQ ID NO: 459031 - DNA, 77 bp, Homo sapiens; identical to SEQ ID NO: 338228
  chr3:150187009-150187086
  hypo
  cervical vs. upper_gi,colorectal,lymphoid_neoplasm, melanoma,pancreas_gallbladder

SEQ ID NO: 459032 - DNA, 86 bp, Homo sapiens; identical to SEQ ID NO: 458017
  chr3:150802802-150802888
  hypo
  cervical vs. lung,breast,multiple_myeloma

SEQ ID NO: 459033 - DNA, 123 bp, Homo sapiens; identical to SEQ ID NO: 338237
  chr3:168608983-168609106
  hypo
  cervical vs. pancreas_gallbladder,lymphoid_neoplasm

SEQ ID NO: 459034 - DNA, 54 bp, Homo sapiens; identical to SEQ ID NO: 345815
  chr3:169540679-169540733
  hypo
  cervical vs. sarcoma

SEQ ID NO: 459035 - DNA, 108 bp, Homo sapiens; identical to SEQ ID NO: 453226
  chr3:170626349-170626457
  hypo
  cervical vs. colorectal

SEQ ID NO: 459036 - DNA, 508 bp, Homo sapiens; identical to SEQ ID NO: 357752
  chr3:170626710-170627218
  hypo
  cervical vs. colorectal

SEQ ID NO: 459037 - DNA, 97 bp, Homo sapiens; identical to SEQ ID NO: 338249
  chr3:179377859-179377956
  hypo
  cervical vs. pancreas_gallbladder,upper_gi, liver_bileduct

SEQ ID NO: 459038 - DNA, 207 bp, Homo sapiens; identical to SEQ ID NO: 453230
  chr3:180397104-180397311
  hypo
  cervical vs. lung,sarcoma,breast,ovary

SEQ ID NO: 459039 - DNA, 809 bp, Homo sapiens; identical to SEQ ID NO: 345120
  chr3:183165024-183165833
  hypo
  cervical vs. liver_bileduct,bladder_and_urothelial,lung, ovary,renal,melanoma,uterine

SEQ ID NO: 459040 - DNA, 117 bp, Homo sapiens; identical to SEQ ID NO: 338262
  chr3:183275024-183275141
  hypo
  cervical vs. pancreas_gallbladder,colorectal,melanoma, lymphoid_neoplasm,breast

SEQ ID NO: 459041 - DNA, 140 bp, Homo sapiens; identical to SEQ ID NO: 338263
  chr3:183419820-183419960
  hypo
  cervical vs. liver_bileduct

SEQ ID NO: 459042 - DNA, 54 bp, Homo sapiens; identical to SEQ ID NO: 363399
  chr3:183643595-183643649
  hypo
  cervical vs. colorectal,breast,uterine,sarcoma

SEQ ID NO: 459043 - DNA, 939 bp, Homo sapiens; identical to SEQ ID NO: 331970
  chr3:184278877-184279816
  hypo
  cervical vs. upper_gi

SEQ ID NO: 459044 - DNA, 3 bp, Homo sapiens
  chr3:185271380-185271383
  hypo
  cervical vs. melanoma
ggc

SEQ ID NO: 459045 - DNA, 133 bp, Homo sapiens; identical to SEQ ID NO: 453234
  chr3:186079331-186079464
  hypo
  cervical vs. non_cancer,thyroid

SEQ ID NO: 459046 - DNA, 291 bp, Homo sapiens; identical to SEQ ID NO: 453235
  chr3:186079331-186079622
  hypo
  cervical vs. prostate,myeloid_neoplasm,multiple_myeloma, non_cancer,lymphoid_neoplasm,thyroid,breast,sarcoma,ovary

SEQ ID NO: 459047 - DNA, 125 bp, Homo sapiens; identical to SEQ ID NO: 453236
  chr3:186079497-186079622
  hypo
  cervical vs. ovary,multiple_myeloma,prostate,non_cancer, myeloid_neoplasm,uterine,thyroid,lymphoid_neoplasm,sarcoma, breast

SEQ ID NO: 459048 - DNA, 46 bp, Homo sapiens; identical to SEQ ID NO: 454388
  chr3:187455297-187455343
  hypo
  cervical vs. renal

SEQ ID NO: 459049 - DNA, 447 bp, Homo sapiens; identical to SEQ ID NO: 454389
  chr3:187456666-187457113
  hypo
  cervical vs. colorectal,lymphoid_neoplasm

SEQ ID NO: 459050 - DNA, 380 bp, Homo sapiens; identical to SEQ ID NO: 454390
  chr3:187456733-187457113
  hypo
  cervical vs. pancreas_gallbladder,colorectal

SEQ ID NO: 459051 - DNA, 154 bp, Homo sapiens; identical to SEQ ID NO: 455246
  chr3:193922622-193922776
  hypo
  cervical vs. renal

SEQ ID NO: 459052 - DNA, 63 bp, Homo sapiens
  chr3:195093160-195093223
  hypo
  cervical vs. liver_bileduct
cgcctccgacctcagcacctgggagtcccggagacgatcactttagcacaagacctcagcagc

SEQ ID NO: 459053 - DNA, 473 bp, Homo sapiens; identical to SEQ ID NO: 338325
  chr3:195750601-195751074
  hypo
  cervical vs. lymphoid_neoplasm

SEQ ID NO: 459054 - DNA, 18 bp, Homo sapiens
  chr3:195834909-195834927
  hypo
  cervical vs. lymphoid_neoplasm
cgcgcctgtcatcttttt

SEQ ID NO: 459055 - DNA, 93 bp, Homo sapiens; identical to SEQ ID NO: 338331
  chr3:196434743-196434836
  hypo
  cervical vs. upper_gi,lymphoid_neoplasm

SEQ ID NO: 459056 - DNA, 80 bp, Homo sapiens; identical to SEQ ID NO: 353431
  chr3:197330147-197330227
  hypo

SEQ ID NO: 459057 - DNA, 635 bp, Homo sapiens; identical to SEQ ID NO: 453952
  chr4:513070-513705
  hypo
  cervical vs. liver_bileduct,upper_gi,colorectal

SEQ ID NO: 459058 - DNA, 221 bp, Homo sapiens; identical to SEQ ID NO: 353435
  chr4:513734-513955
  hypo
  cervical vs. liver_bileduct,upper_gi,colorectal

SEQ ID NO: 459059 - DNA, 2 bp, Homo sapiens
  chr4:650837-650839
  hypo
cg

SEQ ID NO: 459060 - DNA, 22 bp, Homo sapiens
  chr4:651348-651370
  hypo
ccaggggtcacccaggggtctc

SEQ ID NO: 459061 - DNA, 464 bp, Homo sapiens; identical to SEQ ID NO: 338366
  chr4:1225310-1225774
  hypo
  cervical vs. liver_bileduct,colorectal,upper_gi, pancreas_gallbladder

SEQ ID NO: 459062 - DNA, 50 bp, Homo sapiens; identical to SEQ ID NO: 338406
  chr4:2622600-2622650
  hypo
  cervical vs. liver_bileduct

SEQ ID NO: 459063 - DNA, 115 bp, Homo sapiens; identical to SEQ ID NO: 332040
  chr4:8609457-8609572
  hypo
  cervical vs. pancreas_gallbladder,liver_bileduct, upper_gi,anorectal

SEQ ID NO: 459064 - DNA, 94 bp, Homo sapiens; identical to SEQ ID NO: 458065
  chr4:57687545-57687639
  hypo
  cervical vs. anorectal

SEQ ID NO: 459065 - DNA, 37 bp, Homo sapiens; identical to SEQ ID NO: 338501
  chr4:71566942-71566979
  hypo

SEQ ID NO: 459066 - DNA, 113 bp, Homo sapiens; identical to SEQ ID NO: 338520
  chr4:100555198-100555311
  hypo
  cervical vs. lymphoid_neoplasm

SEQ ID NO: 459067 - DNA, 162 bp, Homo sapiens; identical to SEQ ID NO: 338540
  chr4:128702523-128702685
  hypo

SEQ ID NO: 459068 - DNA, 116 bp, Homo sapiens; identical to SEQ ID NO: 338551
  chr4:152591291-152591407
  hypo
  cervical vs. liver_bileduct

SEQ ID NO: 459069 - DNA, 40 bp, Homo sapiens; identical to SEQ ID NO: 350004
  chr4:156298073-156298113
  hypo
  cervical vs. breast,lung,uterine,ovary

SEQ ID NO: 459070 - DNA, 50 bp, Homo sapiens
  chr5:139637-139687
  hypo
  cervical vs. anorectal
cgctgtgcgcccatgagaaggtggtggtgcagctggcgtccctgcacgga

SEQ ID NO: 459071 - DNA, 249 bp, Homo sapiens
  chr5:139745-139994
  hypo
  cervical vs. anorectal
ctagactggtcttgaaatgcctgtcccggctgggaagaggcacagaggaagtcaccgtccctgaggccatgtatggctgtgtcttcacgggggcgttcctggagtgggtgaaccgggagcggcgccatgtccccctgcaaacctgcttgctgacctcaggcttggccgtccaccgagccccgtggagcgacgtcactgaccctgtctttgtccccagccctggagccatcctgcagagctactccagct

SEQ ID NO: 459072 - DNA, 111 bp, Homo sapiens; identical to SEQ ID NO: 353532
  chr5:140023-140134
  hypo
  cervical vs. anorectal

SEQ ID NO: 459073 - DNA, 331 bp, Homo sapiens; identical to SEQ ID NO: 338589
  chr5:453948-454279
  hypo
  cervical vs. upper_gi,pancreas_gallbladder,colorectal, liver_bileduct

SEQ ID NO: 459074 - DNA, 463 bp, Homo sapiens
  chr5:465360-465823
  hypo
  cervical vs. liver_bileduct,pancreas_gallbladder, upper_gi
cgcttcctgttccggaagctggcgtccgtgagtgtcgcgcaggtccgggctggagaaggcctgtcgctccgcggccctgttcagcctccaccccgggactcgggccagtagatgggagtgtgtcgtgtgtttgtcaggcggggggagcctgggtccaggtcctgcctgaccttgtggttggacacgaatgtccacagaggtagacgcgccggccccgccggcttcccgaggccgcccacagctccctgacggacgcttcccagtctgtcctgcgctgcgaggtgctggctgcctcccacggtctcgccctcaccccagacccctggccctgtcactgagctttcagagtagatcctgaggagtcaggtgaagagggaggttcccagtcaggaaggggctcagccagaatccagctgctcccagcgccgcgggacagccgagggcggctcctcacattgctgct

SEQ ID NO: 459075 - DNA, 258 bp, Homo sapiens; identical to SEQ ID NO: 353535
  chr5:465852-466110
  hypo
  cervical vs. liver_bileduct,pancreas_gallbladder, upper_gi

SEQ ID NO: 459076 - DNA, 368 bp, Homo sapiens; identical to SEQ ID NO: 338593
  chr5:476496-476864
  hypo
  cervical vs. pancreas_gallbladder

SEQ ID NO: 459077 - DNA, 7 bp, Homo sapiens
  chr5:1034298-1034305
  hypo
  cervical vs. anorectal
cgtgttg

SEQ ID NO: 459078 - DNA, 319 bp, Homo sapiens
  chr5:1039295-1039614
  hypo
  cervical vs. lymphoid_neoplasm,colorectal,melanoma, prostate,renal
cggtcccaacactcacggggcgacttctgtgacatgtcagctttggagaaaggtgtgtcctgcaagggtcaggagacggttgcaggccagaaggacgtcccagtgacgtttcggagtcttgcagcctgcaggggtccatgtggttacccggaacaggaaccgtgggggtgctttccgggacccagggggcccgtgccaatgtttctgagtcttggagcctgcaggggtccacgtgtttaccctgaacaggaacatgcgggtgttttccggaatctggcgaggccgcgcggcagttttgcatttacattccttgttttgt

SEQ ID NO: 459079 - DNA, 132 bp, Homo sapiens; identical to SEQ ID NO: 353549
  chr5:1039683-1039815
  hypo
  cervical vs. lymphoid_neoplasm,colorectal,melanoma, prostate,renal

SEQ ID NO: 459080 - DNA, 50 bp, Homo sapiens; identical to SEQ ID NO: 345162
  chr5:49737299-49737349
  hypo
  cervical vs. multiple_myeloma,pancreas_gallbladder, bladder_and_urothelial,lymphoid_neoplasm,prostate

SEQ ID NO: 459081 - DNA, 62 bp, Homo sapiens; identical to SEQ ID NO: 338743
  chr5:74753672-74753734
  hypo
  cervical vs. lymphoid_neoplasm,anorectal,sarcoma

SEQ ID NO: 459082 - DNA, 735 bp, Homo sapiens; identical to SEQ ID NO: 345179
  chr5:87436769-87437504
  hypo
  cervical vs. lung,bladder_and_urothelial,colorectal, uterine,breast,ovary

SEQ ID NO: 459083 - DNA, 4 bp, Homo sapiens
  chr5:88179111-88179115
  hypo
  cervical vs. lung,lymphoid_neoplasm,melanoma,breast, uterine,renal,ovary,bladder_and_urothelial,prostate,sarcoma
gctc

SEQ ID NO: 459084 - DNA, 38 bp, Homo sapiens; identical to SEQ ID NO: 453332
  chr5:124084158-124084196
  hypo
  cervical vs. pancreas_gallbladder,colorectal,upper_gi, liver_bileduct,lymphoid_neoplasm

SEQ ID NO: 459085 - DNA, 60 bp, Homo sapiens; identical to SEQ ID NO: 346734
  chr5:124084302-124084362
  hypo
  cervical vs. pancreas_gallbladder,colorectal,upper_gi, liver_bileduct,lymphoid_neoplasm

SEQ ID NO: 459086 - DNA, 112 bp, Homo sapiens; identical to SEQ ID NO: 453334
  chr5:124084660-124084772
  hypo
  cervical vs. liver_bileduct,upper_gi, pancreas_gallbladder,colorectal,uterine,renal,ovary, bladder_and_urothelial,prostate,myeloid_neoplasm

SEQ ID NO: 459087 - DNA, 64 bp, Homo sapiens; identical to SEQ ID NO: 345193
  chr5:124084977-124085041
  hypo
  cervical vs. liver_bileduct,upper_gi, pancreas_gallbladder,colorectal,uterine,renal,ovary, bladder_and_urothelial,prostate,myeloid_neoplasm

SEQ ID NO: 459088 - DNA, 1 bp, Homo sapiens
  chr5:136835144-136835145
  hypo
  cervical vs. anorectal,melanoma,lung, bladder_and_urothelial,breast,sarcoma
c

SEQ ID NO: 459089 - DNA, 121 bp, Homo sapiens; identical to SEQ ID NO: 455297
  chr5:137912553-137912674
  hypo
  cervical vs. liver_bileduct,pancreas_gallbladder, colorectal,upper_gi,lymphoid_neoplasm

SEQ ID NO: 459090 - DNA, 2 bp, Homo sapiens
  chr5:158526418-158526420
  hypo
  cervical vs. melanoma
cc

SEQ ID NO: 459091 - DNA, 244 bp, Homo sapiens; identical to SEQ ID NO: 458167
  chr5:170171140-170171384
  hypo

SEQ ID NO: 459092 - DNA, 388 bp, Homo sapiens; identical to SEQ ID NO: 350214
  chr5:170171413-170171801
  hypo

SEQ ID NO: 459093 - DNA, 210 bp, Homo sapiens; identical to SEQ ID NO: 458169
  chr5:176057164-176057374
  hypo
  cervical vs. head_and_neck

SEQ ID NO: 459094 - DNA, 195 bp, Homo sapiens; identical to SEQ ID NO: 453986
  chr5:176558657-176558852
  hypo
  cervical vs. liver_bileduct,pancreas_gallbladder,lung, melanoma,breast,bladder_and_urothelial,multiple_myeloma

SEQ ID NO: 459095 - DNA, 144 bp, Homo sapiens; identical to SEQ ID NO: 345871
  chr5:176558908-176559052
  hypo
  cervical vs. liver_bileduct,pancreas_gallbladder,lung, melanoma,breast,bladder_and_urothelial,multiple_myeloma

SEQ ID NO: 459096 - DNA, 77 bp, Homo sapiens; identical to SEQ ID NO: 453988
  chr5:176795049-176795126
  hypo
  cervical vs. lung,breast

SEQ ID NO: 459097 - DNA, 238 bp, Homo sapiens; identical to SEQ ID NO: 348125
  chr5:176795288-176795526
  hypo
  cervical vs. lung,breast

SEQ ID NO: 459098 - DNA, 184 bp, Homo sapiens; identical to SEQ ID NO: 358338
  chr5:178594471-178594655
  hypo
  cervical vs. anorectal

SEQ ID NO: 459099 - DNA, 55 bp, Homo sapiens; identical to SEQ ID NO: 346767
  chr6:393764-393819
  hypo
  cervical vs. lymphoid_neoplasm

SEQ ID NO: 459100 - DNA, 95 bp, Homo sapiens; identical to SEQ ID NO: 200248
  chr6:4775543-4775638
  hypo
  cervical vs. head_and_neck

SEQ ID NO: 459101 - DNA, 305 bp, Homo sapiens; identical to SEQ ID NO: 458177
  chr6:4775640-4775945
  hypo
  cervical vs. head_and_neck

SEQ ID NO: 459102 - DNA, 80 bp, Homo sapiens; identical to SEQ ID NO: 350268
  chr6:6009552-6009632
  hypo
  cervical vs. colorectal

SEQ ID NO: 459103 - DNA, 11 bp, Homo sapiens
  chr6:12287989-12288000
  hypo
  cervical vs. melanoma
cgcgcgcgcgc

SEQ ID NO: 459104 - DNA, 120 bp, Homo sapiens; identical to SEQ ID NO: 338991
  chr6:16322061-16322181
  hypo
  cervical vs. head_and_neck,liver_bileduct

SEQ ID NO: 459105 - DNA, 223 bp, Homo sapiens; identical to SEQ ID NO: 339024
  chr6:36198250-36198473
  hypo
  cervical vs. upper_gi,ovary,lymphoid_neoplasm,breast, melanoma

SEQ ID NO: 459106 - DNA, 157 bp, Homo sapiens; identical to SEQ ID NO: 458194
  chr6:40554364-40554521
  hypo
  cervical vs. bladder_and_urothelial

SEQ ID NO: 459107 - DNA, 316 bp, Homo sapiens; identical to SEQ ID NO: 458195
  chr6:40554860-40555176
  hypo
  cervical vs. bladder_and_urothelial

SEQ ID NO: 459108 - DNA, 373 bp, Homo sapiens; identical to SEQ ID NO: 453380
  chr6:46097250-46097623
  hypo
  cervical vs. pancreas_gallbladder,renal,uterine, colorectal,ovary

SEQ ID NO: 459109 - DNA, 521 bp, Homo sapiens; identical to SEQ ID NO: 345237
  chr6:46097694-46098215
  hypo
  cervical vs. pancreas_gallbladder,renal,uterine, colorectal,ovary

SEQ ID NO: 459110 - DNA, 295 bp, Homo sapiens; identical to SEQ ID NO: 453385
  chr6:69344649-69344944
  hypo
  cervical vs. lung,bladder_and_urothelial

SEQ ID NO: 459111 - DNA, 295 bp, Homo sapiens; identical to SEQ ID NO: 453385
  chr6:69344649-69344944
  hypo
  cervical vs. lung,melanoma

SEQ ID NO: 459112 - DNA, 571 bp, Homo sapiens; identical to SEQ ID NO: 456080
  chr6:71123134-71123705
  hypo
  cervical vs. head_and_neck,upper_gi,pancreas_gallbladder, liver_bileduct

SEQ ID NO: 459113 - DNA, 289 bp, Homo sapiens; identical to SEQ ID NO: 350397
  chr6:71123746-71124035
  hypo
  cervical vs. head_and_neck,upper_gi,pancreas_gallbladder, liver_bileduct

SEQ ID NO: 459114 - DNA, 223 bp, Homo sapiens; identical to SEQ ID NO: 458206
  chr6:71665723-71665946
  hypo
  cervical vs. head_and_neck,lung

SEQ ID NO: 459115 - DNA, 141 bp, Homo sapiens; identical to SEQ ID NO: 458207
  chr6:71665805-71665946
  hypo
  cervical vs. anorectal

SEQ ID NO: 459116 - DNA, 9 bp, Homo sapiens
  chr6:73333099-73333108
  hypo
  cervical vs. head_and_neck,anorectal
ttgtggcgc

SEQ ID NO: 459117 - DNA, 83 bp, Homo sapiens; identical to SEQ ID NO: 350409
  chr6:80657600-80657683
  hypo
  cervical vs. anorectal,head_and_neck

SEQ ID NO: 459118 - DNA, 68 bp, Homo sapiens
  chr6:157193700-157193768
  hypo
  cervical vs. liver_bileduct
cgcctcagcctcccaaagtgctgagccacctcccaaggtgcgagccaccactcctggcctaacccatc

SEQ ID NO: 459119 - DNA, 139 bp, Homo sapiens; identical to SEQ ID NO: 455346
  chr6:158093637-158093776
  hypo

SEQ ID NO: 459120 - DNA, 172 bp, Homo sapiens; identical to SEQ ID NO: 348175
  chr6:158094082-158094254
  hypo

SEQ ID NO: 459121 - DNA, 117 bp, Homo sapiens; identical to SEQ ID NO: 339210
  chr6:170178959-170179076
  hypo
  cervical vs. melanoma

SEQ ID NO: 459122 - DNA, 192 bp, Homo sapiens; identical to SEQ ID NO: 339271
  chr7:987241-987433
  hypo
  cervical vs. head_and_neck

SEQ ID NO: 459123 - DNA, 95 bp, Homo sapiens; identical to SEQ ID NO: 346873
  chr7:1705153-1705248
  hypo
  cervical vs. anorectal,melanoma,head_and_neck,renal, breast,bladder_and_urothelial,uterine,prostate,lung

SEQ ID NO: 459124 - DNA, 903 bp, Homo sapiens
  chr7:4801650-4802553
  hypo
  cervical vs. liver_bileduct
cggcagggcccgcagggagcagagcaagggtagccgtcctgcctggcaggggtgcactgacctccggttccggcttggtggcttagcccctgtataggggacttgaaaaaagcagctgggtcctaaccagaccccagagtaaccctcttcttcctccactccagccctcaccagccctttgcagctccttgcgacccaagcgagttcatccgcgccggtggtggtcacccgggtgtgcgaggtggggcccaaggagccagcagcagccgtcgcggccacggccaccaccaccccagccactgccaccaccgcctctgcctccgcctcttccactggagagcccgaggtcaaaaggtcccgggtggaggagcccagtggtgctgtaaccacaccggctggagtgatcgcagctgccggcccccaggggccaggcaccggggagtgaggtcacctgcaacgcgggggagtgggactcacccagcggcgaccccgaagctggacccggcagctcaggcggccgcacccacagacggaggagaacagcccgcggcggcctgtgggcatcggcggcacctggacacacccagccctttccatttgatcgcctgccttcccgtggtttaagacaaaaacacataaacaagttcagacaactgattgtatgattctgggaattctttgctttcctttccttctccctcggcaccacctcctctccccaggcctccctgtcgggcatggggaggaggttggagctcagcatcttgaggaatgtgtcaagacagcccctccgctccgcgctgcacggccagccgcctttgtccgggaggacagacagaaacgcagcaaggcacacaccaaggctgccggggaggcccgggcaccggacagatgcctgttggg

SEQ ID NO: 459125 - DNA, 468 bp, Homo sapiens; identical to SEQ ID NO: 454008
  chr7:4802085-4802553
  hypo
  cervical vs. liver_bileduct

SEQ ID NO: 459126 - DNA, 430 bp, Homo sapiens; identical to SEQ ID NO: 364288
  chr7:4802589-4803019
  hypo
  cervical vs. liver_bileduct

SEQ ID NO: 459127 - DNA, 108 bp, Homo sapiens; identical to SEQ ID NO: 455377
  chr7:6443719-6443827
  hypo
  cervical vs. melanoma,lymphoid_neoplasm

SEQ ID NO: 459128 - DNA, 101 bp, Homo sapiens; identical to SEQ ID NO: 455378
  chr7:6443856-6443957
  hypo
  cervical vs. melanoma,lymphoid_neoplasm

SEQ ID NO: 459129 - DNA, 61 bp, Homo sapiens; identical to SEQ ID NO: 455379
  chr7:6443990-6444051
  hypo
  cervical vs. melanoma,lymphoid_neoplasm

SEQ ID NO: 459130 - DNA, 57 bp, Homo sapiens
  chr7:7102882-7102939
  hypo
  cervical vs. lymphoid_neoplasm,pancreas_gallbladder
cggggggagtcagtgatattggcaatatcacagggtgtgtacaccacacctgttata

SEQ ID NO: 459131 - DNA, 37 bp, Homo sapiens; identical to SEQ ID NO: 364316
  chr7:7102968-7103005
  hypo
  cervical vs. lymphoid_neoplasm,pancreas_gallbladder

SEQ ID NO: 459132 - DNA, 60 bp, Homo sapiens; identical to SEQ ID NO: 454474
  chr7:19156644-19156704
  hypo
  cervical vs. anorectal

SEQ ID NO: 459133 - DNA, 210 bp, Homo sapiens; identical to SEQ ID NO: 456111
  chr7:23052818-23053028
  hypo
  cervical vs. lung

SEQ ID NO: 459134 - DNA, 595 bp, Homo sapiens; identical to SEQ ID NO: 346883
  chr7:23053080-23053675
  hypo
  cervical vs. lung

SEQ ID NO: 459135 - DNA, 599 bp, Homo sapiens; identical to SEQ ID NO: 456113
  chr7:23053195-23053794
  hypo
  cervical vs. lung

SEQ ID NO: 459136 - DNA, 246 bp, Homo sapiens; identical to SEQ ID NO: 350530
  chr7:23053819-23054065
  hypo
  cervical vs. lung

SEQ ID NO: 459137 - DNA, 6 bp, Homo sapiens
  chr7:23569158-23569164
  hypo
  cervical vs. colorectal,liver_bileduct
cgtgag

SEQ ID NO: 459138 - DNA, 88 bp, Homo sapiens; identical to SEQ ID NO: 339436
  chr7:27651058-27651146
  hypo
  cervical vs. colorectal

SEQ ID NO: 459139 - DNA, 543 bp, Homo sapiens; identical to SEQ ID NO: 364367
  chr7:36894954-36895497
  hypo
  cervical vs. liver_bileduct

SEQ ID NO: 459140 - DNA, 7 bp, Homo sapiens
  chr7:37487365-37487372
  hypo
  cervical vs. lymphoid_neoplasm,uterine,myeloid_neoplasm, non_cancer,thyroid,ovary,multiple_myeloma,breast,prostate,renal
cgctcgc

SEQ ID NO: 459141 - DNA, 168 bp, Homo sapiens; identical to SEQ ID NO: 345273
  chr7:37960958-37961126
  hypo
  cervical vs. liver_bileduct,pancreas_gallbladder,lung, renal,ovary

SEQ ID NO: 459142 - DNA, 27 bp, Homo sapiens
  chr7:39453515-39453542
  hypo
  cervical vs. sarcoma
cgcttcgggaaaataacgagcccctca

SEQ ID NO: 459143 - DNA, 102 bp, Homo sapiens; identical to SEQ ID NO: 345274
  chr7:50344738-50344840
  hypo
  cervical vs. anorectal

SEQ ID NO: 459144 - DNA, 5 bp, Homo sapiens
  chr7:64974264-64974269
  hypo
  cervical vs. breast,sarcoma,uterine
cggcg

SEQ ID NO: 459145 - DNA, 61 bp, Homo sapiens; identical to SEQ ID NO: 458263
  chr7:64974448-64974509
  hypo
  cervical vs. breast,sarcoma,uterine

SEQ ID NO: 459146 - DNA, 5 bp, Homo sapiens
  chr7:64974988-64974993
  hypo
  cervical vs. breast,sarcoma,uterine
tcggc

SEQ ID NO: 459147 - DNA, 98 bp, Homo sapiens
  chr7:66204269-66204367
  hypo
cgtagcacacattaggcacttaggaagaatctgagaaacgaatcagttaatccctactttaccaataatgaataaagactgagaaactcgggccgggc

SEQ ID NO: 459148 - DNA, 90 bp, Homo sapiens; identical to SEQ ID NO: 354000
  chr7:66293278-66293368
  hypo
  cervical vs. melanoma,colorectal

SEQ ID NO: 459149 - DNA, 216 bp, Homo sapiens; identical to SEQ ID NO: 458267
  chr7:87563614-87563830
  hypo
  cervical vs. head_and_neck

SEQ ID NO: 459150 - DNA, 191 bp, Homo sapiens; identical to SEQ ID NO: 458269
  chr7:87563639-87563830
  hypo
  cervical vs. anorectal

SEQ ID NO: 459151 - DNA, 440 bp, Homo sapiens; identical to SEQ ID NO: 458270
  chr7:87563890-87564330
  hypo
  cervical vs. anorectal

SEQ ID NO: 459152 - DNA, 207 bp, Homo sapiens; identical to SEQ ID NO: 350608
  chr7:87564359-87564566
  hypo
  cervical vs. anorectal

SEQ ID NO: 459153 - DNA, 117 bp, Homo sapiens; identical to SEQ ID NO: 454016
  chr7:101475674-101475791
  hypo
  cervical vs. uterine,melanoma,liver_bileduct,colorectal, lymphoid_neoplasm,renal

SEQ ID NO: 459154 - DNA, 236 bp, Homo sapiens; identical to SEQ ID NO: 354028
  chr7:101475858-101476094
  hypo
  cervical vs. uterine,melanoma,liver_bileduct,colorectal, lymphoid_neoplasm,renal

SEQ ID NO: 459155 - DNA, 288 bp, Homo sapiens; identical to SEQ ID NO: 339585
  chr7:101616410-101616698
  hypo
  cervical vs. head_and_neck

SEQ ID NO: 459156 - DNA, 312 bp, Homo sapiens; identical to SEQ ID NO: 457139
  chr7:101652279-101652591
  hypo
  cervical vs. lymphoid_neoplasm,sarcoma,renal,prostate

SEQ ID NO: 459157 - DNA, 67 bp, Homo sapiens
  chr7:104917801-104917868
  hypo
  cervical vs. head_and_neck
cgtgagccactgcgcccggcccaacttggtatttttaagagacttctcgctgaaatgcaaaaggccc

SEQ ID NO: 459158 - DNA, 483 bp, Homo sapiens; identical to SEQ ID NO: 458282
  chr7:113726887-113727370
  hypo
  cervical vs. head_and_neck,anorectal

SEQ ID NO: 459159 - DNA, 3 bp, Homo sapiens
  chr7:128097690-128097693
  hypo
  cervical vs. multiple_myeloma,sarcoma
tgc

SEQ ID NO: 459160 - DNA, 86 bp, Homo sapiens; identical to SEQ ID NO: 457149
  chr7:134918319-134918405
  hypo
  cervical vs. liver_bileduct

SEQ ID NO: 459161 - DNA, 132 bp, Homo sapiens; identical to SEQ ID NO: 345922
  chr7:134918661-134918793
  hypo
  cervical vs. liver_bileduct

SEQ ID NO: 459162 - DNA, 669 bp, Homo sapiens; identical to SEQ ID NO: 333286
  chr7:148036392-148037061
  hypo
  cervical vs. colorectal,breast

SEQ ID NO: 459163 - DNA, 168 bp, Homo sapiens; identical to SEQ ID NO: 333288
  chr7:148523540-148523708
  hypo
  cervical vs. head_and_neck

SEQ ID NO: 459164 - DNA, 10 bp, Homo sapiens
  chr7:148841969-148841979
  hypo
cgtgcccggc

SEQ ID NO: 459165 - DNA, 846 bp, Homo sapiens; identical to SEQ ID NO: 333298
  chr7:150671471-150672317
  hypo
  cervical vs. lung,colorectal

SEQ ID NO: 459166 - DNA, 1 bp, Homo sapiens
  chr7:155581242-155581243
  hypo
  cervical vs. lymphoid_neoplasm,prostate,non_cancer
c

SEQ ID NO: 459167 - DNA, 39 bp, Homo sapiens; identical to SEQ ID NO: 345928
  chr7:155581980-155582019
  hypo
  cervical vs. lymphoid_neoplasm,prostate,non_cancer

SEQ ID NO: 459168 - DNA, 146 bp, Homo sapiens; identical to SEQ ID NO: 339727
  chr7:157151185-157151331
  hypo
  cervical vs. melanoma

SEQ ID NO: 459169 - DNA, 650 bp, Homo sapiens; identical to SEQ ID NO: 348277
  chr7:157202474-157203124
  hypo
  cervical vs. liver_bileduct,melanoma,lymphoid_neoplasm, breast,uterine,prostate,renal,ovary

SEQ ID NO: 459170 - DNA, 3 bp, Homo sapiens
  chr7:157346741-157346744
  hypo
  cervical vs. lymphoid_neoplasm
cgc

SEQ ID NO: 459171 - DNA, 250 bp, Homo sapiens; identical to SEQ ID NO: 339753
  chr7:157589680-157589930
  hypo
  cervical vs. anorectal

SEQ ID NO: 459172 - DNA, 11 bp, Homo sapiens
  chr8:593193-593204
  hypo
  cervical vs. head_and_neck
cgttaaacatt

SEQ ID NO: 459173 - DNA, 32 bp, Homo sapiens; identical to SEQ ID NO: 378478
  chr8:593299-593331
  hypo
  cervical vs. head_and_neck

SEQ ID NO: 459174 - DNA, 125 bp, Homo sapiens
  chr8:8748226-8748351
  hypo
  cervical vs. melanoma
cggagcagttcctggctgggggtggaccgcgccatgggcggggagctttccccctccgccttgccctctccactggtccctaggagcagcttatgcagcagcaaagagggatccctctggaagaa

SEQ ID NO: 459175 - DNA, 85 bp, Homo sapiens
  chr8:8749088-8749173
  hypo
  cervical vs. melanoma
gggacaggaagaagggctggatcacctcataactttcatccccagctaagtcatacacgatgaaccgcaggccccgggaggcatc

SEQ ID NO: 459176 - DNA, 5 bp, Homo sapiens
  chr8:16884178-16884183
  hypo
  cervical vs. lung,melanoma
cggaa

SEQ ID NO: 459177 - DNA, 85 bp, Homo sapiens; identical to SEQ ID NO: 458295
  chr8:16884239-16884324
  hypo
  cervical vs. lung,melanoma

SEQ ID NO: 459178 - DNA, 56 bp, Homo sapiens; identical to SEQ ID NO: 339854
  chr8:21959292-21959348
  hypo
  cervical vs. upper_gi

SEQ ID NO: 459179 - DNA, 197 bp, Homo sapiens; identical to SEQ ID NO: 454027
  chr8:23423722-23423919
  hypo
  cervical vs. liver_bileduct,melanoma,renal, lymphoid_neoplasm,multiple_myeloma,colorectal,myeloid_neoplasm, upper_gi,non_cancer

SEQ ID NO: 459180 - DNA, 106 bp, Homo sapiens; identical to SEQ ID NO: 339867
  chr8:26267649-26267755
  hypo
  cervical vs. lymphoid_neoplasm,melanoma

SEQ ID NO: 459181 - DNA, 267 bp, Homo sapiens; identical to SEQ ID NO: 339878
  chr8:30561955-30562222
  hypo
  cervical vs. liver_bileduct

SEQ ID NO: 459182 - DNA, 231 bp, Homo sapiens; identical to SEQ ID NO: 359092
  chr8:33372206-33372437
  hypo
  cervical vs. pancreas_gallbladder

SEQ ID NO: 459183 - DNA, 606 bp, Homo sapiens; identical to SEQ ID NO: 333447
  chr8:57122656-57123262
  hypo
  cervical vs. pancreas_gallbladder

SEQ ID NO: 459184 - DNA, 200 bp, Homo sapiens; identical to SEQ ID NO: 453449
  chr8:60030947-60031147
  hypo
  cervical vs. ovary,lung,uterine

SEQ ID NO: 459185 - DNA, 115 bp, Homo sapiens; identical to SEQ ID NO: 346983
  chr8:60031791-60031906
  hypo
  cervical vs. ovary,lung,uterine

SEQ ID NO: 459186 - DNA, 350 bp, Homo sapiens; identical to SEQ ID NO: 453451
  chr8:60031791-60032141
  hypo
  cervical vs. uterine,ovary,non_cancer,myeloid_neoplasm, thyroid,lung

SEQ ID NO: 459187 - DNA, 212 bp, Homo sapiens; identical to SEQ ID NO: 345302
  chr8:61193765-61193977
  hypo
  cervical vs. ovary,upper_gi,breast,uterine,colorectal, myeloid_neoplasm,multiple_myeloma,bladder_and_urothelial, prostate,melanoma,pancreas_gallbladder,non_cancer,lung

SEQ ID NO: 459188 - DNA, 293 bp, Homo sapiens; identical to SEQ ID NO: 453456
  chr8:61193765-61194058
  hypo
  cervical vs. breast,uterine,ovary,upper_gi,melanoma, prostate

SEQ ID NO: 459189 - DNA, 436 bp, Homo sapiens; identical to SEQ ID NO: 453464
  chr8:70745324-70745760
  hypo
  cervical vs. uterine,myeloid_neoplasm,thyroid

SEQ ID NO: 459190 - DNA, 146 bp, Homo sapiens; identical to SEQ ID NO: 454043
  chr8:71447942-71448088
  hypo
  cervical vs. melanoma,colorectal,breast, pancreas_gallbladder,renal,sarcoma

SEQ ID NO: 459191 - DNA, 50 bp, Homo sapiens; identical to SEQ ID NO: 354202
  chr8:71448124-71448174
  hypo
  cervical vs. melanoma,colorectal,breast, pancreas_gallbladder,renal,sarcoma

SEQ ID NO: 459192 - DNA, 55 bp, Homo sapiens; identical to SEQ ID NO: 346990
  chr8:72756949-72757004
  hypo
  cervical vs. sarcoma,renal,melanoma,non_cancer

SEQ ID NO: 459193 - DNA, 27 bp, Homo sapiens
  chr8:75896528-75896555
  hypo
  cervical vs. lung
cgggcttgggtctcgggagcccaaagc

SEQ ID NO: 459194 - DNA, 2 bp, Homo sapiens
  chr8:90913515-90913517
  hypo
  cervical vs. multiple_myeloma
cg

SEQ ID NO: 459195 - DNA, 541 bp, Homo sapiens; identical to SEQ ID NO: 454513
  chr8:121823361-121823902
  hypo
  cervical vs. liver_bileduct,anorectal

SEQ ID NO: 459196 - DNA, 27 bp, Homo sapiens
  chr8:121823930-121823957
  hypo
  cervical vs. liver_bileduct,anorectal
ctcgctgctcagaaccagggcgtcctc

SEQ ID NO: 459197 - DNA, 132 bp, Homo sapiens; identical to SEQ ID NO: 340020
  chr8:126042734-126042866
  hypo

SEQ ID NO: 459198 - DNA, 44 bp, Homo sapiens; identical to SEQ ID NO: 454049
  chr8:126044399-126044443
  hypo
  cervical vs. melanoma,colorectal,lymphoid_neoplasm, prostate

SEQ ID NO: 459199 - DNA, 30 bp, Homo sapiens; identical to SEQ ID NO: 454050
  chr8:126044563-126044593
  hypo
  cervical vs. melanoma,colorectal,lymphoid_neoplasm, prostate

SEQ ID NO: 459200 - DNA, 393 bp, Homo sapiens; identical to SEQ ID NO: 458328
  chr8:136469763-136470156
  hypo
  cervical vs. head_and_neck

SEQ ID NO: 459201 - DNA, 206 bp, Homo sapiens; identical to SEQ ID NO: 359234
  chr8:136470313-136470519
  hypo
  cervical vs. head_and_neck

SEQ ID NO: 459202 - DNA, 82 bp, Homo sapiens; identical to SEQ ID NO: 340069
  chr8:141624866-141624948
  hypo

SEQ ID NO: 459203 - DNA, 104 bp, Homo sapiens; identical to SEQ ID NO: 340070
  chr8:141634072-141634176
  hypo
  cervical vs. upper_gi,colorectal

SEQ ID NO: 459204 - DNA, 934 bp, Homo sapiens; identical to SEQ ID NO: 340073
  chr8:142235190-142236124
  hypo
  cervical vs. colorectal,pancreas_gallbladder, lymphoid_neoplasm,ovary

SEQ ID NO: 459205 - DNA, 121 bp, Homo sapiens; identical to SEQ ID NO: 458331
  chr8:143531858-143531979
  hypo
  cervical vs. anorectal

SEQ ID NO: 459206 - DNA, 207 bp, Homo sapiens; identical to SEQ ID NO: 348337
  chr8:144414283-144414490
  hypo
  cervical vs. colorectal

SEQ ID NO: 459207 - DNA, 48 bp, Homo sapiens
  chr8:144589930-144589978
  hypo
  cervical vs. upper_gi
cgccgggcccgccaggagggcagagacagggggaagggcggggcgctg

SEQ ID NO: 459208 - DNA, 220 bp, Homo sapiens; identical to SEQ ID NO: 364903
  chr8:144590082-144590302
  hypo
  cervical vs. upper_gi

SEQ ID NO: 459209 - DNA, 72 bp, Homo sapiens
  chr9:33023515-33023587
  hypo
  cervical vs. pancreas_gallbladder,upper_gi, liver_bileduct,colorectal,lymphoid_neoplasm, bladder_and_urothelial
cggcctgacttacgtgatttttgtattacaaagccctagtacactgcctggtaatattagacgtttattaac

SEQ ID NO: 459210 - DNA, 665 bp, Homo sapiens; identical to SEQ ID NO: 340190
  chr9:34318282-34318947
  hypo
  cervical vs. upper_gi,pancreas_gallbladder, liver_bileduct

SEQ ID NO: 459211 - DNA, 83 bp, Homo sapiens; identical to SEQ ID NO: 340200
  chr9:37118395-37118478
  hypo
  cervical vs. upper_gi,pancreas_gallbladder,melanoma, colorectal,renal,breast,uterine

SEQ ID NO: 459212 - DNA, 61 bp, Homo sapiens
  chr9:37118798-37118859
  hypo
  cervical vs. pancreas_gallbladder,liver_bileduct
cgtcttgctatattaccccggctggtttcgaattctcggccttaagctatcctcccacttc

SEQ ID NO: 459213 - DNA, 163 bp, Homo sapiens; identical to SEQ ID NO: 333671
  chr9:74640002-74640165
  hypo
  cervical vs. liver_bileduct

SEQ ID NO: 459214 - DNA, 370 bp, Homo sapiens; identical to SEQ ID NO: 458345
  chr9:95570986-95571356
  hypo
  cervical vs. anorectal

SEQ ID NO: 459215 - DNA, 55 bp, Homo sapiens; identical to SEQ ID NO: 340242
  chr9:96155825-96155880
  hypo
  cervical vs. upper_gi

SEQ ID NO: 459216 - DNA, 175 bp, Homo sapiens; identical to SEQ ID NO: 458347
  chr9:96717633-96717808
  hypo
  cervical vs. anorectal

SEQ ID NO: 459217 - DNA, 9 bp, Homo sapiens
  chr9:96717840-96717849
  hypo
  cervical vs. anorectal
cgcacgccc

SEQ ID NO: 459218 - DNA, 294 bp, Homo sapiens
  chr9:97867233-97867527
  hypo
  cervical vs. liver_bileduct
cgcgtctggcttatttcgctcagtgtaaagccctctaggttgggccgcattgttgcaggtgtgcattttataagagtacacaatagattctcgaaagcattctcgctgtgctggggccgggcccaaagaggtggcacctggcatgtggcagccagtcgtctttagccctgggccaccctcatgactcggattcgtcttagctgagacaccagcacctgggaggcacagcctgggcccactccacaggactgtcctaccaggatggagacaatctcctggccctggttcttggca

SEQ ID NO: 459219 - DNA, 37 bp, Homo sapiens; identical to SEQ ID NO: 364994
  chr9:97867556-97867593
  hypo
  cervical vs. liver_bileduct

SEQ ID NO: 459220 - DNA, 15 bp, Homo sapiens
  chr9:99984044-99984059
  hypo
  cervical vs. melanoma
ctggccgtgactccc

SEQ ID NO: 459221 - DNA, 41 bp, Homo sapiens; identical to SEQ ID NO: 359367
  chr9:99984107-99984148
  hypo
  cervical vs. melanoma

SEQ ID NO: 459222 - DNA, 150 bp, Homo sapiens; identical to SEQ ID NO: 340263
  chr9:100849678-100849828
  hypo
  cervical vs. liver_bileduct

SEQ ID NO: 459223 - DNA, 188 bp, Homo sapiens; identical to SEQ ID NO: 340276
  chr9:114556879-114557067
  hypo
  cervical vs. liver_bileduct

SEQ ID NO: 459224 - DNA, 46 bp, Homo sapiens; identical to SEQ ID NO: 340278
  chr9:115087431-115087477
  hypo
  cervical vs. head_and_neck

SEQ ID NO: 459225 - DNA, 233 bp, Homo sapiens; identical to SEQ ID NO: 340332
  chr9:130637231-130637464
  hypo
  cervical vs. liver_bileduct

SEQ ID NO: 459226 - DNA, 355 bp, Homo sapiens; identical to SEQ ID NO: 365073
  chr9:132393701-132394056
  hypo
  cervical vs. anorectal

SEQ ID NO: 459227 - DNA, 53 bp, Homo sapiens; identical to SEQ ID NO: 354398
  chr9:134126741-134126794
  hypo

SEQ ID NO: 459228 - DNA, 275 bp, Homo sapiens; identical to SEQ ID NO: 455485
  chr9:138660497-138660772
  hypo
  cervical vs. renal

SEQ ID NO: 459229 - DNA, 3 bp, Homo sapiens
  chr9:138660769-138660772
  hypo
  cervical vs. renal
cgt

SEQ ID NO: 459230 - DNA, 206 bp, Homo sapiens; identical to SEQ ID NO: 454068
  chr9:139698453-139698659
  hypo
  cervical vs. lymphoid_neoplasm

SEQ ID NO: 459231 - DNA, 21 bp, Homo sapiens
  chr9:139699253-139699274
  hypo
  cervical vs. lymphoid_neoplasm
cggagaccctgaaatgtaagc

SEQ ID NO: 459232 - DNA, 10 bp, Homo sapiens
  chrX:8698495-8698505
  hypo
  cervical vs. head_and_neck
cgcgaacgcg

SEQ ID NO: 459233 - DNA, 597 bp, Homo sapiens; identical to SEQ ID NO: 458369
  chrX:9432830-9433427
  hypo
  cervical vs. head_and_neck,upper_gi,lung

SEQ ID NO: 459234 - DNA, 135 bp, Homo sapiens; identical to SEQ ID NO: 458370
  chrX:9433471-9433606
  hypo
  cervical vs. head_and_neck,upper_gi,lung

SEQ ID NO: 459235 - DNA, 296 bp, Homo sapiens; identical to SEQ ID NO: 458371
  chrX:9433131-9433427
  hypo
  cervical vs. head_and_neck,upper_gi,lung,prostate,renal

SEQ ID NO: 459236 - DNA, 242 bp, Homo sapiens; identical to SEQ ID NO: 458372
  chrX:9433471-9433713
  hypo
  cervical vs. head_and_neck,upper_gi,lung,prostate,renal

SEQ ID NO: 459237 - DNA, 80 bp, Homo sapiens; identical to SEQ ID NO: 453513
  chrX:9433633-9433713
  hypo
  cervical vs. head_and_neck,upper_gi,lung

SEQ ID NO: 459238 - DNA, 225 bp, Homo sapiens; identical to SEQ ID NO: 453522
  chrX:16730628-16730853
  hypo
  cervical vs. head_and_neck,upper_gi,lung,renal,prostate, bladder_and_urothelial,sarcoma

SEQ ID NO: 459239 - DNA, 35 bp, Homo sapiens; identical to SEQ ID NO: 345669
  chrX:16730902-16730937
  hypo
  cervical vs. head_and_neck,upper_gi,lung,renal,prostate, bladder_and_urothelial,sarcoma

SEQ ID NO: 459240 - DNA, 187 bp, Homo sapiens; identical to SEQ ID NO: 336699
  chrX:23801086-23801273
  hypo
  cervical vs. head_and_neck,upper_gi

SEQ ID NO: 459241 - DNA, 863 bp, Homo sapiens; identical to SEQ ID NO: 336706
  chrX:39931611-39932474
  hypo
  cervical vs. head_and_neck

SEQ ID NO: 459242 - DNA, 995 bp, Homo sapiens; identical to SEQ ID NO: 458399
  chrX:39955753-39956748
  hypo
  cervical vs. head_and_neck

SEQ ID NO: 459243 - DNA, 604 bp, Homo sapiens; identical to SEQ ID NO: 458400
  chrX:39956253-39956857
  hypo
  cervical vs. head_and_neck

SEQ ID NO: 459244 - DNA, 104 bp, Homo sapiens; identical to SEQ ID NO: 456211
  chrX:39956753-39956857
  hypo
  cervical vs. head_and_neck

SEQ ID NO: 459245 - DNA, 90 bp, Homo sapiens; identical to SEQ ID NO: 456218
  chrX:40035057-40035147
  hypo
  cervical vs. head_and_neck,upper_gi

SEQ ID NO: 459246 - DNA, 599 bp, Homo sapiens; identical to SEQ ID NO: 456219
  chrX:40035057-40035656
  hypo
  cervical vs. head_and_neck,upper_gi

SEQ ID NO: 459247 - DNA, 564 bp, Homo sapiens; identical to SEQ ID NO: 456220
  chrX:40035161-40035725
  hypo
  cervical vs. upper_gi,head_and_neck

SEQ ID NO: 459248 - DNA, 721 bp, Homo sapiens; identical to SEQ ID NO: 347751
  chrX:40035852-40036573
  hypo
  cervical vs. upper_gi,head_and_neck

SEQ ID NO: 459249 - DNA, 264 bp, Homo sapiens; identical to SEQ ID NO: 336722
  chrX:41112874-41113138
  hypo
  cervical vs. head_and_neck,upper_gi,lung, bladder_and_urothelial,prostate,colorectal,renal

SEQ ID NO: 459250 - DNA, 85 bp, Homo sapiens; identical to SEQ ID NO: 458438
  chrX:123094093-123094178
  hypo
  cervical vs. upper_gi

SEQ ID NO: 459251 - DNA, 87 bp, Homo sapiens; identical to SEQ ID NO: 362175
  chrX:123094335-123094422
  hypo
  cervical vs. upper_gi

SEQ ID NO: 459252 - DNA, 116 bp, Homo sapiens; identical to SEQ ID NO: 336732
  chrX:129171389-129171505
  hypo
  cervical vs. head_and_neck

SEQ ID NO: 459253 - DNA, 158 bp, Homo sapiens; identical to SEQ ID NO: 375448
  chrX:133507338-133507496
  hypo
  cervical vs. upper_gi

SEQ ID NO: 459254 - DNA, 179 bp, Homo sapiens; identical to SEQ ID NO: 454087
  chr1:3663338-3663517
  hyper
  colorectal vs. liver_bileduct,sarcoma,ovary, pancreas_gallbladder,renal,cervical,prostate,lung,uterine, breast,multiple_myeloma,non_cancer,thyroid

SEQ ID NO: 459255 - DNA, 101 bp, Homo sapiens; identical to SEQ ID NO: 346306
  chr1:3663983-3664084
  hyper
  colorectal vs. liver_bileduct,sarcoma,ovary, pancreas_gallbladder,renal,cervical,prostate,lung,uterine, breast,multiple_myeloma,non_cancer,thyroid

SEQ ID NO: 459256 - DNA, 426 bp, Homo sapiens; identical to SEQ ID NO: 457245
  chr1:9711649-9712075
  hyper
  colorectal vs. lymphoid_neoplasm,prostate,head_and_neck, sarcoma,bladder_and_urothelial,multiple_myeloma,lung,uterine, non_cancer,myeloid_neoplasm,thyroid,breast,ovary

SEQ ID NO: 459257 - DNA, 64 bp, Homo sapiens; identical to SEQ ID NO: 346318
  chr1:12123950-12124014
  hyper
  colorectal vs. lymphoid_neoplasm,thyroid,non_cancer, multiple_myeloma,ovary,uterine,prostate

SEQ ID NO: 459258 - DNA, 87 bp, Homo sapiens; identical to SEQ ID NO: 349178
  chr1:13910927-13911014
  hyper
  colorectal vs. anorectal

SEQ ID NO: 459259 - DNA, 169 bp, Homo sapiens; identical to SEQ ID NO: 349179
  chr1:14926204-14926373
  hyper
  colorectal vs. anorectal,lung,breast,cervical, bladder_and_urothelial,head_and_neck,renal,sarcoma,uterine, prostate,multiple_myeloma,myeloid_neoplasm,ovary

SEQ ID NO: 459260 - DNA, 136 bp, Homo sapiens
  chr1:16085153-16085289
  hyper
  colorectal vs. head_and_neck,anorectal,lung,ovary, cervical,breast
cgcggggcgggaatcccgcgccccctccccccgagcctcaccttttatggtaaagcggcgcggggcggcggggcggagggagccgagggggcggggagggcggacgggcggaggggacgggaggcccagcggctcc

SEQ ID NO: 459261 - DNA, 179 bp, Homo sapiens
  chr1:33219389-33219568
  hyper
  colorectal vs. upper_gi,pancreas_gallbladder,lung
cgcctgccccacctggactggccaggccttcccctgtgcgccctaggctgggcggctcagccggtctcccaggtcccgggaggggcggagccgacgggatgcgcgccaggccccgcccctcctccgggcccgcccccggcctggccattggccgcagagctcgggggcgtggtcgagct

SEQ ID NO: 459262 - DNA, 307 bp, Homo sapiens; identical to SEQ ID NO: 344950
  chr1:33219596-33219903
  hyper
  colorectal vs. upper_gi,pancreas_gallbladder,lung

SEQ ID NO: 459263 - DNA, 158 bp, Homo sapiens
  chr1:34629913-34630071
  hyper
cctcctagctccgagcgccgagggaggggtagcatttgaggagggggatggcggccgcagtctgcagtcggttccagagggggcaccggtttcaattggagaaaatgggcgggggcagggaagggcagaccttgcagacgcagaaatggggagggggc

SEQ ID NO: 459264 - DNA, 27 bp, Homo sapiens
  chr1:35394588-35394615
  hyper
  colorectal vs. breast,bladder_and_urothelial,ovary, prostate,lung,sarcoma,lymphoid_neoplasm,uterine
cggcacacacaatcgcccacagaccca

SEQ ID NO: 459265 - DNA, 253 bp, Homo sapiens; identical to SEQ ID NO: 457261
  chr1:35394790-35395043
  hyper
  colorectal vs. breast,bladder_and_urothelial,ovary, prostate,lung,sarcoma,lymphoid_neoplasm,uterine

SEQ ID NO: 459266 - DNA, 121 bp, Homo sapiens
  chr1:35394922-35395043
  hyper
  colorectal vs. ovary,prostate,breast,uterine, myeloid_neoplasm,lung,renal,anorectal,non_cancer,sarcoma, thyroid,bladder_and_urothelial,melanoma,head_and_neck
cggggccgggagccgagcgccggagcccggggcgtgggcggcgccggggccgcagccgggccgtgcctggggggcgctgcagagggagccgcgagcgcggccccgtccccactcctccccg

SEQ ID NO: 459267 - DNA, 113 bp, Homo sapiens; identical to SEQ ID NO: 346333
  chr1:35396131-35396244
  hyper
  colorectal vs. uterine,prostate,myeloid_neoplasm,ovary, breast,non_cancer,lung,renal,sarcoma,anorectal,thyroid

SEQ ID NO: 459268 - DNA, 1 bp, Homo sapiens
  chr1:41284752-41284753
  hyper
  colorectal vs. multiple_myeloma
c

SEQ ID NO: 459269 - DNA, 160 bp, Homo sapiens
  chr1:48190715-48190875
  hyper
  colorectal vs. upper_gi
cggttcccctgggccaagccgagtcctccccagcacaacagcgcggcccctcggcctccgcttaacctgggcgcgcgggctggctgggccggggccattatgcgggcgcatggccggccgcgccggggcgcagagcaaacttaaccttcatttgggagcg

SEQ ID NO: 459270 - DNA, 48 bp, Homo sapiens; identical to SEQ ID NO: 349234
  chr1:48191178-48191226
  hyper
  colorectal vs. upper_gi

SEQ ID NO: 459271 - DNA, 109 bp, Homo sapiens
  chr1:49242191-49242300
  hyper
  colorectal vs. breast,uterine,bladder_and_urothelial, sarcoma,liver_bileduct,prostate,lung,ovary,multiple_myeloma, lymphoid_neoplasm,non_cancer,renal,myeloid_neoplasm,thyroid
cggtcccctccgcccgggcccccggcccctcccggggtcccagcccccgcccgggtcccaccgtccctccccgcccgcttgctcacctgccagcgccaggatctgggcc

SEQ ID NO: 459272 - DNA, 107 bp, Homo sapiens; identical to SEQ ID NO: 349236
  chr1:49243013-49243120
  hyper
  colorectal vs. breast,uterine,bladder_and_urothelial, sarcoma,liver_bileduct,prostate,lung,ovary,multiple_myeloma, lymphoid_neoplasm,non_cancer,renal,myeloid_neoplasm,thyroid

SEQ ID NO: 459273 - DNA, 193 bp, Homo sapiens
  chr1:52081937-52082130
  hyper
  colorectal vs. liver_bileduct,pancreas_gallbladder, cervical,anorectal,head_and_neck,lymphoid_neoplasm
cgagccaccgcgcccagccaataaatgcttaaattgcccctgtaggctgttagtgatctatccctacttctttgaccttatctcccaccactttctccctggctcactgctccacgcacactgacctccttgttgatccctcaagatgccacgctcactcctaacatttggtctttgcatttgctattccttc

SEQ ID NO: 459274 - DNA, 145 bp, Homo sapiens; identical to SEQ ID NO: 349247
  chr1:59042557-59042702
  hyper
  colorectal vs. upper_gi,bladder_and_urothelial

SEQ ID NO: 459275 - DNA, 434 bp, Homo sapiens; identical to SEQ ID NO: 356775
  chr1:59042557-59042991
  hyper
  colorectal vs. upper_gi

SEQ ID NO: 459276 - DNA, 289 bp, Homo sapiens; identical to SEQ ID NO: 452731
  chr1:101702081-101702370
  hyper
  colorectal vs. sarcoma,uterine,myeloid_neoplasm, non_cancer,thyroid,prostate,bladder_and_urothelial,ovary

SEQ ID NO: 459277 - DNA, 152 bp, Homo sapiens; identical to SEQ ID NO: 452732
  chr1:101702796-101702948
  hyper
  colorectal vs. sarcoma,uterine,myeloid_neoplasm, non_cancer,thyroid,prostate,bladder_and_urothelial,ovary

SEQ ID NO: 459278 - DNA, 393 bp, Homo sapiens; identical to SEQ ID NO: 452733
  chr1:101702796-101703189
  hyper
  colorectal vs. sarcoma,uterine,prostate,myeloid_neoplasm, non_cancer,thyroid,bladder_and_urothelial,ovary,renal

SEQ ID NO: 459279 - DNA, 49 bp, Homo sapiens; identical to SEQ ID NO: 349294
  chr1:107684495-107684544
  hyper
  colorectal vs. breast,prostate

SEQ ID NO: 459280 - DNA, 306 bp, Homo sapiens; identical to SEQ ID NO: 452735
  chr1:108506290-108506596
  hyper
  colorectal vs. multiple_myeloma,myeloid_neoplasm, non_cancer,thyroid,lymphoid_neoplasm,uterine

SEQ ID NO: 459281 - DNA, 365 bp, Homo sapiens
  chr1:110753530-110753895
  hyper
  colorectal vs. upper_gi,head_and_neck,cervical, multiple_myeloma,thyroid,ovary,pancreas_gallbladder,renal, non_cancer
cgccgccgccgcctcgtgttgaccgcaagcagcccgggcccacggagctccggctgccgtgagagtgtcggcctggccccggcagccgctcggaggacttgttgctgctgcgctgccgccgctgcggggaagccggctattccggggcttggtgcggtcttggagccggagggtggcccgtgtgagcgcgagcgccccggaccttcgcggtgcgcgtggactgtgcgcttcctcgtctttggtcggggtgaaggcgggggcgtgtccccggcccagagcgtttgtgtgtcccgtcgtagcgggggaccgcgtgtgtgcttgcttctacttccccgggtcctccctctctgcgcctccctctctcc

SEQ ID NO: 459282 - DNA, 47 bp, Homo sapiens
  chr1:110753957-110754004
  hyper
  colorectal vs. upper_gi,head_and_neck,cervical, multiple_myeloma,thyroid,ovary,pancreas_gallbladder,renal, non_cancer
cgtcctagggggataggcaggggcaagcccaagccgcagagggggcc

SEQ ID NO: 459283 - DNA, 16 bp, Homo sapiens
  chr1:110754101-110754117
  hyper
  colorectal vs. upper_gi,head_and_neck,cervical, multiple_myeloma,thyroid,ovary,pancreas_gallbladder,renal, non_cancer
ggagccccgcagcgct

SEQ ID NO: 459284 - DNA, 47 bp, Homo sapiens; identical to SEQ ID NO: 459282
  chr1:110753957-110754004
  hyper
  colorectal vs. upper_gi

SEQ ID NO: 459285 - DNA, 16 bp, Homo sapiens
  chr1:110754101-110754117
  hyper
  colorectal vs. upper_gi
ggagccccgcagcgct

SEQ ID NO: 459286 - DNA, 448 bp, Homo sapiens; identical to SEQ ID NO: 457286
  chr1:154297543-154297991
  hyper
  colorectal vs. lung,melanoma,lymphoid_neoplasm, multiple_myeloma,sarcoma,ovary,uterine,non_cancer,prostate, myeloid_neoplasm,breast,bladder_and_urothelial,thyroid, head_and_neck,pancreas_gallbladder,renal

SEQ ID NO: 459287 - DNA, 73 bp, Homo sapiens; identical to SEQ ID NO: 457287
  chr1:154298038-154298111
  hyper
  colorectal vs. lung,melanoma,lymphoid_neoplasm, multiple_myeloma,sarcoma,ovary,uterine,non_cancer,prostate, myeloid_neoplasm,breast,bladder_and_urothelial,thyroid, head_and_neck,pancreas_gallbladder,renal

SEQ ID NO: 459288 - DNA, 48 bp, Homo sapiens; identical to SEQ ID NO: 369277
  chr1:156627098-156627146
  hyper
  colorectal vs. prostate,multiple_myeloma

SEQ ID NO: 459289 - DNA, 8 bp, Homo sapiens
  chr1:161510039-161510047
  hyper
  colorectal vs. upper_gi
gcgcaatc

SEQ ID NO: 459290 - DNA, 29 bp, Homo sapiens
  chr1:208084683-208084712
  hyper
  colorectal vs. pancreas_gallbladder,breast, myeloid_neoplasm,uterine,thyroid,ovary,multiple_myeloma,sarcoma, non_cancer,prostate
tggaggtttgttcgggctccagatgcctc

SEQ ID NO: 459291 - DNA, 1 bp, Homo sapiens
  chr1:218520063-218520064
  hyper
  colorectal vs. pancreas_gallbladder
c

SEQ ID NO: 459292 - DNA, 91 bp, Homo sapiens; identical to SEQ ID NO: 357010
  chr1:220102055-220102146
  hyper
  colorectal vs. liver_bileduct

SEQ ID NO: 459293 - DNA, 33 bp, Homo sapiens; identical to SEQ ID NO: 357019
  chr1:224528889-224528922
  hyper
  colorectal vs. upper_gi

SEQ ID NO: 459294 - DNA, 68 bp, Homo sapiens
  chr1:226814279-226814347
  hyper
  colorectal vs. upper_gi,head_and_neck
cgctgagctcctgacccgtcttccttttcttcgggcaccttgtaatgcacccgaccgtccagaagggg

SEQ ID NO: 459295 - DNA, 11 bp, Homo sapiens
  chr1:226814408-226814419
  hyper
  colorectal vs. upper_gi,head_and_neck
cactccagcac

SEQ ID NO: 459296 - DNA, 35 bp, Homo sapiens; identical to SEQ ID NO: 454106
  chr1:226924738-226924773
  hyper
  colorectal vs. multiple_myeloma,prostate, lymphoid_neoplasm,non_cancer,myeloid_neoplasm

SEQ ID NO: 459297 - DNA, 452 bp, Homo sapiens; identical to SEQ ID NO: 344993
  chr1:226925659-226926111
  hyper
  colorectal vs. lymphoid_neoplasm,prostate, multiple_myeloma

SEQ ID NO: 459298 - DNA, 96 bp, Homo sapiens; identical to SEQ ID NO: 345341
  chr10:1780056-1780152
  hyper
  colorectal vs. anorectal,liver_bileduct,melanoma, prostate,head_and_neck,non_cancer,breast

SEQ ID NO: 459299 - DNA, 57 bp, Homo sapiens
  chr10:7449898-7449955
  hyper
  colorectal vs. renal,myeloid_neoplasm,thyroid,breast, ovary,prostate,non_cancer
gtggtcggccgggctcctgcccagtctcggctcctccctcctccccaccagaaggaa

SEQ ID NO: 459300 - DNA, 61 bp, Homo sapiens
  chr10:7453036-7453097
  hyper
  colorectal vs. renal,breast,melanoma,prostate, multiple_myeloma,ovary,bladder_and_urothelial,lung,anorectal, lymphoid_neoplasm,myeloid_neoplasm,non_cancer,thyroid,sarcoma, cervical,liver_bileduct
tttttttttttttttttttaagattttgtgtgtgtgtgtatgtgtgtgcgtgcgcgtgcag

SEQ ID NO: 459301 - DNA, 61 bp, Homo sapiens; identical to SEQ ID NO: 459300
  chr10:7453036-7453097
  hyper
  colorectal vs. melanoma,breast,prostate,renal, multiple_myeloma,thyroid,bladder_and_urothelial,ovary,lung, anorectal,non_cancer,myeloid_neoplasm,cervical,sarcoma, lymphoid_neoplasm,liver_bileduct

SEQ ID NO: 459302 - DNA, 229 bp, Homo sapiens
  chr10:7454077-7454306
  hyper
  colorectal vs. breast
tttatggttgccaaagggggtaaaattacccagtcccccaaatctgtgtcccatgaatccctctcatagtacccctctccagggggccaagaggtcctccaggtccccgtgggttcgcagctccacccgcccttcctcgccctgcatccctaaggagaggtgtccgctctgaagggctaggggccagccatggagtgaggggaccggggctgaccacgcgcggcacaga

SEQ ID NO: 459303 - DNA, 101 bp, Homo sapiens; identical to SEQ ID NO: 457323
  chr10:11207330-11207431
  hyper
  colorectal vs. melanoma,sarcoma

SEQ ID NO: 459304 - DNA, 156 bp, Homo sapiens
  chr10:11207724-11207880
  hyper
  colorectal vs. melanoma,sarcoma
caggaggaagggcgggtaggcaggagggctggaagcagccggtgctggcggcccctgtgctccaggggctgctcccgactcctccccgcacccccgcccgcctgcccgccgggacaggttggaggcgggagagagggaccgaggcagggcgggagc

SEQ ID NO: 459305 - DNA, 209 bp, Homo sapiens; identical to SEQ ID NO: 452758
  chr10:17270445-17270654
  hyper
  colorectal vs. melanoma,uterine,sarcoma,renal,ovary, non_cancer,myeloid_neoplasm,multiple_myeloma,thyroid

SEQ ID NO: 459306 - DNA, 116 bp, Homo sapiens; identical to SEQ ID NO: 345346
  chr10:17272233-17272349
  hyper
  colorectal vs. sarcoma,melanoma,uterine,multiple_myeloma, myeloid_neoplasm,renal,ovary,thyroid,non_cancer

SEQ ID NO: 459307 - DNA, 63 bp, Homo sapiens; identical to SEQ ID NO: 454116
  chr10:22540645-22540708
  hyper
  colorectal vs. anorectal,lymphoid_neoplasm,sarcoma,ovary, non_cancer,myeloid_neoplasm,thyroid

SEQ ID NO: 459308 - DNA, 21 bp, Homo sapiens
  chr10:23001886-23001907
  hyper
  colorectal vs. pancreas_gallbladder,upper_gi
cgaaaaaccagcatggttttc

SEQ ID NO: 459309 - DNA, 215 bp, Homo sapiens
  chr10:23001984-23002199
  hyper
  colorectal vs. pancreas_gallbladder,upper_gi
ccccagatgctaagtgactgcagtggctaaggtcatggtcaaaattcacagctcgtttaaactttcctggctgagccaacagctccgatcatgtttcctgatcctatcgaagtggattaaaactgcaggagtttctcgctgtcagatcagcaggaggctatttcagaccctcgaaccgcagtccgcatagcccgcagcggcgcatcctccaatcc

SEQ ID NO: 459310 - DNA, 286 bp, Homo sapiens; identical to SEQ ID NO: 351010
  chr10:23002228-23002514
  hyper
  colorectal vs. pancreas_gallbladder,upper_gi

SEQ ID NO: 459311 - DNA, 91 bp, Homo sapiens
  chr10:26726986-26727077
  hyper
  colorectal vs. lymphoid_neoplasm
cggccaactgagcgtggttaaacgtggggagggaggagggtgaggttaccaacctgatggttgagaaagggcctccgcccagcgcgccctt

SEQ ID NO: 459312 - DNA, 65 bp, Homo sapiens; identical to SEQ ID NO: 351013
  chr10:26728108-26728173
  hyper
  colorectal vs. lymphoid_neoplasm

SEQ ID NO: 459313 - DNA, 791 bp, Homo sapiens; identical to SEQ ID NO: 457329
  chr10:31607954-31608745
  hyper
  colorectal vs. liver_bileduct,bladder_and_urothelial, lymphoid_neoplasm,head_and_neck

SEQ ID NO: 459314 - DNA, 467 bp, Homo sapiens; identical to SEQ ID NO: 457330
  chr10:31608278-31608745
  hyper
  colorectal vs. liver_bileduct,lymphoid_neoplasm,renal, head_and_neck,anorectal,bladder_and_urothelial,uterine, multiple_myeloma,sarcoma,lung,prostate,non_cancer, myeloid_neoplasm,thyroid,ovary,cervical,breast

SEQ ID NO: 459315 - DNA, 253 bp, Homo sapiens; identical to SEQ ID NO: 455585
  chr10:31609416-31609669
  hyper
  colorectal vs. renal,liver_bileduct,anorectal, lymphoid_neoplasm,multiple_myeloma,head_and_neck,sarcoma, uterine,bladder_and_urothelial,prostate,non_cancer,ovary, myeloid_neoplasm,thyroid,cervical,lung

SEQ ID NO: 459316 - DNA, 253 bp, Homo sapiens; identical to SEQ ID NO: 455585
  chr10:31609416-31609669
  hyper
  colorectal vs. lymphoid_neoplasm,renal,multiple_myeloma, sarcoma,uterine

SEQ ID NO: 459317 - DNA, 202 bp, Homo sapiens
  chr10:49731801-49732003
  hyper
  colorectal vs. uterine
cctggagggcggaccctcccctccgctctacccactcccgcccaggggccggaccccacccccactcccacatggggaccgaggagccccaggatgcgcccccgcgccccgagtgaaggggagcctccccttccaaagttaggagactcagaggagcagcagccgcacctgagccctttccaaagctgaggcaggtgcgggc

SEQ ID NO: 459318 - DNA, 60 bp, Homo sapiens
  chr10:50323163-50323223
  hyper
  colorectal vs. head_and_neck
cgctcctgctgcatctcccctcggggcctgccgctgggaagatctcggctgctgcgagag

SEQ ID NO: 459319 - DNA, 73 bp, Homo sapiens; identical to SEQ ID NO: 347093
  chr10:64578688-64578761
  hyper
  colorectal vs. cervical,anorectal,head_and_neck,breast, bladder_and_urothelial,thyroid,multiple_myeloma,ovary, non_cancer,prostate,renal,uterine

SEQ ID NO: 459320 - DNA, 103 bp, Homo sapiens; identical to SEQ ID NO: 452774
  chr10:83634159-83634262
  hyper
  colorectal vs. pancreas_gallbladder, bladder_and_urothelial

SEQ ID NO: 459321 - DNA, 47 bp, Homo sapiens; identical to SEQ ID NO: 359614
  chr10:83634499-83634546
  hyper
  colorectal vs. pancreas_gallbladder, bladder_and_urothelial

SEQ ID NO: 459322 - DNA, 1 bp, Homo sapiens
  chr10:92616995-92616996
  hyper
  colorectal vs. bladder_and_urothelial
c

SEQ ID NO: 459323 - DNA, 82 bp, Homo sapiens
  chr10:92617016-92617098
  hyper
  colorectal vs. bladder_and_urothelial
cgaagggcatgaccgccacagccaccgagaggtcggccagcgccagggacacgatcaggtagttggagggctggcggagctt

SEQ ID NO: 459324 - DNA, 278 bp, Homo sapiens
  chr10:92617539-92617817
  hyper
  colorectal vs. bladder_and_urothelial
gcccgcgccgaccgctggggggcgcctggctctgtctcggagccccgcactccccggacccccggccgctgcgggtaacgcggcagcgcggcctcacggggactccctgcgggaggcgcttcggcccccgacggacgcctgggacgcgcggagtcgagggagctcgggctgggctccgctggcagctccacagttcgcagcagcagctcggctgcgccgagagcgcccgggcggcagcggcagaagttgcggagtgcgccccgcccctcgcgcccgcc

SEQ ID NO: 459325 - DNA, 179 bp, Homo sapiens
  chr10:94450726-94450905
  hyper
  colorectal vs. upper_gi,cervical,liver_bileduct, pancreas_gallbladder,anorectal
gttcatttcctctgtgtgggatgtgactttatggcagctaaaataaccagttgcttcctattttttttcgaggctgttttgcaccagtctgaagcctgacgcaagcaaaatctcgaaaaaacaatgctagctttcaaagcgttgaggtgcaggcctgcagacggacggacggaccgacc

SEQ ID NO: 459326 - DNA, 644 bp, Homo sapiens
  chr10:94450726-94451370
  hyper
  colorectal vs. upper_gi,liver_bileduct,cervical
gttcatttcctctgtgtgggatgtgactttatggcagctaaaataaccagttgcttcctattttttttcgaggctgttttgcaccagtctgaagcctgacgcaagcaaaatctcgaaaaaacaatgctagctttcaaagcgttgaggtgcaggcctgcagacggacggacggaccgaccgacactactttgggagtaggaagcagcagctcctggtcgccagttaggaagggaagcagggacacatagggcatatattccagaacttcggggcttgtcccctcaatgtgcggcctaacaaataagccgcccgtggtccgcgctgtgggtgacccttggcgccttcgaggtctggagccctagggtaaataaggaaacggggcgcctctagagttttaaatgaactctgttattggaagcttcagtagggaccctgaaaacaattaacgtcttaattagcattttaatgtctccattattacggcgcgggctctagctcagccctttaccttaccttctcaccgttaacaggggagggggattgtatttttagttcatctttttatgtttttgagttgttatcctgtctgtctgattccagcctcgagggtttgatgatgcggcccgagcctggctgtggtcgcc

SEQ ID NO: 459327 - DNA, 20 bp, Homo sapiens
  chr10:100993468-100993488
  hyper
  colorectal vs. thyroid,myeloid_neoplasm,multiple_myeloma, non_cancer,breast
cgtggctaccccagggtctt

SEQ ID NO: 459328 - DNA, 124 bp, Homo sapiens; identical to SEQ ID NO: 345364
  chr10:100994695-100994819
  hyper
  colorectal vs. myeloid_neoplasm,thyroid,non_cancer

SEQ ID NO: 459329 - DNA, 57 bp, Homo sapiens
  chr10:101089476-101089533
  hyper
  colorectal vs. pancreas_gallbladder
gcccccgggcggtggcggcgtggcccccagcgcggtccccactcgccccccgggacc

SEQ ID NO: 459330 - DNA, 237 bp, Homo sapiens
  chr10:101089565-101089802
  hyper
  colorectal vs. pancreas_gallbladder
cggacgtggaagtcctggggcccttgcgtcccgggggcgtggcaggctcggccctggtccaggtgcgagtgcgggagctgcgcaagggcgaagcggagcggggcggcgcgggcggtggcgggaagctcttttcactctgcgcctgggatgggcgcgcgtggcaccaccacggcgccgccggcggcttcctgctgcgcgttcgcccgcggttgtacggcccaggcggggacctgctgc

SEQ ID NO: 459331 - DNA, 57 bp, Homo sapiens; identical to SEQ ID NO: 459329
  chr10:101089476-101089533
  hyper
  colorectal vs. pancreas_gallbladder

SEQ ID NO: 459332 - DNA, 237 bp, Homo sapiens; identical to SEQ ID NO: 459330
  chr10:101089565-101089802
  hyper
  colorectal vs. pancreas_gallbladder

SEQ ID NO: 459333 - DNA, 212 bp, Homo sapiens
  chr10:103535916-103536128
  hyper
  colorectal vs. bladder_and_urothelial,anorectal
ggtggggaggtgggagggcggggaggggtgggggcggggggcgccgcaccgggcgcgaggggggagcgcggggcgggcggcgggagcccgcagcccccggctgggaactggggcctggatgcagcccggggcgggggcggggcggccggggaggggcggccgacgggttcgggattgagggtctgggctaggggaggggtctggggacccgc

SEQ ID NO: 459334 - DNA, 240 bp, Homo sapiens; identical to SEQ ID NO: 454122
  chr10:118891774-118892014
  hyper
  colorectal vs. multiple_myeloma

SEQ ID NO: 459335 - DNA, 132 bp, Homo sapiens
  chr10:121301363-121301495
  hyper
  colorectal vs. upper_gi,cervical,breast,uterine, head_and_neck,prostate
cgcacccaaaggcctgcacaggtcgtagctattgtgatgagcaaaagggtggaaggaccggaatcaagggcacggctccaccttcaccgtggggtctttggcctatcaagttgcccgagatcgtggctcagg

SEQ ID NO: 459336 - DNA, 323 bp, Homo sapiens
  chr10:121301911-121302234
  hyper
  colorectal vs. upper_gi,cervical,breast,uterine, head_and_neck,prostate
agctctgcgctcccgtcgcggctgggaccgcgaaggtgcggtacccagcggggagaggtggtgcggtcggccggggctccagtctgggaggtaccaccgagccgcgcccgagcacaagagggagggcaggaggccgggcgggcgaaacggcgccccgaccccgagcccgcgggcccccgaagccgcttacctgacggcggccgcttcctgctcagccggctcacggcgcggttgaacatcgccgcgggcgcccgaggaggaagaaggagcagcccggcggcgcggcggctgagccggaggaaggcgaggaggaggaggagggc

SEQ ID NO: 459337 - DNA, 5 bp, Homo sapiens
  chr10:125851161-125851166
  hyper
  colorectal vs. pancreas_gallbladder,anorectal, head_and_neck,ovary,upper_gi,breast,uterine,multiple_myeloma, cervical,myeloid_neoplasm,non_cancer,renal, bladder_and_urothelial,thyroid,lung
cggag

SEQ ID NO: 459338 - DNA, 82 bp, Homo sapiens
  chr10:125851929-125852011
  hyper
  colorectal vs. pancreas_gallbladder,anorectal, head_and_neck,ovary,upper_gi,breast,uterine,multiple_myeloma, cervical,myeloid_neoplasm,non_cancer,renal, bladder_and_urothelial,thyroid,lung
cacgccgcctcccgagacgcggcggggcgcagggaggggacagcagtgggggcggggcggggaggaggaaggaggagggggc

SEQ ID NO: 459339 - DNA, 204 bp, Homo sapiens
  chr10:125851929-125852133
  hyper
  colorectal vs. upper_gi,head_and_neck, pancreas_gallbladder,lung,anorectal,breast,ovary,uterine,renal, cervical,multiple_myeloma,bladder_and_urothelial, myeloid_neoplasm,non_cancer,thyroid,sarcoma
cacgccgcctcccgagacgcggcggggcgcagggaggggacagcagtgggggcggggcggggaggaggaaggaggagggggcggggagcaaaagttcacaccgctcggggctcagccgctcccctatctcttcccaggcccgcccccgccatcccccttccctgaaccgggtcccacgggcttaggcgcgggagagctctggcc

SEQ ID NO: 459340 - DNA, 103 bp, Homo sapiens
  chr10:125852030-125852133
  hyper
  colorectal vs. head_and_neck,lung,upper_gi, pancreas_gallbladder,breast,anorectal,renal, bladder_and_urothelial,ovary,multiple_myeloma,uterine,sarcoma, prostate,cervical,non_cancer,lymphoid_neoplasm,myeloid_neoplasm,
  CONT. FROM ABOVE: thyroid,melanoma
cgctcggggctcagccgctcccctatctcttcccaggcccgcccccgccatcccccttccctgaaccgggtcccacgggcttaggcgcgggagagctctggcc

SEQ ID NO: 459341 - DNA, 98 bp, Homo sapiens
  chr10:125853277-125853375
  hyper
  colorectal vs. upper_gi,head_and_neck,lung,breast, anorectal,pancreas_gallbladder,bladder_and_urothelial,renal, uterine,ovary,multiple_myeloma,prostate,sarcoma,non_cancer
tgtgtgttgcggtgattccaaataaaagcacatcgaaacccctgaaatctggcagtgacaccttgccagatacttcttttttttaaagacagagtttc

SEQ ID NO: 459342 - DNA, 25 bp, Homo sapiens
  chr10:125853669-125853694
  hyper
  colorectal vs. upper_gi
cgcgcccggccgccagagacatctt

SEQ ID NO: 459343 - DNA, 2 bp, Homo sapiens
  chr10:125853891-125853893
  hyper
  colorectal vs. upper_gi
tc

SEQ ID NO: 459344 - DNA, 94 bp, Homo sapiens; identical to SEQ ID NO: 454127
  chr11:829438-829532
  hyper
  colorectal vs. cervical

SEQ ID NO: 459345 - DNA, 65 bp, Homo sapiens
  chr11:8284161-8284226
  hyper
  colorectal vs. anorectal,head_and_neck
cgtgccactctcgcaggccgctcccgcacaagtgctaccggccggcggcgggacactttcttcct

SEQ ID NO: 459346 - DNA, 191 bp, Homo sapiens
  chr11:8284345-8284536
  hyper
  colorectal vs. anorectal,head_and_neck
gccttcccctcgcctgccgggcaccctggcgctcgcgccgtcctcccgcgctcccgcttgccccgagctctggagcccgattctccccgaagccgctgatttgctcggcgctcagcgcctctcgggttacgcggcggctggcgcgagggtgatggctgcggtgagagcagcagcctcagacacgaaatgct

SEQ ID NO: 459347 - DNA, 70 bp, Homo sapiens; identical to SEQ ID NO: 372629
  chr11:8284961-8285031
  hyper
  colorectal vs. anorectal,head_and_neck

SEQ ID NO: 459348 - DNA, 129 bp, Homo sapiens; identical to SEQ ID NO: 351149
  chr11:8615887-8616016
  hyper
  colorectal vs. ovary,lung

SEQ ID NO: 459349 - DNA, 61 bp, Homo sapiens
  chr11:9112971-9113032
  hyper
  colorectal vs. bladder_and_urothelial,cervical,ovary
cccggcgggacggcccccgccagcagcagcagtggcggcagcagcagcagcagcagcagca

SEQ ID NO: 459350 - DNA, 61 bp, Homo sapiens; identical to SEQ ID NO: 459349
  chr11:9112971-9113032
  hyper
  colorectal vs. cervical

SEQ ID NO: 459351 - DNA, 38 bp, Homo sapiens; identical to SEQ ID NO: 351170
  chr11:20619974-20620012
  hyper
  colorectal vs. melanoma

SEQ ID NO: 459352 - DNA, 28 bp, Homo sapiens
  chr11:45377196-45377224
  hyper
  colorectal vs. prostate,non_cancer,thyroid, multiple_myeloma
ctgaaggcgaccaacgagagggagggcc

SEQ ID NO: 459353 - DNA, 87 bp, Homo sapiens; identical to SEQ ID NO: 454128
  chr11:47208495-47208582
  hyper
  colorectal vs. upper_gi

SEQ ID NO: 459354 - DNA, 78 bp, Homo sapiens
  chr11:57194101-57194179
  hyper
  colorectal vs. upper_gi,cervical,anorectal,melanoma, lymphoid_neoplasm
cgctcgaattctgaataccgtcccctaaaataatgacagcaactcaaccaggtgcagaggcagggagatttcatacag

SEQ ID NO: 459355 - DNA, 20 bp, Homo sapiens
  chr11:60718609-60718629
  hyper
  colorectal vs. cervical,multiple_myeloma,thyroid, non_cancer,lymphoid_neoplasm,anorectal
cggcgacgcgggcatctctc

SEQ ID NO: 459356 - DNA, 133 bp, Homo sapiens
  chr11:67895663-67895796
  hyper
  colorectal vs. upper_gi,liver_bileduct, pancreas_gallbladder
cgtccgtgtagccttggccgggcccccaagcttcttagaatgccatctaagaaggcagagggggatgagcggcggcggggaggaggggcaggccttgggaagatccactgggtcacagggaagcgaaggcgga

SEQ ID NO: 459357 - DNA, 339 bp, Homo sapiens
  chr11:79150336-79150675
  hyper
  colorectal vs. head_and_neck
aactgcatttctataaaccctctctccacggttagggggtgggagggagttagagatcgggtgggggcttggcgcggtactgttgagggctctgcacccaactgagcagtaatacactcatccacatggacgcgggtgcataaatcgccttaacattttgccctgaaagcggagccaatttccaaagttaaggaccacgcagctgaatttccagtactttccaacctcgcctaggcgggggcaggcagagaaggggcgggcagcgggcagctaactcgcccgacccccccgccaagaaggactcactaggtgaaccccccgcccttcacccaagtagtt

SEQ ID NO: 459358 - DNA, 20 bp, Homo sapiens
  chr11:79150655-79150675
  hyper
  colorectal vs. head_and_neck,ovary,pancreas_gallbladder
cgcccttcacccaagtagtt

SEQ ID NO: 459359 - DNA, 198 bp, Homo sapiens
  chr11:94474139-94474337
  hyper
  colorectal vs. upper_gi,pancreas_gallbladder
gcccagacgagttaggtaagtctgctcattttgtcttttatttcttggtcgcaattctgcccgagaactgcgagtttggggggcgtccataggaactcagctagggatggggctggggttggagggcggagggaaagggtcaggggacacctgctgccttcgcggccggaaccggcctttcctcggcgctgtgctttc

SEQ ID NO: 459360 - DNA, 218 bp, Homo sapiens
  chr11:94474139-94474357
  hyper
  colorectal vs. pancreas_gallbladder
gcccagacgagttaggtaagtctgctcattttgtcttttatttcttggtcgcaattctgcccgagaactgcgagtttggggggcgtccataggaactcagctagggatggggctggggttggagggcggagggaaagggtcaggggacacctgctgccttcgcggccggaaccggcctttcctcggcgctgtgctttcgggggtggcagggcaagtgt

SEQ ID NO: 459361 - DNA, 105 bp, Homo sapiens
  chr11:94474385-94474490
  hyper
  colorectal vs. pancreas_gallbladder
gcgtgcgtgtgcgtgtgtgtgtgtgtgagtgcgtgtgtgtgcgtgttcgtctggggcagtggtgctgctccgaggagcctggcacagcaaacttccagagctggg

SEQ ID NO: 459362 - DNA, 220 bp, Homo sapiens; identical to SEQ ID NO: 359917
  chr11:94474547-94474767
  hyper
  colorectal vs. pancreas_gallbladder

SEQ ID NO: 459363 - DNA, 235 bp, Homo sapiens
  chr11:94502100-94502335
  hyper
  colorectal vs. upper_gi
cggaagggggtgtccggtgcagctttccccggcgcgagacaaaggcgcgcgcaccggcccgcccgacgggctctggcgctgtggactggaccctttctgcccgccggccagacccggctctggcgggtgggggcgacgaaagggtcgcaccccagccccagacgctcggatcgcgttagctgctgctccttctttgttctctccccagacaagtttctttgacaaactggagagt

SEQ ID NO: 459364 - DNA, 66 bp, Homo sapiens; identical to SEQ ID NO: 202722
  chr11:111412304-111412370
  hyper
  colorectal vs. anorectal

SEQ ID NO: 459365 - DNA, 10 bp, Homo sapiens
  chr11:125757409-125757419
  hyper
  colorectal vs. upper_gi
caaaatgtgc

SEQ ID NO: 459366 - DNA, 129 bp, Homo sapiens
  chr11:128562635-128562764
  hyper
  colorectal vs. thyroid,non_cancer,sarcoma, multiple_myeloma,myeloid_neoplasm,prostate,lymphoid_neoplasm, ovary,melanoma,renal,cervical,bladder_and_urothelial,breast
cgtcggactcttaaataaaagtgagcaagtccaaagcgtggtccggagagcgtggacaaggtaacctgttttggatgtccgggagaagggagtccggccgaaagggcccagcccctcgaggctgctcca

SEQ ID NO: 459367 - DNA, 18 bp, Homo sapiens
  chr11:128563818-128563836
  hyper
  colorectal vs. multiple_myeloma,sarcoma,thyroid, lymphoid_neoplasm,ovary,non_cancer,myeloid_neoplasm,prostate, melanoma,cervical,renal,bladder_and_urothelial,breast
gagaggagagctcgaggc

SEQ ID NO: 459368 - DNA, 17 bp, Homo sapiens
  chr11:133938756-133938773
  hyper
  colorectal vs. melanoma,sarcoma,thyroid,prostate, non_cancer,renal,myeloid_neoplasm
cgccaagttcattgaaa

SEQ ID NO: 459369 - DNA, 161 bp, Homo sapiens; identical to SEQ ID NO: 345407
  chr11:133939437-133939598
  hyper
  colorectal vs. melanoma,sarcoma,thyroid,prostate, non_cancer,renal,myeloid_neoplasm

SEQ ID NO: 459370 - DNA, 235 bp, Homo sapiens; identical to SEQ ID NO: 351283
  chr12:1639655-1639890
  hyper
  colorectal vs. cervical

SEQ ID NO: 459371 - DNA, 180 bp, Homo sapiens; identical to SEQ ID NO: 360011
  chr12:5020472-5020652
  hyper
  colorectal vs. multiple_myeloma

SEQ ID NO: 459372 - DNA, 94 bp, Homo sapiens
  chr12:15374050-15374144
  hyper
  colorectal vs. pancreas_gallbladder,renal
cgagcgcgctcagggctcggaatgggtctgcaggaagtcgtcccgaaagagctgcctggacacgtgcgtgacactcacctgttcacactctcca

SEQ ID NO: 459373 - DNA, 253 bp, Homo sapiens
  chr12:24715505-24715758
  hyper
  colorectal vs. lung,multiple_myeloma,sarcoma,breast, uterine,cervical,renal,non_cancer,head_and_neck,anorectal, melanoma,bladder_and_urothelial,liver_bileduct,ovary,prostate
gacgaggtgaaatccctttgctggtcatgaggcggcttcagagacaaacaacacaatgcgagtgcaaataacaaaaggcaaaaagacagtaggaacaatgggggaggcgagggcagcgcaccagccggcggtcaccgcggcccggcgcccgccccggggggtgcggcgggggcggggggggggcgcgggggcggtgccgggggctcccgctccctccaggtcgcccccgagctcccgcaagcccaccctgacc

SEQ ID NO: 459374 - DNA, 253 bp, Homo sapiens; identical to SEQ ID NO: 459373
  chr12:24715505-24715758
  hyper
  colorectal vs. lung,multiple_myeloma,anorectal,breast, sarcoma,uterine,renal,non_cancer,ovary,prostate,cervical, myeloid_neoplasm,bladder_and_urothelial,liver_bileduct,melanoma, head_and_neck

SEQ ID NO: 459375 - DNA, 23 bp, Homo sapiens
  chr12:25102288-25102311
  hyper
  colorectal vs. bladder_and_urothelial,lymphoid_neoplasm, sarcoma,multiple_myeloma,ovary,uterine,thyroid,non_cancer, myeloid_neoplasm,prostate,renal,breast
ccgtgtaacatttatatggagac

SEQ ID NO: 459376 - DNA, 54 bp, Homo sapiens
  chr12:41086129-41086183
  hyper
  colorectal vs. lung
cgctggtcctgggggtgagagtgatatccctgttgtccaatcagagaagcgggt

SEQ ID NO: 459377 - DNA, 211 bp, Homo sapiens
  chr12:41086454-41086665
  hyper
  colorectal vs. lung
ttgcttcccttcccccagccccgcccagccctcgtcacccccaaatctcctgtggtccctgcagctctcgccgtgcggcgcgggaaggactggggcggaggtggctggggtgcggggaagcaggggtgcgggatgccggagccctggggtgccgggcaaggcaggacggcagtgccctagaagagggctccgagctcggggtctgtgtctc

SEQ ID NO: 459378 - DNA, 22 bp, Homo sapiens
  chr12:41086692-41086714
  hyper
  colorectal vs. lung
cgccagcgccgggaactcgccc

SEQ ID NO: 459379 - DNA, 53 bp, Homo sapiens
  chr12:41582155-41582208
  hyper
  colorectal vs. anorectal
cgccgccgcgagacggctgccccgggggtggcccggggaaggcaggggggctc

SEQ ID NO: 459380 - DNA, 3 bp, Homo sapiens
  chr12:52401537-52401540
  hyper
  colorectal vs. anorectal,head_and_neck,melanoma,thyroid, uterine,multiple_myeloma,non_cancer
tcc

SEQ ID NO: 459381 - DNA, 54 bp, Homo sapiens; identical to SEQ ID NO: 347231
  chr12:52401605-52401659
  hyper
  colorectal vs. anorectal,head_and_neck,melanoma,thyroid, uterine,multiple_myeloma,non_cancer

SEQ ID NO: 459382 - DNA, 1 bp, Homo sapiens
  chr12:52626747-52626748
  hyper
  colorectal vs. pancreas_gallbladder,upper_gi, liver_bileduct,cervical
c

SEQ ID NO: 459383 - DNA, 71 bp, Homo sapiens; identical to SEQ ID NO: 202986
  chr12:52627438-52627509
  hyper
  colorectal vs. pancreas_gallbladder,upper_gi, liver_bileduct,cervical

SEQ ID NO: 459384 - DNA, 182 bp, Homo sapiens
  chr12:54366668-54366850
  hyper
  colorectal vs. upper_gi
cgcccatcccaccgcccaccccaccccaaccctctctctcctcctttgctcgtgctgtggtatggagagaaggggagtgacgagagaaaaacgaatacaaatctgcaattgattttcataatgtttctgcggtgtttgcaaaccaatcgcctgaacgtccccgatcttacctaagagagaac

SEQ ID NO: 459385 - DNA, 192 bp, Homo sapiens; identical to SEQ ID NO: 360102
  chr12:54367630-54367822
  hyper
  colorectal vs. upper_gi

SEQ ID NO: 459386 - DNA, 27 bp, Homo sapiens
  chr12:54368271-54368298
  hyper
  colorectal vs. upper_gi
cgcgggtcctcgagcagaaacccaagc

SEQ ID NO: 459387 - DNA, 216 bp, Homo sapiens
  chr12:54368432-54368648
  hyper
  colorectal vs. upper_gi
tgccccgcgggcttcccggggcgccagggccccggaagcggctctctggtgtctcggtgcctgctggccggcttcctccccgcctcccgactgctctcgccagatttcactgcttcgcgcctgttctcagctttccccccagatttctgggggaggggttgggctttccgaaccactaggagggcggcccaggaagggcccgagggcggaggggga

SEQ ID NO: 459388 - DNA, 205 bp, Homo sapiens
  chr12:54369002-54369207
  hyper
  colorectal vs. upper_gi
aaattccagatccgggaactggagcgagagtttttcttcaacgtgtatatcaacaaagagaagcggctgcagctgtcccggatgctgaacctgacggaccgacaagtgaaaatttggtttcagaacagaaggatgaaagaaaagaaactgagcagagaccggctgcagtatttctcgggaaatcctctgctgtaacctgcagacc

SEQ ID NO: 459389 - DNA, 258 bp, Homo sapiens
  chr12:54369002-54369260
  hyper
  colorectal vs. upper_gi
aaattccagatccgggaactggagcgagagtttttcttcaacgtgtatatcaacaaagagaagcggctgcagctgtcccggatgctgaacctgacggaccgacaagtgaaaatttggtttcagaacagaaggatgaaagaaaagaaactgagcagagaccggctgcagtatttctcgggaaatcctctgctgtaacctgcagaccgggcccttttgggggcggggggaggggaaaattattttattttatttttattt

SEQ ID NO: 459390 - DNA, 354 bp, Homo sapiens; identical to SEQ ID NO: 360105
  chr12:54369303-54369657
  hyper
  colorectal vs. upper_gi

SEQ ID NO: 459391 - DNA, 130 bp, Homo sapiens
  chr12:54519801-54519931
  hyper
  colorectal vs. pancreas_gallbladder,upper_gi
cgtggtccctcgtaccaatcgatcgaattctagtcgcaattctctgtctgtccctcggctctggggagaaagggggggctgtggcgtgggggctgaggaggggctaaggcgggaggggcgcctcatccct

SEQ ID NO: 459392 - DNA, 30 bp, Homo sapiens; identical to SEQ ID NO: 455672
  chr12:54521011-54521041
  hyper
  colorectal vs. pancreas_gallbladder,cervical,upper_gi

SEQ ID NO: 459393 - DNA, 3 bp, Homo sapiens
  chr12:66582719-66582722
  hyper
  colorectal vs. upper_gi
cgc

SEQ ID NO: 459394 - DNA, 106 bp, Homo sapiens
  chr12:104850139-104850245
  hyper
  colorectal vs. bladder_and_urothelial, pancreas_gallbladder,lung,ovary,melanoma,renal,anorectal, head_and_neck,prostate,multiple_myeloma,sarcoma,uterine, cervical,lymphoid_neoplasm,breast,non_cancer,thyroid
cgggaaagctcagctgtcgcctgacccgagggtcgtgcagtttccttaaccctgactttaagtcagccctctttaaccccgactcccaagctgggctgtcctttga

SEQ ID NO: 459395 - DNA, 349 bp, Homo sapiens
  chr12:104851545-104851894
  hyper
  colorectal vs. melanoma,multiple_myeloma,renal,ovary, lung,sarcoma,non_cancer,head_and_neck,bladder_and_urothelial, breast,pancreas_gallbladder,thyroid,myeloid_neoplasm,cervical, prostate,lymphoid_neoplasm,uterine,anorectal
gaccaggaggggcggtagtttttttttttttttttttcttcttctttttttctttgtgtcccttgtctgtctgtctgcgaggtagcagggaaacggagaggtgtgggaagcaaccgggggtgaggggctggtttgaggagaacgaaactccctccctgctgctgccgaggtcggaggatgaaagagttacccggagccggctgctctgcgcccgggcgagccgcctcttcctggttgccgggccgggggcgaagggtgtacgccccggcgaggttgcgagtccctgcagcaggctgggagcccgggactgggctcccacgtgtcccgggctccgcgcagagctgagcag

SEQ ID NO: 459396 - DNA, 349 bp, Homo sapiens; identical to SEQ ID NO: 459395
  chr12:104851545-104851894
  hyper
  colorectal vs. melanoma,multiple_myeloma,cervical, bladder_and_urothelial,non_cancer,myeloid_neoplasm, head_and_neck,pancreas_gallbladder,lymphoid_neoplasm,lung, uterine,sarcoma,ovary,renal,thyroid

SEQ ID NO: 459397 - DNA, 22 bp, Homo sapiens
  chr12:111471144-111471166
  hyper
  colorectal vs. breast
cgcggaaactgtgggcggtggt

SEQ ID NO: 459398 - DNA, 366 bp, Homo sapiens; identical to SEQ ID NO: 373156
  chr12:111473017-111473383
  hyper
  colorectal vs. breast

SEQ ID NO: 459399 - DNA, 83 bp, Homo sapiens; identical to SEQ ID NO: 345434
  chr12:113495127-113495210
  hyper
  colorectal vs. breast,multiple_myeloma,prostate,ovary, sarcoma,lung,uterine,liver_bileduct,melanoma,myeloid_neoplasm, non_cancer,thyroid,renal,lymphoid_neoplasm,head_and_neck, bladder_and_urothelial,pancreas_gallbladder

SEQ ID NO: 459400 - DNA, 2 bp, Homo sapiens
  chr12:129337804-129337806
  hyper
  colorectal vs. renal,prostate,multiple_myeloma, non_cancer,myeloid_neoplasm
cg

SEQ ID NO: 459401 - DNA, 103 bp, Homo sapiens
  chr12:133464006-133464109
  hyper
  colorectal vs. pancreas_gallbladder,breast,ovary
cggcccggccgcccgcgcccacgcagccccgcagcccggcctggacgccggcgggcgccccctcccacggccgcaaccaggtcccccttcgccgcccgccgca

SEQ ID NO: 459402 - DNA, 238 bp, Homo sapiens
  chr12:133464166-133464404
  hyper
  colorectal vs. pancreas_gallbladder,breast,ovary
cgccgccgctgtcaagagacattgcggctccctcagctgatccgcggggcggggccagaggcctctgcgccccgcgattggctggcggcggcgctcaccaagagcggcagctaaagcggagccgggagtggcccgcgagagtaggcgcgtggagggcgctcggccatctttgatcctgaccaggcgacttcgtcgcctgcggatcacggaagtggctgcggtcggcgccatgttatgt

SEQ ID NO: 459403 - DNA, 219 bp, Homo sapiens
  chr12:133464555-133464774
  hyper
  colorectal vs. pancreas_gallbladder,breast,ovary
acagtggatcacacagatccgaagtctgaggcacagggcgcggtccgcgagtgggagcggctgcttgtgggcagggtggacgcggggccacgtcttggccggcgttttgcggggtcttcctgttctgaacgcgcgtaacttttgcctcagtatctcacttcttggaatccggcggcgttcacgtgtgtgctccagagaagggcgccagagggtattccc

SEQ ID NO: 459404 - DNA, 82 bp, Homo sapiens
  chr13:25746000-25746082
  hyper
  colorectal vs. sarcoma,breast,prostate,melanoma,lung, uterine,multiple_myeloma,renal,non_cancer,myeloid_neoplasm, bladder_and_urothelial,cervical,head_and_neck
gaaattcgagtcgtaattatggaattcaaattccctcaactctcacccaccttcggattccttctctagactcgctcttcac

SEQ ID NO: 459405 - DNA, 7 bp, Homo sapiens
  chr13:25746119-25746126
  hyper
  colorectal vs. sarcoma,breast,prostate,melanoma,lung, uterine,multiple_myeloma,renal,non_cancer,myeloid_neoplasm, bladder_and_urothelial,cervical,head_and_neck
cgacaac

SEQ ID NO: 459406 - DNA, 282 bp, Homo sapiens
  chr13:26624917-26625199
  hyper
  colorectal vs. head_and_neck
agatggtggcgtcgccgccgtcgaagcgctcgggacactggaagccgatgcgccagacgccctgcgcgtccagccagccgtggcagtactcgccgctggccctcgcccccgccgccagcagcgcagccagcagcagctgcaggagcgaagcggcgttccaggatgaggagacggacgagcggcgagcgccccacatggcaccaccctgggcgcggacagcgcgtctccagagagcgcaggacggtctccgagaagtcgtggccccggcgacccccgggcctc

SEQ ID NO: 459407 - DNA, 204 bp, Homo sapiens
  chr13:26624995-26625199
  hyper
  colorectal vs. upper_gi,bladder_and_urothelial, head_and_neck,pancreas_gallbladder
cgtggcagtactcgccgctggccctcgcccccgccgccagcagcgcagccagcagcagctgcaggagcgaagcggcgttccaggatgaggagacggacgagcggcgagcgccccacatggcaccaccctgggcgcggacagcgcgtctccagagagcgcaggacggtctccgagaagtcgtggccccggcgacccccgggcctc

SEQ ID NO: 459408 - DNA, 23 bp, Homo sapiens
  chr13:37005451-37005474
  hyper
  colorectal vs. ovary,uterine,lung,breast,thyroid,renal, sarcoma,myeloid_neoplasm,prostate,bladder_and_urothelial, cervical,non_cancer,multiple_myeloma
cgattatttcacctggcttgtca

SEQ ID NO: 459409 - DNA, 1 bp, Homo sapiens
  chr13:102569995-102569996
  hyper
  colorectal vs. sarcoma
c

SEQ ID NO: 459410 - DNA, 127 bp, Homo sapiens
  chr13:103046539-103046666
  hyper
  colorectal vs. melanoma,anorectal,liver_bileduct,renal, pancreas_gallbladder,sarcoma,breast
cgccagctcccttccctttccttcagatgggtctcgggtccagagctggcgcccgctagcgggaggccagaccgggagggccaaggcagccacctgtggctttcccatccctcaggtccagcagtgc

SEQ ID NO: 459411 - DNA, 1 bp, Homo sapiens
  chr13:103047328-103047329
  hyper
  colorectal vs. melanoma,anorectal,liver_bileduct,renal, pancreas_gallbladder,sarcoma,breast
c

SEQ ID NO: 459412 - DNA, 207 bp, Homo sapiens; identical to SEQ ID NO: 457501
  chr13:108518148-108518355
  hyper
  colorectal vs. liver_bileduct

SEQ ID NO: 459413 - DNA, 1 bp, Homo sapiens
  chr13:108518657-108518658
  hyper
  colorectal vs. liver_bileduct
c

SEQ ID NO: 459414 - DNA, 43 bp, Homo sapiens
  chr13:108519212-108519255
  hyper
  colorectal vs. liver_bileduct
cgaccccatcctctgtagagtgggaaacaataatggagagaga

SEQ ID NO: 459415 - DNA, 22 bp, Homo sapiens
  chr13:108519410-108519432
  hyper
  colorectal vs. liver_bileduct
tctcccctgccaggggcatgcc

SEQ ID NO: 459416 - DNA, 59 bp, Homo sapiens
  chr13:108519564-108519623
  hyper
  colorectal vs. liver_bileduct
cgcgctggctctcccagagtccggagcctgggctgcctccggcggggcgctccctcccc

SEQ ID NO: 459417 - DNA, 166 bp, Homo sapiens; identical to SEQ ID NO: 452855
  chr13:108519932-108520098
  hyper
  colorectal vs. liver_bileduct

SEQ ID NO: 459418 - DNA, 166 bp, Homo sapiens; identical to SEQ ID NO: 452855
  chr13:108519932-108520098
  hyper
  colorectal vs. liver_bileduct

SEQ ID NO: 459419 - DNA, 68 bp, Homo sapiens; identical to SEQ ID NO: 452856
  chr13:108520309-108520377
  hyper
  colorectal vs. liver_bileduct

SEQ ID NO: 459420 - DNA, 352 bp, Homo sapiens; identical to SEQ ID NO: 457508
  chr13:112760444-112760796
  hyper
  colorectal vs. multiple_myeloma

SEQ ID NO: 459421 - DNA, 112 bp, Homo sapiens
  chr14:21439074-21439186
  hyper
  colorectal vs. upper_gi,liver_bileduct, pancreas_gallbladder,lung,head_and_neck
cgcaatggaaagctcgtggcatacagcaggcgctcattatttgaagcctcttcattctcctgcttcctcggtggttaaggaggcttttggaagttcaagtccgtctcagcta

SEQ ID NO: 459422 - DNA, 590 bp, Homo sapiens; identical to SEQ ID NO: 345455
  chr14:21439317-21439907
  hyper
  colorectal vs. upper_gi,liver_bileduct, pancreas_gallbladder,lung,head_and_neck

SEQ ID NO: 459423 - DNA, 196 bp, Homo sapiens; identical to SEQ ID NO: 334941
  chr14:62105869-62106065
  hyper
  colorectal vs. lymphoid_neoplasm

SEQ ID NO: 459424 - DNA, 114 bp, Homo sapiens; identical to SEQ ID NO: 347307
  chr14:62584399-62584513
  hyper
  colorectal vs. thyroid,non_cancer

SEQ ID NO: 459425 - DNA, 9 bp, Homo sapiens
  chr14:70654358-70654367
  hyper
  colorectal vs. multiple_myeloma,thyroid,myeloid_neoplasm, non_cancer,sarcoma,renal,melanoma
cgcgcgcgc

SEQ ID NO: 459426 - DNA, 61 bp, Homo sapiens
  chr14:96342530-96342591
  hyper
  colorectal vs. melanoma
cgcagccgccggccctccccgcactggagctccccctcccctccctccccgcccctcggct

SEQ ID NO: 459427 - DNA, 41 bp, Homo sapiens; identical to SEQ ID NO: 351622
  chr14:100438971-100439012
  hyper
  colorectal vs. anorectal,head_and_neck,lung,breast, uterine,ovary,bladder_and_urothelial,renal

SEQ ID NO: 459428 - DNA, 78 bp, Homo sapiens
  chr15:28351681-28351759
  hyper
  colorectal vs. bladder_and_urothelial,anorectal,breast, head_and_neck,sarcoma,cervical,prostate
cgttgtccccaagggtctctccaccctccgggccccggcctccggccccgcctggcatgaggagcggggagcgcacag

SEQ ID NO: 459429 - DNA, 211 bp, Homo sapiens
  chr15:45669920-45670131
  hyper
  colorectal vs. upper_gi,liver_bileduct, pancreas_gallbladder
cggagcgattccagtactagaagcatgggagggtctgctgccagggcagccgagggcggggagcgcagaaactctgcttacaggctgcactcgccccgactcctctccagacgtgggatcccatgttatacttggagtgaatctggtcgctcgctccccgtccccgattcccactttgcttgcctcttctccccatccatctaccccacac

SEQ ID NO: 459430 - DNA, 275 bp, Homo sapiens
  chr15:45670188-45670463
  hyper
  colorectal vs. upper_gi,liver_bileduct, pancreas_gallbladder
cgccacccttttactaagaggagcctccgtcgtcccaaccccttgctccgagcgggaagcttggtgcagcgcaccaaggtccggtagaggggggcggcgccccctgcgccgtgggccagcaggccgcggacgcgcagacagcaagtggaccccaagggctggagccgcaacgcaagttccccctgactgggggacgccgcccagctcctggagcctgcgaaggctcttgaagctgagcttcccagggataccagaagggacactctcgtgcaatt

SEQ ID NO: 459431 - DNA, 227 bp, Homo sapiens
  chr15:45670236-45670463
  hyper
  colorectal vs. upper_gi,pancreas_gallbladder, liver_bileduct
cgagcgggaagcttggtgcagcgcaccaaggtccggtagaggggggcggcgccccctgcgccgtgggccagcaggccgcggacgcgcagacagcaagtggaccccaagggctggagccgcaacgcaagttccccctgactgggggacgccgcccagctcctggagcctgcgaaggctcttgaagctgagcttcccagggataccagaagggacactctcgtgcaatt

SEQ ID NO: 459432 - DNA, 13 bp, Homo sapiens
  chr15:45671015-45671028
  hyper
  colorectal vs. upper_gi,pancreas_gallbladder, liver_bileduct
cgcgacttctgac

SEQ ID NO: 459433 - DNA, 78 bp, Homo sapiens; identical to SEQ ID NO: 452897
  chr15:48936649-48936727
  hyper
  colorectal vs. prostate,uterine,sarcoma,head_and_neck, multiple_myeloma,lung,renal,myeloid_neoplasm,ovary,thyroid, bladder_and_urothelial,non_cancer,melanoma,breast

SEQ ID NO: 459434 - DNA, 99 bp, Homo sapiens; identical to SEQ ID NO: 452899
  chr15:53080201-53080300
  hyper
  colorectal vs. liver_bileduct

SEQ ID NO: 459435 - DNA, 2 bp, Homo sapiens
  chr15:53082020-53082022
  hyper
  colorectal vs. liver_bileduct
cc

SEQ ID NO: 459436 - DNA, 34 bp, Homo sapiens
  chr15:53082144-53082178
  hyper
  colorectal vs. liver_bileduct
cgcacggagtccggtcttcacatcggctgctggc

SEQ ID NO: 459437 - DNA, 2 bp, Homo sapiens
  chr15:53082020-53082022
  hyper
  colorectal vs. liver_bileduct,pancreas_gallbladder, anorectal
cc

SEQ ID NO: 459438 - DNA, 160 bp, Homo sapiens
  chr15:53082144-53082304
  hyper
  colorectal vs. liver_bileduct,pancreas_gallbladder, anorectal
cgcacggagtccggtcttcacatcggctgctggcgactgttgccttccttcctctcactgtggggctctgtctctctctctctctctctccgtgtgtgtgtgtccgtgtgtgcgtgtgcgtgtgtgtgtgtgtgtgtgtctcgccttccctcttaccccc

SEQ ID NO: 459439 - DNA, 70 bp, Homo sapiens
  chr15:53082234-53082304
  hyper
  colorectal vs. liver_bileduct,cervical,anorectal
cgtgtgtgtgtgtccgtgtgtgcgtgtgcgtgtgtgtgtgtgtgtgtgtctcgccttccctcttaccccc

SEQ ID NO: 459440 - DNA, 61 bp, Homo sapiens; identical to SEQ ID NO: 457569
  chr15:79383268-79383329
  hyper
  colorectal vs. breast,lung,uterine, bladder_and_urothelial,sarcoma,myeloid_neoplasm,thyroid, prostate

SEQ ID NO: 459441 - DNA, 61 bp, Homo sapiens; identical to SEQ ID NO: 457569
  chr15:79383268-79383329
  hyper
  colorectal vs. prostate,sarcoma,breast,uterine, bladder_and_urothelial,lung,melanoma,multiple_myeloma,thyroid, non_cancer,ovary

SEQ ID NO: 459442 - DNA, 62 bp, Homo sapiens; identical to SEQ ID NO: 351730
  chr15:79384146-79384208
  hyper
  colorectal vs. prostate,sarcoma,breast,uterine, bladder_and_urothelial,lung,melanoma,multiple_myeloma,thyroid, non_cancer,ovary

SEQ ID NO: 459443 - DNA, 60 bp, Homo sapiens
  chr15:83951722-83951782
  hyper
  colorectal vs. head_and_neck
cgtctgggccgctttaaatgccctggccttcagaggactgaggcgagcacagccataaaa

SEQ ID NO: 459444 - DNA, 228 bp, Homo sapiens
  chr15:83952822-83953050
  hyper
  colorectal vs. cervical
atcagctgtttcacaaattctgaggtaaaagaaaaaaaaaaaaagaaggggtcgacccccacaggtggaaacagcaagtcctaacgtcctgggctgaagcctggggtgcgggcggcagagagtggcgtgtagggtacccgccgagtgccgccgccgatttccacaggctggcccgccggcacctccgacgcgcccgcagatccggcgcggagaccgtttgccagctcc

SEQ ID NO: 459445 - DNA, 228 bp, Homo sapiens; identical to SEQ ID NO: 459444
  chr15:83952822-83953050
  hyper
  colorectal vs. cervical

SEQ ID NO: 459446 - DNA, 18 bp, Homo sapiens
  chr16:3234164-3234182
  hyper
  colorectal vs. thyroid,multiple_myeloma,non_cancer
cgcacccaaagcgagaat

SEQ ID NO: 459447 - DNA, 50 bp, Homo sapiens; identical to SEQ ID NO: 452914
  chr16:3238043-3238093
  hyper
  colorectal vs. multiple_myeloma,uterine,non_cancer

SEQ ID NO: 459448 - DNA, 12 bp, Homo sapiens
  chr16:10277411-10277423
  hyper
  colorectal vs. pancreas_gallbladder,ovary, multiple_myeloma,bladder_and_urothelial,prostate,upper_gi, non_cancer,renal,breast,myeloid_neoplasm,thyroid
cacaggcgcgcc

SEQ ID NO: 459449 - DNA, 16 bp, Homo sapiens
  chr16:10479686-10479702
  hyper
  colorectal vs. upper_gi
cgctatggcgggtaag

SEQ ID NO: 459450 - DNA, 17 bp, Homo sapiens
  chr16:10480336-10480353
  hyper
  colorectal vs. upper_gi
tgctttcagaaattaac

SEQ ID NO: 459451 - DNA, 451 bp, Homo sapiens
  chr16:19566591-19567042
  hyper
  colorectal vs. melanoma,prostate,uterine,non_cancer, renal
cgtcttcgctccgccgccttctggagtcctttctgcccctagaggacgcaggtgagctaagcagcagtcatgccctttaccatcatgacgcccgcaggcgggaccacccggcactgtagacagctgccctttacaatcatgactcatagaaactacggcactctggccgtggccgacgttgctcctccgaagcatggcgccggcgggagttgtaacccgggctgtccggagcggggagctgcccctcacaagcatggcgtcagctgaaaatgaagcctgtgctgtgcggagcgtcgcctgcccctcacaagcatggcgtctgcagaaggtgctgtgcggccgctgcggggcggccagctgcccttcacaaacatggcggccgaggggtgcggggagtggcggggtaaggatgggaagccgagcagacggccccagaacaagcggtcatgtg

SEQ ID NO: 459452 - DNA, 86 bp, Homo sapiens
  chr16:56228284-56228370
  hyper
  colorectal vs. ovary
cgaggggggacgttttaaaacttcagaagtctgtaatcagcagtggcggactcggagcccagtagaagccccagccacctgagctg

SEQ ID NO: 459453 - DNA, 57 bp, Homo sapiens; identical to SEQ ID NO: 351808
  chr16:56228591-56228648
  hyper
  colorectal vs. ovary

SEQ ID NO: 459454 - DNA, 30 bp, Homo sapiens
  chr16:58498724-58498754
  hyper
  colorectal vs. head_and_neck,anorectal,breast,lung
ggacccgcgccatggacctcttatttctgc

SEQ ID NO: 459455 - DNA, 46 bp, Homo sapiens
  chr16:66638030-66638076
  hyper
  colorectal vs. melanoma,cervical,bladder_and_urothelial, lung,lymphoid_neoplasm
cgcgcgcgcgcgcgtgtgtgtgtgtctgtgtgtgtgcctggagctg

SEQ ID NO: 459456 - DNA, 566 bp, Homo sapiens; identical to SEQ ID NO: 351815
  chr16:66638452-66639018
  hyper
  colorectal vs. melanoma,cervical,bladder_and_urothelial, lung,lymphoid_neoplasm

SEQ ID NO: 459457 - DNA, 300 bp, Homo sapiens
  chr16:67197294-67197594
  hyper
  colorectal vs. anorectal
cgcgcgtccccgctgcccaacgaagcctgggtcgcgttgcgccgccgccaccctgggctggcagtggagctggagctggagcccgcgctgcccgctgagagcgtgacgcgcgtcctgcagccagccgtccccgtggctgcgctgcgcctcaacctctcaggcgacaccgtaggcccagtgcgcttcgcagcacaccactacgccgcaaccctgtgcgcgctcgaggtgcgcgcagccgcttcggccgagctgaacgccgcgctggaggagctggcggcgcgctgcgcggccctgcgcgag

SEQ ID NO: 459458 - DNA, 174 bp, Homo sapiens; identical to SEQ ID NO: 454226
  chr17:10632714-10632888
  hyper
  colorectal vs. pancreas_gallbladder,cervical,anorectal, melanoma,sarcoma

SEQ ID NO: 459459 - DNA, 245 bp, Homo sapiens; identical to SEQ ID NO: 351891
  chr17:10633350-10633595
  hyper
  colorectal vs. pancreas_gallbladder,cervical,anorectal, melanoma,sarcoma

SEQ ID NO: 459460 - DNA, 20 bp, Homo sapiens
  chr17:27044400-27044420
  hyper
  colorectal vs. head_and_neck,lung,anorectal,upper_gi, ovary,uterine,renal,sarcoma,cervical
cggggccacggggaccctac

SEQ ID NO: 459461 - DNA, 71 bp, Homo sapiens; identical to SEQ ID NO: 351907
  chr17:27044882-27044953
  hyper
  colorectal vs. head_and_neck,lung,anorectal,upper_gi, ovary,uterine,renal,sarcoma,cervical

SEQ ID NO: 459462 - DNA, 53 bp, Homo sapiens; identical to SEQ ID NO: 347416
  chr17:27940911-27940964
  hyper
  colorectal vs. cervical,renal,multiple_myeloma, non_cancer

SEQ ID NO: 459463 - DNA, 74 bp, Homo sapiens
  chr17:28088056-28088130
  hyper
  colorectal vs. upper_gi,cervical
cgcgctcgccctcgcttgattgtttgctccccaggatgctggggaaagcggctgctgaaagagcaaactttctg

SEQ ID NO: 459464 - DNA, 12 bp, Homo sapiens
  chr17:30846472-30846484
  hyper
  colorectal vs. head_and_neck,upper_gi
cgccgggtgggc

SEQ ID NO: 459465 - DNA, 69 bp, Homo sapiens; identical to SEQ ID NO: 351915
  chr17:30846659-30846728
  hyper
  colorectal vs. head_and_neck,upper_gi

SEQ ID NO: 459466 - DNA, 308 bp, Homo sapiens
  chr17:33700165-33700473
  hyper
  colorectal vs. upper_gi,cervical,anorectal,head_and_neck, bladder_and_urothelial,uterine
cggttcctgctccgcgccccgcagaaaccgcggctggctggccaggggctcttccaacttccagcgggagcaggtgcacaggtcaggcccgccccgcccctaatgccttctacccccattacccacccccgccccgcccgccagtcctccatagtccgctttttagggaacctgctgagcaaactagctgggcccccggacaggggagaaaagcacagatacccccactccactccacccccagcccctccgcacccctccagcccctccccacaccccacaccctggctggggtggggtgggaaggg

SEQ ID NO: 459467 - DNA, 85 bp, Homo sapiens
  chr17:33701376-33701461
  hyper
  colorectal vs. cervical,upper_gi,anorectal,head_and_neck, renal,myeloid_neoplasm,uterine,multiple_myeloma,thyroid, non_cancer,breast,ovary
accccggtaaccgtcacgctgctagtgatatgaaaaaaacctgccagcgttctgcttttctgccccgctgcagtctttagcaccc

SEQ ID NO: 459468 - DNA, 207 bp, Homo sapiens
  chr17:33701376-33701583
  hyper
  colorectal vs. upper_gi,cervical,anorectal,head_and_neck, uterine,renal,myeloid_neoplasm,multiple_myeloma, lymphoid_neoplasm,thyroid,ovary,non_cancer,breast
accccggtaaccgtcacgctgctagtgatatgaaaaaaacctgccagcgttctgcttttctgccccgctgcagtctttagcacccgccaggattctgtccgagtgtttggattttgtaatcctcctgtctttggccaactccccatccttggcggagcgctcgcccttggccgggctccgtgctgccagccttgcggaaccctaggc

SEQ ID NO: 459469 - DNA, 168 bp, Homo sapiens; identical to SEQ ID NO: 345516
  chr17:33701612-33701780
  hyper
  colorectal vs. upper_gi,cervical,anorectal,head_and_neck, uterine,renal,myeloid_neoplasm,multiple_myeloma, lymphoid_neoplasm,thyroid,ovary,non_cancer,breast

SEQ ID NO: 459470 - DNA, 34 bp, Homo sapiens
  chr17:33775294-33775328
  hyper
  colorectal vs. upper_gi,cervical,pancreas_gallbladder, bladder_and_urothelial,lung,ovary,renal,multiple_myeloma, anorectal,breast,myeloid_neoplasm
cgcaacgggggaagcctccaggacgcacttggct

SEQ ID NO: 459471 - DNA, 717 bp, Homo sapiens; identical to SEQ ID NO: 335510
  chr17:33814248-33814965
  hyper
  colorectal vs. upper_gi

SEQ ID NO: 459472 - DNA, 55 bp, Homo sapiens; identical to SEQ ID NO: 455768
  chr17:37365986-37366041
  hyper
  colorectal vs. cervical,myeloid_neoplasm,non_cancer, thyroid,multiple_myeloma,renal

SEQ ID NO: 459473 - DNA, 25 bp, Homo sapiens
  chr17:37382418-37382443
  hyper
  colorectal vs. sarcoma,myeloid_neoplasm,thyroid,ovary, multiple_myeloma,uterine
ggaagcttggggagatcatagtagc

SEQ ID NO: 459474 - DNA, 36 bp, Homo sapiens
  chr17:37794000-37794036
  hyper
  colorectal vs. upper_gi,cervical,anorectal
cgttccctcaccccgcatttttgggttagtcaatgt

SEQ ID NO: 459475 - DNA, 219 bp, Homo sapiens
  chr17:46124683-46124902
  hyper
  colorectal vs. upper_gi,cervical,anorectal, pancreas_gallbladder,breast,renal,lymphoid_neoplasm, liver_bileduct,prostate,ovary,melanoma,myeloid_neoplasm,thyroid, multiple_myeloma,bladder_and_urothelial,non_cancer,uterine,
  CONT. FROM ABOVE: head_and_neck,lung
cgcatcagctgcgttaaaatcaccccagcaggcaggttatccggccgccactccagggtcattaaatcagactctccagtgggacctcggaattcgtagcttagcaagctccccaagtgatgctgggagtaaactaacgtttgagagtcacaaacatgttttggcaatataaccagatgggactggagaaattaaaaaatgagaaacatccctaaaaaa

SEQ ID NO: 459476 - DNA, 164 bp, Homo sapiens; identical to SEQ ID NO: 345529
  chr17:46125148-46125312
  hyper
  colorectal vs. upper_gi,cervical,anorectal, pancreas_gallbladder,breast,renal,lymphoid_neoplasm, liver_bileduct,prostate,ovary,melanoma,myeloid_neoplasm,thyroid, multiple_myeloma,bladder_and_urothelial,non_cancer,uterine,
  CONT. FROM ABOVE: head_and_neck,lung

SEQ ID NO: 459477 - DNA, 54 bp, Homo sapiens
  chr17:46620299-46620353
  hyper
  colorectal vs. cervical
cgctaattcagtaatacctgaattttagcaaaacacataagtctatgcgactga

SEQ ID NO: 459478 - DNA, 260 bp, Homo sapiens; identical to SEQ ID NO: 345530
  chr17:46621458-46621718
  hyper
  colorectal vs. cervical

SEQ ID NO: 459479 - DNA, 322 bp, Homo sapiens
  chr17:46621458-46621780
  hyper
  colorectal vs. cervical
ttgttcttcacccctcttcctccctagctctgaattcttcctcttctcctagagttggggcagaaaggaccgaatcttttctgcttctagggtctatcccagcaacaacatactcattcccctacacagatacgggtgaaaacctcaatcaaatcattttcttctagcagaaaaaaaggcgtttccccaaccagcttccaaaatcagccatagggagagaaagagagagagagacagaaaaaaaaaaagacgctgttagcggccaggcctgaaccccagtgggatattctacttccccatcccaggaatggagggggtaagg

SEQ ID NO: 459480 - DNA, 304 bp, Homo sapiens; identical to SEQ ID NO: 361082
  chr17:46755701-46756005
  hyper
  colorectal vs. upper_gi

SEQ ID NO: 459481 - DNA, 216 bp, Homo sapiens; identical to SEQ ID NO: 457619
  chr17:56327007-56327223
  hyper
  colorectal vs. bladder_and_urothelial,anorectal,prostate, lung,sarcoma,head_and_neck,breast,uterine

SEQ ID NO: 459482 - DNA, 787 bp, Homo sapiens; identical to SEQ ID NO: 335625
  chr17:56429059-56429846
  hyper
  colorectal vs. upper_gi

SEQ ID NO: 459483 - DNA, 112 bp, Homo sapiens; identical to SEQ ID NO: 454237
  chr17:61777761-61777873
  hyper
  colorectal vs. cervical,anorectal,sarcoma, multiple_myeloma,lymphoid_neoplasm,head_and_neck,non_cancer, thyroid

SEQ ID NO: 459484 - DNA, 76 bp, Homo sapiens; identical to SEQ ID NO: 345537
  chr17:61778423-61778499
  hyper
  colorectal vs. cervical,anorectal,sarcoma, multiple_myeloma,lymphoid_neoplasm,head_and_neck,non_cancer, thyroid

SEQ ID NO: 459485 - DNA, 3 bp, Homo sapiens
  chr17:71160730-71160733
  hyper
  colorectal vs. breast,ovary,sarcoma,uterine
cgc

SEQ ID NO: 459486 - DNA, 241 bp, Homo sapiens
  chr17:71160878-71161119
  hyper
  colorectal vs. breast,ovary,sarcoma,uterine
agagggaaaatagcgcttgtccttgccatgagtcttgaggagaccgaaaacgcttaaccttttacgcccccgcaggcgggtcccctctctccccgctccccggctgtctgtaagctctgcctgcggccacccgcaggcgtttcagccggtctcacccctgtccttctgcaggacccgggaggaggggttgggggggcggagcgaagccgctgtgacgtagcgggaggggggcgtggggaaa

SEQ ID NO: 459487 - DNA, 5 bp, Homo sapiens
  chr17:71161494-71161499
  hyper
  colorectal vs. anorectal,uterine,sarcoma,breast
cgaga

SEQ ID NO: 459488 - DNA, 77 bp, Homo sapiens
  chr17:72931833-72931910
  hyper
  colorectal vs. upper_gi
cgagcccccgggagggtaattaacgagggattaatgagatttccaaagtcaacagaaaaatcgatgggccgcggagc

SEQ ID NO: 459489 - DNA, 81 bp, Homo sapiens; identical to SEQ ID NO: 454240
  chr17:73584287-73584368
  hyper
  colorectal vs. cervical

SEQ ID NO: 459490 - DNA, 170 bp, Homo sapiens; identical to SEQ ID NO: 352021
  chr17:73584951-73585121
  hyper
  colorectal vs. cervical

SEQ ID NO: 459491 - DNA, 28 bp, Homo sapiens
  chr17:75368688-75368716
  hyper
  colorectal vs. uterine,ovary,pancreas_gallbladder,breast, sarcoma
cgtcgcccgtccctggcttctctgacag

SEQ ID NO: 459492 - DNA, 1 bp, Homo sapiens
  chr17:77178580-77178581
  hyper
  colorectal vs. melanoma
c

SEQ ID NO: 459493 - DNA, 238 bp, Homo sapiens; identical to SEQ ID NO: 345538
  chr18:2848166-2848404
  hyper
  colorectal vs. uterine

SEQ ID NO: 459494 - DNA, 273 bp, Homo sapiens
  chr18:7567478-7567751
  hyper
  colorectal vs. liver_bileduct
cgggtcccgggcaggggaaggggagaggcggcgagctcagcaaccggaaccgagggaagattttggctccgcgggctcgccctccgctccctctgccagcggcgccagacgccgagtggggccagggacaggggaggaggacccaggaccctgtgcccgcgcccctggagccgctggagttcggacttctgcaactgttggcactttgggggcttggcttagcgctctgctgtttacccgtctctcctcgctgcctcggaaccaaagctcccg

SEQ ID NO: 459495 - DNA, 70 bp, Homo sapiens; identical to SEQ ID NO: 352058
  chr18:7568821-7568891
  hyper
  colorectal vs. liver_bileduct

SEQ ID NO: 459496 - DNA, 202 bp, Homo sapiens; identical to SEQ ID NO: 452944
  chr18:25756986-25757188
  hyper
  colorectal vs. liver_bileduct

SEQ ID NO: 459497 - DNA, 42 bp, Homo sapiens; identical to SEQ ID NO: 452945
  chr18:25757146-25757188
  hyper
  colorectal vs. liver_bileduct

SEQ ID NO: 459498 - DNA, 80 bp, Homo sapiens; identical to SEQ ID NO: 452959
  chr18:44335955-44336035
  hyper
  colorectal vs. sarcoma,myeloid_neoplasm,non_cancer

SEQ ID NO: 459499 - DNA, 14 bp, Homo sapiens
  chr18:44337138-44337152
  hyper
  colorectal vs. myeloid_neoplasm,thyroid,non_cancer, sarcoma,prostate,breast,renal,multiple_myeloma
caggggctgggcgc

SEQ ID NO: 459500 - DNA, 45 bp, Homo sapiens; identical to SEQ ID NO: 455808
  chr18:53446783-53446828
  hyper
  colorectal vs. anorectal,head_and_neck,cervical

SEQ ID NO: 459501 - DNA, 121 bp, Homo sapiens
  chr19:1449921-1450042
  hyper
  colorectal vs. uterine
cggggcacccccttccctcgggggggtttcgccccccgcactcacggcccctgagcccgcgcggaggcccgacgccccgcggccgacgccggtccccgccccgggccgccattggctgttg

SEQ ID NO: 459502 - DNA, 287 bp, Homo sapiens
  chr19:1753216-1753503
  hyper
  colorectal vs. upper_gi
cgcgaaatcggagactctgggtcgaggcccccagccccacctgggcagagtctgtcctcggacccccgcccgctgtcccccgggtacggcctgccccagcgggcgcgggcgggcgcagtggccagggacgccgaagccccaagtctggccgacttcggcctgcttggtgctcgagtggggccggggcgggcggagagcgaggctgcgggaggcagcggtggcaggagcgggtgggcgggggcgctgacgtcagacccgggcccgggcgccggcggccgctcccctgc

SEQ ID NO: 459503 - DNA, 197 bp, Homo sapiens; identical to SEQ ID NO: 361357
  chr19:1754950-1755147
  hyper
  colorectal vs. upper_gi

SEQ ID NO: 459504 - DNA, 111 bp, Homo sapiens
  chr19:1757112-1757223
  hyper
  colorectal vs. upper_gi
cgcaggcgagaagtcccatggggggggggtgggctccccgcagccgggtcagcagcacccagcacccgccctgagtggacaccgcctgcttcgcctgcacctgaccctgca

SEQ ID NO: 459505 - DNA, 166 bp, Homo sapiens; identical to SEQ ID NO: 361358
  chr19:1758062-1758228
  hyper
  colorectal vs. upper_gi

SEQ ID NO: 459506 - DNA, 47 bp, Homo sapiens
  chr19:3785511-3785558
  hyper
  colorectal vs. myeloid_neoplasm,thyroid
cgaccgctagtggctgggaagtgggcggtgctggggggtgagtctcg

SEQ ID NO: 459507 - DNA, 302 bp, Homo sapiens
  chr19:5293673-5293975
  hyper
  colorectal vs. cervical
gttcccctcccagtctgggtgggaccggaggcacggtgatgggggcggggggcgtcccctcttccccctcttagaccagagggtaggggagaggtgcgggcgcagaggcttccctcccgctgggggtccaggggaatgaatggggggacaccgtggcagaggcccccaccctcgccacaagcctgaggagggggcggagagcacagggccagattggaaacagatggggccgccgtgccaggcccgcgacaccggagcagagggagaggaggagggagagggaggggcagacctgtccgggc

SEQ ID NO: 459508 - DNA, 66 bp, Homo sapiens
  chr19:6590260-6590326
  hyper
  colorectal vs. lymphoid_neoplasm
cggcgcgcactggtgattttatttcattttatttttttttactcttaagacttcttaaagaggaag

SEQ ID NO: 459509 - DNA, 323 bp, Homo sapiens; identical to SEQ ID NO: 361399
  chr19:6590881-6591204
  hyper
  colorectal vs. lymphoid_neoplasm

SEQ ID NO: 459510 - DNA, 685 bp, Homo sapiens; identical to SEQ ID NO: 335930
  chr19:8274278-8274963
  hyper
  colorectal vs. cervical,lung,anorectal,lymphoid_neoplasm, head_and_neck,prostate,uterine,breast

SEQ ID NO: 459511 - DNA, 215 bp, Homo sapiens
  chr19:10400761-10400976
  hyper
  colorectal vs. head_and_neck,lung
ctctgggctgctctgggcctggggctcttcggcctctcaggtaagagccccgctctggttcggggtggacagggcgggggcggagtccctggacctgagaaacggcctcctgtccctcccagctctgccctcgcctcgctcccacgcctctgcccccacctcgagcctgagtcttctccccttccccctcctccccaacacacacccgagcccca

SEQ ID NO: 459512 - DNA, 631 bp, Homo sapiens; identical to SEQ ID NO: 457670
  chr19:10530654-10531285
  hyper
  colorectal vs. sarcoma

SEQ ID NO: 459513 - DNA, 189 bp, Homo sapiens; identical to SEQ ID NO: 347537
  chr19:11593453-11593642
  hyper
  colorectal vs. anorectal,melanoma

SEQ ID NO: 459514 - DNA, 16 bp, Homo sapiens
  chr19:12203656-12203672
  hyper
  colorectal vs. multiple_myeloma,breast,sarcoma,prostate, myeloid_neoplasm,thyroid,renal,non_cancer
ctgaggtcaggagttc

SEQ ID NO: 459515 - DNA, 3 bp, Homo sapiens
  chr19:12266891-12266894
  hyper
  colorectal vs. bladder_and_urothelial,sarcoma,breast, uterine
cga

SEQ ID NO: 459516 - DNA, 106 bp, Homo sapiens
  chr19:17392397-17392503
  hyper
  colorectal vs. anorectal,bladder_and_urothelial
cgtagctccacccactcgagccgggtgccttcgcgtttcccgtttttaaatgagatagtggcacacccggtggcatcctcccacccgggctcttatcggcggtccc

SEQ ID NO: 459517 - DNA, 354 bp, Homo sapiens; identical to SEQ ID NO: 454288
  chr19:18117804-18118158
  hyper
  colorectal vs. liver_bileduct,pancreas_gallbladder

SEQ ID NO: 459518 - DNA, 20 bp, Homo sapiens
  chr19:34973766-34973786
  hyper
  colorectal vs. head_and_neck,lung,anorectal
ctctgggtcccccgacacac

SEQ ID NO: 459519 - DNA, 159 bp, Homo sapiens; identical to SEQ ID NO: 347586
  chr19:36822892-36823051
  hyper
  colorectal vs. bladder_and_urothelial,breast,prostate, sarcoma,renal,ovary,myeloid_neoplasm,thyroid,non_cancer, melanoma

SEQ ID NO: 459520 - DNA, 4 bp, Homo sapiens
  chr19:36909065-36909069
  hyper
  colorectal vs. sarcoma,breast,bladder_and_urothelial, prostate,myeloid_neoplasm
cgcc

SEQ ID NO: 459521 - DNA, 32 bp, Homo sapiens
  chr19:37095634-37095666
  hyper
  colorectal vs. breast,uterine
cgctgtcacaggatcactgataacagcatgac

SEQ ID NO: 459522 - DNA, 105 bp, Homo sapiens; identical to SEQ ID NO: 347589
  chr19:37096594-37096699
  hyper
  colorectal vs. uterine,breast,prostate,myeloid_neoplasm, sarcoma

SEQ ID NO: 459523 - DNA, 4 bp, Homo sapiens
  chr19:37288206-37288210
  hyper
  colorectal vs. sarcoma,prostate,myeloid_neoplasm,thyroid, breast,ovary,non_cancer,melanoma
cgtg

SEQ ID NO: 459524 - DNA, 3 bp, Homo sapiens
  chr19:37288807-37288810
  hyper
  colorectal vs. sarcoma,prostate,myeloid_neoplasm,thyroid, breast,ovary,non_cancer,melanoma
acc

SEQ ID NO: 459525 - DNA, 42 bp, Homo sapiens; identical to SEQ ID NO: 453018
  chr19:37463952-37463994
  hyper
  colorectal vs. bladder_and_urothelial,breast

SEQ ID NO: 459526 - DNA, 58 bp, Homo sapiens
  chr19:41119120-41119178
  hyper
  colorectal vs. upper_gi
cgccagagagtctgggagtagggcctgggttccagggcaaagccggctggaaaggtgg

SEQ ID NO: 459527 - DNA, 68 bp, Homo sapiens
  chr19:41119735-41119803
  hyper
  colorectal vs. upper_gi
agagccgaggggcggtggaggggtgtggcctagaatgttaggcggagcgggaggtgggccgggccttc

SEQ ID NO: 459528 - DNA, 3 bp, Homo sapiens
  chr19:45655296-45655299
  hyper
  colorectal vs. anorectal,cervical
cgg

SEQ ID NO: 459529 - DNA, 118 bp, Homo sapiens; identical to SEQ ID NO: 454295
  chr19:45656461-45656579
  hyper
  colorectal vs. cervical

SEQ ID NO: 459530 - DNA, 4 bp, Homo sapiens
  chr19:46379840-46379844
  hyper
  colorectal vs. pancreas_gallbladder
cgcc

SEQ ID NO: 459531 - DNA, 18 bp, Homo sapiens
  chr19:49242357-49242375
  hyper
  colorectal vs. cervical,upper_gi,anorectal,head_and_neck, lung,ovary
cgcgcaggtgctccgccc

SEQ ID NO: 459532 - DNA, 142 bp, Homo sapiens
  chr19:49242393-49242535
  hyper
  colorectal vs. cervical,upper_gi,anorectal,head_and_neck, lung,ovary
cgcccgccgccgcgggccggcccagagcgtcgcacaaagcgaaggcgtccacgcagctgctctcgccggggccaccgccggggctgcctgctaggccgtagcgctctagcgcctcggccacgagctcgcgcgccgtggagcg

SEQ ID NO: 459533 - DNA, 36 bp, Homo sapiens
  chr19:49242773-49242809
  hyper
  colorectal vs. cervical,upper_gi,anorectal,head_and_neck, lung,ovary
atgcgcttggcgcggctaccggaggctcccccggcc

SEQ ID NO: 459534 - DNA, 19 bp, Homo sapiens
  chr19:49242911-49242930
  hyper
  colorectal vs. cervical,upper_gi,anorectal,head_and_neck, lung,ovary
cgccggggaacagagtcgc

SEQ ID NO: 459535 - DNA, 333 bp, Homo sapiens; identical to SEQ ID NO: 361674
  chr19:50316721-50317054
  hyper
  colorectal vs. pancreas_gallbladder,lymphoid_neoplasm, multiple_myeloma,cervical,ovary

SEQ ID NO: 459536 - DNA, 5 bp, Homo sapiens
  chr19:50815289-50815294
  hyper
  colorectal vs. cervical,melanoma,anorectal,lung
cggca

SEQ ID NO: 459537 - DNA, 77 bp, Homo sapiens
  chr19:50816051-50816128
  hyper
  colorectal vs. cervical,melanoma,anorectal,lung
aagaagttgaaccctttggcaatataatcagtccccaccccgtaccctggtgtctggagcccctagccctttgcccc

SEQ ID NO: 459538 - DNA, 381 bp, Homo sapiens
  chr19:50816051-50816432
  hyper
  colorectal vs. cervical,anorectal,uterine,lung, multiple_myeloma,head_and_neck
aagaagttgaaccctttggcaatataatcagtccccaccccgtaccctggtgtctggagcccctagccctttgccccgcccccaccaaaacccgccccacccctcacccctgcttcaccagggtttagggtccgagggaaggatgggggggactcaaaatgccccttgcataggaatcgttgcatcgagaatcgtgctcagtgacgccccccatccaccctcgggtggggggttcctgaggccgtgggagcagagggagggaggtggctaattccgtgggaccccggctccaaaaggggggtccgctaaagagtctgggaccggtgtggtctctgggcttgggggaggtagcgcatccttgagccaggataggaggtggga

SEQ ID NO: 459539 - DNA, 16 bp, Homo sapiens
  chr19:50819158-50819174
  hyper
  colorectal vs. cervical
ggcttttccaggcaac

SEQ ID NO: 459540 - DNA, 71 bp, Homo sapiens; identical to SEQ ID NO: 457763
  chr19:51161615-51161686
  hyper
  colorectal vs. melanoma

SEQ ID NO: 459541 - DNA, 42 bp, Homo sapiens
  chr19:56015143-56015185
  hyper
  colorectal vs. upper_gi
cgctcccgcaggagagtctcgccgcaagcgtcctttcccgcc

SEQ ID NO: 459542 - DNA, 95 bp, Homo sapiens; identical to SEQ ID NO: 374959
  chr19:56015237-56015332
  hyper
  colorectal vs. upper_gi

SEQ ID NO: 459543 - DNA, 1 bp, Homo sapiens
  chr19:56879394-56879395
  hyper
  colorectal vs. prostate,myeloid_neoplasm
c

SEQ ID NO: 459544 - DNA, 207 bp, Homo sapiens
  chr19:57683360-57683567
  hyper
  colorectal vs. melanoma,bladder_and_urothelial
cgggggccgcgggccgcgaggggggcgggggccgcgagggggcggggcgtgcgagggggcgggggcgtgcgagggggcgggggcgcgcgagggggcggggcgcgcgagggggcggggcgcgcgagggggcggggcgcgcgagggggcggggcgcgcgagggggcggggcgcgcgagggggcggggcgcgcgagggggcggggcgcgc

SEQ ID NO: 459545 - DNA, 103 bp, Homo sapiens; identical to SEQ ID NO: 361756
  chr19:57683899-57684002
  hyper
  colorectal vs. melanoma,bladder_and_urothelial

SEQ ID NO: 459546 - DNA, 57 bp, Homo sapiens; identical to SEQ ID NO: 453063
  chr19:57702696-57702753
  hyper
  colorectal vs. upper_gi,bladder_and_urothelial, pancreas_gallbladder,melanoma,uterine,lung,breast,prostate, sarcoma

SEQ ID NO: 459547 - DNA, 39 bp, Homo sapiens; identical to SEQ ID NO: 352421
  chr19:57703385-57703424
  hyper
  colorectal vs. upper_gi,bladder_and_urothelial, pancreas_gallbladder,melanoma,uterine,lung,breast,prostate, sarcoma

SEQ ID NO: 459548 - DNA, 86 bp, Homo sapiens; identical to SEQ ID NO: 457799
  chr19:57751590-57751676
  hyper
  colorectal vs. bladder_and_urothelial,upper_gi,breast

SEQ ID NO: 459549 - DNA, 373 bp, Homo sapiens; identical to SEQ ID NO: 361760
  chr19:57751755-57752128
  hyper
  colorectal vs. bladder_and_urothelial,upper_gi,breast

SEQ ID NO: 459550 - DNA, 71 bp, Homo sapiens; identical to SEQ ID NO: 453065
  chr19:57831543-57831614
  hyper
  colorectal vs. upper_gi,liver_bileduct, bladder_and_urothelial,pancreas_gallbladder,melanoma,breast, lung,uterine,lymphoid_neoplasm,sarcoma,prostate, multiple_myeloma,renal,ovary,non_cancer

SEQ ID NO: 459551 - DNA, 12 bp, Homo sapiens
  chr19:57832400-57832412
  hyper
  colorectal vs. upper_gi,liver_bileduct, bladder_and_urothelial,pancreas_gallbladder,melanoma,breast, lung,uterine,lymphoid_neoplasm,sarcoma,prostate, multiple_myeloma,renal,ovary,non_cancer
gtgttggcctcc

SEQ ID NO: 459552 - DNA, 14 bp, Homo sapiens
  chr19:57863221-57863235
  hyper
  colorectal vs. upper_gi,breast,liver_bileduct,lung, bladder_and_urothelial,prostate,ovary,uterine,renal,melanoma, sarcoma,pancreas_gallbladder,thyroid,non_cancer, multiple_myeloma,myeloid_neoplasm
cgcaggggcagttc

SEQ ID NO: 459553 - DNA, 461 bp, Homo sapiens; identical to SEQ ID NO: 453068
  chr19:57874412-57874873
  hyper
  colorectal vs. upper_gi

SEQ ID NO: 459554 - DNA, 218 bp, Homo sapiens; identical to SEQ ID NO: 453069
  chr19:57875005-57875223
  hyper
  colorectal vs. upper_gi

SEQ ID NO: 459555 - DNA, 43 bp, Homo sapiens; identical to SEQ ID NO: 345616
  chr19:57875252-57875295
  hyper
  colorectal vs. upper_gi

SEQ ID NO: 459556 - DNA, 11 bp, Homo sapiens
  chr19:58039267-58039278
  hyper
  colorectal vs. bladder_and_urothelial,melanoma,prostate, myeloid_neoplasm,uterine
cctgagcaacc

SEQ ID NO: 459557 - DNA, 38 bp, Homo sapiens; identical to SEQ ID NO: 457811
  chr19:58094924-58094962
  hyper
  colorectal vs. myeloid_neoplasm,prostate

SEQ ID NO: 459558 - DNA, 31 bp, Homo sapiens; identical to SEQ ID NO: 453076
  chr19:58125385-58125416
  hyper
  colorectal vs. bladder_and_urothelial

SEQ ID NO: 459559 - DNA, 29 bp, Homo sapiens
  chr19:58239193-58239222
  hyper
  colorectal vs. melanoma,prostate,myeloid_neoplasm, thyroid,lymphoid_neoplasm,multiple_myeloma,non_cancer,sarcoma, renal
ccgagtttcaaagggctgacaggacttcc

SEQ ID NO: 459560 - DNA, 71 bp, Homo sapiens
  chr2:12856411-12856482
  hyper
  colorectal vs. upper_gi
cgggggcaagcggtgacaccaactaaaaggaagcaatggatttccttttaaatggagaggaggatgtcgga

SEQ ID NO: 459561 - DNA, 849 bp, Homo sapiens; identical to SEQ ID NO: 346418
  chr2:12856549-12857398
  hyper
  colorectal vs. upper_gi

SEQ ID NO: 459562 - DNA, 185 bp, Homo sapiens
  chr2:12857960-12858145
  hyper
  colorectal vs. upper_gi
cgcgttgggactgagtcgccgccgtgagctccccgaagactgcacaaactaccgcgggctcctccgccccgtctgcgattcggaagccggcctgggggtcgcgtcgggagccctggcgctgcagctccgcaccttagcagcccgggtactcatccagatccacgccggggacacacacacagagt

SEQ ID NO: 459563 - DNA, 1 bp, Homo sapiens
  chr2:12858681-12858682
  hyper
  colorectal vs. upper_gi
c

SEQ ID NO: 459564 - DNA, 514 bp, Homo sapiens; identical to SEQ ID NO: 454313
  chr2:24272450-24272964
  hyper
  colorectal vs. upper_gi,pancreas_gallbladder,anorectal

SEQ ID NO: 459565 - DNA, 17 bp, Homo sapiens
  chr2:27484883-27484900
  hyper
  colorectal vs. uterine
cggacggtcagccgaca

SEQ ID NO: 459566 - DNA, 22 bp, Homo sapiens
  chr2:29337909-29337931
  hyper
  colorectal vs. pancreas_gallbladder,anorectal,cervical, renal,lung,bladder_and_urothelial,thyroid,myeloid_neoplasm, ovary,non_cancer,head_and_neck,multiple_myeloma,sarcoma,uterine, prostate,breast,lymphoid_neoplasm,upper_gi
cgtgggtgtagcacggattagg

SEQ ID NO: 459567 - DNA, 207 bp, Homo sapiens
  chr2:30143712-30143919
  hyper
  colorectal vs. bladder_and_urothelial,lung,prostate, renal,ovary,melanoma
atgaaacagacctggaagctcaggggcgagtccagagacactcaagcacactgggctcactggctgggaccttgagcctcccgctctccgcgccgagtgccgcgcccccgtctgtagctcgctgcgctcggtacagaggaactactatggttgaagggaggtggcagttgggtaccgtcctctcctgccccccgcagtcggagctgg

SEQ ID NO: 459568 - DNA, 157 bp, Homo sapiens; identical to SEQ ID NO: 357143
  chr2:30144693-30144850
  hyper
  colorectal vs. bladder_and_urothelial,lung

SEQ ID NO: 459569 - DNA, 69 bp, Homo sapiens
  chr2:31361021-31361090
  hyper
  colorectal vs. breast,head_and_neck,ovary,renal,lung, prostate,bladder_and_urothelial,thyroid,cervical,non_cancer, sarcoma,myeloid_neoplasm,pancreas_gallbladder,uterine, lymphoid_neoplasm,anorectal,multiple_myeloma,melanoma
gggcaggagtcctggcgagcgcctcgctctggggagctctagacccaggatccggttggaggggcggca

SEQ ID NO: 459570 - DNA, 179 bp, Homo sapiens
  chr2:31361118-31361297
  hyper
  colorectal vs. breast,head_and_neck,ovary,renal,lung, prostate,bladder_and_urothelial,thyroid,cervical,non_cancer, sarcoma,myeloid_neoplasm,pancreas_gallbladder,uterine, lymphoid_neoplasm,anorectal,multiple_myeloma,melanoma
gaagagaagcgagcctgggtggggggtgcagggcgacccgaaacgtggcagggaaggaccgagggcagccaagctggacgcccgctccagcgggagaagcgcggtggctgccgagatgttccccacgccgccaccgcggctgccgccgccgccgccgccgccttgcccgctgccgccga

SEQ ID NO: 459571 - DNA, 69 bp, Homo sapiens; identical to SEQ ID NO: 459569
  chr2:31361021-31361090
  hyper
  colorectal vs. head_and_neck,breast

SEQ ID NO: 459572 - DNA, 179 bp, Homo sapiens; identical to SEQ ID NO: 459570
  chr2:31361118-31361297
  hyper
  colorectal vs. head_and_neck,breast

SEQ ID NO: 459573 - DNA, 70 bp, Homo sapiens; identical to SEQ ID NO: 346429
  chr2:31361690-31361760
  hyper
  colorectal vs. head_and_neck,breast

SEQ ID NO: 459574 - DNA, 105 bp, Homo sapiens; identical to SEQ ID NO: 198157
  chr2:31457427-31457532
  hyper
  colorectal vs. bladder_and_urothelial,anorectal,breast, head_and_neck,ovary,lung,sarcoma,multiple_myeloma,prostate, uterine,cervical,renal,non_cancer,pancreas_gallbladder,thyroid, myeloid_neoplasm

SEQ ID NO: 459575 - DNA, 9 bp, Homo sapiens
  chr2:40679688-40679697
  hyper
  colorectal vs. bladder_and_urothelial,thyroid,ovary, prostate,myeloid_neoplasm,non_cancer,sarcoma
cgcctaccc

SEQ ID NO: 459576 - DNA, 53 bp, Homo sapiens
  chr2:43037884-43037937
  hyper
  colorectal vs. pancreas_gallbladder
cgcaagcaggaagcagctcgcagtggactctcaataccccttttccgagctac

SEQ ID NO: 459577 - DNA, 77 bp, Homo sapiens
  chr2:66652787-66652864
  hyper
  colorectal vs. pancreas_gallbladder, bladder_and_urothelial
cgctcttccgaattatttaggaaagccaacacgcaattatgcaaaagtgtagataaggttctccgaagcagaaagca

SEQ ID NO: 459578 - DNA, 60 bp, Homo sapiens
  chr2:66652963-66653023
  hyper
  colorectal vs. pancreas_gallbladder, bladder_and_urothelial
gctctcggtcggttctgccgctctgtccccggttctgcagcgcactctcttactccctct

SEQ ID NO: 459579 - DNA, 79 bp, Homo sapiens; identical to SEQ ID NO: 346440
  chr2:68547270-68547349
  hyper
  colorectal vs. melanoma,head_and_neck,renal,lung,sarcoma, prostate,myeloid_neoplasm,anorectal,breast,cervical, multiple_myeloma,ovary,non_cancer,thyroid

SEQ ID NO: 459580 - DNA, 251 bp, Homo sapiens
  chr2:96192254-96192505
  hyper
  colorectal vs. liver_bileduct,pancreas_gallbladder
cgccgctccccgagaggccgcaaaagcccgagggctccaagaactgcctgcagaggctcagggactgcgagctgtccgcgctgacgccgcgctccatgcggggcccagaggaccggggcgccctggaccacatggtcaggatgaccacgagcctctaacagccccgccggggccctcgcgtgccagactatgtgccccgagagcaccttgtgctgggggaagaggcggctggcggtgcaggaaatcctggc

SEQ ID NO: 459581 - DNA, 193 bp, Homo sapiens; identical to SEQ ID NO: 346462
  chr2:96192624-96192817
  hyper
  colorectal vs. liver_bileduct,pancreas_gallbladder

SEQ ID NO: 459582 - DNA, 11 bp, Homo sapiens
  chr2:100937779-100937790
  hyper
  colorectal vs. pancreas_gallbladder,liver_bileduct,lung, upper_gi,breast,ovary,uterine,prostate,multiple_myeloma, non_cancer,renal
cgaaagcccaa

SEQ ID NO: 459583 - DNA, 147 bp, Homo sapiens; identical to SEQ ID NO: 457849
  chr2:101033445-101033592
  hyper
  colorectal vs. melanoma,anorectal,prostate, lymphoid_neoplasm,breast,sarcoma,lung,uterine,ovary,renal, multiple_myeloma,non_cancer,myeloid_neoplasm,thyroid, head_and_neck

SEQ ID NO: 459584 - DNA, 66 bp, Homo sapiens
  chr2:109647974-109648040
  hyper
  colorectal vs. upper_gi,pancreas_gallbladder,cervical, uterine
cggctctgcccgcctcgccgggctgcaccgagtccgcgggtctctagcgcacggcctggccccacg

SEQ ID NO: 459585 - DNA, 71 bp, Homo sapiens; identical to SEQ ID NO: 349562
  chr2:109648464-109648535
  hyper
  colorectal vs. upper_gi,pancreas_gallbladder,cervical, uterine

SEQ ID NO: 459586 - DNA, 225 bp, Homo sapiens
  chr2:120281422-120281647
  hyper
  colorectal vs. pancreas_gallbladder
cgggcggctccagaatttccgtgtaggagagtttcagaagccagaccagaggaaggggtcggtggtgggcacagggattcatcttagagccgccttcgtctggcgcgcacgatgtttttctttgggaaagggtccctccggagaagagctgggagagattaatgttgggaggattgggagggaagagtccctattcctcatgggaagatctgctagtccctctcc

SEQ ID NO: 459587 - DNA, 382 bp, Homo sapiens
  chr2:127413347-127413729
  hyper
  colorectal vs. lymphoid_neoplasm,sarcoma
cgcccagctatccagcggccgcgcagccagccaagatttcaacacaggtctgccctatttggtcaccatccccgacagtgctgggccaggccatcatgtcacattggggagttttccctgcactccagggggaattctcaaccacaacctctgtatccggtagtggcagatggaaagagaaacggttagaaaagcgtggttcttgcgcaggaaagttggagcaaagaagagttcagaagtgggcgggtgtgtgtttaaaaaaaaaaaagggggtggaaaccccaccagccaagtctgcagaaaaaaaataaatgaagtctgcctatctccgggccagagcccctcccctcggcccgcgcgggaggagtgtgacccaggtgcc

SEQ ID NO: 459588 - DNA, 53 bp, Homo sapiens
  chr2:127413676-127413729
  hyper
  colorectal vs. sarcoma,lymphoid_neoplasm
cgggccagagcccctcccctcggcccgcgcgggaggagtgtgacccaggtgcc

SEQ ID NO: 459589 - DNA, 255 bp, Homo sapiens; identical to SEQ ID NO: 349581
  chr2:127414108-127414363
  hyper
  colorectal vs. sarcoma,lymphoid_neoplasm

SEQ ID NO: 459590 - DNA, 184 bp, Homo sapiens; identical to SEQ ID NO: 346478
  chr2:135476396-135476580
  hyper
  colorectal vs. upper_gi,pancreas_gallbladder, myeloid_neoplasm,non_cancer,lung

SEQ ID NO: 459591 - DNA, 354 bp, Homo sapiens; identical to SEQ ID NO: 453117
  chr2:135476396-135476750
  hyper
  colorectal vs. upper_gi,pancreas_gallbladder,lung,ovary

SEQ ID NO: 459592 - DNA, 35 bp, Homo sapiens; identical to SEQ ID NO: 349594
  chr2:145275891-145275926
  hyper
  colorectal vs. lymphoid_neoplasm,bladder_and_urothelial, renal,melanoma,head_and_neck,lung,uterine,ovary,cervical, multiple_myeloma

SEQ ID NO: 459593 - DNA, 1 bp, Homo sapiens
  chr2:145282267-145282268
  hyper
  colorectal vs. melanoma,lymphoid_neoplasm, bladder_and_urothelial,uterine,renal,non_cancer, myeloid_neoplasm
c

SEQ ID NO: 459594 - DNA, 51 bp, Homo sapiens; identical to SEQ ID NO: 453124
  chr2:149632592-149632643
  hyper
  colorectal vs. sarcoma,prostate

SEQ ID NO: 459595 - DNA, 238 bp, Homo sapiens; identical to SEQ ID NO: 345045
  chr2:149634146-149634384
  hyper
  colorectal vs. prostate,sarcoma,breast,ovary

SEQ ID NO: 459596 - DNA, 76 bp, Homo sapiens
  chr2:175546713-175546789
  hyper
cgactgggtcagctgctttcccttacactcacaacgctaacagttctttctttaaaaagaaaagtatgtatagtag

SEQ ID NO: 459597 - DNA, 5 bp, Homo sapiens
  chr2:182321353-182321358
  hyper
  colorectal vs. non_cancer,myeloid_neoplasm, multiple_myeloma,lymphoid_neoplasm,uterine,sarcoma,ovary, thyroid,prostate,renal,breast,lung
cgtgg

SEQ ID NO: 459598 - DNA, 34 bp, Homo sapiens; identical to SEQ ID NO: 345053
  chr2:182323095-182323129
  hyper
  colorectal vs. thyroid,non_cancer,myeloid_neoplasm, lymphoid_neoplasm,multiple_myeloma,uterine,renal

SEQ ID NO: 459599 - DNA, 132 bp, Homo sapiens; identical to SEQ ID NO: 331581
  chr2:201828586-201828718
  hyper
  colorectal vs. upper_gi

SEQ ID NO: 459600 - DNA, 5 bp, Homo sapiens
  chr2:225906006-225906011
  hyper
  colorectal vs. lymphoid_neoplasm
cggat

SEQ ID NO: 459601 - DNA, 237 bp, Homo sapiens
  chr2:225906168-225906405
  hyper
  colorectal vs. lymphoid_neoplasm
gttggtatggataggatcctagcatcagatgctggctgctgccccagggacttcccgcggaaatcacccagcacttagaagccgtttcaataaggaagtaaccagtaaagcattgctggtgggagaaccccgcgaaacatcttagaaaaatatcagaaaccgctggagacctaatgacccacgtctcctccagcctgtgttcctcagccctttctggaggagtattaagtggtttgt

SEQ ID NO: 459602 - DNA, 77 bp, Homo sapiens; identical to SEQ ID NO: 454345
  chr2:225906328-225906405
  hyper
  colorectal vs. lymphoid_neoplasm

SEQ ID NO: 459603 - DNA, 624 bp, Homo sapiens; identical to SEQ ID NO: 457903
  chr2:232790030-232790654
  hyper
  colorectal vs. head_and_neck

SEQ ID NO: 459604 - DNA, 20 bp, Homo sapiens
  chr2:232790784-232790804
  hyper
  colorectal vs. head_and_neck
tctcctgggtcctgcgcgcc

SEQ ID NO: 459605 - DNA, 342 bp, Homo sapiens; identical to SEQ ID NO: 453146
  chr2:232790312-232790654
  hyper
  colorectal vs. head_and_neck,bladder_and_urothelial

SEQ ID NO: 459606 - DNA, 264 bp, Homo sapiens; identical to SEQ ID NO: 453147
  chr2:232790784-232791048
  hyper
  colorectal vs. head_and_neck,bladder_and_urothelial

SEQ ID NO: 459607 - DNA, 145 bp, Homo sapiens; identical to SEQ ID NO: 453148
  chr2:232791140-232791285
  hyper
  colorectal vs. head_and_neck,bladder_and_urothelial

SEQ ID NO: 459608 - DNA, 213 bp, Homo sapiens
  chr2:232791318-232791531
  hyper
  colorectal vs. anorectal
cgcacaggggaactccatttgcagcgagcgcgcgccctggcctgccgagcatcggtgcgcctggtgccctgtgcacccactaggtcctcatcgcactcactctacctggaagggatacgtagccctctttgcaggtgcaaagacaggctcagaggaatgaagtcacttgcccaaagtcatacaggcataaagttggcgctgcccgaaatccac

SEQ ID NO: 459609 - DNA, 210 bp, Homo sapiens; identical to SEQ ID NO: 352439
  chr20:657125-657335
  hyper
  colorectal vs. ovary,bladder_and_urothelial

SEQ ID NO: 459610 - DNA, 414 bp, Homo sapiens; identical to SEQ ID NO: 347652
  chr20:4804008-4804422
  hyper
  colorectal vs. bladder_and_urothelial,lymphoid_neoplasm, melanoma,multiple_myeloma,ovary,non_cancer,uterine,thyroid, sarcoma,breast,renal,myeloid_neoplasm,lung

SEQ ID NO: 459611 - DNA, 63 bp, Homo sapiens; identical to SEQ ID NO: 361804
  chr20:5297756-5297819
  hyper
  colorectal vs. multiple_myeloma,thyroid

SEQ ID NO: 459612 - DNA, 185 bp, Homo sapiens; identical to SEQ ID NO: 457915
  chr20:21086682-21086867
  hyper

SEQ ID NO: 459613 - DNA, 107 bp, Homo sapiens; identical to SEQ ID NO: 361836
  chr20:21087188-21087295
  hyper

SEQ ID NO: 459614 - DNA, 1 bp, Homo sapiens
  chr20:25058288-25058289
  hyper
  colorectal vs. bladder_and_urothelial,sarcoma,uterine, cervical,ovary,non_cancer,myeloid_neoplasm,renal,thyroid, anorectal
c

SEQ ID NO: 459615 - DNA, 151 bp, Homo sapiens
  chr20:25566244-25566395
  hyper
  colorectal vs. upper_gi
gggggcggggcgagcgaacgggagagggggcgggtcgggtccgggattgcggggcggggtgggggcaaggcggcctccgcaaatctcagggcggctctggccagtttggagcctggggtgacccttggagctgacctcgctggtccctgtc

SEQ ID NO: 459616 - DNA, 59 bp, Homo sapiens; identical to SEQ ID NO: 352472
  chr20:25566411-25566470
  hyper
  colorectal vs. upper_gi

SEQ ID NO: 459617 - DNA, 62 bp, Homo sapiens; identical to SEQ ID NO: 453168
  chr20:30639044-30639106
  hyper
  colorectal vs. multiple_myeloma

SEQ ID NO: 459618 - DNA, 139 bp, Homo sapiens; identical to SEQ ID NO: 453169
  chr20:30639494-30639633
  hyper
  colorectal vs. multiple_myeloma

SEQ ID NO: 459619 - DNA, 139 bp, Homo sapiens; identical to SEQ ID NO: 453169
  chr20:30639494-30639633
  hyper
  colorectal vs. non_cancer,anorectal,myeloid_neoplasm, thyroid

SEQ ID NO: 459620 - DNA, 5 bp, Homo sapiens
  chr20:34188561-34188566
  hyper
  colorectal vs. anorectal,thyroid,non_cancer
cgtcc

SEQ ID NO: 459621 - DNA, 60 bp, Homo sapiens; identical to SEQ ID NO: 454352
  chr20:34190072-34190132
  hyper
  colorectal vs. anorectal

SEQ ID NO: 459622 - DNA, 1 bp, Homo sapiens
  chr20:34190145-34190146
  hyper
  colorectal vs. anorectal
c

SEQ ID NO: 459623 - DNA, 25 bp, Homo sapiens
  chr20:36531527-36531552
  hyper
  colorectal vs. bladder_and_urothelial,lung,anorectal, breast,cervical,head_and_neck,pancreas_gallbladder,prostate, uterine,ovary
cgcagtcggaggcggccggctgggc

SEQ ID NO: 459624 - DNA, 24 bp, Homo sapiens
  chr20:36531991-36532015
  hyper
  colorectal vs. bladder_and_urothelial,lung,anorectal, breast,cervical,head_and_neck,pancreas_gallbladder,prostate, uterine,ovary
gccccctgccggcgcggtggaccc

SEQ ID NO: 459625 - DNA, 100 bp, Homo sapiens; identical to SEQ ID NO: 352489
  chr20:37303401-37303501
  hyper
  colorectal vs. thyroid,non_cancer,ovary

SEQ ID NO: 459626 - DNA, 37 bp, Homo sapiens; identical to SEQ ID NO: 347675
  chr20:37358242-37358279
  hyper
  colorectal vs. multiple_myeloma

SEQ ID NO: 459627 - DNA, 390 bp, Homo sapiens; identical to SEQ ID NO: 455936
  chr20:37433723-37434113
  hyper
  colorectal vs. ovary,bladder_and_urothelial,uterine, cervical,multiple_myeloma,lymphoid_neoplasm,myeloid_neoplasm, non_cancer,prostate,thyroid,lung,sarcoma

SEQ ID NO: 459628 - DNA, 27 bp, Homo sapiens
  chr20:37434086-37434113
  hyper
  colorectal vs. uterine,multiple_myeloma, bladder_and_urothelial,ovary,prostate,non_cancer, myeloid_neoplasm,thyroid,lymphoid_neoplasm,lung,cervical, sarcoma,breast,renal
cggggtgggggttaggaaaactatttt

SEQ ID NO: 459629 - DNA, 221 bp, Homo sapiens
  chr20:42876305-42876526
  hyper
  colorectal vs. upper_gi,cervical,renal
caggactgctcacctgggaagcgacaggccctgtctgggccccaggagcacagttctcaattttaggagcatccattctgcctctttccctcccagaaacagccggtctgttggggtgcggggcgggttgggggggctgagaaaagagacaaaggcgaggggaagggaatgggcactgctgggaaggcggcttggtggggtgggaggtgctgctgctgcgg

SEQ ID NO: 459630 - DNA, 26 bp, Homo sapiens
  chr20:42876667-42876693
  hyper
  colorectal vs. upper_gi,cervical,renal
gcttggagggtctgtccccagtcgtc

SEQ ID NO: 459631 - DNA, 51 bp, Homo sapiens; identical to SEQ ID NO: 457931
  chr20:47934774-47934825
  hyper
  colorectal vs. sarcoma,prostate,breast,ovary, bladder_and_urothelial,myeloid_neoplasm

SEQ ID NO: 459632 - DNA, 641 bp, Homo sapiens
  chr20:51589126-51589767
  hyper
  colorectal vs. upper_gi
cgctcctgtcctctcgcatatcactcacagacggggatctgacagcagccacaaacctacagtgagtgatcgctctccccccggcacgaatccgccatagagatcggcgaggaggaggaggaggaggaggaagaaaagaaggaggaggtggaggaggaggtggaggaggaggaggaggagggaaagaggagaaggaagaagaagaaaaagaagaaacccactaccttcccaggattgccttttttttttccttatctttacgcgcgagtgtgcctgtggcgcgtgtgcgcccctcgtcccttccatccgaacccgggcttggatgtttaataaagaaatcaagtgtctcaacagtcaccaaaaaaaaaaaaaaccgcaaaaacaaaaccaaaaaaattccaaaagcaaaaacaaaaaagagagaggaaaaaaaattcaaaataaacaaacaaacaaacaaggcagaaccaacctctacttcaaagcagccggcacaagccacccgtgtctgccacccagagaggggggtctctggcccgtggtggaggagttgcaggggggatcgtcagggggacagaggccgagtgacgtcctaggagccaccgggcaagaggcggaggagacccagagaggccagagag

SEQ ID NO: 459633 - DNA, 56 bp, Homo sapiens; identical to SEQ ID NO: 361908
  chr20:51590002-51590058
  hyper
  colorectal vs. upper_gi

SEQ ID NO: 459634 - DNA, 43 bp, Homo sapiens; identical to SEQ ID NO: 361912
  chr20:54919370-54919413
  hyper
  colorectal vs. melanoma,ovary

SEQ ID NO: 459635 - DNA, 136 bp, Homo sapiens
  chr20:55206463-55206599
  hyper
  colorectal vs. cervical,breast
cgccgccatcaaccccctgcaccagccggcgcccacaggcagccagcagcaggcctggcccggccgccagagccaggagggagcggggctgccctcgcaccacgggcgcccggccggcctactgccccacctctcc

SEQ ID NO: 459636 - DNA, 4 bp, Homo sapiens
  chr20:55206736-55206740
  hyper
  colorectal vs. cervical,breast
cgag

SEQ ID NO: 459637 - DNA, 95 bp, Homo sapiens; identical to SEQ ID NO: 352515
  chr20:55206774-55206869
  hyper
  colorectal vs. cervical,breast

SEQ ID NO: 459638 - DNA, 1 bp, Homo sapiens
  chr20:57224597-57224598
  hyper
  colorectal vs. multiple_myeloma,myeloid_neoplasm, non_cancer,thyroid
c

SEQ ID NO: 459639 - DNA, 113 bp, Homo sapiens; identical to SEQ ID NO: 345643
  chr20:57225466-57225579
  hyper
  colorectal vs. multiple_myeloma,myeloid_neoplasm, non_cancer,thyroid

SEQ ID NO: 459640 - DNA, 193 bp, Homo sapiens
  chr20:61806216-61806409
  hyper
  colorectal vs. sarcoma
cgcggcctttcctctttctggaggaatgacaggcctcccgcagaggaggagcgggtggtgacgagggagaaggagcggaaagggaggggttctccacgggttctgttgatttgtttaatcccacgctattcggaggctttcacggatggcggacaagagggagggggagggggtgggggtctcggcccgtgtt

SEQ ID NO: 459641 - DNA, 248 bp, Homo sapiens
  chr20:61810310-61810558
  hyper
  colorectal vs. melanoma,uterine,ovary,prostate,sarcoma, breast,anorectal,thyroid
gggtgcgtggggcggcgggctagggtgcggcgctgtccgcggtgctggcggcggggcggcccccgcgggacgggagggcggccaagtgcggccctcgcccccacagcgggcgccctggacagttgccacggcaacgtgggaggaggtggggcagggtctgaggtcaccgctaagtctgcccttcctcgggccgctgcgccgcggggcggggcggaggcggcgctcgctgtggccccagagcagccccc

SEQ ID NO: 459642 - DNA, 248 bp, Homo sapiens; identical to SEQ ID NO: 459641
  chr20:61810310-61810558
  hyper
  colorectal vs. uterine,melanoma,ovary,breast,prostate

SEQ ID NO: 459643 - DNA, 270 bp, Homo sapiens; identical to SEQ ID NO: 361940
  chr20:61810632-61810902
  hyper
  colorectal vs. uterine,melanoma,ovary,breast,prostate

SEQ ID NO: 459644 - DNA, 79 bp, Homo sapiens; identical to SEQ ID NO: 375179
  chr20:62103897-62103976
  hyper
  colorectal vs. uterine

SEQ ID NO: 459645 - DNA, 759 bp, Homo sapiens; identical to SEQ ID NO: 205913
  chr20:62600809-62601568
  hyper
  colorectal vs. liver_bileduct,lung,pancreas_gallbladder, cervical,ovary

SEQ ID NO: 459646 - DNA, 64 bp, Homo sapiens
  chr20:62601570-62601634
  hyper
  colorectal vs. liver_bileduct,lung,pancreas_gallbladder, cervical,ovary
acggattgaggcgacctgattccgccgcatcctggcccgcgcggcgagtgtggtctctgggctc

SEQ ID NO: 459647 - DNA, 215 bp, Homo sapiens
  chr20:62680443-62680658
  hyper
  colorectal vs. head_and_neck,anorectal,sarcoma,breast
ccccgccccaccccggcccgagccccccccgccctctcccccttctctgccgccctcccgccgctcacccagcatcttgctgagcaccgcgttgtgcaggtccgggttctgctgagccagccgcttgcgctcgtcctttgcccacaccatgaaggcgttcatgggccgccggatgcgcgactcgtctgccgcctggcgttccccgcggccggccg

SEQ ID NO: 459648 - DNA, 28 bp, Homo sapiens
  chr20:62680739-62680767
  hyper
  colorectal vs. head_and_neck,anorectal,sarcoma,breast
cggcgagggcggcggggccggcggcgag

SEQ ID NO: 459649 - DNA, 267 bp, Homo sapiens; identical to SEQ ID NO: 361951
  chr20:62680896-62681163
  hyper
  colorectal vs. head_and_neck,anorectal,sarcoma,breast

SEQ ID NO: 459650 - DNA, 59 bp, Homo sapiens
  chr20:62694227-62694286
  hyper
  colorectal vs. pancreas_gallbladder,lung,cervical, bladder_and_urothelial
cgcgggacagcaaggcccgaagcaggaggagagaagggagcagattcctgggcctcctg

SEQ ID NO: 459651 - DNA, 211 bp, Homo sapiens
  chr20:62694767-62694978
  hyper
  colorectal vs. pancreas_gallbladder,lung,cervical, bladder_and_urothelial
aaccccgccccgccgagaccccgtcgagcccgccgacccccgttagggccggaagacgacctgaggggcaggacgagacccctccccggcagagactaaccgggacgcaggggagacccccacccgtggccgagacccctgccccgggccagccctgccgttcactcccgcaaccccggcagaggccgcgatcaggcctggaccttgtccc

SEQ ID NO: 459652 - DNA, 252 bp, Homo sapiens
  chr20:62694767-62695019
  hyper
  colorectal vs. pancreas_gallbladder,lung,cervical, bladder_and_urothelial
aaccccgccccgccgagaccccgtcgagcccgccgacccccgttagggccggaagacgacctgaggggcaggacgagacccctccccggcagagactaaccgggacgcaggggagacccccacccgtggccgagacccctgccccgggccagccctgccgttcactcccgcaaccccggcagaggccgcgatcaggcctggaccttgtcccgggagagccacccgctctggactcagacccctccctcgccc

SEQ ID NO: 459653 - DNA, 197 bp, Homo sapiens; identical to SEQ ID NO: 352536
  chr20:62695048-62695245
  hyper
  colorectal vs. pancreas_gallbladder,lung,cervical, bladder_and_urothelial

SEQ ID NO: 459654 - DNA, 123 bp, Homo sapiens; identical to SEQ ID NO: 457941
  chr21:27011487-27011610
  hyper
  colorectal vs. uterine,sarcoma,lymphoid_neoplasm,breast, multiple_myeloma,non_cancer,myeloid_neoplasm,head_and_neck, thyroid,ovary,prostate,renal,lung

SEQ ID NO: 459655 - DNA, 134 bp, Homo sapiens; identical to SEQ ID NO: 457942
  chr21:27011639-27011773
  hyper
  colorectal vs. uterine,sarcoma,lymphoid_neoplasm,breast, multiple_myeloma,non_cancer,myeloid_neoplasm,head_and_neck, thyroid,ovary,prostate,renal,lung

SEQ ID NO: 459656 - DNA, 153 bp, Homo sapiens; identical to SEQ ID NO: 345649
  chr21:27012725-27012878
  hyper
  colorectal vs. uterine,sarcoma,multiple_myeloma, myeloid_neoplasm,ovary,thyroid,breast,non_cancer, lymphoid_neoplasm,prostate,head_and_neck,melanoma,renal,lung, cervical,bladder_and_urothelial

SEQ ID NO: 459657 - DNA, 192 bp, Homo sapiens
  chr21:32716044-32716236
  hyper
cgagcagcgggacagccccgggcaggacgcatcctgggtgggtgacgtgatcccgcagtctcctccccgaccccatatcccatacaatgatcctcgcttacagaagtcaagggggaaagatgacgctttcaaagcccgaatctctttaccctggagccagaaccagcgtcgccgccgtcccctgcagctcag

SEQ ID NO: 459658 - DNA, 221 bp, Homo sapiens
  chr21:38064746-38064967
  hyper
  colorectal vs. upper_gi
cgtcctctaaaaaatgaagaggggactggagtcgggaccaaaattattggcagaccgcacggtttgcagtcaccctgaagttaccagcagccgatgctgtgtccagggaaaatattcttgagctggaaaacgtgctaatttaaagtctttcgtttcacacgaaaatgtgctgcactctttgactgctcaggaatttgctctagcacctagaaggaattctg

SEQ ID NO: 459659 - DNA, 211 bp, Homo sapiens; identical to SEQ ID NO: 454354
  chr21:38592864-38593075
  hyper
  colorectal vs. pancreas_gallbladder

SEQ ID NO: 459660 - DNA, 259 bp, Homo sapiens; identical to SEQ ID NO: 454355
  chr21:38593104-38593363
  hyper
  colorectal vs. pancreas_gallbladder

SEQ ID NO: 459661 - DNA, 38 bp, Homo sapiens; identical to SEQ ID NO: 361982
  chr21:38593729-38593767
  hyper
  colorectal vs. pancreas_gallbladder

SEQ ID NO: 459662 - DNA, 34 bp, Homo sapiens
  chr21:44847478-44847512
  hyper
  colorectal vs. cervical,breast,lymphoid_neoplasm,renal, uterine
cgcggcctgcgttcgtccagactcagagcctcgg

SEQ ID NO: 459663 - DNA, 56 bp, Homo sapiens; identical to SEQ ID NO: 352570
  chr21:44847864-44847920
  hyper
  colorectal vs. cervical,breast,lymphoid_neoplasm,renal, uterine

SEQ ID NO: 459664 - DNA, 174 bp, Homo sapiens; identical to SEQ ID NO: 457951
  chr22:24819901-24820075
  hyper
  colorectal vs. anorectal,breast

SEQ ID NO: 459665 - DNA, 61 bp, Homo sapiens; identical to SEQ ID NO: 295272
  chr22:24820486-24820547
  hyper
  colorectal vs. anorectal,breast

SEQ ID NO: 459666 - DNA, 61 bp, Homo sapiens; identical to SEQ ID NO: 453178
  chr22:25678186-25678247
  hyper
  colorectal vs. sarcoma,breast

SEQ ID NO: 459667 - DNA, 149 bp, Homo sapiens
  chr22:39852943-39853092
  hyper
  colorectal vs. bladder_and_urothelial,ovary,anorectal, cervical,prostate,breast,head_and_neck,sarcoma,uterine, multiple_myeloma,pancreas_gallbladder,lung,non_cancer,renal, lymphoid_neoplasm,thyroid,myeloid_neoplasm
cgcccccgcgcaggccgccccgggccgtgggccggcgcacgcacggtcacaggaggggcgcgcgcacactcgcactcacacacactcgctcgcacacgcacacactcgatccagcacgcgcgggcggcgcggggcggcggcggccggag

SEQ ID NO: 459668 - DNA, 226 bp, Homo sapiens
  chr22:39853157-39853383
  hyper
  colorectal vs. bladder_and_urothelial,ovary,anorectal, cervical,prostate,breast,head_and_neck,sarcoma,uterine, multiple_myeloma,pancreas_gallbladder,lung,non_cancer,renal, lymphoid_neoplasm,thyroid,myeloid_neoplasm
ggttgcggagggggcggggtgggggccggagccgcttgagccggcgggagcgggcacccctgcgcgccgcgctcggcctcgcctccgcgccccccgcgcgcccgccgcggtccctcccccgcgcccgtccgctcgccgggcccccgccgccgccccggggtgcagccgagcggccgcgccgggtccccgggacggggtggaagtgggggtggggggaggggatcgg

SEQ ID NO: 459669 - DNA, 32 bp, Homo sapiens
  chr22:39853626-39853658
  hyper
  colorectal vs. bladder_and_urothelial,ovary,anorectal, cervical,prostate,breast,head_and_neck,sarcoma,uterine, multiple_myeloma,pancreas_gallbladder,lung,non_cancer,renal, lymphoid_neoplasm,thyroid,myeloid_neoplasm
cgcgctgcgcttggcgccccccgcccggctcc

SEQ ID NO: 459670 - DNA, 56 bp, Homo sapiens
  chr22:39853690-39853746
  hyper
  colorectal vs. bladder_and_urothelial,ovary,anorectal, cervical,prostate,breast,head_and_neck,sarcoma,uterine, multiple_myeloma,pancreas_gallbladder,lung,non_cancer,renal, lymphoid_neoplasm,thyroid,myeloid_neoplasm
cgggcgcgggcgcactggggctgggggcccggaggccgcggtgggggcgggatgcc

SEQ ID NO: 459671 - DNA, 128 bp, Homo sapiens
  chr22:39853255-39853383
  hyper
  colorectal vs. bladder_and_urothelial,ovary,anorectal, prostate,cervical,head_and_neck,breast,uterine,sarcoma, pancreas_gallbladder,multiple_myeloma,non_cancer,lung, lymphoid_neoplasm,myeloid_neoplasm,renal,thyroid,melanoma
cgcccgccgcggtccctcccccgcgcccgtccgctcgccgggcccccgccgccgccccggggtgcagccgagcggccgcgccgggtccccgggacggggtggaagtgggggtggggggaggggatcgg

SEQ ID NO: 459672 - DNA, 32 bp, Homo sapiens; identical to SEQ ID NO: 459669
  chr22:39853626-39853658
  hyper
  colorectal vs. bladder_and_urothelial,ovary,anorectal, prostate,cervical,head_and_neck,breast,uterine,sarcoma, pancreas_gallbladder,multiple_myeloma,non_cancer,lung, lymphoid_neoplasm,myeloid_neoplasm,renal,thyroid,melanoma

SEQ ID NO: 459673 - DNA, 210 bp, Homo sapiens
  chr22:39853690-39853900
  hyper
  colorectal vs. bladder_and_urothelial,ovary,anorectal, prostate,cervical,head_and_neck,breast,uterine,sarcoma, pancreas_gallbladder,multiple_myeloma,non_cancer,lung, lymphoid_neoplasm,myeloid_neoplasm,renal,thyroid,melanoma
cgggcgcgggcgcactggggctgggggcccggaggccgcggtgggggcgggatgccggggaagccgctcggcgcgggccccctccccctacccgccgctcctccgagctccccggtccccggagggcagagcctcagcgcccgaccccctcccacggccgggcgggggacgtccccgaggcgcggggctcgagccgtgctttgtgcgcgg

SEQ ID NO: 459674 - DNA, 130 bp, Homo sapiens; identical to SEQ ID NO: 345661
  chr22:39853934-39854064
  hyper
  colorectal vs. bladder_and_urothelial,ovary,anorectal, prostate,cervical,head_and_neck,breast,uterine,sarcoma, pancreas_gallbladder,multiple_myeloma,non_cancer,lung, lymphoid_neoplasm,myeloid_neoplasm,renal,thyroid,melanoma

SEQ ID NO: 459675 - DNA, 10 bp, Homo sapiens
  chr22:46262409-46262419
  hyper
  colorectal vs. cervical
cgggtgctgg

SEQ ID NO: 459676 - DNA, 1 bp, Homo sapiens
  chr22:46658633-46658634
  hyper
  colorectal vs. cervical
c

SEQ ID NO: 459677 - DNA, 9 bp, Homo sapiens
  chr3:238187-238196
  hyper
  colorectal vs. cervical,lung
cgacctgtg

SEQ ID NO: 459678 - DNA, 6 bp, Homo sapiens
  chr3:9994129-9994135
  hyper
  colorectal vs. lymphoid_neoplasm
aggagc

SEQ ID NO: 459679 - DNA, 370 bp, Homo sapiens; identical to SEQ ID NO: 455964
  chr3:16553609-16553979
  hyper
  colorectal vs. lymphoid_neoplasm,bladder_and_urothelial, multiple_myeloma,renal,myeloid_neoplasm,sarcoma

SEQ ID NO: 459680 - DNA, 78 bp, Homo sapiens; identical to SEQ ID NO: 345081
  chr3:16555426-16555504
  hyper
  colorectal vs. lymphoid_neoplasm,sarcoma,anorectal,renal, lung,ovary,myeloid_neoplasm

SEQ ID NO: 459681 - DNA, 222 bp, Homo sapiens
  chr3:25469458-25469680
  hyper
  colorectal vs. upper_gi,pancreas_gallbladder
gttggtgctcaacgtgagccaggagcagcgtcccggctcctcccctgctcattttaaaagcacttcttgtattgtttttaaggtgagaaataggaaagaaaacgccggcttgtgcgctcgctgcctgcctctctggctgtctgcttttgcagggctgctgggagtttttaagctctgtgagaatcctgggagttggtgatgtcagactagttgggtcatttg

SEQ ID NO: 459682 - DNA, 130 bp, Homo sapiens; identical to SEQ ID NO: 345083
  chr3:25469874-25470004
  hyper
  colorectal vs. upper_gi,pancreas_gallbladder

SEQ ID NO: 459683 - DNA, 196 bp, Homo sapiens; identical to SEQ ID NO: 453202
  chr3:44038922-44039118
  hyper
  colorectal vs. renal,lung,thyroid,non_cancer, bladder_and_urothelial,prostate

SEQ ID NO: 459684 - DNA, 202 bp, Homo sapiens; identical to SEQ ID NO: 457978
  chr3:54156155-54156357
  hyper
  colorectal vs. head_and_neck

SEQ ID NO: 459685 - DNA, 78 bp, Homo sapiens
  chr3:63264062-63264140
  hyper
  colorectal vs. bladder_and_urothelial
cgaggccccctgccctcgccgggctgctccagggtgtcgctcctctggctgctcccgaaggggcttctggccctgagg

SEQ ID NO: 459686 - DNA, 86 bp, Homo sapiens; identical to SEQ ID NO: 457989
  chr3:63264169-63264255
  hyper
  colorectal vs. bladder_and_urothelial

SEQ ID NO: 459687 - DNA, 254 bp, Homo sapiens
  chr3:120169367-120169621
  hyper
  colorectal vs. anorectal
cgtaagcagcattactgccccagctccaccccagcacaccccaaggaccgaaactcccagcgccaccccgggagagcatccccaggacgcgcgcccacccgcccagcgcgcagacccaagaggccccggggaccgagttcggactcctcggcccctcgcctacctcggcgcggacccaggcgaccgccaccagcgcgagcgcgagcgcgagccagcgtttccacatctgcggaagagagaagagagcgagtctg

SEQ ID NO: 459688 - DNA, 54 bp, Homo sapiens
  chr3:121902674-121902728
  hyper
  colorectal vs. pancreas_gallbladder
cgcgatttgtatttattttactgtgaatctctggccttatatcagaaaaaaaaa

SEQ ID NO: 459689 - DNA, 49 bp, Homo sapiens; identical to SEQ ID NO: 453213
  chr3:129694299-129694348
  hyper
  colorectal vs. multiple_myeloma

SEQ ID NO: 459690 - DNA, 22 bp, Homo sapiens
  chr3:139258159-139258181
  hyper
  colorectal vs. pancreas_gallbladder,cervical
cgaggacgccctttctggcgtc

SEQ ID NO: 459691 - DNA, 267 bp, Homo sapiens; identical to SEQ ID NO: 349830
  chr3:139258672-139258939
  hyper
  colorectal vs. pancreas_gallbladder,cervical

SEQ ID NO: 459692 - DNA, 15 bp, Homo sapiens
  chr3:142837817-142837832
  hyper
  colorectal vs. ovary,uterine,renal, bladder_and_urothelial,lymphoid_neoplasm,myeloid_neoplasm, multiple_myeloma,melanoma,non_cancer,prostate,thyroid, head_and_neck,lung
cgggacaagtatttt

SEQ ID NO: 459693 - DNA, 345 bp, Homo sapiens
  chr3:160822422-160822767
  hyper
  colorectal vs. upper_gi
cgtgggatttccttctctctccgcccgttctccacattccccacttagtttcacattccttcccaatccctccgacatccctgcgccggggcccttccctagcgctccgggaaagcgttcgccgcaggcctgttaggggcccaccaataccgtaacaccgttcccgtcctcttcctcggcaccgctgcaaacgccccgggtcgctacccggatttgacggtggctggagcggcacgggcgacgcaaggcaggtattgcaccctggggcaaggcaaggtggacaaccagcggatgcggcgcggccgcggcctgggcctgggccctccgcgtcgcccactgccccac

SEQ ID NO: 459694 - DNA, 245 bp, Homo sapiens; identical to SEQ ID NO: 199173
  chr3:160822962-160823207
  hyper
  colorectal vs. upper_gi

SEQ ID NO: 459695 - DNA, 138 bp, Homo sapiens; identical to SEQ ID NO: 345119
  chr3:179169640-179169778
  hyper
  colorectal vs. cervical,head_and_neck,ovary,breast, bladder_and_urothelial,melanoma,uterine,lung,prostate,sarcoma, myeloid_neoplasm,thyroid,non_cancer,lymphoid_neoplasm

SEQ ID NO: 459696 - DNA, 3 bp, Homo sapiens
  chr3:186078710-186078713
  hyper
  colorectal vs. thyroid,non_cancer,lymphoid_neoplasm, prostate,sarcoma,bladder_and_urothelial,multiple_myeloma,renal
cgt

SEQ ID NO: 459697 - DNA, 133 bp, Homo sapiens; identical to SEQ ID NO: 453234
  chr3:186079331-186079464
  hyper
  colorectal vs. thyroid,non_cancer,lymphoid_neoplasm, prostate,sarcoma,bladder_and_urothelial,multiple_myeloma,renal

SEQ ID NO: 459698 - DNA, 291 bp, Homo sapiens; identical to SEQ ID NO: 453235
  chr3:186079331-186079622
  hyper
  colorectal vs. prostate,multiple_myeloma, myeloid_neoplasm,lymphoid_neoplasm,non_cancer,thyroid,breast, sarcoma,ovary,uterine,renal

SEQ ID NO: 459699 - DNA, 125 bp, Homo sapiens; identical to SEQ ID NO: 453236
  chr3:186079497-186079622
  hyper
  colorectal vs. multiple_myeloma,ovary,uterine,non_cancer, prostate

SEQ ID NO: 459700 - DNA, 56 bp, Homo sapiens; identical to SEQ ID NO: 349888
  chr3:192128140-192128196
  hyper
  colorectal vs. renal,sarcoma,ovary,myeloid_neoplasm, thyroid,prostate,non_cancer,breast

SEQ ID NO: 459701 - DNA, 147 bp, Homo sapiens
  chr3:194407289-194407436
  hyper
  colorectal vs. anorectal
cgcgcgtgtctcccccgcaccaaccttttttgcacactcgaagctgaatattttcttttttagagaatttacccgcacctcctgcggggttcctaagcactctctctgctcccctccccccaactccctaccacagggccgctccca

SEQ ID NO: 459702 - DNA, 154 bp, Homo sapiens
  chr3:194407836-194407990
  hyper
  colorectal vs. anorectal
caagatctggagcaagagcgaggcgggccgtcagggcaccaagatgaagctgacggtgagtgcgcagggtatccgcatggtgcacgccgaggagcgcgcgctgcgccgcccgggccacctctacctgctgcaccgcgtcacctactgcgtggcc

SEQ ID NO: 459703 - DNA, 3 bp, Homo sapiens
  chr3:194407996-194407999
  hyper
  colorectal vs. anorectal
cgg

SEQ ID NO: 459704 - DNA, 102 bp, Homo sapiens
  chr3:194408028-194408130
  hyper
  colorectal vs. anorectal
gcacgagctgaagcacaaggccgtgatgctgcgctgccacgccgtgctggtgtccaagcccgaaaaggcgcaggccatggccctgctgctctaccagacgtc

SEQ ID NO: 459705 - DNA, 80 bp, Homo sapiens; identical to SEQ ID NO: 370368
  chr4:5712804-5712884
  hyper
  colorectal vs. lung

SEQ ID NO: 459706 - DNA, 6 bp, Homo sapiens
  chr4:5712886-5712892
  hyper
  colorectal vs. lung
gggtgg

SEQ ID NO: 459707 - DNA, 57 bp, Homo sapiens; identical to SEQ ID NO: 370369
  chr4:5713393-5713450
  hyper
  colorectal vs. lung

SEQ ID NO: 459708 - DNA, 44 bp, Homo sapiens
  chr4:10458329-10458373
  hyper
  colorectal vs. anorectal
cgcgtcccgctcgccgcgagggaaggccggggttcttccaaccg

SEQ ID NO: 459709 - DNA, 25 bp, Homo sapiens
  chr4:10459327-10459352
  hyper
  colorectal vs. anorectal
gggtcccgcggagggcggccttggc

SEQ ID NO: 459710 - DNA, 415 bp, Homo sapiens
  chr4:11429092-11429507
  hyper
  colorectal vs. upper_gi
cggagcgcagcgcaaagacagtggatttggagtggcctccctagaatccccccaaaagcatcttggcacaagttgtagataaaaatagctcatgataacattgtgggaaagggaggagcgagactcgcgcaaggcgaggcaagggtaccactggatctgcaaaggaggaggaagagggaggatgcaacccttggcccaagagagcgccctgagtgtgcgaggaatcgctggctcccaggggagggaaagagatggaagacctatagcgcctataactgcagagttatagacctataactgcagagcccagcacaccccatcccgcgccggcacccggctttggctccagcttcttcttcccatcatccgcctacgttctgggtctgtcctccgcttcctgggacaggctggggct

SEQ ID NO: 459711 - DNA, 3 bp, Homo sapiens
  chr4:42155097-42155100
  hyper
  colorectal vs. prostate,thyroid,non_cancer, myeloid_neoplasm,uterine,ovary,multiple_myeloma, lymphoid_neoplasm
gac

SEQ ID NO: 459712 - DNA, 71 bp, Homo sapiens; identical to SEQ ID NO: 458079
  chr4:123747655-123747726
  hyper
  colorectal vs. sarcoma

SEQ ID NO: 459713 - DNA, 61 bp, Homo sapiens
  chr4:142054594-142054655
  hyper
  colorectal vs. ovary
gtaagcggtccgtgtgtgtgtgtctgtatgtttgtgtgtgtgtgtgtgtgtgtgtataatg

SEQ ID NO: 459714 - DNA, 155 bp, Homo sapiens; identical to SEQ ID NO: 357972
  chr4:142054757-142054912
  hyper
  colorectal vs. ovary

SEQ ID NO: 459715 - DNA, 271 bp, Homo sapiens
  chr4:147560617-147560888
  hyper
  colorectal vs. melanoma,sarcoma
tttgacagccccctttatctgcttgatgtttttttcatgtctgcacagcaaatcaccccacacctccaaccaattttcccctctctctctcttaagtattcagcaggtcttgcctttcatattaatttttatgacctgggatgttgcctgtgcgcgtgttgtgttgtgtttcgttgtgtctacaggctcactttcctcctcctcctgcactctcggcttctttctgtggcttccctctttttctcttcacctctgttttcaggattattat

SEQ ID NO: 459716 - DNA, 46 bp, Homo sapiens
  chr4:154143770-154143816
  hyper
  colorectal vs. liver_bileduct,upper_gi,head_and_neck, cervical
cgcggttgatggaaaacagatgtcttactgctctgggcctgagcac

SEQ ID NO: 459717 - DNA, 214 bp, Homo sapiens
  chr4:154144184-154144398
  hyper
  colorectal vs. liver_bileduct,upper_gi,head_and_neck, cervical
tctcgtagtaagtcgtggctcgggctgtgccctgggaaccctcccgcccgggcaaggtccggtggccggagcgtgcgggaagcctgcccagagtccatttccggacgggcgctgcggggctggcagccggcctggagcgggtgcagtgggtcggcgcggcgcagagctgtcagcaacagggccgctgagcagcagaacctggacgccgcgcggc

SEQ ID NO: 459718 - DNA, 40 bp, Homo sapiens; identical to SEQ ID NO: 350004
  chr4:156298073-156298113
  hyper
  colorectal vs. breast,lung,uterine,ovary,prostate, lymphoid_neoplasm

SEQ ID NO: 459719 - DNA, 43 bp, Homo sapiens; identical to SEQ ID NO: 453271
  chr4:176986744-176986787
  hyper
  colorectal vs. melanoma,ovary,lung,renal, myeloid_neoplasm,non_cancer,lymphoid_neoplasm,prostate

SEQ ID NO: 459720 - DNA, 171 bp, Homo sapiens; identical to SEQ ID NO: 456015
  chr5:10564301-10564472
  hyper
  colorectal vs. lymphoid_neoplasm,myeloid_neoplasm, thyroid,cervical,non_cancer,ovary,renal,sarcoma, bladder_and_urothelial,head_and_neck,anorectal,uterine, multiple_myeloma

SEQ ID NO: 459721 - DNA, 1 bp, Homo sapiens
  chr5:31639088-31639089
  hyper
  colorectal vs. uterine
c

SEQ ID NO: 459722 - DNA, 440 bp, Homo sapiens
  chr5:31639164-31639604
  hyper
  colorectal vs. uterine
cgtccctgtcactcggggaagggagttcccgcccctcgaatcaaccagggggagggaatccccgcccatcctggaggctcggcggatcccctgcgcagcgaggcgaggagcggaccccagcgccggtgcgtgccggccccgggcagcgggacgcggcggggcggcggctgcaggcagccgaggagccgcaggccgaacccaaggcaccgggattgcgcctcccgcggctgccggcgaaccgcggctctgcagctcggggcaggcgcggcggcggcaccggtggtggccgcggtggcggcagctgcgcggggacccgccgggcggcgcctgggtctggacgcgcgaggaagccgcgggagcctcggccaagccgcgagcaggtgaagcgaccgtcccgctgcagccgggacgcgcggctccgggtgggcaggggatggggg

SEQ ID NO: 459723 - DNA, 19 bp, Homo sapiens
  chr5:33936135-33936154
  hyper
  colorectal vs. melanoma
cgggtgggctttgcctgca

SEQ ID NO: 459724 - DNA, 101 bp, Homo sapiens
  chr5:38556107-38556208
  hyper
  colorectal vs. upper_gi,pancreas_gallbladder
cgaaatcacctggcaggtcacctctccgaaggaaaaacatttcaagctccctcccatcccccaggtaacctctggcctcagaactcactgccctgcgtggg

SEQ ID NO: 459725 - DNA, 86 bp, Homo sapiens
  chr5:38556985-38557071
  hyper
  colorectal vs. upper_gi,pancreas_gallbladder
tctcagaaggtcatggaagcgcaggggagagcgaggcggccgagcccaggcaaatcctcgagaaaggccgagtgcgcgacggctct

SEQ ID NO: 459726 - DNA, 86 bp, Homo sapiens; identical to SEQ ID NO: 459725
  chr5:38556985-38557071
  hyper
  colorectal vs. upper_gi

SEQ ID NO: 459727 - DNA, 162 bp, Homo sapiens; identical to SEQ ID NO: 358093
  chr5:38557400-38557562
  hyper
  colorectal vs. upper_gi

SEQ ID NO: 459728 - DNA, 1 bp, Homo sapiens
  chr5:38845617-38845618
  hyper
  colorectal vs. upper_gi,pancreas_gallbladder,lung, cervical,head_and_neck,anorectal
c

SEQ ID NO: 459729 - DNA, 50 bp, Homo sapiens; identical to SEQ ID NO: 345162
  chr5:49737299-49737349
  hyper
  colorectal vs. pancreas_gallbladder

SEQ ID NO: 459730 - DNA, 76 bp, Homo sapiens; identical to SEQ ID NO: 454408
  chr5:54518558-54518634
  hyper
  colorectal vs. multiple_myeloma

SEQ ID NO: 459731 - DNA, 117 bp, Homo sapiens
  chr5:76506029-76506146
  hyper
  colorectal vs. uterine
cgctgggggcggcgtcgggatgagtgcagaagagacgaggcctctggacagcggaggaggaggggagggcgccgaggcgcggtgccagctgccgcgcacaggggccccgcggcggag

SEQ ID NO: 459732 - DNA, 96 bp, Homo sapiens; identical to SEQ ID NO: 358151
  chr5:76507202-76507298
  hyper
  colorectal vs. bladder_and_urothelial,ovary,breast, uterine,prostate,myeloid_neoplasm

SEQ ID NO: 459733 - DNA, 3 bp, Homo sapiens
  chr5:77147514-77147517
  hyper
  colorectal vs. uterine
cgc

SEQ ID NO: 459734 - DNA, 23 bp, Homo sapiens
  chr5:77148195-77148218
  hyper
  colorectal vs. uterine
gtttctgcaattatggcttaaac

SEQ ID NO: 459735 - DNA, 192 bp, Homo sapiens; identical to SEQ ID NO: 453297
  chr5:77148195-77148387
  hyper
  colorectal vs. sarcoma

SEQ ID NO: 459736 - DNA, 38 bp, Homo sapiens; identical to SEQ ID NO: 456033
  chr5:77268330-77268368
  hyper
  colorectal vs. myeloid_neoplasm,thyroid

SEQ ID NO: 459737 - DNA, 15 bp, Homo sapiens
  chr5:77269447-77269462
  hyper
  colorectal vs. multiple_myeloma
ttccccgcggggctc

SEQ ID NO: 459738 - DNA, 158 bp, Homo sapiens; identical to SEQ ID NO: 350105
  chr5:82767810-82767968
  hyper
  colorectal vs. renal,uterine

SEQ ID NO: 459739 - DNA, 314 bp, Homo sapiens; identical to SEQ ID NO: 345177
  chr5:82769369-82769683
  hyper
  colorectal vs. pancreas_gallbladder,lung,breast,uterine

SEQ ID NO: 459740 - DNA, 542 bp, Homo sapiens; identical to SEQ ID NO: 458116
  chr5:82769369-82769911
  hyper
  colorectal vs. pancreas_gallbladder,lung,ovary,uterine, breast

SEQ ID NO: 459741 - DNA, 160 bp, Homo sapiens; identical to SEQ ID NO: 458117
  chr5:82769751-82769911
  hyper
  colorectal vs. lung,melanoma,pancreas_gallbladder

SEQ ID NO: 459742 - DNA, 246 bp, Homo sapiens; identical to SEQ ID NO: 458118
  chr5:82770318-82770564
  hyper
  colorectal vs. lung,melanoma,pancreas_gallbladder

SEQ ID NO: 459743 - DNA, 25 bp, Homo sapiens
  chr5:82770612-82770637
  hyper
  colorectal vs. lung,melanoma,pancreas_gallbladder
ctgacccgagttccatccagacagc

SEQ ID NO: 459744 - DNA, 87 bp, Homo sapiens; identical to SEQ ID NO: 453315
  chr5:100238197-100238284
  hyper
  colorectal vs. lymphoid_neoplasm,multiple_myeloma,lung, thyroid,renal,bladder_and_urothelial

SEQ ID NO: 459745 - DNA, 345 bp, Homo sapiens; identical to SEQ ID NO: 453316
  chr5:100239724-100240069
  hyper
  colorectal vs. lymphoid_neoplasm

SEQ ID NO: 459746 - DNA, 17 bp, Homo sapiens
  chr5:112629411-112629428
  hyper
  colorectal vs. anorectal
cgcttgcctcaaagact

SEQ ID NO: 459747 - DNA, 470 bp, Homo sapiens; identical to SEQ ID NO: 458145
  chr5:112629778-112630248
  hyper
  colorectal vs. anorectal

SEQ ID NO: 459748 - DNA, 27 bp, Homo sapiens
  chr5:127872819-127872846
  hyper
  colorectal vs. anorectal,melanoma
cgcccaacccccggagagagggctttc

SEQ ID NO: 459749 - DNA, 625 bp, Homo sapiens; identical to SEQ ID NO: 456042
  chr5:142781875-142782500
  hyper
  colorectal vs. anorectal,multiple_myeloma

SEQ ID NO: 459750 - DNA, 78 bp, Homo sapiens; identical to SEQ ID NO: 456043
  chr5:142782625-142782703
  hyper
  colorectal vs. anorectal,multiple_myeloma

SEQ ID NO: 459751 - DNA, 283 bp, Homo sapiens
  chr5:142782217-142782500
  hyper
  colorectal vs. liver_bileduct,pancreas_gallbladder
cggccgcagtctccaagttgcgggctgtcagccccccgcgtgtgcaccctcacgcgccccgcacgccctcctcaagccaggcgccgccggggcctccccggagcccgggctcgcgctcgggcgcgccggggtggcgtgcaaatattcgggcgagtaaaattcagacgcggcttagcgttcaccacgaaaacgggtgtcgggcgacccccttggagggaaaggggacactagggggagaaaagaggccaggattcccgcgaggaatgagaggctcgaagccccc

SEQ ID NO: 459752 - DNA, 125 bp, Homo sapiens
  chr5:142782625-142782750
  hyper
  colorectal vs. liver_bileduct,pancreas_gallbladder
cgtcgcccggcccttgccagccccccacccccactccccgaggctaataaaagtttgtaggctcccgcggcggcccccgagttgtctccggtcccagcggcacctcgggggagcgagcgcgcccc

SEQ ID NO: 459753 - DNA, 410 bp, Homo sapiens; identical to SEQ ID NO: 345197
  chr5:142782794-142783204
  hyper
  colorectal vs. liver_bileduct,pancreas_gallbladder

SEQ ID NO: 459754 - DNA, 839 bp, Homo sapiens
  chr5:142783606-142784445
  hyper
  colorectal vs. liver_bileduct
cgctacctccttcccgcccccgcccagctccgcggctccagacccactcgggagctcgctctgccccttggcggcaagcgccgccagtgcccctgcgggtgacagcgggcgggccacaagagccggggcgcctcccgcggctgagctgcgtgagtggcccgcgccgccgccgccgggccgagttgcgtgaagtgtgtcacttcgaaaggggctacggggttgcacggaaacggtgccgcagcgtctcggccgcgctcggggccgggcggcctgacacgccctctggggaggcttcagggaagggacgggatagcgggggtcggcgcatacgtactttgggcccggggggagtcgcgtgccggcaggtcccccaccaccgcatcatctgggcggccgggtcttcagctgccgccgccgcgctctcgcactgggagagaagttgcaaagcagaacccaccctcccccgcgccccgaccgtcccccaccctcttccccgagtctgcgaggcggcggcggcggcagaaggaggcgccgcctgccaagttcaacccccacccctcccgcccaatgtgctcacactcgaaggaagttgcacgccaaatgcaaaacctccagcgagctggatttctttgcactttttttttattattatgattaaggaaagcagggggcggcaggcttaaaagcaagttgcaggcgaaatagtaagttgctggcgaaatatagccccccttccgaaactcctgacctcttcttccaccccggccagggcccgcgtccaagttcccggtgcaggccccacccccgaatcttgacatttgctgccctcgactctgtgc

SEQ ID NO: 459755 - DNA, 718 bp, Homo sapiens; identical to SEQ ID NO: 454427
  chr5:142783958-142784676
  hyper
  colorectal vs. liver_bileduct,lung,pancreas_gallbladder, head_and_neck,cervical,lymphoid_neoplasm,melanoma,anorectal, renal,multiple_myeloma,breast,ovary,sarcoma,prostate,non_cancer

SEQ ID NO: 459756 - DNA, 215 bp, Homo sapiens; identical to SEQ ID NO: 454428
  chr5:142784461-142784676
  hyper
  colorectal vs. liver_bileduct,pancreas_gallbladder,lung, cervical,head_and_neck,melanoma,anorectal,lymphoid_neoplasm, renal,prostate,breast,multiple_myeloma,sarcoma, bladder_and_urothelial,ovary,non_cancer,myeloid_neoplasm,
  CONT. FROM ABOVE: thyroid,upper_gi

SEQ ID NO: 459757 - DNA, 32 bp, Homo sapiens; identical to SEQ ID NO: 345199
  chr5:142785272-142785304
  hyper
  colorectal vs. liver_bileduct,pancreas_gallbladder,lung, cervical,head_and_neck,melanoma,anorectal,lymphoid_neoplasm, renal,prostate,breast,multiple_myeloma,sarcoma, bladder_and_urothelial,ovary,non_cancer,myeloid_neoplasm,
  CONT. FROM ABOVE: thyroid,upper_gi

SEQ ID NO: 459758 - DNA, 13 bp, Homo sapiens
  chr5:169063996-169064009
  hyper
  colorectal vs. lymphoid_neoplasm,multiple_myeloma
cggcaatcaggaa

SEQ ID NO: 459759 - DNA, 117 bp, Homo sapiens
  chr5:178016455-178016572
  hyper
  colorectal vs. anorectal,bladder_and_urothelial,cervical, uterine
cgccgtgaccaccgcctctccaggtgtaccagcgttggttaggaacagtaggtgctactggtcacagtcaccagatacttcccacgagcctcatctttatccccgactctggccgcc

SEQ ID NO: 459760 - DNA, 289 bp, Homo sapiens
  chr5:178770455-178770744
  hyper
  colorectal vs. bladder_and_urothelial,anorectal
cggacccacccccggatgcaagccagagacctgttcaggcaggcaaaagagagaggcgcacgctcctgcctgctgagccttttggagacccgggcgctccccatgcataaatggccccctgctcagaccagtcaaaacaacctgctttccagccaagcccttcagttggagcacgaggctcactaaagcacgggaagggcgcggaaagtcctcagcgcaggccttgccctcccaagggactcccaggtaacccttttccaaaacccaggcgagagcagcggagagaaag

SEQ ID NO: 459761 - DNA, 61 bp, Homo sapiens; identical to SEQ ID NO: 453345
  chr6:391113-391174
  hyper
  colorectal vs. lymphoid_neoplasm,thyroid,non_cancer, prostate,multiple_myeloma,myeloid_neoplasm,renal,sarcoma

SEQ ID NO: 459762 - DNA, 55 bp, Homo sapiens; identical to SEQ ID NO: 346767
  chr6:393764-393819
  hyper
  colorectal vs. lymphoid_neoplasm,myeloid_neoplasm, melanoma,thyroid,non_cancer,multiple_myeloma,sarcoma,prostate

SEQ ID NO: 459763 - DNA, 52 bp, Homo sapiens
  chr6:1625068-1625120
  hyper
  colorectal vs. anorectal,sarcoma
tttttttttttttttttttttataacatgaagttgtcagggacgctcctatg

SEQ ID NO: 459764 - DNA, 78 bp, Homo sapiens
  chr6:11043624-11043702
  hyper
  colorectal vs. liver_bileduct,uterine,ovary,breast, prostate
cggacacgggtgaacacacacacacacacacacacacacacagcttactgtcaggcagttcatcggacacgggtgaac

SEQ ID NO: 459765 - DNA, 94 bp, Homo sapiens
  chr6:37665241-37665335
  hyper
  colorectal vs. bladder_and_urothelial
agccgagccgccgataaacccgggggaagaatagcagcccggcgccccgcgggaatctggagagcaattccaggcaagaagggccccagaaaac

SEQ ID NO: 459766 - DNA, 86 bp, Homo sapiens
  chr6:41605681-41605767
  hyper
  colorectal vs. multiple_myeloma
cgctgtgggcgggtggcctgggagcccagatccctgtccctggcttaggaccccgggaggagaccgagggggtgggtaaaacgtga

SEQ ID NO: 459767 - DNA, 467 bp, Homo sapiens
  chr6:43969986-43970453
  hyper
  colorectal vs. upper_gi
cgccttctcccccgccgcccgcgcccacgccctcccccgcggggccgtggcagtgccaccaagggcctctttaagcccctttgaagccgcggagccccgcgccgcaggaggccccgccgctatgccagctatgccagctatgtccctgctgccgccggccgccaccgctcccccattaatgctggctaatctggctaataaataaactcccctcccagccccagccccgcgccgactcctccccgcccccgcagaatcgatgtcagggctcgactagagcaagcgcccgcactccaccccactccctcgagatgtagctgacgttttttcttatggctgccctaggtctgtagcccgtcggggattctcggggagacgtgggatttgggaggtctccgcctagccactgcgtttgccttcctcttttccagtccacctgcgcaccaggggcaggacacgtggctggg

SEQ ID NO: 459768 - DNA, 11 bp, Homo sapiens
  chr6:43970721-43970732
  hyper
  colorectal vs. upper_gi
ggcatcgcttc

SEQ ID NO: 459769 - DNA, 249 bp, Homo sapiens; identical to SEQ ID NO: 456079
  chr6:56818408-56818657
  hyper
  colorectal vs. anorectal

SEQ ID NO: 459770 - DNA, 55 bp, Homo sapiens; identical to SEQ ID NO: 458205
  chr6:71665452-71665507
  hyper
  colorectal vs. lung

SEQ ID NO: 459771 - DNA, 223 bp, Homo sapiens; identical to SEQ ID NO: 458206
  chr6:71665723-71665946
  hyper
  colorectal vs. lung

SEQ ID NO: 459772 - DNA, 156 bp, Homo sapiens
  chr6:72129577-72129733
  hyper
  colorectal vs. pancreas_gallbladder,upper_gi, liver_bileduct,lung
cgcgccggcacccgaagagttcccacggatacggttcccaagtcagtggcatgtcagtgcccttcaagctaccgcaattttatttgttctccccgccagctccataaagtattaaaggctctctccacgacttcttcccaagcccaggtgccctaa

SEQ ID NO: 459773 - DNA, 61 bp, Homo sapiens; identical to SEQ ID NO: 350400
  chr6:72130646-72130707
  hyper
  colorectal vs. pancreas_gallbladder,liver_bileduct, melanoma,upper_gi,anorectal,lung,breast

SEQ ID NO: 459774 - DNA, 227 bp, Homo sapiens; identical to SEQ ID NO: 453389
  chr6:72596315-72596542
  hyper
  colorectal vs. lung,uterine

SEQ ID NO: 459775 - DNA, 9 bp, Homo sapiens
  chr6:73333099-73333108
  hyper
  colorectal vs. head_and_neck,breast,anorectal,lung, thyroid,lymphoid_neoplasm,multiple_myeloma,prostate,non_cancer, renal,myeloid_neoplasm
ttgtggcgc

SEQ ID NO: 459776 - DNA, 41 bp, Homo sapiens; identical to SEQ ID NO: 454461
  chr6:74019373-74019414
  hyper
  colorectal vs. pancreas_gallbladder,anorectal,lung, upper_gi,lymphoid_neoplasm,cervical,multiple_myeloma, myeloid_neoplasm,prostate,head_and_neck

SEQ ID NO: 459777 - DNA, 102 bp, Homo sapiens; identical to SEQ ID NO: 346835
  chr6:74020094-74020196
  hyper
  colorectal vs. pancreas_gallbladder,anorectal,lung, upper_gi,lymphoid_neoplasm,cervical,multiple_myeloma, myeloid_neoplasm,prostate,head_and_neck

SEQ ID NO: 459778 - DNA, 131 bp, Homo sapiens
  chr6:74161047-74161178
  hyper
  colorectal vs. upper_gi
cggttggttgtctgatcgttggatgtgtagatgaataaacgaacggtttgtcgttttacttagactaggctaccgaaaaacatgcaaaagtctaagttacttccgaagggaagtgaggggcgcgacccggg

SEQ ID NO: 459779 - DNA, 179 bp, Homo sapiens
  chr6:74161321-74161500
  hyper
  colorectal vs. upper_gi
gcagcaggtggtccacaacccctttcaccatccccgccgccgtggagatatcatcgcggctgagcttcaacttctccaaaaccgcccggagcttcgaggccccaggcgccgcatccctccgtacgagaatgggggccgagaccggcaggccggggctgggcacgtcccagggcccgggc

SEQ ID NO: 459780 - DNA, 179 bp, Homo sapiens; identical to SEQ ID NO: 459779
  chr6:74161321-74161500
  hyper
  colorectal vs. upper_gi

SEQ ID NO: 459781 - DNA, 124 bp, Homo sapiens; identical to SEQ ID NO: 453391
  chr6:87646737-87646861
  hyper
  colorectal vs. melanoma,bladder_and_urothelial

SEQ ID NO: 459782 - DNA, 171 bp, Homo sapiens; identical to SEQ ID NO: 453392
  chr6:87646944-87647115
  hyper
  colorectal vs. melanoma,bladder_and_urothelial

SEQ ID NO: 459783 - DNA, 75 bp, Homo sapiens; identical to SEQ ID NO: 453393
  chr6:87647143-87647218
  hyper
  colorectal vs. melanoma,bladder_and_urothelial

SEQ ID NO: 459784 - DNA, 256 bp, Homo sapiens
  chr6:90142647-90142903
  hyper
  colorectal vs. liver_bileduct,pancreas_gallbladder, bladder_and_urothelial,cervical,lung,ovary,renal
cgcggaaaacctcaccctactataggcccccttcctcccactcttcagaaggcggtggccccacccaggagagggctgcagatcggggccagccccagggcctccgcggtgccacctctctctcgcgagggtccctgccgtgccccggctcgccgctgggaggcgctgcggcaccggcgtaggagccgccggcaggggtggggcggggccggcgggacggggcagagggccctgcggcggcggacgcggcgggctc

SEQ ID NO: 459785 - DNA, 372 bp, Homo sapiens; identical to SEQ ID NO: 346840
  chr6:91005702-91006074
  hyper
  colorectal vs. head_and_neck,cervical,anorectal, lymphoid_neoplasm,uterine,prostate

SEQ ID NO: 459786 - DNA, 42 bp, Homo sapiens
  chr6:91320244-91320286
  hyper
  colorectal vs. bladder_and_urothelial
cgtgtttgtgtagtaagccgagttctttcttgactgtctgtt

SEQ ID NO: 459787 - DNA, 3 bp, Homo sapiens
  chr6:134638705-134638708
  hyper
  colorectal vs. head_and_neck,bladder_and_urothelial
cgg

SEQ ID NO: 459788 - DNA, 160 bp, Homo sapiens; identical to SEQ ID NO: 346856
  chr6:134639003-134639163
  hyper
  colorectal vs. head_and_neck,bladder_and_urothelial

SEQ ID NO: 459789 - DNA, 69 bp, Homo sapiens; identical to SEQ ID NO: 358678
  chr6:151562596-151562665
  hyper
  colorectal vs. anorectal

SEQ ID NO: 459790 - DNA, 1 bp, Homo sapiens
  chr6:151815611-151815612
  hyper
  colorectal vs. upper_gi,pancreas_gallbladder
c

SEQ ID NO: 459791 - DNA, 235 bp, Homo sapiens
  chr6:151815611-151815846
  hyper
  colorectal vs. upper_gi,pancreas_gallbladder
cgccacccctgggagcaaagaattccttcatttaactttccctgcttagctactgaagtgtgcttcggagcaatttctggaaaatctgatgtggcaggaggagggccagcccggagtagagtcaccggccctttcgttgcgaagtaatccagaaacgttggtaattcagttgttcctgaatgcatctactcatttactcccaggagttacttaggtactggggactttcaggtat

SEQ ID NO: 459792 - DNA, 80 bp, Homo sapiens; identical to SEQ ID NO: 350480
  chr6:151815879-151815959
  hyper
  colorectal vs. upper_gi,pancreas_gallbladder

SEQ ID NO: 459793 - DNA, 229 bp, Homo sapiens
  chr6:159589682-159589911
  hyper
  colorectal vs. myeloid_neoplasm
cggcggcggacagcagcacgcggcgtccaggacccggccttcctagagcttaggtcactgtagcctccaggggcgctccgagtccatctggagggccgcgaggcttccaggctggaaggaggaatagggagaaggaggaatagggagacctggggcagtgttacaattacagaaaagggagaggcgaggtccgctgagtccttggcctgggcaacaaggcacactgaaa

SEQ ID NO: 459794 - DNA, 41 bp, Homo sapiens; identical to SEQ ID NO: 346866
  chr6:159591277-159591318
  hyper
  colorectal vs. sarcoma,prostate,myeloid_neoplasm,thyroid, lung,non_cancer,renal,multiple_myeloma

SEQ ID NO: 459795 - DNA, 1 bp, Homo sapiens
  chr6:161188084-161188085
  hyper
  colorectal vs. bladder_and_urothelial
c

SEQ ID NO: 459796 - DNA, 129 bp, Homo sapiens
  chr6:161188108-161188237
  hyper
  colorectal vs. bladder_and_urothelial
cgccctggaacacggagctggcgagaaggagaaaagcccagctggcggcgtaggggcgagggtcctgcctttcccggcggcctcgccctggccatcctggccctgcgggaaggggtcagcccacccgag

SEQ ID NO: 459797 - DNA, 26 bp, Homo sapiens
  chr6:161188612-161188638
  hyper
  colorectal vs. bladder_and_urothelial
tggctgacgttcgcttctgtttccac

SEQ ID NO: 459798 - DNA, 109 bp, Homo sapiens
  chr6:163834157-163834266
  hyper
  colorectal vs. pancreas_gallbladder,liver_bileduct,lung, head_and_neck,cervical,bladder_and_urothelial,breast,melanoma, ovary,renal,uterine,prostate,anorectal,sarcoma,myeloid_neoplasm, upper_gi,thyroid
cgtagatttagggactgccgacttctatagatcaaggacttcattggtgcagctgaggaaattcttccaaacaagtctaaatgttggaaatccaccaaactgcagagaa

SEQ ID NO: 459799 - DNA, 29 bp, Homo sapiens
  chr6:163834829-163834858
  hyper
  colorectal vs. pancreas_gallbladder,liver_bileduct,lung, head_and_neck,cervical,bladder_and_urothelial,breast,melanoma, ovary,renal,uterine,prostate,anorectal,sarcoma,myeloid_neoplasm, upper_gi,thyroid
acctccgccccgcagccaagacccgcgcc

SEQ ID NO: 459800 - DNA, 29 bp, Homo sapiens
  chr6:163834829-163834858
  hyper
  colorectal vs. liver_bileduct,pancreas_gallbladder, cervical,lung,head_and_neck,melanoma,bladder_and_urothelial, anorectal,renal,breast,sarcoma,uterine,ovary,prostate, myeloid_neoplasm,thyroid,multiple_myeloma,lymphoid_neoplasm,
  CONT. FROM ABOVE: non_cancer
acctccgccccgcagccaagacccgcgcc

SEQ ID NO: 459801 - DNA, 97 bp, Homo sapiens
  chr6:163834987-163835084
  hyper
  colorectal vs. liver_bileduct,pancreas_gallbladder, cervical,lung,head_and_neck,melanoma,bladder_and_urothelial, anorectal,renal,breast,sarcoma,uterine,ovary,prostate, myeloid_neoplasm,thyroid,multiple_myeloma,lymphoid_neoplasm,
  CONT. FROM ABOVE: non_cancer
cggggccctcccctcccccaccgcgcgctcgcggggcccgacgggggcggagcgaccctcggaaggggcgtggcgaccgggctcgacgcgcgcacgc

SEQ ID NO: 459802 - DNA, 340 bp, Homo sapiens
  chr6:163835131-163835471
  hyper
  colorectal vs. liver_bileduct,pancreas_gallbladder, cervical,lung,head_and_neck,melanoma,bladder_and_urothelial, anorectal,renal,breast,sarcoma,uterine,ovary,prostate, myeloid_neoplasm,thyroid,multiple_myeloma,lymphoid_neoplasm,
  CONT. FROM ABOVE: non_cancer
gaaagtcccccgtgaagcaacaggacgttaaaaaaaaatttctcttctgcggggtggataagaggttctgaaaaaactatagtaacgggaggcgaggcggaggcagcgctggcgcgtcccgctggaattcctctcgcctgccgcgccagccccgaccgcgcccgcagccccacccgccccgtgccgtggaaagccccgcgccccccccgcggccgtcggccccgcagcccacacccacccgccccgggcgccccgcacggcggcgacccagtccttgcgcccaggcccgccgagcgccgcagtccgtcacactcccgttgcccccgtcgcccgccccgcc

SEQ ID NO: 459803 - DNA, 97 bp, Homo sapiens; identical to SEQ ID NO: 459801
  chr6:163834987-163835084
  hyper
  colorectal vs. liver_bileduct,pancreas_gallbladder, head_and_neck,lung,bladder_and_urothelial,cervical,melanoma

SEQ ID NO: 459804 - DNA, 667 bp, Homo sapiens
  chr6:163835131-163835798
  hyper
  colorectal vs. liver_bileduct,pancreas_gallbladder, head_and_neck,lung,bladder_and_urothelial,cervical,melanoma
gaaagtcccccgtgaagcaacaggacgttaaaaaaaaatttctcttctgcggggtggataagaggttctgaaaaaactatagtaacgggaggcgaggcggaggcagcgctggcgcgtcccgctggaattcctctcgcctgccgcgccagccccgaccgcgcccgcagccccacccgccccgtgccgtggaaagccccgcgccccccccgcggccgtcggccccgcagcccacacccacccgccccgggcgccccgcacggcggcgacccagtccttgcgcccaggcccgccgagcgccgcagtccgtcacactcccgttgcccccgtcgcccgccccgccggggaggcagggaggagggggcgcggcgccggcggctgccccggtcgcggggcggcgggcagcaggcagcgggagcgcgccggccgggacccgctaacggccgccctgcgcggccccgcccgccgcccgcccccggccctccccgcgccgctgcccctccccccgccgccgccgctgctgccgccgccgctggcagcgccgcctgaactgaggcgaactccgccgccaagtgagtgaggaggaggaggaggagaaggaggaggaggaagaggaggagcgcagtcggagcgcggcggcagcggcagaggcgccgcggcggggaccagc

SEQ ID NO: 459805 - DNA, 69 bp, Homo sapiens
  chr6:163835906-163835975
  hyper
  colorectal vs. liver_bileduct,pancreas_gallbladder, head_and_neck,lung,bladder_and_urothelial,cervical,melanoma
gcgccccgcgcccgcactcggccagccgagacccgcctcccgcccgcccgccggcctcgtgagggacgc

SEQ ID NO: 459806 - DNA, 306 bp, Homo sapiens
  chr6:163835492-163835798
  hyper
  colorectal vs. liver_bileduct,pancreas_gallbladder,lung, head_and_neck,bladder_and_urothelial,cervical,melanoma,renal, breast,ovary
cgcggcgccggcggctgccccggtcgcggggcggcgggcagcaggcagcgggagcgcgccggccgggacccgctaacggccgccctgcgcggccccgcccgccgcccgcccccggccctccccgcgccgctgcccctccccccgccgccgccgctgctgccgccgccgctggcagcgccgcctgaactgaggcgaactccgccgccaagtgagtgaggaggaggaggaggagaaggaggaggaggaagaggaggagcgcagtcggagcgcggcggcagcggcagaggcgccgcggcggggaccagc

SEQ ID NO: 459807 - DNA, 292 bp, Homo sapiens
  chr6:163835906-163836198
  hyper
  colorectal vs. liver_bileduct,pancreas_gallbladder,lung, head_and_neck,bladder_and_urothelial,cervical,melanoma,renal, breast,ovary
gcgccccgcgcccgcactcggccagccgagacccgcctcccgcccgcccgccggcctcgtgagggacgcgccgagccgggcggccgagagcggcggcggctgggagcgcgtcgggcccgggcggaaagtgcctgcggggggcgggcgagcgcgcggtgccggccgccccggggctcggcgcgggagccagagcgggagccggcgcggagcgggacgccgggtcccgagcggcccgcggccggggctcgcccccgcccctccctcctctccggcggcggcggcggcggcggcg

SEQ ID NO: 459808 - DNA, 221 bp, Homo sapiens
  chr6:163835977-163836198
  hyper
  colorectal vs. liver_bileduct,pancreas_gallbladder, head_and_neck,lung,bladder_and_urothelial,cervical,melanoma, ovary,breast,renal,sarcoma,prostate,anorectal,uterine, myeloid_neoplasm,lymphoid_neoplasm,multiple_myeloma,non_cancer,
  CONT. FROM ABOVE: upper_gi
cgagccgggcggccgagagcggcggcggctgggagcgcgtcgggcccgggcggaaagtgcctgcggggggcgggcgagcgcgcggtgccggccgccccggggctcggcgcgggagccagagcgggagccggcgcggagcgggacgccgggtcccgagcggcccgcggccggggctcgcccccgcccctccctcctctccggcggcggcggcggcggcggcg

SEQ ID NO: 459809 - DNA, 205 bp, Homo sapiens
  chr6:163837231-163837436
  hyper
  colorectal vs. liver_bileduct,pancreas_gallbladder, head_and_neck,bladder_and_urothelial,anorectal,lung,ovary, cervical,breast,renal,prostate,melanoma,sarcoma,uterine, lymphoid_neoplasm,myeloid_neoplasm,thyroid,non_cancer,upper_gi,
  CONT. FROM ABOVE: multiple_myeloma
aaataaaattgagccaaagtttccaaaaagctgtatggagcgctgtggggagtgaagaatgacaagaagattaatgttgaccaactttggaatttccttaagaagttctcatagcagtacctgaagtattaatttctagtagctgtgggtttctgtggacgcctagagaaaaaaaagaccacaaaaaaagtctgtttcgaaaatc

SEQ ID NO: 459810 - DNA, 239 bp, Homo sapiens
  chr6:163837231-163837470
  hyper
  colorectal vs. liver_bileduct,pancreas_gallbladder, bladder_and_urothelial,head_and_neck,cervical,melanoma, anorectal,ovary,renal,breast,lymphoid_neoplasm,multiple_myeloma, uterine,lung
aaataaaattgagccaaagtttccaaaaagctgtatggagcgctgtggggagtgaagaatgacaagaagattaatgttgaccaactttggaatttccttaagaagttctcatagcagtacctgaagtattaatttctagtagctgtgggtttctgtggacgcctagagaaaaaaaagaccacaaaaaaagtctgtttcgaaaatcgactggccaggagtttgtttgtttttttttcctg

SEQ ID NO: 459811 - DNA, 14 bp, Homo sapiens
  chr6:163837780-163837794
  hyper
  colorectal vs. liver_bileduct,pancreas_gallbladder, bladder_and_urothelial,head_and_neck,cervical,melanoma, anorectal,ovary,renal,breast,lymphoid_neoplasm,multiple_myeloma, uterine,lung
cagcactcaccaac

SEQ ID NO: 459812 - DNA, 121 bp, Homo sapiens
  chr7:1705266-1705387
  hyper
  colorectal vs. sarcoma
cgacgtgcgggcagcgaccccgccccccgcccctccggtcgcccccgccgcggcccccgccccctccccatccctccccgcgcgctctcccacatgaaaccttccatcacgctcagaaaga

SEQ ID NO: 459813 - DNA, 503 bp, Homo sapiens
  chr7:1705693-1706196
  hyper
  colorectal vs. sarcoma
aggaggaaggaggggaagccgccgccgccgccgccgcgctcggggaaccggggtgcgcgcgctctgctcgcccgcgacagtgcctccagcccggggcccgcaccccggcccaggtaagaaggggcctgaggggcagggggctgtccggggccgggggacccctctgtcgccgctgcgggatcggagggtccccgcccctaggggaggcagggaagaggatgctctctggggggggcggcggggggcagcgcagggtccccagcggctctcgcagcccgggccaccccatccctggtgccctgacctcggcgtccgcgccagggccgagtctccccgcccgcggggctctggatgcggcgctcggggcccgcggctcccgggcgtccccatccacccacccaggttcggaggcgggcgcacccgaagttagcggccgccgagcctgggccggacaaacttccctccccgacgccgcggctggaagggccaggactccggacccc

SEQ ID NO: 459814 - DNA, 1 bp, Homo sapiens
  chr7:2727815-2727816
  hyper
  colorectal vs. breast,uterine
c

SEQ ID NO: 459815 - DNA, 43 bp, Homo sapiens; identical to SEQ ID NO: 284742
  chr7:2728259-2728302
  hyper
  colorectal vs. breast,uterine

SEQ ID NO: 459816 - DNA, 396 bp, Homo sapiens; identical to SEQ ID NO: 453404
  chr7:3082731-3083127
  hyper
  colorectal vs. pancreas_gallbladder

SEQ ID NO: 459817 - DNA, 84 bp, Homo sapiens; identical to SEQ ID NO: 350505
  chr7:3083602-3083686
  hyper
  colorectal vs. pancreas_gallbladder

SEQ ID NO: 459818 - DNA, 60 bp, Homo sapiens; identical to SEQ ID NO: 454474
  chr7:19156644-19156704
  hyper
  colorectal vs. melanoma,sarcoma,uterine,anorectal, prostate,head_and_neck,breast,myeloid_neoplasm

SEQ ID NO: 459819 - DNA, 60 bp, Homo sapiens; identical to SEQ ID NO: 454474
  chr7:19156644-19156704
  hyper
  colorectal vs. anorectal,uterine,sarcoma,breast, head_and_neck,prostate

SEQ ID NO: 459820 - DNA, 50 bp, Homo sapiens
  chr7:21582471-21582521
  hyper
  colorectal vs. lung,head_and_neck
cgcactgggggctcagacccaccccggacacgcggcttctcggccgtgtt

SEQ ID NO: 459821 - DNA, 176 bp, Homo sapiens; identical to SEQ ID NO: 371468
  chr7:21583452-21583628
  hyper
  colorectal vs. lung,cervical,head_and_neck

SEQ ID NO: 459822 - DNA, 210 bp, Homo sapiens; identical to SEQ ID NO: 456111
  chr7:23052818-23053028
  hyper
  colorectal vs. lung,bladder_and_urothelial, lymphoid_neoplasm

SEQ ID NO: 459823 - DNA, 595 bp, Homo sapiens; identical to SEQ ID NO: 346883
  chr7:23053080-23053675
  hyper
  colorectal vs. lung,bladder_and_urothelial, lymphoid_neoplasm

SEQ ID NO: 459824 - DNA, 372 bp, Homo sapiens
  chr7:28450240-28450612
  hyper
  colorectal vs. lung,melanoma,sarcoma,renal,uterine, prostate,ovary,head_and_neck,anorectal,breast,cervical, bladder_and_urothelial,liver_bileduct,multiple_myeloma,thyroid
cttgctcaaggccggggactggagcgggctacttgtatatttcgttgtcagtctgcagaatgtgtttgatttttatttttccctccttctctgacatgtgtcaaggaataaagactggatacaggtccattacgtcattctgcaggccagtaagtgtttgattaacggcttgagctcctcaagggttcaggagcttagaatgctgacaaagcaactctgctttgcatccccctaccctccccacaacacactcgtgcaatcgccggctccctgggcatctttattgccctctcttcccagcccctccctctccaccactcccccgtctacaccgttatcactctagccccgcccccgcctttttacagcttt

SEQ ID NO: 459825 - DNA, 108 bp, Homo sapiens; identical to SEQ ID NO: 371526
  chr7:31091717-31091825
  hyper
  colorectal vs. melanoma

SEQ ID NO: 459826 - DNA, 69 bp, Homo sapiens
  chr7:31091827-31091896
  hyper
  colorectal vs. melanoma
accgccctcgatctaaccccgcccccgggcgctcattggcctgcagcaccccctccccagcctgtgaag

SEQ ID NO: 459827 - DNA, 165 bp, Homo sapiens
  chr7:35839776-35839941
  hyper
  colorectal vs. lung
cgacattcatcgctacagtagaaactcacacaatcgcagccctttattagtattttgttacccagtagttcctgtgtccattcatttcctcaactggagtgtgagctccaagaggaccgaaccgggcaccgacaaggtgagccaatatgaatgtggcgagtccgc

SEQ ID NO: 459828 - DNA, 58 bp, Homo sapiens; identical to SEQ ID NO: 371535
  chr7:35840078-35840136
  hyper
  colorectal vs. lung

SEQ ID NO: 459829 - DNA, 7 bp, Homo sapiens
  chr7:37487365-37487372
  hyper
  colorectal vs. lymphoid_neoplasm,uterine,ovary, myeloid_neoplasm,thyroid,non_cancer,multiple_myeloma,sarcoma, breast,prostate,renal,melanoma,liver_bileduct
cgctcgc

SEQ ID NO: 459830 - DNA, 39 bp, Homo sapiens
  chr7:44364447-44364486
  hyper
  colorectal vs. uterine,breast,sarcoma,prostate, bladder_and_urothelial,ovary,head_and_neck
cgcggatggggccacgcgcaggagcaggcgcaagcaggt

SEQ ID NO: 459831 - DNA, 27 bp, Homo sapiens
  chr7:44365258-44365285
  hyper
  colorectal vs. uterine,breast,sarcoma,prostate, bladder_and_urothelial,ovary,head_and_neck
caccgccgccgccgccgcgcccgcccc

SEQ ID NO: 459832 - DNA, 369 bp, Homo sapiens; identical to SEQ ID NO: 346904
  chr7:44365258-44365627
  hyper
  colorectal vs. anorectal,breast,prostate

SEQ ID NO: 459833 - DNA, 161 bp, Homo sapiens
  chr7:44924093-44924254
  hyper
  colorectal vs. upper_gi,liver_bileduct
cgttcctggatttctttcatctcatccgcataccggcaaaaggcgcctccgaacttgccccaggctttgaagggtacggtgatggcattgcggtaggacggcttcacctcgctcactcgcagaaacaccccgtatttgttgcagcccacatcgaagaagaa

SEQ ID NO: 459834 - DNA, 309 bp, Homo sapiens; identical to SEQ ID NO: 200961
  chr7:44924469-44924778
  hyper
  colorectal vs. upper_gi,liver_bileduct

SEQ ID NO: 459835 - DNA, 1 bp, Homo sapiens
  chr7:45613422-45613423
  hyper
  colorectal vs. bladder_and_urothelial
c

SEQ ID NO: 459836 - DNA, 102 bp, Homo sapiens; identical to SEQ ID NO: 345274
  chr7:50344738-50344840
  hyper
  colorectal vs. multiple_myeloma,anorectal, lymphoid_neoplasm,non_cancer,head_and_neck,uterine, myeloid_neoplasm,ovary,thyroid,breast,cervical,lung,prostate

SEQ ID NO: 459837 - DNA, 5 bp, Homo sapiens
  chr7:64974264-64974269
  hyper
  colorectal vs. breast,melanoma,sarcoma
cggcg

SEQ ID NO: 459838 - DNA, 61 bp, Homo sapiens; identical to SEQ ID NO: 458263
  chr7:64974448-64974509
  hyper
  colorectal vs. breast,melanoma,sarcoma

SEQ ID NO: 459839 - DNA, 5 bp, Homo sapiens
  chr7:64974988-64974993
  hyper
  colorectal vs. breast,melanoma,sarcoma
tcggc

SEQ ID NO: 459840 - DNA, 422 bp, Homo sapiens
  chr7:69063038-69063460
  hyper
  colorectal vs. anorectal
cacgcccccgcccccgcccccctcacagctccccaccgcccccagtgcgcaggcccggccgccccagcgcgcatgccctgggctcgcgagcgcggccagcccccagccttttgctttctacacactctacaactggggagggggcgggggaggagggagcccagccgtccacgtgatcccgccggccggggccgcgggggcgggagcgcgcgccgagagaggcgcggggagggcgggtgcgcgggagcgcgcgcactcgagcgagcgagcgaaagcacgaacgagcgagcgagcgagcgagcgagcgggcgggcgcggggttgggctgaggcgggcggcggcggcggcggcggcggtgggctggccgcggagggggaggagcgggagctgcgcgaggcaggcgggcgggcggaggatggggc

SEQ ID NO: 459841 - DNA, 130 bp, Homo sapiens
  chr7:69064053-69064183
  hyper
  colorectal vs. renal,breast,melanoma,lung,prostate,ovary, cervical,uterine,sarcoma,myeloid_neoplasm, bladder_and_urothelial,head_and_neck,anorectal,non_cancer, thyroid
cgaggcgtgtgtgagaggcggcgggggtgttttcctgcgcgaggggcgggtgaagttcattgcccccacttttcccgcgacctttttcggacccgattttggatcgagttgaggggggcgcgggcgtttt

SEQ ID NO: 459842 - DNA, 200 bp, Homo sapiens; identical to SEQ ID NO: 350591
  chr7:69065161-69065361
  hyper
  colorectal vs. lung,breast,anorectal,prostate,renal, ovary,uterine,cervical,bladder_and_urothelial,thyroid,sarcoma, melanoma,myeloid_neoplasm,non_cancer

SEQ ID NO: 459843 - DNA, 6 bp, Homo sapiens
  chr7:71802405-71802411
  hyper
  colorectal vs. melanoma
cgcaca

SEQ ID NO: 459844 - DNA, 296 bp, Homo sapiens
  chr7:90225450-90225746
  hyper
  colorectal vs. pancreas_gallbladder,liver_bileduct, cervical
cggttccgcgccgcggctccttctgcgctgcgcccgcaactctgggctgagaacttctcccgccggcccactcgccctcgccccgcgcactcggcgccaggcgactcccgcaccttgtacccggcccgccccgcctcctccttcggccgcaccactccccctgccggccgcgcttctctccgttacaaaggagggaaaatgagccgggcggcggcggcgcggcgcggggccaccacggcggcggcgagcgcggccgcccccggcaccacgtaaaccgcccccgcccgcccagctgc

SEQ ID NO: 459845 - DNA, 212 bp, Homo sapiens
  chr7:90226057-90226269
  hyper
  colorectal vs. pancreas_gallbladder,liver_bileduct, cervical
ccccagcgcccgctcccctcggcctgcgcccccgccgcgttcctggcaccagccatgcagctgccagcggggctggcgtggggtgcgttgtaggcggggatcgagggcacagtgctagggacccgggggagggcaaggacgtaaaggaaagagacccctcttcctcaggatctgggggttcatttgtagattctctcaagcctacaatatgg

SEQ ID NO: 459846 - DNA, 212 bp, Homo sapiens; identical to SEQ ID NO: 459845
  chr7:90226057-90226269
  hyper
  colorectal vs. cervical,pancreas_gallbladder, bladder_and_urothelial,anorectal,liver_bileduct,uterine,breast, head_and_neck,ovary

SEQ ID NO: 459847 - DNA, 80 bp, Homo sapiens; identical to SEQ ID NO: 456135
  chr7:99155672-99155752
  hyper
  colorectal vs. liver_bileduct,lymphoid_neoplasm,melanoma, anorectal

SEQ ID NO: 459848 - DNA, 15 bp, Homo sapiens
  chr7:99156600-99156615
  hyper
  colorectal vs. liver_bileduct,lymphoid_neoplasm,melanoma, anorectal
ccgccgtcaggagcc

SEQ ID NO: 459849 - DNA, 216 bp, Homo sapiens; identical to SEQ ID NO: 456137
  chr7:99156600-99156816
  hyper
  colorectal vs. liver_bileduct,melanoma,anorectal

SEQ ID NO: 459850 - DNA, 77 bp, Homo sapiens; identical to SEQ ID NO: 345277
  chr7:99156982-99157059
  hyper
  colorectal vs. liver_bileduct,melanoma,anorectal

SEQ ID NO: 459851 - DNA, 58 bp, Homo sapiens; identical to SEQ ID NO: 358917
  chr7:100254132-100254190
  hyper
  colorectal vs. melanoma

SEQ ID NO: 459852 - DNA, 243 bp, Homo sapiens
  chr7:100660381-100660624
  hyper
  colorectal vs. upper_gi
cggagtccagagagtgagtggttctgcgggaccaggaagtaagtgatcgctgtgctccgggaggatgctggaagaagattccagacgcagcttttttgcctgctatggttaccgttgctatgaaggagggcggccctgctgacccagagccagccctgtctcccgctccactctgacctcacccctgagtccagggctgaacgcacgctcctccgtggcccccgcttccaccccgtgcatgtg

SEQ ID NO: 459853 - DNA, 227 bp, Homo sapiens; identical to SEQ ID NO: 371642
  chr7:100660682-100660909
  hyper
  colorectal vs. upper_gi

SEQ ID NO: 459854 - DNA, 24 bp, Homo sapiens
  chr7:108095249-108095273
  hyper
  colorectal vs. ovary,uterine,renal,myeloid_neoplasm, thyroid,non_cancer,multiple_myeloma,breast,cervical, head_and_neck
cgaggaagagcccagtctcttaga

SEQ ID NO: 459855 - DNA, 240 bp, Homo sapiens; identical to SEQ ID NO: 458277
  chr7:112726614-112726854
  hyper
  colorectal vs. bladder_and_urothelial

SEQ ID NO: 459856 - DNA, 23 bp, Homo sapiens
  chr7:156794976-156794999
  hyper
  colorectal vs. anorectal
cggatgagggaagggacaggtcc

SEQ ID NO: 459857 - DNA, 217 bp, Homo sapiens; identical to SEQ ID NO: 458290
  chr7:157476655-157476872
  hyper
  colorectal vs. multiple_myeloma,anorectal

SEQ ID NO: 459858 - DNA, 110 bp, Homo sapiens; identical to SEQ ID NO: 453442
  chr8:11561282-11561392
  hyper
  colorectal vs. upper_gi,liver_bileduct, pancreas_gallbladder

SEQ ID NO: 459859 - DNA, 5 bp, Homo sapiens
  chr8:16884178-16884183
  hyper
  colorectal vs. lung
cggaa

SEQ ID NO: 459860 - DNA, 85 bp, Homo sapiens; identical to SEQ ID NO: 458295
  chr8:16884239-16884324
  hyper
  colorectal vs. lung

SEQ ID NO: 459861 - DNA, 14 bp, Homo sapiens
  chr8:54163303-54163317
  hyper
  colorectal vs. lung
cgcccagcccccag

SEQ ID NO: 459862 - DNA, 177 bp, Homo sapiens; identical to SEQ ID NO: 371869
  chr8:54795170-54795347
  hyper
  colorectal vs. uterine

SEQ ID NO: 459863 - DNA, 11 bp, Homo sapiens
  chr8:57069543-57069554
  hyper
  colorectal vs. myeloid_neoplasm,prostate,non_cancer
cgaaaagtaga

SEQ ID NO: 459864 - DNA, 149 bp, Homo sapiens
  chr8:58906804-58906953
  hyper
  colorectal vs. pancreas_gallbladder
cgtgcggacataggtgggagtgggggatagggaggaaatggaggcgccgaccgagtggaatggggggtgggtcagggatggggtgggatgggcatcagtagcggggtggagatgttgagagagaggcagggcttggagtggaggtgcga

SEQ ID NO: 459865 - DNA, 119 bp, Homo sapiens
  chr8:67089303-67089422
  hyper
  colorectal vs. liver_bileduct
cgccgcgctccgcgagagccgcggggctgtcgagcgagcgccgaggcagcagcagctgctgcagcaacacgcggaaaaagttggcggtcgcctgttccggcgaagggcggctgccgctg

SEQ ID NO: 459866 - DNA, 47 bp, Homo sapiens; identical to SEQ ID NO: 371897
  chr8:67090036-67090083
  hyper
  colorectal vs. liver_bileduct

SEQ ID NO: 459867 - DNA, 13 bp, Homo sapiens
  chr8:67344497-67344510
  hyper
  colorectal vs. liver_bileduct
cgaggcctacgga

SEQ ID NO: 459868 - DNA, 210 bp, Homo sapiens; identical to SEQ ID NO: 371898
  chr8:67344870-67345080
  hyper
  colorectal vs. liver_bileduct

SEQ ID NO: 459869 - DNA, 55 bp, Homo sapiens; identical to SEQ ID NO: 346990
  chr8:72756949-72757004
  hyper
  colorectal vs. sarcoma,melanoma,renal,non_cancer, myeloid_neoplasm

SEQ ID NO: 459870 - DNA, 181 bp, Homo sapiens
  chr8:73449197-73449378
  hyper
  colorectal vs. head_and_neck
cgcgccccagccgcgccctgggcaccagagcgctgtccccggccgagcgcacagctccggcgccgcgaggcagagccccggcgtccccggcggtgcgctgccggctcgcgcagcccagccatcccgccccgccgcccaccttgacagccgggagcgctgaggaggaagagggggaggggga

SEQ ID NO: 459871 - DNA, 208 bp, Homo sapiens
  chr8:73449432-73449640
  hyper
  colorectal vs. head_and_neck
gaggcggagcgggaggctggggtggccgcagccctgtgtgcgcgccgggccggctagctgcggggcgggggagcggcgccccagagcgccccgcctagcctcccgcgcgcagcctctaccctgctccgccacagacacacacccaccaagcacccaccgccctccgccctccgccctccgcccccgcggccgccgccgccgctgcgcc

SEQ ID NO: 459872 - DNA, 19 bp, Homo sapiens
  chr8:73450162-73450181
  hyper
  colorectal vs. head_and_neck
tttaagaatgaatcatcgc

SEQ ID NO: 459873 - DNA, 27 bp, Homo sapiens
  chr8:75896528-75896555
  hyper
  colorectal vs. lung
cgggcttgggtctcgggagcccaaagc

SEQ ID NO: 459874 - DNA, 77 bp, Homo sapiens; identical to SEQ ID NO: 346991
  chr8:75897394-75897471
  hyper
  colorectal vs. lung

SEQ ID NO: 459875 - DNA, 209 bp, Homo sapiens
  chr8:80803900-80804109
  hyper
  colorectal vs. upper_gi,pancreas_gallbladder,anorectal, multiple_myeloma,cervical,uterine,ovary,breast, bladder_and_urothelial,renal,thyroid,non_cancer,liver_bileduct, lung
actgggcgcccgcgcctcccaactcagcccgccgccgagcagacggcgcgccgcggtaattgggcacaggggcctttttcagagtcgctcagtcgataaatgaaacgtcagctcccctgtgatcccgcgtgtgtggggcggcggtggctgcgagccggggcgcagggccggccggcagccgctgctctttcacagccccagaccctgcg

SEQ ID NO: 459876 - DNA, 273 bp, Homo sapiens
  chr8:85095711-85095984
  hyper
  colorectal vs. upper_gi
ggcagagactgcgagaaaaaaacgcgcttcattccttcttccaccgccatactgtattttatactaaatctcatttttattccaacattttactcccgctcggtgagtaccttctcagtggcattcttgtcctattcttttttttgtccttttttttggttttttgttttttttgtttttgttttttttctttttttccacttctttgattattgtttatatttgggaaagctggaggagcatggttttgagccttttcctgaatccaagttt

SEQ ID NO: 459877 - DNA, 66 bp, Homo sapiens; identical to SEQ ID NO: 456178
  chr8:91996920-91996986
  hyper
  colorectal vs. sarcoma,multiple_myeloma

SEQ ID NO: 459878 - DNA, 80 bp, Homo sapiens; identical to SEQ ID NO: 350793
  chr8:97507728-97507808
  hyper
  colorectal vs. lung,renal,pancreas_gallbladder,breast, uterine,ovary,sarcoma,liver_bileduct,thyroid

SEQ ID NO: 459879 - DNA, 2 bp, Homo sapiens
  chr8:98290386-98290388
  hyper
  colorectal vs. myeloid_neoplasm,prostate, multiple_myeloma,thyroid,non_cancer
tc

SEQ ID NO: 459880 - DNA, 938 bp, Homo sapiens
  chr8:134582236-134583174
  hyper
  colorectal vs. pancreas_gallbladder
cgtccgggcccctgccagcaccttccaccttggggccttgtcaatgaacactgcgttagcacctacgacgtgccaggcgccctggcgactattggaaaacccggctcccctctcaccccgttttcctcgttggcgagtcggcctcgcctcctcctcccgtctcttcctctcaccacacacacccagccgcagagcgggggtgggcgctcgctgtctccctggagaaccagctcgtcgcaaacttgcggggcttggggacccgcgagggggagaagtcgggagaggccaggggtgcccggaaacaatcacgagaaagccgggcgaatgcctgatgcagggacgcggcgagccagtcactgccctcagggtcacggctgactccctctgcgggactcgcccagcccgcgagacgcagtgacctgcccaacccccacccccttgcgcgcttctgggtgcgcacgtgtcccctcgcccaacacaccaccgagccccgcgcatggtacggccgccgaggaccctagcgtaggagggaggagcgagtcagggctccagctgacgagcagagccagacgatccccacacgcttcctgggagacccggctgcaaggccaggctaatgcgcgctccgacgtctctgtgccaagccggggcgcaagctcaacccccatctcaagttcagccgcgcttcctcccgcaaggtcacgcttaaacactcgcgcagagaaaggaggagcggaaagttgcgccaccgtcccgattccaaactaactgtaccctcaccagagcgcctcgccccagggtcaccgctgtccgtccccgtgcgctcccagaaggggtggccctgcccccacgcaggtcacacacacgagagacacaggcaagttgctaacttttgtcagattatttcttgggagctgcgacgcctcacggggttgggg

SEQ ID NO: 459881 - DNA, 436 bp, Homo sapiens
  chr8:134582738-134583174
  hyper
  colorectal vs. pancreas_gallbladder,liver_bileduct
cggccgccgaggaccctagcgtaggagggaggagcgagtcagggctccagctgacgagcagagccagacgatccccacacgcttcctgggagacccggctgcaaggccaggctaatgcgcgctccgacgtctctgtgccaagccggggcgcaagctcaacccccatctcaagttcagccgcgcttcctcccgcaaggtcacgcttaaacactcgcgcagagaaaggaggagcggaaagttgcgccaccgtcccgattccaaactaactgtaccctcaccagagcgcctcgccccagggtcaccgctgtccgtccccgtgcgctcccagaaggggtggccctgcccccacgcaggtcacacacacgagagacacaggcaagttgctaacttttgtcagattatttcttgggagctgcgacgcctcacggggttgggg

SEQ ID NO: 459882 - DNA, 438 bp, Homo sapiens
  chr8:134583293-134583731
  hyper
  colorectal vs. pancreas_gallbladder,liver_bileduct
cccccagatccggagcagcgcgctctgacggcgtccccggggccgatagccacctcccggatctgcgcctgcttgcagcggattgggggactcgatccggatactgtcccacggccgctcgtccagaacactggcggcctccgcggtgtcccagcctgtgaccccaaatccgctcgagagcgcctgagcccggccacccagcgaggtctcctcccacgggcggccccagcggaggagatcccagcccggcgccgggtgcaatgtcactggggctgctttcgggaaccgctgcccgggacttggcgtaggttccccacagagctccaggcagctcctccagtgtcggccgaagacccctaagcccgaacctccaccccgaccttcttcctctcccaaagccctgggtggtcgccgctgccaaggaaggggtctcccttc

SEQ ID NO: 459883 - DNA, 926 bp, Homo sapiens; identical to SEQ ID NO: 359232
  chr8:134583293-134584219
  hyper
  colorectal vs. pancreas_gallbladder

SEQ ID NO: 459884 - DNA, 64 bp, Homo sapiens; identical to SEQ ID NO: 359243
  chr8:143531771-143531835
  hyper
  colorectal vs. anorectal

SEQ ID NO: 459885 - DNA, 121 bp, Homo sapiens; identical to SEQ ID NO: 458331
  chr8:143531858-143531979
  hyper
  colorectal vs. anorectal,lung,breast,prostate

SEQ ID NO: 459886 - DNA, 29 bp, Homo sapiens
  chr9:841339-841368
  hyper
  colorectal vs. melanoma
cggctctggtcttgacctggggagcccag

SEQ ID NO: 459887 - DNA, 70 bp, Homo sapiens; identical to SEQ ID NO: 359268
  chr9:6412900-6412970
  hyper
  colorectal vs. lymphoid_neoplasm,cervical

SEQ ID NO: 459888 - DNA, 114 bp, Homo sapiens; identical to SEQ ID NO: 453490
  chr9:6644756-6644870
  hyper
  colorectal vs. renal,ovary

SEQ ID NO: 459889 - DNA, 3 bp, Homo sapiens
  chr9:21994206-21994209
  hyper
  colorectal vs. liver_bileduct,pancreas_gallbladder
cgg

SEQ ID NO: 459890 - DNA, 203 bp, Homo sapiens; identical to SEQ ID NO: 359288
  chr9:21994237-21994440
  hyper
  colorectal vs. liver_bileduct,pancreas_gallbladder

SEQ ID NO: 459891 - DNA, 9 bp, Homo sapiens
  chr9:37028066-37028075
  hyper
  colorectal vs. lymphoid_neoplasm,melanoma,prostate, non_cancer,myeloid_neoplasm,thyroid
agagcagtc

SEQ ID NO: 459892 - DNA, 3 bp, Homo sapiens
  chr9:66494093-66494096
  hyper
  colorectal vs. bladder_and_urothelial,breast, lymphoid_neoplasm,multiple_myeloma,uterine,prostate,sarcoma, ovary,lung
cgc

SEQ ID NO: 459893 - DNA, 381 bp, Homo sapiens; identical to SEQ ID NO: 454519
  chr9:71788570-71788951
  hyper
  colorectal vs. head_and_neck,melanoma,renal

SEQ ID NO: 459894 - DNA, 15 bp, Homo sapiens
  chr9:71788936-71788951
  hyper
  colorectal vs. lymphoid_neoplasm
cgccgcctcccgccc

SEQ ID NO: 459895 - DNA, 45 bp, Homo sapiens; identical to SEQ ID NO: 350872
  chr9:71789757-71789802
  hyper
  colorectal vs. lymphoid_neoplasm

SEQ ID NO: 459896 - DNA, 432 bp, Homo sapiens
  chr9:89561318-89561750
  hyper
  colorectal vs. cervical
ccagggcgggcccgcggcgcgtgtggttgagctgaatgagggccgagatgcagtgactcgggcagcgccagcgcgacgagaaagaggcggccgaggccgggaaagcggcggcggcggccccgggcgcgtcgcccccgccgtgctgcgccagcaccggcgcgcacgcctcggcgtactggttgtaggcgtagctgcactccggctccccctggcactgcagcagcgcctgccagcagatgaggcggcggccgtgcgccagccccgatccccgcggcgccgagcccagcagctgcagcagcgccatcaggcacagccaggcgcccggcactgtccccccgcgggcctcgccgccgccgcccagcagcgcggccaccatcgcgggcagcggcggccgccgggagaggaggggaaaggagacgaggcgcggggagc

SEQ ID NO: 459897 - DNA, 3 bp, Homo sapiens
  chr9:117267153-117267156
  hyper
  colorectal vs. upper_gi,lung
cgc

SEQ ID NO: 459898 - DNA, 167 bp, Homo sapiens; identical to SEQ ID NO: 350930
  chr9:117267296-117267463
  hyper
  colorectal vs. upper_gi,lung

SEQ ID NO: 459899 - DNA, 732 bp, Homo sapiens
  chr9:124131788-124132520
  hyper
  colorectal vs. liver_bileduct,upper_gi
cgaggaacaaaagccgggaaggagagttctccaaaacgcagaggaaagcggagggggaaaaatggggcagaaagtggagctagaaagagaggtaagaagaaagccagagagacttcttccttctgcaaatcggtctaagtttcgggaggtgggattgggggaggagggggttcaccctggggccaggccagggctgggtggaggaggcggccttcgagagagtgagtcgggaaagaaggggagtgggcaaagggtgagatgtggggtcccggtccccgcctcgctggctgccagttccctctgcgtttcctagtccgcgtgcgtgacacgagatagtgcagccctggcatggggcttggcatctggcggccgcgagataaccagggcccgtgcgatgggaaacgtgccgttggcagcccgccacccctccatcgtgacctcagtctgccaaacagggttcgtgatgctcagtttactagggaggagccgcggctttgagatctcgcccagcccgaagcagcggagactggccaggagcccggctgtcagacctcggagcgcacgctgcgggcgggggctcggtccacgggggagggtcaggggacgcgggactcacccttgaaggagtcggggagccgctgggcttcggagtcccgtgtgtgccgcttctcggccatgctgcccgagacgcagtcgcactcccccgtcctcgttgccaaacccggagccgcc

SEQ ID NO: 459900 - DNA, 754 bp, Homo sapiens
  chr9:124132057-124132811
  hyper
  colorectal vs. liver_bileduct,upper_gi, bladder_and_urothelial
cggtccccgcctcgctggctgccagttccctctgcgtttcctagtccgcgtgcgtgacacgagatagtgcagccctggcatggggcttggcatctggcggccgcgagataaccagggcccgtgcgatgggaaacgtgccgttggcagcccgccacccctccatcgtgacctcagtctgccaaacagggttcgtgatgctcagtttactagggaggagccgcggctttgagatctcgcccagcccgaagcagcggagactggccaggagcccggctgtcagacctcggagcgcacgctgcgggcgggggctcggtccacgggggagggtcaggggacgcgggactcacccttgaaggagtcggggagccgctgggcttcggagtcccgtgtgtgccgcttctcggccatgctgcccgagacgcagtcgcactcccccgtcctcgttgccaaacccggagccgccgggaatgccctgaggagccagaggcacaagacccagattgccgccccgcccccaatcgaggtcccgccctcgtgagagttggccaatcaacgcccaggatcgaggaggacccacctcccaatccccgccctcctgtccctccacggcgcgactgcttcgcagtcacttcccgctagttctgtgggctgaggggcgtggcctgaggggcgtggcctgaggggcgagagcccccaaggctgtgggtatgaggccggggccctgcaccggaagggagggcggaagccacgggac

SEQ ID NO: 459901 - DNA, 25 bp, Homo sapiens
  chr9:124461310-124461335
  hyper
  colorectal vs. bladder_and_urothelial
gcctcggccgcggtcggcgcggctc

SEQ ID NO: 459902 - DNA, 168 bp, Homo sapiens
  chr9:129485513-129485681
  hyper
  colorectal vs. bladder_and_urothelial,prostate,breast, renal,cervical,anorectal,myeloid_neoplasm,ovary,non_cancer, lymphoid_neoplasm,uterine,lung,multiple_myeloma
cggtgtccatggtgggtctggttcccaccgctccctccctccccgcacagtctgagacccccttccccgggccgccccgtcgatcccaggtgatggatggagccttcagggagcccgcgcgggcgggctaggctcgggcggaaatgaagaggataagatctgcgagca

SEQ ID NO: 459903 - DNA, 456 bp, Homo sapiens; identical to SEQ ID NO: 333795
  chr9:130674546-130675002
  hyper
  colorectal vs. upper_gi

SEQ ID NO: 459904 - DNA, 89 bp, Homo sapiens
  chr9:131842789-131842878
  hyper
  colorectal vs. pancreas_gallbladder,upper_gi, bladder_and_urothelial,head_and_neck,cervical,lymphoid_neoplasm
cgcctgctctgtgtgacttgccctttcgccggccagtatggggcagagggaaataagccccctctgctctctggtctcagtttactcgt

SEQ ID NO: 459905 - DNA, 704 bp, Homo sapiens; identical to SEQ ID NO: 350949
  chr9:131842946-131843650
  hyper
  colorectal vs. pancreas_gallbladder,upper_gi, bladder_and_urothelial,head_and_neck,cervical,lymphoid_neoplasm

SEQ ID NO: 459906 - DNA, 123 bp, Homo sapiens; identical to SEQ ID NO: 359451
  chr9:135037440-135037563
  hyper
  colorectal vs. uterine

SEQ ID NO: 459907 - DNA, 23 bp, Homo sapiens
  chr9:135285310-135285333
  hyper
  colorectal vs. head_and_neck
cgagccgggctctgttggcgtcc

SEQ ID NO: 459908 - DNA, 306 bp, Homo sapiens
  chr9:135286324-135286630
  hyper
  colorectal vs. head_and_neck
agcatcacgtcgaatgttcatttccgttcgatcatactaatttcttacccaaattacaaccctaagagaaaaaaagcataatctttggcctaggaggctccgcagacaagaatgagggagctgcggtttcgggctggatcactttcccttccattacacttccctcctccccacctttagcctcgcttcccgctgatgggaaaccaacactgctgtggcggccacaccttcccgggggccactggagaagtcaggctgaggcttgggggtcagggagcaagcctcgaggcgaatttatcttgcgcc

SEQ ID NO: 459909 - DNA, 116 bp, Homo sapiens
  chr9:137299004-137299120
  hyper
  colorectal vs. pancreas_gallbladder
cgaggtccatgtgaaaggaggctttgcggtggtttctgctttgcttgcattgagcctcaaactcttcctgtcccgtgagaaggggggatgggatttggaggcctgaggaaggaagg

SEQ ID NO: 459910 - DNA, 712 bp, Homo sapiens
  chr9:140023901-140024613
  hyper
  colorectal vs. upper_gi
cgcaggctgggagggcggcgggcgcagcgaccccgggcctcggtccgcccggcgcggtcctcaccctgcagcacaagagccgccggcagttcttgctgttgccgtagctctcgccaaagctctgcgtcaccgaaatgaagtcctgatgaagcagcggcggcggatgcgtggaagggggcctcgaggaaccaccggcggcatcaggagacccggtcctgtaaaagactgagagctccgcctctccgatactcgcgggcagccattgcggcgcacagaaccgtccgcgtgtgagcagcgcgcacgcgcacgcaatgcgcctcaaccccgcagcctatgcgcctgcactgagagctcacggcttgcggcgcctgcgtctaccccgcgcgcagtcgccacggcaacagggcgggccttggttctgcttcgggcgtggtcggtgcatggtcctccagcactgttcgccccgcgggtctggtcctgggttcctttcgcctcctgtcgtcggacggcaccggctttgcccacggcctcgcggggagacgcagacacccgggacccggggaggcgcccgggcgccgccgccatgttgtcagggagcgcccgctcccagctcttcggttccgggacccgcggcgcggggatggggctgggccgcccttggtagccgtcctgggctgggggccaccctggccgcgtggtcaccggcaagaag

SEQ ID NO: 459911 - DNA, 376 bp, Homo sapiens
  chr9:140024237-140024613
  hyper
  colorectal vs. cervical,breast,melanoma,lung,renal, bladder_and_urothelial,upper_gi
cgcctgcactgagagctcacggcttgcggcgcctgcgtctaccccgcgcgcagtcgccacggcaacagggcgggccttggttctgcttcgggcgtggtcggtgcatggtcctccagcactgttcgccccgcgggtctggtcctgggttcctttcgcctcctgtcgtcggacggcaccggctttgcccacggcctcgcggggagacgcagacacccgggacccggggaggcgcccgggcgccgccgccatgttgtcagggagcgcccgctcccagctcttcggttccgggacccgcggcgcggggatggggctgggccgcccttggtagccgtcctgggctgggggccaccctggccgcgtggtcaccggcaagaag

SEQ ID NO: 459912 - DNA, 1 bp, Homo sapiens
  chrX:44202962-44202963
  hyper
  colorectal vs. upper_gi
c

SEQ ID NO: 459913 - DNA, 74 bp, Homo sapiens; identical to SEQ ID NO: 454528
  chrY:16635744-16635818
  hyper
  colorectal vs. liver_bileduct,cervical

SEQ ID NO: 459914 - DNA, 624 bp, Homo sapiens; identical to SEQ ID NO: 454529
  chrY:16636060-16636684
  hyper
  colorectal vs. liver_bileduct,cervical

SEQ ID NO: 459915 - DNA, 949 bp, Homo sapiens; identical to SEQ ID NO: 454530
  chrY:16636193-16637142
  hyper
  colorectal vs. liver_bileduct,cervical

SEQ ID NO: 459916 - DNA, 111 bp, Homo sapiens; identical to SEQ ID NO: 336746
  JH636052.4:789300-789411
  hyper
  colorectal vs. upper_gi,pancreas_gallbladder, liver_bileduct,lung,bladder_and_urothelial,cervical

SEQ ID NO: 459917 - DNA, 21 bp, Homo sapiens
  chr1:942678-942699
  hypo
  colorectal vs. melanoma
cggtttatcgccaggcgcggc

SEQ ID NO: 459918 - DNA, 489 bp, Homo sapiens; identical to SEQ ID NO: 336756
  chr1:1096415-1096904
  hypo
  colorectal vs. pancreas_gallbladder

SEQ ID NO: 459919 - DNA, 56 bp, Homo sapiens; identical to SEQ ID NO: 375517
  chr1:2170983-2171039
  hypo
  colorectal vs. liver_bileduct

SEQ ID NO: 459920 - DNA, 39 bp, Homo sapiens; identical to SEQ ID NO: 454548
  chr1:3659512-3659551
  hypo
  colorectal vs. pancreas_gallbladder,anorectal,ovary, cervical,breast,liver_bileduct,uterine,prostate

SEQ ID NO: 459921 - DNA, 179 bp, Homo sapiens; identical to SEQ ID NO: 454087
  chr1:3663338-3663517
  hypo
  colorectal vs. liver_bileduct,sarcoma,ovary, pancreas_gallbladder,renal,cervical,prostate,lung,uterine, breast,multiple_myeloma,non_cancer,thyroid

SEQ ID NO: 459922 - DNA, 101 bp, Homo sapiens; identical to SEQ ID NO: 346306
  chr1:3663983-3664084
  hypo
  colorectal vs. liver_bileduct,sarcoma,ovary, pancreas_gallbladder,renal,cervical,prostate,lung,uterine, breast,multiple_myeloma,non_cancer,thyroid

SEQ ID NO: 459923 - DNA, 502 bp, Homo sapiens
  chr1:6331654-6332156
  hypo
  colorectal vs. liver_bileduct,head_and_neck, bladder_and_urothelial,upper_gi
cggagcctgtccgccatccgctgtggcctctccgccatccgctgtggcctctcccagcagctgcaggcctgggttaattacctcctcctccacacccacccaggactgcaccagcctccagcagaaagcagccggaagtctcaaataatgagatcattgtggagagtcataaacaccctcaccaggggctcccctcacccagcagcaccggctcagactccgaaagaactgcccccaagtggggccaagaaaggaggcgtaaaggccaacgggaggctgctggcggaggcagggagatcgtcaccacaaaggggagaaaaggcattgggacttgggcctgggtggtggcctctcaggagcccctcctgcaggcacggagtgccgtggtcccgggacgctcggctcacagctcttgtgccggagtgtggacatggcggtccccaccctacaacaccaataatgatcatagctgtcacctgctgagtgcccactgtgggctagg

SEQ ID NO: 459924 - DNA, 426 bp, Homo sapiens; identical to SEQ ID NO: 457245
  chr1:9711649-9712075
  hypo
  colorectal vs. lymphoid_neoplasm,prostate,head_and_neck, sarcoma,bladder_and_urothelial,multiple_myeloma,lung,uterine, non_cancer,myeloid_neoplasm,thyroid,breast,ovary

SEQ ID NO: 459925 - DNA, 64 bp, Homo sapiens; identical to SEQ ID NO: 346318
  chr1:12123950-12124014
  hypo
  colorectal vs. lymphoid_neoplasm,thyroid,non_cancer, multiple_myeloma,ovary,uterine,prostate

SEQ ID NO: 459926 - DNA, 77 bp, Homo sapiens; identical to SEQ ID NO: 454554
  chr1:14125492-14125569
  hypo
  colorectal vs. lymphoid_neoplasm

SEQ ID NO: 459927 - DNA, 54 bp, Homo sapiens; identical to SEQ ID NO: 352807
  chr1:14125622-14125676
  hypo
  colorectal vs. lymphoid_neoplasm

SEQ ID NO: 459928 - DNA, 124 bp, Homo sapiens
  chr1:22777390-22777514
  hypo
  colorectal vs. pancreas_gallbladder
cgtaactgtcagggacagaaaaagtggctgcatgtcagtgacagggtgactgtgttcagtgggccagcgcggaggtgactcagtttgttactgctggatctgatttaaatgtttgtgtaaggaa

SEQ ID NO: 459929 - DNA, 150 bp, Homo sapiens; identical to SEQ ID NO: 362395
  chr1:22777697-22777847
  hypo
  colorectal vs. pancreas_gallbladder

SEQ ID NO: 459930 - DNA, 158 bp, Homo sapiens; identical to SEQ ID NO: 459263
  chr1:34629913-34630071
  hypo

SEQ ID NO: 459931 - DNA, 27 bp, Homo sapiens
  chr1:35394588-35394615
  hypo
  colorectal vs. breast,bladder_and_urothelial,ovary, prostate,lung,sarcoma,lymphoid_neoplasm,uterine
cggcacacacaatcgcccacagaccca

SEQ ID NO: 459932 - DNA, 253 bp, Homo sapiens; identical to SEQ ID NO: 457261
  chr1:35394790-35395043
  hypo
  colorectal vs. breast,bladder_and_urothelial,ovary, prostate,lung,sarcoma,lymphoid_neoplasm,uterine

SEQ ID NO: 459933 - DNA, 121 bp, Homo sapiens; identical to SEQ ID NO: 459266
  chr1:35394922-35395043
  hypo
  colorectal vs. ovary,prostate,breast,uterine, myeloid_neoplasm,lung,renal,anorectal,non_cancer,sarcoma, thyroid,bladder_and_urothelial,melanoma,head_and_neck

SEQ ID NO: 459934 - DNA, 148 bp, Homo sapiens; identical to SEQ ID NO: 337042
  chr1:44132677-44132825
  hypo
  colorectal vs. upper_gi

SEQ ID NO: 459935 - DNA, 60 bp, Homo sapiens; identical to SEQ ID NO: 453555
  chr1:44351032-44351092
  hypo
  colorectal vs. liver_bileduct

SEQ ID NO: 459936 - DNA, 141 bp, Homo sapiens
  chr1:44717932-44718073
  hypo
  colorectal vs. liver_bileduct
cgcacacacgcttcccttcccctgggctgctgcaatttccatgcacagggaagcaggtgccgagctgctcccggctggctctcccctctcgtggctctgcccgccttggctgctgccccattagcttagtggccagccatc

SEQ ID NO: 459937 - DNA, 138 bp, Homo sapiens; identical to SEQ ID NO: 352856
  chr1:44718164-44718302
  hypo
  colorectal vs. liver_bileduct

SEQ ID NO: 459938 - DNA, 106 bp, Homo sapiens; identical to SEQ ID NO: 458476
  chr1:44726788-44726894
  hypo
  colorectal vs. liver_bileduct,melanoma,breast, lymphoid_neoplasm,renal

SEQ ID NO: 459939 - DNA, 14 bp, Homo sapiens
  chr1:44727316-44727330
  hypo
  colorectal vs. liver_bileduct,melanoma,breast, lymphoid_neoplasm,renal
atgcgctccgctcc

SEQ ID NO: 459940 - DNA, 160 bp, Homo sapiens; identical to SEQ ID NO: 459269
  chr1:48190715-48190875
  hypo
  colorectal vs. upper_gi

SEQ ID NO: 459941 - DNA, 193 bp, Homo sapiens; identical to SEQ ID NO: 459273
  chr1:52081937-52082130
  hypo
  colorectal vs. liver_bileduct,pancreas_gallbladder, cervical,anorectal,head_and_neck,lymphoid_neoplasm

SEQ ID NO: 459942 - DNA, 52 bp, Homo sapiens; identical to SEQ ID NO: 337079
  chr1:52879577-52879629
  hypo
  colorectal vs. upper_gi,liver_bileduct, pancreas_gallbladder,cervical,bladder_and_urothelial,anorectal, lung,lymphoid_neoplasm,breast

SEQ ID NO: 459943 - DNA, 182 bp, Homo sapiens
  chr1:94047877-94048059
  hypo
cgtgctgggcgatgaccttggggtcgttgttggtgaacagttcttttgcacgtttcaacattgctgtttccaggggcttattctcagggggaaggaactttgactcaaactcgttgggcctgaaggaggagacagtctccaggaggggcgtcacaaactcgcccttgtcccactgccccttc

SEQ ID NO: 459944 - DNA, 330 bp, Homo sapiens
  chr1:94048088-94048418
  hypo
tctttccctgtcatcatcatcaaggatcaagtagttgacgccagagttccggggacctggcgcctcattctgcttggctgtgagcagttctgtgtggcttccctgggcacatgagggtagctttgctcccctgccgcagcctgtggcaaacgctgggttcagttcacagtagttggcctctgagttgagccaggcagagggagacgagggaaccttgaggaacggcaccttgcagggcttaggcgggggcttagggcacagttgactgtctgatcccctcagcgcctccccagccctggcgtctgaggagaccctccgaaccactgctgg

SEQ ID NO: 459945 - DNA, 289 bp, Homo sapiens; identical to SEQ ID NO: 452731
  chr1:101702081-101702370
  hypo
  colorectal vs. sarcoma,uterine,myeloid_neoplasm, non_cancer,thyroid,prostate,bladder_and_urothelial,ovary

SEQ ID NO: 459946 - DNA, 152 bp, Homo sapiens; identical to SEQ ID NO: 452732
  chr1:101702796-101702948
  hypo
  colorectal vs. sarcoma,uterine,myeloid_neoplasm, non_cancer,thyroid,prostate,bladder_and_urothelial,ovary

SEQ ID NO: 459947 - DNA, 393 bp, Homo sapiens; identical to SEQ ID NO: 452733
  chr1:101702796-101703189
  hypo
  colorectal vs. sarcoma,uterine,prostate,myeloid_neoplasm, non_cancer,thyroid,bladder_and_urothelial,ovary,renal

SEQ ID NO: 459948 - DNA, 49 bp, Homo sapiens; identical to SEQ ID NO: 349294
  chr1:107684495-107684544
  hypo
  colorectal vs. breast,prostate

SEQ ID NO: 459949 - DNA, 365 bp, Homo sapiens; identical to SEQ ID NO: 459281
  chr1:110753530-110753895
  hypo
  colorectal vs. upper_gi,head_and_neck,cervical, multiple_myeloma,thyroid,ovary,pancreas_gallbladder,renal, non_cancer

SEQ ID NO: 459950 - DNA, 47 bp, Homo sapiens; identical to SEQ ID NO: 459282
  chr1:110753957-110754004
  hypo
  colorectal vs. upper_gi,head_and_neck,cervical, multiple_myeloma,thyroid,ovary,pancreas_gallbladder,renal, non_cancer

SEQ ID NO: 459951 - DNA, 16 bp, Homo sapiens
  chr1:110754101-110754117
  hypo
  colorectal vs. upper_gi,head_and_neck,cervical, multiple_myeloma,thyroid,ovary,pancreas_gallbladder,renal, non_cancer
ggagccccgcagcgct

SEQ ID NO: 459952 - DNA, 47 bp, Homo sapiens; identical to SEQ ID NO: 459282
  chr1:110753957-110754004
  hypo
  colorectal vs. upper_gi

SEQ ID NO: 459953 - DNA, 16 bp, Homo sapiens
  chr1:110754101-110754117
  hypo
  colorectal vs. upper_gi
ggagccccgcagcgct

SEQ ID NO: 459954 - DNA, 76 bp, Homo sapiens; identical to SEQ ID NO: 362520
  chr1:115261261-115261337
  hypo
  colorectal vs. upper_gi,pancreas_gallbladder

SEQ ID NO: 459955 - DNA, 182 bp, Homo sapiens
  chr1:151699304-151699486
  hypo
  colorectal vs. upper_gi
cggtccatcttttagctctgtttattgtatctccctctgccccttgaattcatggttaagcttactcaggacattgtggggctgcatatctcccaccattcgtgggccggccggcatgttcttcatctttgcctcttgcccctggcttgagatctggttcagtgaaaatgatcgttgaggcc

SEQ ID NO: 459956 - DNA, 448 bp, Homo sapiens; identical to SEQ ID NO: 457286
  chr1:154297543-154297991
  hypo
  colorectal vs. lung,melanoma,lymphoid_neoplasm, multiple_myeloma,sarcoma,ovary,uterine,non_cancer,prostate, myeloid_neoplasm,breast,bladder_and_urothelial,thyroid, head_and_neck,pancreas_gallbladder,renal

SEQ ID NO: 459957 - DNA, 73 bp, Homo sapiens; identical to SEQ ID NO: 457287
  chr1:154298038-154298111
  hypo
  colorectal vs. lung,melanoma,lymphoid_neoplasm, multiple_myeloma,sarcoma,ovary,uterine,non_cancer,prostate, myeloid_neoplasm,breast,bladder_and_urothelial,thyroid, head_and_neck,pancreas_gallbladder,renal

SEQ ID NO: 459958 - DNA, 354 bp, Homo sapiens
  chr1:155911571-155911925
  hypo
  colorectal vs. cervical,melanoma,renal,upper_gi
gagtgctgatgatgctccgatgcctgtcaaattcctagccctgaggctcatggttgccctggcctatgggcttgtgggggccattggcttgctgggaaatttggcggtgctgtgggtactgagtaactgtgcccggagagcccctggcccaccttcagacaccttcgtcttcaacctggctctggcggacctgggactggcactcactctccccttttgggcagccgagtcggcactggactttcactggcccttcggaggtgccctctgcaagatggttctgacggccactgtcctcaacgtctatgccagcatcttcctcatcacagcgctgagcgttgctcgctactgggt

SEQ ID NO: 459959 - DNA, 83 bp, Homo sapiens; identical to SEQ ID NO: 352917
  chr1:155911954-155912037
  hypo
  colorectal vs. cervical,melanoma,renal,upper_gi

SEQ ID NO: 459960 - DNA, 92 bp, Homo sapiens; identical to SEQ ID NO: 337304
  chr1:207240948-207241040
  hypo
  colorectal vs. lung,head_and_neck

SEQ ID NO: 459961 - DNA, 29 bp, Homo sapiens
  chr1:208084683-208084712
  hypo
  colorectal vs. pancreas_gallbladder,breast, myeloid_neoplasm,uterine,thyroid,ovary,multiple_myeloma,sarcoma, non_cancer,prostate
tggaggtttgttcgggctccagatgcctc

SEQ ID NO: 459962 - DNA, 168 bp, Homo sapiens; identical to SEQ ID NO: 362647
  chr1:212605105-212605273
  hypo
  colorectal vs. liver_bileduct,pancreas_gallbladder

SEQ ID NO: 459963 - DNA, 91 bp, Homo sapiens; identical to SEQ ID NO: 357010
  chr1:220102055-220102146
  hypo
  colorectal vs. liver_bileduct

SEQ ID NO: 459964 - DNA, 85 bp, Homo sapiens
  chr1:226908290-226908375
  hypo
  colorectal vs. upper_gi,pancreas_gallbladder
cggaacatgcctggcacataataggcacttctgaaatcattgctgctattatttttattattattgtgcatcctaagactgttta

SEQ ID NO: 459965 - DNA, 22 bp, Homo sapiens
  chr1:226908456-226908478
  hypo
  colorectal vs. upper_gi,pancreas_gallbladder
tattggccgggcgcggccgggc

SEQ ID NO: 459966 - DNA, 359 bp, Homo sapiens; identical to SEQ ID NO: 454601
  chr1:228528433-228528792
  hypo
  colorectal vs. anorectal,breast,renal

SEQ ID NO: 459967 - DNA, 50 bp, Homo sapiens; identical to SEQ ID NO: 347858
  chr1:228529382-228529432
  hypo
  colorectal vs. anorectal,breast,renal

SEQ ID NO: 459968 - DNA, 194 bp, Homo sapiens
  chr1:230404024-230404218
  hypo
  colorectal vs. lymphoid_neoplasm
cgtgtagggttgggtgaagcttacctctggtctgtggatgacaaaacggacgaggtgcccacccaggttccgtactgtctgggtgttgggcctcttgtgatccctggccagcctcacctccgtgtttaatctctggagttcccactgtcactctgcagtgttctgatgatttatggaaggttggagaggtcact

SEQ ID NO: 459969 - DNA, 196 bp, Homo sapiens; identical to SEQ ID NO: 352995
  chr1:230404365-230404561
  hypo
  colorectal vs. lymphoid_neoplasm

SEQ ID NO: 459970 - DNA, 173 bp, Homo sapiens; identical to SEQ ID NO: 337378
  chr1:231122207-231122380
  hypo
  colorectal vs. upper_gi,pancreas_gallbladder

SEQ ID NO: 459971 - DNA, 134 bp, Homo sapiens; identical to SEQ ID NO: 337399
  chr1:235955204-235955338
  hypo
  colorectal vs. liver_bileduct

SEQ ID NO: 459972 - DNA, 117 bp, Homo sapiens
  chr1:241051980-241052097
  hypo
  colorectal vs. pancreas_gallbladder
cgcgcgttgagaagaggtgctatcaactttcccattttgctgatgaggcaatttaggctggatgagaggacgagactgagtactactttcttggtggaggcgacagtcaaagccagg

SEQ ID NO: 459973 - DNA, 19 bp, Homo sapiens
  chr1:241052126-241052145
  hypo
  colorectal vs. pancreas_gallbladder
ctaggctgtgtgtgacagc

SEQ ID NO: 459974 - DNA, 47 bp, Homo sapiens
  chr10:518263-518310
  hypo
  colorectal vs. pancreas_gallbladder,upper_gi,lung, cervical,liver_bileduct,head_and_neck
cgcgtgctgcaggtccacgcccactgcacttctgcctcgcccagtgg

SEQ ID NO: 459975 - DNA, 131 bp, Homo sapiens; identical to SEQ ID NO: 354470
  chr10:518339-518470
  hypo
  colorectal vs. pancreas_gallbladder,upper_gi,lung, cervical,liver_bileduct,head_and_neck

SEQ ID NO: 459976 - DNA, 162 bp, Homo sapiens
  chr10:3160827-3160989
  hypo
  colorectal vs. lymphoid_neoplasm,anorectal
cggcatgagtgaaaaggcagacgtttaccgctccttaattaaaaccacagactggggaaggcggccgggtggggaccggcgtggcgtcctgcggaccgcgtggagtttggggtgtctgacatcgttctccacgtggctattttcagcgttctcccggggaag

SEQ ID NO: 459977 - DNA, 125 bp, Homo sapiens; identical to SEQ ID NO: 354487
  chr10:3161171-3161296
  hypo
  colorectal vs. lymphoid_neoplasm,anorectal

SEQ ID NO: 459978 - DNA, 309 bp, Homo sapiens; identical to SEQ ID NO: 454609
  chr10:3329809-3330118
  hypo
  colorectal vs. head_and_neck

SEQ ID NO: 459979 - DNA, 61 bp, Homo sapiens; identical to SEQ ID NO: 459300
  chr10:7453036-7453097
  hypo
  colorectal vs. renal,breast,melanoma,prostate, multiple_myeloma,ovary,bladder_and_urothelial,lung,anorectal, lymphoid_neoplasm,myeloid_neoplasm,non_cancer,thyroid,sarcoma, cervical,liver_bileduct

SEQ ID NO: 459980 - DNA, 61 bp, Homo sapiens; identical to SEQ ID NO: 459300
  chr10:7453036-7453097
  hypo
  colorectal vs. melanoma,breast,prostate,renal, multiple_myeloma,thyroid,bladder_and_urothelial,ovary,lung, anorectal,non_cancer,myeloid_neoplasm,cervical,sarcoma, lymphoid_neoplasm,liver_bileduct

SEQ ID NO: 459981 - DNA, 209 bp, Homo sapiens; identical to SEQ ID NO: 452758
  chr10:17270445-17270654
  hypo
  colorectal vs. melanoma,uterine,sarcoma,renal,ovary, non_cancer,myeloid_neoplasm,multiple_myeloma,thyroid

SEQ ID NO: 459982 - DNA, 63 bp, Homo sapiens; identical to SEQ ID NO: 454116
  chr10:22540645-22540708
  hypo
  colorectal vs. anorectal,lymphoid_neoplasm,sarcoma,ovary, non_cancer,myeloid_neoplasm,thyroid

SEQ ID NO: 459983 - DNA, 215 bp, Homo sapiens; identical to SEQ ID NO: 459309
  chr10:23001984-23002199
  hypo
  colorectal vs. pancreas_gallbladder,upper_gi

SEQ ID NO: 459984 - DNA, 286 bp, Homo sapiens; identical to SEQ ID NO: 351010
  chr10:23002228-23002514
  hypo
  colorectal vs. pancreas_gallbladder,upper_gi

SEQ ID NO: 459985 - DNA, 56 bp, Homo sapiens; identical to SEQ ID NO: 340612
  chr10:27144571-27144627
  hypo
  colorectal vs. liver_bileduct

SEQ ID NO: 459986 - DNA, 791 bp, Homo sapiens; identical to SEQ ID NO: 457329
  chr10:31607954-31608745
  hypo
  colorectal vs. liver_bileduct,bladder_and_urothelial, lymphoid_neoplasm,head_and_neck

SEQ ID NO: 459987 - DNA, 467 bp, Homo sapiens; identical to SEQ ID NO: 457330
  chr10:31608278-31608745
  hypo
  colorectal vs. liver_bileduct,lymphoid_neoplasm,renal, head_and_neck,anorectal,bladder_and_urothelial,uterine, multiple_myeloma,sarcoma,lung,prostate,non_cancer, myeloid_neoplasm,thyroid,ovary,cervical,breast

SEQ ID NO: 459988 - DNA, 253 bp, Homo sapiens; identical to SEQ ID NO: 455585
  chr10:31609416-31609669
  hypo
  colorectal vs. renal,liver_bileduct,anorectal, lymphoid_neoplasm,multiple_myeloma,head_and_neck,sarcoma, uterine,bladder_and_urothelial,prostate,non_cancer,ovary, myeloid_neoplasm,thyroid,cervical,lung

SEQ ID NO: 459989 - DNA, 253 bp, Homo sapiens; identical to SEQ ID NO: 455585
  chr10:31609416-31609669
  hypo
  colorectal vs. lymphoid_neoplasm,renal,multiple_myeloma, sarcoma,uterine

SEQ ID NO: 459990 - DNA, 82 bp, Homo sapiens; identical to SEQ ID NO: 459323
  chr10:92617016-92617098
  hypo
  colorectal vs. bladder_and_urothelial

SEQ ID NO: 459991 - DNA, 278 bp, Homo sapiens; identical to SEQ ID NO: 459324
  chr10:92617539-92617817
  hypo
  colorectal vs. bladder_and_urothelial

SEQ ID NO: 459992 - DNA, 51 bp, Homo sapiens; identical to SEQ ID NO: 340707
  chr10:97322758-97322809
  hypo
  colorectal vs. upper_gi,pancreas_gallbladder, liver_bileduct

SEQ ID NO: 459993 - DNA, 212 bp, Homo sapiens; identical to SEQ ID NO: 459333
  chr10:103535916-103536128
  hypo
  colorectal vs. bladder_and_urothelial,anorectal

SEQ ID NO: 459994 - DNA, 65 bp, Homo sapiens; identical to SEQ ID NO: 340741
  chr10:114252654-114252719
  hypo
  colorectal vs. upper_gi,liver_bileduct, pancreas_gallbladder,head_and_neck

SEQ ID NO: 459995 - DNA, 132 bp, Homo sapiens; identical to SEQ ID NO: 459335
  chr10:121301363-121301495
  hypo
  colorectal vs. upper_gi,cervical,breast,uterine, head_and_neck,prostate

SEQ ID NO: 459996 - DNA, 323 bp, Homo sapiens; identical to SEQ ID NO: 459336
  chr10:121301911-121302234
  hypo
  colorectal vs. upper_gi,cervical,breast,uterine, head_and_neck,prostate

SEQ ID NO: 459997 - DNA, 162 bp, Homo sapiens
  chr10:134300856-134301018
  hypo
  colorectal vs. melanoma
cgcaccaggtgtgggtgcaggaggacgtctggttagaggtcagaggcgtcatccccaaccccggccgatgttatcttacgtgcggggaaaggcaaggactggactcgttcatcttttacggaacgtggtgagtcaggcaagagacccgggccctgtgctccg

SEQ ID NO: 459998 - DNA, 3 bp, Homo sapiens
  chr10:134566159-134566162
  hypo
  colorectal vs. liver_bileduct
cgt

SEQ ID NO: 459999 - DNA, 180 bp, Homo sapiens
  chr10:135087233-135087413
  hypo
  colorectal vs. pancreas_gallbladder
cgggagccctggcgttcgtccgccacacccacctgaggccggcacaggtgctgaggctggcggctgagtccgggtacccctctacgtggccctggtagaagcagtggtcctgcgggggaagcaggagaggggtccacaggctgtgcccccatggccccacaggctcggggagggccgccc

SEQ ID NO: 460000 - DNA, 100 bp, Homo sapiens; identical to SEQ ID NO: 365522
  chr10:135087645-135087745
  hypo
  colorectal vs. pancreas_gallbladder

SEQ ID NO: 460001 - DNA, 1 bp, Homo sapiens
  chr11:447718-447719
  hypo
  colorectal vs. pancreas_gallbladder
c

SEQ ID NO: 460002 - DNA, 575 bp, Homo sapiens
  chr11:492571-493146
  hypo
  colorectal vs. liver_bileduct
cgggagccatttgcacccacacccccgggtctgcctcggggccccgggcgtcaaaaagctttacttttagtatttttccttgactacttttggggaaaatttcaagccctctaagtcaagggctgtaatgtggagcacacacaagagcagcctctggggctcagcaggaagacgtccggtgtggccaccgcgcctagcagtcctctttccagtcacggccactcacagctttggcctccgtggccctgcacggatgagttcttccagctgccctgccctgcgtgctgcaggacacatggggccttagcattctgctctttgcaggtggcagctttgatcgctcaggaggaactgccacctgatctccccactgcaggggcccccactccccccctcacgcgctgcgggtcctgtcactccacccacgctgtccatccccgctgatgctctgagccaggtggtagcaggtgggggtggcgccccgctcacggtctccatctgctcttcccgaggagggcgaggcagggcttgtgattaaagtcctgtgttccggcgcccgtgtcccaaaggcagcc

SEQ ID NO: 460003 - DNA, 60 bp, Homo sapiens; identical to SEQ ID NO: 365537
  chr11:493199-493259
  hypo
  colorectal vs. liver_bileduct

SEQ ID NO: 460004 - DNA, 4 bp, Homo sapiens
  chr11:862613-862617
  hypo
cgct

SEQ ID NO: 460005 - DNA, 526 bp, Homo sapiens; identical to SEQ ID NO: 379554
  chr11:985466-985992
  hypo
  colorectal vs. liver_bileduct,upper_gi,head_and_neck

SEQ ID NO: 460006 - DNA, 129 bp, Homo sapiens; identical to SEQ ID NO: 351149
  chr11:8615887-8616016
  hypo
  colorectal vs. ovary,lung

SEQ ID NO: 460007 - DNA, 61 bp, Homo sapiens; identical to SEQ ID NO: 459349
  chr11:9112971-9113032
  hypo
  colorectal vs. bladder_and_urothelial,cervical,ovary

SEQ ID NO: 460008 - DNA, 61 bp, Homo sapiens; identical to SEQ ID NO: 459349
  chr11:9112971-9113032
  hypo
  colorectal vs. cervical

SEQ ID NO: 460009 - DNA, 65 bp, Homo sapiens; identical to SEQ ID NO: 341009
  chr11:19247033-19247098
  hypo
  colorectal vs. upper_gi,melanoma

SEQ ID NO: 460010 - DNA, 155 bp, Homo sapiens; identical to SEQ ID NO: 341033
  chr11:36476175-36476330
  hypo
  colorectal vs. upper_gi

SEQ ID NO: 460011 - DNA, 17 bp, Homo sapiens
  chr11:47358910-47358927
  hypo
  colorectal vs. lymphoid_neoplasm,prostate
cggggggcaggaccagg

SEQ ID NO: 460012 - DNA, 106 bp, Homo sapiens; identical to SEQ ID NO: 348490
  chr11:47359237-47359343
  hypo
  colorectal vs. lymphoid_neoplasm,prostate

SEQ ID NO: 460013 - DNA, 300 bp, Homo sapiens; identical to SEQ ID NO: 341098
  chr11:64088230-64088530
  hypo
  colorectal vs. upper_gi

SEQ ID NO: 460014 - DNA, 95 bp, Homo sapiens
  chr11:66631185-66631280
  hypo
  colorectal vs. liver_bileduct
cggtcagggggccctccaagggccgggagcaaaggcaggcgggggctgcagcctctcaccttcacacctcggacgcggaactccgcaagggccct

SEQ ID NO: 460015 - DNA, 39 bp, Homo sapiens; identical to SEQ ID NO: 379785
  chr11:66631852-66631891
  hypo
  colorectal vs. liver_bileduct

SEQ ID NO: 460016 - DNA, 133 bp, Homo sapiens; identical to SEQ ID NO: 459356
  chr11:67895663-67895796
  hypo
  colorectal vs. upper_gi,liver_bileduct, pancreas_gallbladder

SEQ ID NO: 460017 - DNA, 63 bp, Homo sapiens; identical to SEQ ID NO: 354789
  chr11:73073669-73073732
  hypo

SEQ ID NO: 460018 - DNA, 133 bp, Homo sapiens; identical to SEQ ID NO: 348519
  chr11:75858240-75858373
  hypo
  colorectal vs. liver_bileduct,bladder_and_urothelial, pancreas_gallbladder,head_and_neck,lung

SEQ ID NO: 460019 - DNA, 40 bp, Homo sapiens; identical to SEQ ID NO: 341199
  chr11:76164370-76164410
  hypo
  colorectal vs. pancreas_gallbladder,upper_gi, liver_bileduct,cervical,lymphoid_neoplasm,head_and_neck

SEQ ID NO: 460020 - DNA, 118 bp, Homo sapiens; identical to SEQ ID NO: 341203
  chr11:77383112-77383230
  hypo
  colorectal vs. upper_gi

SEQ ID NO: 460021 - DNA, 58 bp, Homo sapiens
  chr11:85906179-85906237
  hypo
  colorectal vs. upper_gi,pancreas_gallbladder,melanoma
cggccaccgagggggtcggggaggctgcgcaaggcggtgagccccggcagctggagca

SEQ ID NO: 460022 - DNA, 208 bp, Homo sapiens; identical to SEQ ID NO: 354801
  chr11:85906275-85906483
  hypo
  colorectal vs. upper_gi,pancreas_gallbladder,melanoma

SEQ ID NO: 460023 - DNA, 90 bp, Homo sapiens
  chr11:93911562-93911652
  hypo
  colorectal vs. liver_bileduct,pancreas_gallbladder, upper_gi,head_and_neck,lung,lymphoid_neoplasm
cgatcctcctgtacctgcccccgctgttctggcgtttcgcagctgctcctcatatttgctcagacttgaagtttatcatggaagaacttg

SEQ ID NO: 460024 - DNA, 81 bp, Homo sapiens; identical to SEQ ID NO: 354805
  chr11:93911800-93911881
  hypo
  colorectal vs. liver_bileduct,pancreas_gallbladder, upper_gi,head_and_neck,lung,lymphoid_neoplasm

SEQ ID NO: 460025 - DNA, 439 bp, Homo sapiens; identical to SEQ ID NO: 341274
  chr11:126055123-126055562
  hypo
  colorectal vs. head_and_neck,lung

SEQ ID NO: 460026 - DNA, 2 bp, Homo sapiens
  chr11:126083979-126083981
  hypo
  colorectal vs. liver_bileduct
ac

SEQ ID NO: 460027 - DNA, 76 bp, Homo sapiens
  chr11:130059543-130059619
  hypo
cgagccgcccatgtgtcctggagtcgctctgggcgcacgtgggggaaatggggcccagagctccgcctcaggctcc

SEQ ID NO: 460028 - DNA, 61 bp, Homo sapiens; identical to SEQ ID NO: 379930
  chr11:130059738-130059799
  hypo

SEQ ID NO: 460029 - DNA, 453 bp, Homo sapiens; identical to SEQ ID NO: 365851
  chr11:130060407-130060860
  hypo
  colorectal vs. liver_bileduct

SEQ ID NO: 460030 - DNA, 17 bp, Homo sapiens
  chr11:133938756-133938773
  hypo
  colorectal vs. melanoma,sarcoma,thyroid,prostate, non_cancer,renal,myeloid_neoplasm
cgccaagttcattgaaa

SEQ ID NO: 460031 - DNA, 161 bp, Homo sapiens; identical to SEQ ID NO: 345407
  chr11:133939437-133939598
  hypo
  colorectal vs. melanoma,sarcoma,thyroid,prostate, non_cancer,renal,myeloid_neoplasm

SEQ ID NO: 460032 - DNA, 235 bp, Homo sapiens; identical to SEQ ID NO: 351283
  chr12:1639655-1639890
  hypo
  colorectal vs. cervical

SEQ ID NO: 460033 - DNA, 203 bp, Homo sapiens
  chr12:3414071-3414274
  hypo
  colorectal vs. lymphoid_neoplasm
cgagggcagggagtcacgcggcctcacacatccctgtgtctctgtctgtgtgtgctggcgccgcacgactgctgggccacttgcttgtaaaatggggccaacaaaaggacctgcgccctgggccatcgtgcggactgaaagaggtgattcatggaaagcaattagaagagagcctggcgcagcacccgcagttaatgagagac

SEQ ID NO: 460034 - DNA, 192 bp, Homo sapiens; identical to SEQ ID NO: 379977
  chr12:3414306-3414498
  hypo
  colorectal vs. lymphoid_neoplasm

SEQ ID NO: 460035 - DNA, 299 bp, Homo sapiens; identical to SEQ ID NO: 365906
  chr12:6334298-6334597
  hypo
  colorectal vs. upper_gi

SEQ ID NO: 460036 - DNA, 72 bp, Homo sapiens; identical to SEQ ID NO: 341358
  chr12:8906544-8906616
  hypo
  colorectal vs. head_and_neck

SEQ ID NO: 460037 - DNA, 253 bp, Homo sapiens; identical to SEQ ID NO: 459373
  chr12:24715505-24715758
  hypo
  colorectal vs. lung,multiple_myeloma,sarcoma,breast, uterine,cervical,renal,non_cancer,head_and_neck,anorectal, melanoma,bladder_and_urothelial,liver_bileduct,ovary,prostate

SEQ ID NO: 460038 - DNA, 253 bp, Homo sapiens; identical to SEQ ID NO: 459373
  chr12:24715505-24715758
  hypo
  colorectal vs. lung,multiple_myeloma,anorectal,breast, sarcoma,uterine,renal,non_cancer,ovary,prostate,cervical, myeloid_neoplasm,bladder_and_urothelial,liver_bileduct,melanoma, head_and_neck

SEQ ID NO: 460039 - DNA, 84 bp, Homo sapiens; identical to SEQ ID NO: 454680
  chr12:29373882-29373966
  hypo
  colorectal vs. head_and_neck,anorectal,lymphoid_neoplasm

SEQ ID NO: 460040 - DNA, 18 bp, Homo sapiens
  chr12:29374085-29374103
  hypo
  colorectal vs. head_and_neck,anorectal,lymphoid_neoplasm
cgctttacctcttagtgc

SEQ ID NO: 460041 - DNA, 161 bp, Homo sapiens; identical to SEQ ID NO: 341380
  chr12:30861053-30861214
  hypo
  colorectal vs. liver_bileduct,pancreas_gallbladder

SEQ ID NO: 460042 - DNA, 164 bp, Homo sapiens; identical to SEQ ID NO: 341385
  chr12:32864298-32864462
  hypo
  colorectal vs. upper_gi,liver_bileduct, pancreas_gallbladder

SEQ ID NO: 460043 - DNA, 53 bp, Homo sapiens; identical to SEQ ID NO: 459379
  chr12:41582155-41582208
  hypo
  colorectal vs. anorectal

SEQ ID NO: 460044 - DNA, 3 bp, Homo sapiens
  chr12:52401537-52401540
  hypo
  colorectal vs. anorectal,head_and_neck,melanoma,thyroid, uterine,multiple_myeloma,non_cancer
tcc

SEQ ID NO: 460045 - DNA, 29 bp, Homo sapiens
  chr12:70087465-70087494
  hypo
  colorectal vs. pancreas_gallbladder
cgtggtccattgtgggaaatcttttgtac

SEQ ID NO: 460046 - DNA, 123 bp, Homo sapiens
  chr12:93710959-93711082
  hypo
  colorectal vs. liver_bileduct,pancreas_gallbladder
cgacccaggactcccgcttctctttacaccatatactgttctttatgtgccgctgtttttctctttatagtttttctaggacaaaaaccaagctccatcagaaggttaaacctgtgtcaggtt

SEQ ID NO: 460047 - DNA, 349 bp, Homo sapiens; identical to SEQ ID NO: 459395
  chr12:104851545-104851894
  hypo
  colorectal vs. melanoma,multiple_myeloma,renal,ovary, lung,sarcoma,non_cancer,head_and_neck,bladder_and_urothelial, breast,pancreas_gallbladder,thyroid,myeloid_neoplasm,cervical, prostate,lymphoid_neoplasm,uterine,anorectal

SEQ ID NO: 460048 - DNA, 349 bp, Homo sapiens; identical to SEQ ID NO: 459395
  chr12:104851545-104851894
  hypo
  colorectal vs. melanoma,multiple_myeloma,cervical, bladder_and_urothelial,non_cancer,myeloid_neoplasm, head_and_neck,pancreas_gallbladder,lymphoid_neoplasm,lung, uterine,sarcoma,ovary,renal,thyroid

SEQ ID NO: 460049 - DNA, 22 bp, Homo sapiens
  chr12:111471144-111471166
  hypo
  colorectal vs. breast
cgcggaaactgtgggcggtggt

SEQ ID NO: 460050 - DNA, 366 bp, Homo sapiens; identical to SEQ ID NO: 373156
  chr12:111473017-111473383
  hypo
  colorectal vs. breast

SEQ ID NO: 460051 - DNA, 52 bp, Homo sapiens
  chr12:111725459-111725511
  hypo
  colorectal vs. liver_bileduct
cgcaggccctgcctaatgacggggcgtgggggctgccggcagatgaaagcca

SEQ ID NO: 460052 - DNA, 63 bp, Homo sapiens; identical to SEQ ID NO: 215057
  chr12:111725564-111725627
  hypo
  colorectal vs. liver_bileduct

SEQ ID NO: 460053 - DNA, 83 bp, Homo sapiens; identical to SEQ ID NO: 345434
  chr12:113495127-113495210
  hypo
  colorectal vs. breast,multiple_myeloma,prostate,ovary, sarcoma,lung,uterine,liver_bileduct,melanoma,myeloid_neoplasm, non_cancer,thyroid,renal,lymphoid_neoplasm,head_and_neck, bladder_and_urothelial,pancreas_gallbladder

SEQ ID NO: 460054 - DNA, 206 bp, Homo sapiens; identical to SEQ ID NO: 341557
  chr12:121203947-121204153
  hypo
  colorectal vs. upper_gi,pancreas_gallbladder, liver_bileduct,anorectal,head_and_neck

SEQ ID NO: 460055 - DNA, 2 bp, Homo sapiens
  chr12:129337804-129337806
  hypo
  colorectal vs. renal,prostate,multiple_myeloma, non_cancer,myeloid_neoplasm
cg

SEQ ID NO: 460056 - DNA, 26 bp, Homo sapiens
  chr12:132423564-132423590
  hypo
  colorectal vs. melanoma,liver_bileduct,lymphoid_neoplasm
cgtgagccactatgcccggccctcca

SEQ ID NO: 460057 - DNA, 173 bp, Homo sapiens; identical to SEQ ID NO: 355019
  chr12:132423854-132424027
  hypo
  colorectal vs. melanoma,liver_bileduct,lymphoid_neoplasm

SEQ ID NO: 460058 - DNA, 178 bp, Homo sapiens
  chr12:132986274-132986452
  hypo
  colorectal vs. lymphoid_neoplasm,anorectal,cervical, renal
cgcagagagccgcggtgccatctccaccctggctttccaggccctggagggcaaaggtcagtcagatggagggagcccggggtccctggcaggagtgtggccaagtcccagcagcgctgccccgagagaggaggacggcgcagctccattgctccacctgcccggctcagggatggaa

SEQ ID NO: 460059 - DNA, 268 bp, Homo sapiens; identical to SEQ ID NO: 366190
  chr12:132986701-132986969
  hypo
  colorectal vs. lymphoid_neoplasm,anorectal,cervical, renal

SEQ ID NO: 460060 - DNA, 238 bp, Homo sapiens; identical to SEQ ID NO: 459402
  chr12:133464166-133464404
  hypo
  colorectal vs. pancreas_gallbladder,breast,ovary

SEQ ID NO: 460061 - DNA, 219 bp, Homo sapiens; identical to SEQ ID NO: 459403
  chr12:133464555-133464774
  hypo
  colorectal vs. pancreas_gallbladder,breast,ovary

SEQ ID NO: 460062 - DNA, 82 bp, Homo sapiens; identical to SEQ ID NO: 459404
  chr13:25746000-25746082
  hypo
  colorectal vs. sarcoma,breast,prostate,melanoma,lung, uterine,multiple_myeloma,renal,non_cancer,myeloid_neoplasm, bladder_and_urothelial,cervical,head_and_neck

SEQ ID NO: 460063 - DNA, 243 bp, Homo sapiens; identical to SEQ ID NO: 341703
  chr13:28745848-28746091
  hypo
  colorectal vs. liver_bileduct

SEQ ID NO: 460064 - DNA, 23 bp, Homo sapiens
  chr13:37005451-37005474
  hypo
  colorectal vs. ovary,uterine,lung,breast,thyroid,renal, sarcoma,myeloid_neoplasm,prostate,bladder_and_urothelial, cervical,non_cancer,multiple_myeloma
cgattatttcacctggcttgtca

SEQ ID NO: 460065 - DNA, 86 bp, Homo sapiens; identical to SEQ ID NO: 341729
  chr13:43620991-43621077
  hypo
  colorectal vs. pancreas_gallbladder,head_and_neck,lung, cervical

SEQ ID NO: 460066 - DNA, 23 bp, Homo sapiens
  chr13:46661423-46661446
  hypo
  colorectal vs. liver_bileduct
gcagcagccgctctagatgggcc

SEQ ID NO: 460067 - DNA, 72 bp, Homo sapiens; identical to SEQ ID NO: 341735
  chr13:46948519-46948591
  hypo
  colorectal vs. upper_gi,pancreas_gallbladder

SEQ ID NO: 460068 - DNA, 25 bp, Homo sapiens
  chr13:99851652-99851677
  hypo
  colorectal vs. lymphoid_neoplasm,head_and_neck,melanoma, renal
aaacaaacgaacaaaacaagactgt

SEQ ID NO: 460069 - DNA, 97 bp, Homo sapiens; identical to SEQ ID NO: 355067
  chr13:99851706-99851803
  hypo
  colorectal vs. lymphoid_neoplasm,head_and_neck,melanoma, renal

SEQ ID NO: 460070 - DNA, 127 bp, Homo sapiens; identical to SEQ ID NO: 459410
  chr13:103046539-103046666
  hypo
  colorectal vs. melanoma,anorectal,liver_bileduct,renal, pancreas_gallbladder,sarcoma,breast

SEQ ID NO: 460071 - DNA, 1 bp, Homo sapiens
  chr13:108518657-108518658
  hypo
  colorectal vs. liver_bileduct
c

SEQ ID NO: 460072 - DNA, 22 bp, Homo sapiens
  chr13:108519410-108519432
  hypo
  colorectal vs. liver_bileduct
tctcccctgccaggggcatgcc

SEQ ID NO: 460073 - DNA, 59 bp, Homo sapiens; identical to SEQ ID NO: 459416
  chr13:108519564-108519623
  hypo
  colorectal vs. liver_bileduct

SEQ ID NO: 460074 - DNA, 166 bp, Homo sapiens; identical to SEQ ID NO: 452855
  chr13:108519932-108520098
  hypo
  colorectal vs. liver_bileduct

SEQ ID NO: 460075 - DNA, 166 bp, Homo sapiens; identical to SEQ ID NO: 452855
  chr13:108519932-108520098
  hypo
  colorectal vs. liver_bileduct

SEQ ID NO: 460076 - DNA, 68 bp, Homo sapiens; identical to SEQ ID NO: 452856
  chr13:108520309-108520377
  hypo
  colorectal vs. liver_bileduct

SEQ ID NO: 460077 - DNA, 199 bp, Homo sapiens; identical to SEQ ID NO: 341790
  chr13:111006048-111006247
  hypo
  colorectal vs. pancreas_gallbladder

SEQ ID NO: 460078 - DNA, 401 bp, Homo sapiens
  chr13:111277855-111278256
  hypo
  colorectal vs. liver_bileduct,melanoma,lymphoid_neoplasm, cervical,renal
cggggcccagctccagaggcagggaggccctgtgggctgtgtgtgacaggtttgcagaaggtggaaacgaagggcctctgagcaataacaagacccttcctgcactcggcacatatgtctggtgccaggccctagcctgtgttccatgggtcagcgtggaactgggcaggcaaaaacctgcccccgtggggctcccccagaccgcctatgctatagagcttgctgtgtggaggtgttctctctgccgtccaggattgtggccactgagggcttgaaatgtggctgggaggtgcgggagcagagcgtttgctcttgtttacttttcattgtgtgtgtttgcaccgactggattgggctgtgctgctctggagacaagggagaggaggatgtcaggtggtgaa

SEQ ID NO: 460079 - DNA, 278 bp, Homo sapiens; identical to SEQ ID NO: 355077
  chr13:111278426-111278704
  hypo
  colorectal vs. liver_bileduct,melanoma,lymphoid_neoplasm, cervical,renal

SEQ ID NO: 460080 - DNA, 42 bp, Homo sapiens
  chr13:111363839-111363881
  hypo
cgtgagccaccgcgtccggccaagtgttatagtcttttgtgc

SEQ ID NO: 460081 - DNA, 3 bp, Homo sapiens
  chr13:114075301-114075304
  hypo
  colorectal vs. renal,lymphoid_neoplasm,multiple_myeloma, non_cancer,myeloid_neoplasm,melanoma,prostate,thyroid
acc

SEQ ID NO: 460082 - DNA, 47 bp, Homo sapiens
  chr13:114189691-114189738
  hypo
  colorectal vs. liver_bileduct,pancreas_gallbladder, upper_gi,bladder_and_urothelial,head_and_neck,melanoma, anorectal,cervical,lymphoid_neoplasm,breast,renal,ovary,uterine
cgcacctgggcaccgtcaccattgtcccaacagtgcacctgtgcacc

SEQ ID NO: 460083 - DNA, 304 bp, Homo sapiens
  chr13:114189809-114190113
  hypo
  colorectal vs. liver_bileduct,pancreas_gallbladder, upper_gi,bladder_and_urothelial,head_and_neck,melanoma, anorectal,cervical,lymphoid_neoplasm,breast,renal,ovary,uterine
gcctgtacacaggtgtttatagcagctttattcgtattagccataaacagtccaaaggtacttcagtgggtaaataaatgttcaacaaactgagctatgtccataccacggaacgccacccagcagtaaaaccaccggcacacacctccgagaactgcgcagagtgggcaggcagcccccaaaggctgcgtactgtgtggttctttttatgtcacatttatgaggcgagaagattctgaagttgaggaaaggctcgtggttcccaggaattgaggatgggcagtctggggaggggctggggatg

SEQ ID NO: 460084 - DNA, 278 bp, Homo sapiens; identical to SEQ ID NO: 348618
  chr13:114190142-114190420
  hypo
  colorectal vs. liver_bileduct,pancreas_gallbladder, upper_gi,bladder_and_urothelial,head_and_neck,melanoma, anorectal,cervical,lymphoid_neoplasm,breast,renal,ovary,uterine

SEQ ID NO: 460085 - DNA, 221 bp, Homo sapiens; identical to SEQ ID NO: 341849
  chr13:114300515-114300736
  hypo
  colorectal vs. liver_bileduct

SEQ ID NO: 460086 - DNA, 18 bp, Homo sapiens
  chr13:114497796-114497814
  hypo
  colorectal vs. lymphoid_neoplasm
cgtgtgatgagcacacat

SEQ ID NO: 460087 - DNA, 133 bp, Homo sapiens; identical to SEQ ID NO: 341876
  chr13:114887185-114887318
  hypo
  colorectal vs. pancreas_gallbladder,head_and_neck

SEQ ID NO: 460088 - DNA, 63 bp, Homo sapiens
  chr13:114917508-114917571
  hypo
  colorectal vs. cervical
cgccttgaggaacggcatcgtctgtgctgaagcaggcagcgcccagctgacgactgtcaatgc

SEQ ID NO: 460089 - DNA, 96 bp, Homo sapiens; identical to SEQ ID NO: 366347
  chr13:114917600-114917696
  hypo
  colorectal vs. cervical

SEQ ID NO: 460090 - DNA, 111 bp, Homo sapiens; identical to SEQ ID NO: 380562
  chr14:58599612-58599723
  hypo

SEQ ID NO: 460091 - DNA, 196 bp, Homo sapiens; identical to SEQ ID NO: 334941
  chr14:62105869-62106065
  hypo
  colorectal vs. lymphoid_neoplasm

SEQ ID NO: 460092 - DNA, 15 bp, Homo sapiens
  chr14:65406266-65406281
  hypo
  colorectal vs. cervical,melanoma,lymphoid_neoplasm, head_and_neck,breast
cggctgtagcgtcgg

SEQ ID NO: 460093 - DNA, 9 bp, Homo sapiens
  chr14:70654358-70654367
  hypo
  colorectal vs. multiple_myeloma,thyroid,myeloid_neoplasm, non_cancer,sarcoma,renal,melanoma
cgcgcgcgc

SEQ ID NO: 460094 - DNA, 148 bp, Homo sapiens; identical to SEQ ID NO: 355142
  chr14:73238412-73238560
  hypo
  colorectal vs. pancreas_gallbladder,lymphoid_neoplasm

SEQ ID NO: 460095 - DNA, 61 bp, Homo sapiens; identical to SEQ ID NO: 459426
  chr14:96342530-96342591
  hypo
  colorectal vs. melanoma

SEQ ID NO: 460096 - DNA, 2 bp, Homo sapiens
  chr14:100591298-100591300
  hypo
  colorectal vs. cervical,anorectal,head_and_neck,breast, sarcoma,renal
ac

SEQ ID NO: 460097 - DNA, 129 bp, Homo sapiens
  chr14:100644271-100644400
  hypo
  colorectal vs. cervical,lymphoid_neoplasm
cgcggttccccccccgggagcattgatacccccgcccctgggagcattgatcctcctgcccctgcagcccggagcccggagcagcccacgttgctcccgctgcggcccagcccagcccagcccagccca

SEQ ID NO: 460098 - DNA, 85 bp, Homo sapiens; identical to SEQ ID NO: 355221
  chr14:105472075-105472160
  hypo
  colorectal vs. liver_bileduct

SEQ ID NO: 460099 - DNA, 250 bp, Homo sapiens; identical to SEQ ID NO: 342134
  chr15:31561317-31561567
  hypo
  colorectal vs. upper_gi,cervical,pancreas_gallbladder

SEQ ID NO: 460100 - DNA, 185 bp, Homo sapiens; identical to SEQ ID NO: 342135
  chr15:31564302-31564487
  hypo
  colorectal vs. upper_gi

SEQ ID NO: 460101 - DNA, 218 bp, Homo sapiens; identical to SEQ ID NO: 342138
  chr15:31668823-31669041
  hypo
  colorectal vs. liver_bileduct

SEQ ID NO: 460102 - DNA, 275 bp, Homo sapiens; identical to SEQ ID NO: 459430
  chr15:45670188-45670463
  hypo
  colorectal vs. upper_gi,liver_bileduct, pancreas_gallbladder

SEQ ID NO: 460103 - DNA, 227 bp, Homo sapiens; identical to SEQ ID NO: 459431
  chr15:45670236-45670463
  hypo
  colorectal vs. upper_gi,pancreas_gallbladder, liver_bileduct

SEQ ID NO: 460104 - DNA, 13 bp, Homo sapiens
  chr15:45671015-45671028
  hypo
  colorectal vs. upper_gi,pancreas_gallbladder, liver_bileduct
cgcgacttctgac

SEQ ID NO: 460105 - DNA, 78 bp, Homo sapiens; identical to SEQ ID NO: 452897
  chr15:48936649-48936727
  hypo
  colorectal vs. prostate,uterine,sarcoma,head_and_neck, multiple_myeloma,lung,renal,myeloid_neoplasm,ovary,thyroid, bladder_and_urothelial,non_cancer,melanoma,breast

SEQ ID NO: 460106 - DNA, 11 bp, Homo sapiens
  chr15:57618478-57618489
  hypo
  colorectal vs. upper_gi
cgtgctgccac

SEQ ID NO: 460107 - DNA, 133 bp, Homo sapiens; identical to SEQ ID NO: 380818
  chr15:57618572-57618705
  hypo
  colorectal vs. upper_gi

SEQ ID NO: 460108 - DNA, 10 bp, Homo sapiens
  chr15:72412074-72412084
  hypo
  colorectal vs. liver_bileduct,melanoma,head_and_neck, cervical,pancreas_gallbladder,anorectal,sarcoma, lymphoid_neoplasm,prostate,renal
cgagactccg

SEQ ID NO: 460109 - DNA, 32 bp, Homo sapiens
  chr15:77906720-77906752
  hypo
  colorectal vs. cervical,head_and_neck,lymphoid_neoplasm, breast
cgggcatggagtcgttgccgcccgcgttggcc

SEQ ID NO: 460110 - DNA, 106 bp, Homo sapiens; identical to SEQ ID NO: 355281
  chr15:77906998-77907104
  hypo
  colorectal vs. cervical,head_and_neck,lymphoid_neoplasm, breast

SEQ ID NO: 460111 - DNA, 238 bp, Homo sapiens; identical to SEQ ID NO: 342252
  chr15:79163927-79164165
  hypo
  colorectal vs. lymphoid_neoplasm,renal

SEQ ID NO: 460112 - DNA, 8 bp, Homo sapiens
  chr16:300218-300226
  hypo
  colorectal vs. head_and_neck,lung,liver_bileduct, melanoma,anorectal
cgcgcccg

SEQ ID NO: 460113 - DNA, 160 bp, Homo sapiens
  chr16:1807721-1807881
  hypo
  colorectal vs. head_and_neck,lung,bladder_and_urothelial
cgtctgcggtgtctccctcgccgctctctccctcgcccacgctggggggcttttggagactgggtacctgccacaccctgccacacacactctcctcttcacaggcctgcatcatgggggctgcggggggcctgccctcctgatgggcgatgggagcaga

SEQ ID NO: 460114 - DNA, 431 bp, Homo sapiens; identical to SEQ ID NO: 366762
  chr16:1807999-1808430
  hypo
  colorectal vs. head_and_neck,lung,bladder_and_urothelial

SEQ ID NO: 460115 - DNA, 280 bp, Homo sapiens; identical to SEQ ID NO: 342406
  chr16:2035689-2035969
  hypo
  colorectal vs. liver_bileduct,upper_gi

SEQ ID NO: 460116 - DNA, 50 bp, Homo sapiens
  chr16:2141860-2141910
  hypo
  colorectal vs. melanoma,lymphoid_neoplasm,liver_bileduct, breast
cgtagcccccgctgtcatacacggcacaggagccccaggaccatgccctg

SEQ ID NO: 460117 - DNA, 575 bp, Homo sapiens
  chr16:2141972-2142547
  hypo
  colorectal vs. melanoma,lymphoid_neoplasm,liver_bileduct, breast
caggaggccgcggcactcctggagaactactcccttgtccttggcgtagacgcccggggccctcgctctgctcaccccagcagatccggcgctgaataggcccacgtccccgagccattgtgaggactctcccagccaacgtcgtaatcgctggtgctgaagcctcctgcggccgagcacgtgtggaccctggggccgggagggtctgggtagagtgctgaaacacacagagccccaggccggggccagggcctcatcaaaacccaacaggagtgtttcctgctggccagctcgcctgagctctggttcggcgccaccccagggaaccctcccagcagccatcaattagacaacgttaccatctctcatatacagagaaggaaacggcggtgttaagagggcaaaggtcacacagctagggagcagggctgatgccagagctccgctaaaggctgctctctcaacaagaggaacgatttaagtcttggggcacgccctgccagctcaccttcctgcagccgcacctgccgcagccgtgggggccccagctctgggctggactggttcccgtggac

SEQ ID NO: 460118 - DNA, 25 bp, Homo sapiens
  chr16:2142628-2142653
  hypo
  colorectal vs. melanoma,lymphoid_neoplasm,liver_bileduct, breast
tgccccatgcccgcctcgagtgagc

SEQ ID NO: 460119 - DNA, 335 bp, Homo sapiens
  chr16:2142212-2142547
  hypo
  colorectal vs. liver_bileduct,bladder_and_urothelial, lymphoid_neoplasm,breast
cggggccagggcctcatcaaaacccaacaggagtgtttcctgctggccagctcgcctgagctctggttcggcgccaccccagggaaccctcccagcagccatcaattagacaacgttaccatctctcatatacagagaaggaaacggcggtgttaagagggcaaaggtcacacagctagggagcagggctgatgccagagctccgctaaaggctgctctctcaacaagaggaacgatttaagtcttggggcacgccctgccagctcaccttcctgcagccgcacctgccgcagccgtgggggccccagctctgggctggactggttcccgtggac

SEQ ID NO: 460120 - DNA, 391 bp, Homo sapiens; identical to SEQ ID NO: 355378
  chr16:2142628-2143019
  hypo
  colorectal vs. liver_bileduct,bladder_and_urothelial, lymphoid_neoplasm,breast

SEQ ID NO: 460121 - DNA, 368 bp, Homo sapiens
  chr16:4310368-4310736
  hypo
  colorectal vs. melanoma
cgtggcctagggagaggcttccgccattcaagatcacctgtccccttcccggtccccagagcccactcccgggcgcctcctgctcacctgggtccgcagctgctgctgttcccgctccagcttctcctggtgcagcagcctcacctgttcctgctgctgctgcagctgcacctgctgcgcaatcaccttgagcttttccgggtacatgtgggcctccagcgagcgcacctggaggcaggacaacctgggctcagggccaaggccgggagcacaccctgccctgtcagtctcacagcagctcattcactcctgctgaaaaccctagcacagggcgggcccctctcaacagaggccagaagcctttccag

SEQ ID NO: 460122 - DNA, 65 bp, Homo sapiens
  chr16:9005277-9005342
  hypo
  colorectal vs. head_and_neck,lymphoid_neoplasm, liver_bileduct,melanoma,cervical,lung
cgagccacatgctgagtgacaagctctcaatccaacacggaattgtatatccagagtgtatggag

SEQ ID NO: 460123 - DNA, 76 bp, Homo sapiens
  chr16:15767635-15767711
  hypo
  colorectal vs. upper_gi,liver_bileduct
cggcatgaggcaccgcacctggctctgggtgtttggtgaaggaaagtaatttggaagcagagcaggaatagaatcg

SEQ ID NO: 460124 - DNA, 263 bp, Homo sapiens
  chr16:15820563-15820826
  hypo
  colorectal vs. head_and_neck,breast
cgcctctcctccaggaacgcaactagaggaaaggacttgccttgcagcaagagagacctcagcgagccgggaagaggctcctccccacagaactgggcaccacccagcactgcccaccacaccaccgcgccacctcctcacctgcagcttgtggactttgtcattgagctccgcccgggcccgctccccatcgctgcacttggactgcagctcctgcacctgcgcctccagcttcttcttcttatgttccacctcctgcttgg

SEQ ID NO: 460125 - DNA, 219 bp, Homo sapiens; identical to SEQ ID NO: 342530
  chr16:24849506-24849725
  hypo
  colorectal vs. upper_gi

SEQ ID NO: 460126 - DNA, 19 bp, Homo sapiens
  chr16:30124861-30124880
  hypo
  colorectal vs. melanoma,lymphoid_neoplasm
tgcctagccagtgtgggcc

SEQ ID NO: 460127 - DNA, 276 bp, Homo sapiens; identical to SEQ ID NO: 342564
  chr16:31142715-31142991
  hypo
  colorectal vs. liver_bileduct

SEQ ID NO: 460128 - DNA, 86 bp, Homo sapiens; identical to SEQ ID NO: 459452
  chr16:56228284-56228370
  hypo
  colorectal vs. ovary

SEQ ID NO: 460129 - DNA, 57 bp, Homo sapiens; identical to SEQ ID NO: 351808
  chr16:56228591-56228648
  hypo
  colorectal vs. ovary

SEQ ID NO: 460130 - DNA, 566 bp, Homo sapiens; identical to SEQ ID NO: 351815
  chr16:66638452-66639018
  hypo
  colorectal vs. melanoma,cervical,bladder_and_urothelial, lung,lymphoid_neoplasm

SEQ ID NO: 460131 - DNA, 260 bp, Homo sapiens; identical to SEQ ID NO: 342615
  chr16:67709104-67709364
  hypo
  colorectal vs. upper_gi

SEQ ID NO: 460132 - DNA, 79 bp, Homo sapiens
  chr16:71715666-71715745
  hypo
  colorectal vs. cervical,anorectal,lung,breast, lymphoid_neoplasm,head_and_neck,melanoma,sarcoma,uterine, bladder_and_urothelial,ovary,renal,prostate,multiple_myeloma, thyroid,non_cancer
cgaggcctccgggtctttctaactgcatgaagttgtgtcgcaagttgaggtaggtaatatcttgactatagaagagatg

SEQ ID NO: 460133 - DNA, 52 bp, Homo sapiens
  chr16:85485696-85485748
  hypo
  colorectal vs. anorectal
cgccagagagacccgtgtccggcgcgaataattggattttaatgaaacgaat

SEQ ID NO: 460134 - DNA, 91 bp, Homo sapiens; identical to SEQ ID NO: 381338
  chr16:85485855-85485946
  hypo
  colorectal vs. anorectal

SEQ ID NO: 460135 - DNA, 114 bp, Homo sapiens; identical to SEQ ID NO: 367027
  chr16:85679455-85679569
  hypo
  colorectal vs. lymphoid_neoplasm,melanoma

SEQ ID NO: 460136 - DNA, 274 bp, Homo sapiens; identical to SEQ ID NO: 342721
  chr16:87444932-87445206
  hypo
  colorectal vs. head_and_neck,liver_bileduct, lymphoid_neoplasm

SEQ ID NO: 460137 - DNA, 1 bp, Homo sapiens
  chr16:89119921-89119922
  hypo
c

SEQ ID NO: 460138 - DNA, 315 bp, Homo sapiens; identical to SEQ ID NO: 342779
  chr16:89169100-89169415
  hypo
  colorectal vs. liver_bileduct,head_and_neck,lung, cervical

SEQ ID NO: 460139 - DNA, 542 bp, Homo sapiens; identical to SEQ ID NO: 342780
  chr16:89169538-89170080
  hypo
  colorectal vs. head_and_neck,lymphoid_neoplasm,anorectal, lung

SEQ ID NO: 460140 - DNA, 401 bp, Homo sapiens
  chr16:89409913-89410314
  hypo
  colorectal vs. lymphoid_neoplasm,melanoma
cgagcaaatgagacagagctcgaggtgggctggaggcatgtgagggtgcacgcgaaacacagtgcctcctcttggagttgccagaattcacctcgttcagaacctcaccccagtcagaaaacacaaggcagcaactggccggaacttggtcagtcacatccataaaccaccaattaccttcacagaccacgactaacaggtttattacagatgagtcacagctcatgttttcaaggaagggtctccaactgagcagtcaccagtgcagcctgcgtcagggcgcgcctccctccagcggtccccgcgtcgcccatgtctgacacagtttatgcttcgcaggcggtaaggctccgctcctcactcccatggaccaacagagtagggaaaacgaaggcacgttg

SEQ ID NO: 460141 - DNA, 70 bp, Homo sapiens; identical to SEQ ID NO: 367096
  chr16:89504482-89504552
  hypo
  colorectal vs. lung,upper_gi,bladder_and_urothelial, head_and_neck,pancreas_gallbladder

SEQ ID NO: 460142 - DNA, 1 bp, Homo sapiens
  chr16:89575936-89575937
  hypo
  colorectal vs. lymphoid_neoplasm
c

SEQ ID NO: 460143 - DNA, 4 bp, Homo sapiens
  chr16:89883921-89883925
  hypo
cggc

SEQ ID NO: 460144 - DNA, 3 bp, Homo sapiens
  chr16:89884344-89884347
  hypo
gcc

SEQ ID NO: 460145 - DNA, 25 bp, Homo sapiens
  chr16:89899939-89899964
  hypo
  colorectal vs. melanoma,lymphoid_neoplasm,renal
cgccctgctgggctcaggggcaggt

SEQ ID NO: 460146 - DNA, 489 bp, Homo sapiens; identical to SEQ ID NO: 454870
  chr16:89900815-89901304
  hypo
  colorectal vs. melanoma,lymphoid_neoplasm

SEQ ID NO: 460147 - DNA, 142 bp, Homo sapiens
  chr17:1412249-1412391
  hypo
  colorectal vs. liver_bileduct,upper_gi, pancreas_gallbladder,bladder_and_urothelial,cervical, head_and_neck,lung,lymphoid_neoplasm,renal,anorectal,melanoma, breast
cgtggggcagagggcggggaacagtctgcagacccaggctcactcgtggcggtcagcgtggggcagagggcggggaacagtctgcagacccaggctcactcgtgggggtcagcgtggggcagagggcggggagcggtctgca

SEQ ID NO: 460148 - DNA, 84 bp, Homo sapiens; identical to SEQ ID NO: 346154
  chr17:1412463-1412547
  hypo
  colorectal vs. liver_bileduct,upper_gi, pancreas_gallbladder,bladder_and_urothelial,cervical, head_and_neck,lung,lymphoid_neoplasm,renal,anorectal,melanoma, breast

SEQ ID NO: 460149 - DNA, 137 bp, Homo sapiens
  chr17:4144975-4145112
  hypo
  colorectal vs. head_and_neck
cggacctttgccctctgaattcctagacaggtaagtcaattcctgcttgattagcaatgctatcaccatgactcccgcactctttgctgaagataagcagtgaacgagagacacaaatcttgcctcgggcccggcac

SEQ ID NO: 460150 - DNA, 174 bp, Homo sapiens; identical to SEQ ID NO: 454226
  chr17:10632714-10632888
  hypo
  colorectal vs. pancreas_gallbladder,cervical,anorectal, melanoma,sarcoma

SEQ ID NO: 460151 - DNA, 245 bp, Homo sapiens; identical to SEQ ID NO: 351891
  chr17:10633350-10633595
  hypo
  colorectal vs. pancreas_gallbladder,cervical,anorectal, melanoma,sarcoma

SEQ ID NO: 460152 - DNA, 717 bp, Homo sapiens; identical to SEQ ID NO: 335510
  chr17:33814248-33814965
  hypo
  colorectal vs. upper_gi

SEQ ID NO: 460153 - DNA, 219 bp, Homo sapiens; identical to SEQ ID NO: 459475
  chr17:46124683-46124902
  hypo
  colorectal vs. upper_gi,cervical,anorectal, pancreas_gallbladder,breast,renal,lymphoid_neoplasm, liver_bileduct,prostate,ovary,melanoma,myeloid_neoplasm,thyroid, multiple_myeloma,bladder_and_urothelial,non_cancer,uterine,
  CONT. FROM ABOVE: head_and_neck,lung

SEQ ID NO: 460154 - DNA, 164 bp, Homo sapiens; identical to SEQ ID NO: 345529
  chr17:46125148-46125312
  hypo
  colorectal vs. upper_gi,cervical,anorectal, pancreas_gallbladder,breast,renal,lymphoid_neoplasm, liver_bileduct,prostate,ovary,melanoma,myeloid_neoplasm,thyroid, multiple_myeloma,bladder_and_urothelial,non_cancer,uterine,
  CONT. FROM ABOVE: head_and_neck,lung

SEQ ID NO: 460155 - DNA, 120 bp, Homo sapiens; identical to SEQ ID NO: 343025
  chr17:48845008-48845128
  hypo
  colorectal vs. liver_bileduct

SEQ ID NO: 460156 - DNA, 25 bp, Homo sapiens
  chr17:49229457-49229482
  hypo
  colorectal vs. lymphoid_neoplasm,renal,melanoma, multiple_myeloma
cgcgggaagctgagtcacgagaatc

SEQ ID NO: 460157 - DNA, 216 bp, Homo sapiens; identical to SEQ ID NO: 457619
  chr17:56327007-56327223
  hypo
  colorectal vs. bladder_and_urothelial,anorectal,prostate, lung,sarcoma,head_and_neck,breast,uterine

SEQ ID NO: 460158 - DNA, 787 bp, Homo sapiens; identical to SEQ ID NO: 335625
  chr17:56429059-56429846
  hypo
  colorectal vs. upper_gi

SEQ ID NO: 460159 - DNA, 48 bp, Homo sapiens; identical to SEQ ID NO: 348820
  chr17:57297129-57297177
  hypo
  colorectal vs. lymphoid_neoplasm

SEQ ID NO: 460160 - DNA, 112 bp, Homo sapiens; identical to SEQ ID NO: 454237
  chr17:61777761-61777873
  hypo
  colorectal vs. cervical,anorectal,sarcoma, multiple_myeloma,lymphoid_neoplasm,head_and_neck,non_cancer, thyroid

SEQ ID NO: 460161 - DNA, 76 bp, Homo sapiens; identical to SEQ ID NO: 345537
  chr17:61778423-61778499
  hypo
  colorectal vs. cervical,anorectal,sarcoma, multiple_myeloma,lymphoid_neoplasm,head_and_neck,non_cancer, thyroid

SEQ ID NO: 460162 - DNA, 220 bp, Homo sapiens; identical to SEQ ID NO: 343060
  chr17:63152527-63152747
  hypo
  colorectal vs. lymphoid_neoplasm

SEQ ID NO: 460163 - DNA, 241 bp, Homo sapiens; identical to SEQ ID NO: 459486
  chr17:71160878-71161119
  hypo
  colorectal vs. breast,ovary,sarcoma,uterine

SEQ ID NO: 460164 - DNA, 5 bp, Homo sapiens
  chr17:71161494-71161499
  hypo
  colorectal vs. anorectal,uterine,sarcoma,breast
cgaga

SEQ ID NO: 460165 - DNA, 81 bp, Homo sapiens; identical to SEQ ID NO: 454240
  chr17:73584287-73584368
  hypo
  colorectal vs. cervical

SEQ ID NO: 460166 - DNA, 170 bp, Homo sapiens; identical to SEQ ID NO: 352021
  chr17:73584951-73585121
  hypo
  colorectal vs. cervical

SEQ ID NO: 460167 - DNA, 271 bp, Homo sapiens
  chr17:73607997-73608268
  hypo
  colorectal vs. melanoma,renal
cgagtgcctgccgcctgaggttcctgcccggcccagcctgactctcccagcagacattgacctgttccctttctccagcttcgtcgccatcggctttcaggtgggcgcccaggcctaagctcttcccgctggcctcaccgctctgagttagcacctgcctgacagatgctgcgtttttttccccgctgtcagctcttgccctccttcctccccagcctttggggctgtgagtagcgctgaattgctctgaaaataaccgttgaatgtaatt

SEQ ID NO: 460168 - DNA, 536 bp, Homo sapiens
  chr17:73612827-73613363
  hypo
cgcccgggccccgtgcctgtgcccgtgcagccatccaggtgggcccccacggggaggtggccagggctgtcccgctcctcggggaatcaccctatgaacttagtgacctcttgcttctcccacgaggcctcccaaagctttcctgaggaaaatcgaccccaaggacgaggctctggccaagctgggtatcaacggtgcccactcgtccccgccggtgagcaccccagcctgtctcccccagagtgtgtgctgctgcactggggagctcaaggctctctggggcgaacttggccttgtgctgtgactcagcccgtgtactttctccgtatccccccagatgctgtcccccagcccaggaaagggccccccgccagctgtggctcctcgacccaaggccccgctacagcttgggccctctagctccatcaaggaaaagcaggggccccttctggacctgtttggccagaagctgcctattgcccacacacccccacctccaccagcgccaccactgcctctgcccgaggacccaggga

SEQ ID NO: 460169 - DNA, 211 bp, Homo sapiens
  chr17:73613424-73613635
  hypo
ggcagaggcagggttcgcacagactctcggtgcccagggctgaaggcatttctgcgtggctgaggccagctgttcgggcttctggactttggagccatacgtagctggggagtcccagcttccgcgttcccacccagggcagggcctgggcatctttggggctgtcatcgagaggctgtcacacacagggtgttgtccctgacacataccc

SEQ ID NO: 460170 - DNA, 212 bp, Homo sapiens
  chr17:73613151-73613363
  hypo
cgtatccccccagatgctgtcccccagcccaggaaagggccccccgccagctgtggctcctcgacccaaggccccgctacagcttgggccctctagctccatcaaggaaaagcaggggccccttctggacctgtttggccagaagctgcctattgcccacacacccccacctccaccagcgccaccactgcctctgcccgaggacccaggga

SEQ ID NO: 460171 - DNA, 527 bp, Homo sapiens; identical to SEQ ID NO: 367350
  chr17:73613424-73613951
  hypo

SEQ ID NO: 460172 - DNA, 689 bp, Homo sapiens; identical to SEQ ID NO: 343143
  chr17:75213347-75214036
  hypo
  colorectal vs. upper_gi

SEQ ID NO: 460173 - DNA, 512 bp, Homo sapiens
  chr17:76991011-76991523
  hypo
  colorectal vs. liver_bileduct
cggttttggaggcaaatgcaggaggaagcaggttcccagcgactgggctgtggaagccacactgtgggctggggcaggcgtctcttacctggcggctggatgccggcagcagcccgcagggcgttgtagttggacacccagttctcgtggtccacgctgcccttgtagcccaccaccttcacccactccgggttctcgttcaccacatcacccgtagtggtcgtccactccttgcccaggccgcccacgtacagacgctcgtccttcactgccagccattcggccttgaagcctggccaagcagagtgtccttaggccccgcacccagctcccgccgcacccctgcacctggctcccacccggccccgcacctgtccttagaccccgcacctgactcccgcccggctccacacctgcctcccctccggcccgcacctggctcccgcccagggccggccggctgccctcccctcagctcctgaaggttcagtgaccactctcaagtctcctct

SEQ ID NO: 460174 - DNA, 632 bp, Homo sapiens
  chr17:76992727-76993359
  hypo
  colorectal vs. liver_bileduct
cgtggtcttgagaacctttgaaggtgtaaaaagggcgtgttcccagaggctccgagagcagcagcggatacagccgaaaacatcttggagagattccccacgtctcccacaggcctctagcgataagctcttcctcctagaaactgctcagtgtgaagtgacagtaggctatgctcctggctaagggtaagggggccgcaggtcagagcaagagggagacgtgctccctcaccacatccctggcttctaggtgtgtgaattctttaccatgtgcctgtgtttgccagccaggccctgagctcccactccccacccacacctccataaaacctcagggtccagttacctttctccacggtgccgtcgccgtcggacagaatcacccagggcacggctttgctgccttcgatctggtagacgacccccgtccggtcatccacggagtagagtttcccattgaaaacaatcaggtcggatagctccatgcctctccccttctccgccaggtgggactccaggaccccatggtctttgtcccattccacggccaccttgtccccactgtctgacagggtcaggtagccctttttcaggtaactgaaccaggtgttttcctcttgggcccttgactc

SEQ ID NO: 460175 - DNA, 142 bp, Homo sapiens; identical to SEQ ID NO: 348846
  chr17:76993419-76993561
  hypo
  colorectal vs. liver_bileduct

SEQ ID NO: 460176 - DNA, 116 bp, Homo sapiens; identical to SEQ ID NO: 343166
  chr17:77070114-77070230
  hypo
  colorectal vs. pancreas_gallbladder,upper_gi, liver_bileduct

SEQ ID NO: 460177 - DNA, 377 bp, Homo sapiens; identical to SEQ ID NO: 343168
  chr17:77073688-77074065
  hypo
  colorectal vs. upper_gi,liver_bileduct, pancreas_gallbladder

SEQ ID NO: 460178 - DNA, 375 bp, Homo sapiens; identical to SEQ ID NO: 343169
  chr17:77074650-77075025
  hypo
  colorectal vs. upper_gi,liver_bileduct

SEQ ID NO: 460179 - DNA, 2 bp, Homo sapiens
  chr17:80535381-80535383
  hypo
  colorectal vs. upper_gi,pancreas_gallbladder, head_and_neck,lung,liver_bileduct
gt

SEQ ID NO: 460180 - DNA, 238 bp, Homo sapiens; identical to SEQ ID NO: 345538
  chr18:2848166-2848404
  hypo
  colorectal vs. uterine

SEQ ID NO: 460181 - DNA, 273 bp, Homo sapiens; identical to SEQ ID NO: 459494
  chr18:7567478-7567751
  hypo
  colorectal vs. liver_bileduct

SEQ ID NO: 460182 - DNA, 202 bp, Homo sapiens; identical to SEQ ID NO: 452944
  chr18:25756986-25757188
  hypo
  colorectal vs. liver_bileduct

SEQ ID NO: 460183 - DNA, 42 bp, Homo sapiens; identical to SEQ ID NO: 452945
  chr18:25757146-25757188
  hypo
  colorectal vs. liver_bileduct

SEQ ID NO: 460184 - DNA, 14 bp, Homo sapiens
  chr18:44337138-44337152
  hypo
  colorectal vs. myeloid_neoplasm,thyroid,non_cancer, sarcoma,prostate,breast,renal,multiple_myeloma
caggggctgggcgc

SEQ ID NO: 460185 - DNA, 323 bp, Homo sapiens; identical to SEQ ID NO: 343385
  chr18:46287816-46288139
  hypo
  colorectal vs. liver_bileduct,pancreas_gallbladder

SEQ ID NO: 460186 - DNA, 53 bp, Homo sapiens; identical to SEQ ID NO: 355910
  chr19:407832-407885
  hypo
  colorectal vs. lymphoid_neoplasm

SEQ ID NO: 460187 - DNA, 66 bp, Homo sapiens; identical to SEQ ID NO: 355911
  chr19:491540-491606
  hypo
  colorectal vs. pancreas_gallbladder,lymphoid_neoplasm, liver_bileduct,head_and_neck,upper_gi,cervical

SEQ ID NO: 460188 - DNA, 229 bp, Homo sapiens; identical to SEQ ID NO: 456692
  chr19:1004547-1004776
  hypo
  colorectal vs. renal,lymphoid_neoplasm

SEQ ID NO: 460189 - DNA, 279 bp, Homo sapiens; identical to SEQ ID NO: 218770
  chr19:1005441-1005720
  hypo
  colorectal vs. renal

SEQ ID NO: 460190 - DNA, 121 bp, Homo sapiens; identical to SEQ ID NO: 459501
  chr19:1449921-1450042
  hypo
  colorectal vs. uterine

SEQ ID NO: 460191 - DNA, 197 bp, Homo sapiens; identical to SEQ ID NO: 361357
  chr19:1754950-1755147
  hypo
  colorectal vs. upper_gi

SEQ ID NO: 460192 - DNA, 262 bp, Homo sapiens
  chr19:1969650-1969912
  hypo
  colorectal vs. liver_bileduct
cgcccgcccaccggccgcagtgatgttctagccacagaggagccaagacctcaggtttccagagacttgggatttgcacggcagcagagtcaccgtggagaggccagggtatcacaaacttatggattttgacaagaaaggagggaaaggggagacggaggagggccggagaatgtccaaggccggcgggggccggagcagccacggcatccggagctcggggaccagctcgggggtcctgatggtgggccccaacttccgc

SEQ ID NO: 460193 - DNA, 320 bp, Homo sapiens
  chr19:1970106-1970426
  hypo
  colorectal vs. liver_bileduct
ccgtcgtggtgcgagtgccacttcccttcgaggaggttctgtggggagagtgggtttctggccctgtcaccttttcgggaaacagttctgttgggaggcaggtggcccagagcaggccaggccacgccgcaaggagcccgatgttaagttgtgaatgactttcatggcccatgtgcacgctgggcgaagccccggctttaacggcaggtgcctgcccggcactcagctcgtgggaggtcttggccagcccggagctggcgtcaggtggctggagtgactgttctgtggtgatgatactgctgtgtgccactcccagcttc

SEQ ID NO: 460194 - DNA, 320 bp, Homo sapiens; identical to SEQ ID NO: 460193
  chr19:1970106-1970426
  hypo
  colorectal vs. liver_bileduct,melanoma,breast

SEQ ID NO: 460195 - DNA, 13 bp, Homo sapiens
  chr19:3219527-3219540
  hypo
  colorectal vs. melanoma,anorectal,renal, lymphoid_neoplasm
cgccgcgccctgc

SEQ ID NO: 460196 - DNA, 72 bp, Homo sapiens; identical to SEQ ID NO: 355964
  chr19:3219654-3219726
  hypo
  colorectal vs. melanoma,anorectal,renal, lymphoid_neoplasm

SEQ ID NO: 460197 - DNA, 47 bp, Homo sapiens; identical to SEQ ID NO: 459506
  chr19:3785511-3785558
  hypo
  colorectal vs. myeloid_neoplasm,thyroid

SEQ ID NO: 460198 - DNA, 418 bp, Homo sapiens; identical to SEQ ID NO: 382312
  chr19:3966086-3966504
  hypo
  colorectal vs. melanoma,head_and_neck

SEQ ID NO: 460199 - DNA, 100 bp, Homo sapiens
  chr19:3966587-3966687
  hypo
  colorectal vs. head_and_neck
cgggtggcacataagccccgtcattcactctgccagggcgcctcctccatgctggagtggacttcggccccggggacacagggcaccatatgcaccagca

SEQ ID NO: 460200 - DNA, 183 bp, Homo sapiens; identical to SEQ ID NO: 367812
  chr19:3966755-3966938
  hypo
  colorectal vs. head_and_neck

SEQ ID NO: 460201 - DNA, 311 bp, Homo sapiens; identical to SEQ ID NO: 343677
  chr19:5938115-5938426
  hypo
  colorectal vs. liver_bileduct,pancreas_gallbladder,lung, upper_gi,head_and_neck,breast,lymphoid_neoplasm,melanoma, cervical

SEQ ID NO: 460202 - DNA, 323 bp, Homo sapiens; identical to SEQ ID NO: 361399
  chr19:6590881-6591204
  hypo
  colorectal vs. lymphoid_neoplasm

SEQ ID NO: 460203 - DNA, 250 bp, Homo sapiens; identical to SEQ ID NO: 343702
  chr19:7493749-7493999
  hypo
  colorectal vs. head_and_neck,cervical

SEQ ID NO: 460204 - DNA, 685 bp, Homo sapiens; identical to SEQ ID NO: 335930
  chr19:8274278-8274963
  hypo
  colorectal vs. cervical,lung,anorectal,lymphoid_neoplasm, head_and_neck,prostate,uterine,breast

SEQ ID NO: 460205 - DNA, 215 bp, Homo sapiens; identical to SEQ ID NO: 459511
  chr19:10400761-10400976
  hypo
  colorectal vs. head_and_neck,lung

SEQ ID NO: 460206 - DNA, 631 bp, Homo sapiens; identical to SEQ ID NO: 457670
  chr19:10530654-10531285
  hypo
  colorectal vs. sarcoma

SEQ ID NO: 460207 - DNA, 328 bp, Homo sapiens
  chr19:10823276-10823604
  hypo
  colorectal vs. upper_gi,melanoma
cgactgcgtcttccccacacggacagcggtgaggctctggcagaaggaggtcagggcgggagacgggtgggggactagggaggcaaggttaggggtggggggtggggagaatgaagccctgggtgacgcccctttccctgcccttcctctcccacagcgctttggctctgccctggtgcccactgggaacctgcagttgaggaagaaggtgtttgagaaggacttcggccccatagacccggagtgcacctgccccacgtgccaaaagtaggcaggatggcactgggagctggggcagggcatggaggggacagggcctggccgtgct

SEQ ID NO: 460208 - DNA, 46 bp, Homo sapiens
  chr19:10823633-10823679
  hypo
  colorectal vs. upper_gi,melanoma
gccgcgccttcctgcacgcactgctgcacagtgacaacacggccgc

SEQ ID NO: 460209 - DNA, 192 bp, Homo sapiens; identical to SEQ ID NO: 367918
  chr19:10823721-10823913
  hypo
  colorectal vs. upper_gi,melanoma

SEQ ID NO: 460210 - DNA, 123 bp, Homo sapiens
  chr19:10872413-10872536
  hypo
  colorectal vs. liver_bileduct,upper_gi
cgccagctctcagcttggcctcccaagactcctcactttcgtcctctggccccgcccaacctggcaagaaggcgtgtctccagtgagagacagcagccgatgggcccaccacctcttctttat

SEQ ID NO: 460211 - DNA, 189 bp, Homo sapiens; identical to SEQ ID NO: 347537
  chr19:11593453-11593642
  hypo
  colorectal vs. anorectal,melanoma

SEQ ID NO: 460212 - DNA, 3 bp, Homo sapiens
  chr19:12266891-12266894
  hypo
  colorectal vs. bladder_and_urothelial,sarcoma,breast, uterine
cga

SEQ ID NO: 460213 - DNA, 19 bp, Homo sapiens
  chr19:15292612-15292631
  hypo
  colorectal vs. liver_bileduct,cervical,anorectal, bladder_and_urothelial,renal
ctgcggacaggaggaaggc

SEQ ID NO: 460214 - DNA, 376 bp, Homo sapiens; identical to SEQ ID NO: 343826
  chr19:17172577-17172953
  hypo
  colorectal vs. liver_bileduct,upper_gi

SEQ ID NO: 460215 - DNA, 106 bp, Homo sapiens; identical to SEQ ID NO: 459516
  chr19:17392397-17392503
  hypo
  colorectal vs. anorectal,bladder_and_urothelial

SEQ ID NO: 460216 - DNA, 354 bp, Homo sapiens; identical to SEQ ID NO: 454288
  chr19:18117804-18118158
  hypo
  colorectal vs. liver_bileduct,pancreas_gallbladder

SEQ ID NO: 460217 - DNA, 4 bp, Homo sapiens
  chr19:19042867-19042871
  hypo
  colorectal vs. liver_bileduct
gggc

SEQ ID NO: 460218 - DNA, 193 bp, Homo sapiens
  chr19:39151314-39151507
  hypo
  colorectal vs. head_and_neck
cgcgagccaccatgcccgacccatggactcacttgtataatcttgtgaagcaggtgttgttacccttacatgcagaaatggatccatgggcctttaagccacttgcccctgtgacagtgccaggatttgaatgtagaagttgaggctttcaagtttatgctgttatttctacactacactgaagtctagtgat

SEQ ID NO: 460219 - DNA, 244 bp, Homo sapiens
  chr19:39151540-39151784
  hypo
  colorectal vs. head_and_neck
ggagtgtgcagtgcaggtacttcagatggagaggaaggtctcaaagaggtggcatttcagctgttccttaacggatgagaaagagagaaccaagagagcaccagaggaacgcgcttccaacagagaaaaccaagcaagggggcccccgaggagcagaaaggcccgagtggtcagagcggagcccgtggaagagatgggcacagccagattgcttagagctgtgttgttagaagtgctgatgagt

SEQ ID NO: 460220 - DNA, 74 bp, Homo sapiens
  chr19:39305794-39305868
  hypo
  colorectal vs. liver_bileduct,head_and_neck,upper_gi, lung,pancreas_gallbladder,bladder_and_urothelial
cgaacgccaccctcaaccccagggcaggcagggagaccaggaagccttgcaacccagagggaccccagcgactt

SEQ ID NO: 460221 - DNA, 193 bp, Homo sapiens
  chr19:39306241-39306434
  hypo
  colorectal vs. upper_gi,liver_bileduct, pancreas_gallbladder,lung,cervical,bladder_and_urothelial, anorectal,head_and_neck,lymphoid_neoplasm,breast
cgcgagggctctcagagcttggagaaggtgacggttttcagttccttgttctcagtcgtggcctggaccgacttcacgaggtcttgggtctgcagcatgctcatgttccaggacgcctggtaccgagggtgttgagagagaacgaggagagagattagcaggggccaatcaggataaagcatgagagcaccct

SEQ ID NO: 460222 - DNA, 100 bp, Homo sapiens; identical to SEQ ID NO: 356138
  chr19:39306545-39306645
  hypo
  colorectal vs. upper_gi,liver_bileduct, pancreas_gallbladder,lung,cervical,bladder_and_urothelial, anorectal,head_and_neck,lymphoid_neoplasm,breast

SEQ ID NO: 460223 - DNA, 157 bp, Homo sapiens; identical to SEQ ID NO: 356149
  chr19:42408960-42409117
  hypo
  colorectal vs. melanoma,lymphoid_neoplasm

SEQ ID NO: 460224 - DNA, 89 bp, Homo sapiens
  chr19:42460873-42460962
  hypo
  colorectal vs. cervical,lung,anorectal, bladder_and_urothelial
cgggatccctccccgggcttgtgatgggacggcgctgtgggcccgagcagcagagccgtgcaggacaggcatgggcaggggtggggcag

SEQ ID NO: 460225 - DNA, 264 bp, Homo sapiens; identical to SEQ ID NO: 368129
  chr19:42461113-42461377
  hypo
  colorectal vs. cervical,lung,anorectal, bladder_and_urothelial

SEQ ID NO: 460226 - DNA, 12 bp, Homo sapiens
  chr19:45851443-45851455
  hypo
  colorectal vs. cervical
gggggcaggaac

SEQ ID NO: 460227 - DNA, 118 bp, Homo sapiens
  chr19:47593053-47593171
  hypo
cgggtgatctctccggtctcctgtgccatgcacatgcagagcctggcccttctttgtacacttatcccaaccctaagtgaccaaacttgaggttctgtgagaccaggccaccggggtt

SEQ ID NO: 460228 - DNA, 113 bp, Homo sapiens; identical to SEQ ID NO: 368168
  chr19:47593246-47593359
  hypo

SEQ ID NO: 460229 - DNA, 345 bp, Homo sapiens; identical to SEQ ID NO: 455022
  chr19:48150921-48151266
  hypo
  colorectal vs. head_and_neck

SEQ ID NO: 460230 - DNA, 18 bp, Homo sapiens
  chr19:49242357-49242375
  hypo
  colorectal vs. cervical,upper_gi,anorectal,head_and_neck, lung,ovary
cgcgcaggtgctccgccc

SEQ ID NO: 460231 - DNA, 142 bp, Homo sapiens; identical to SEQ ID NO: 459532
  chr19:49242393-49242535
  hypo
  colorectal vs. cervical,upper_gi,anorectal,head_and_neck, lung,ovary

SEQ ID NO: 460232 - DNA, 36 bp, Homo sapiens; identical to SEQ ID NO: 459533
  chr19:49242773-49242809
  hypo
  colorectal vs. cervical,upper_gi,anorectal,head_and_neck, lung,ovary

SEQ ID NO: 460233 - DNA, 19 bp, Homo sapiens
  chr19:49242911-49242930
  hypo
  colorectal vs. cervical,upper_gi,anorectal,head_and_neck, lung,ovary
cgccggggaacagagtcgc

SEQ ID NO: 460234 - DNA, 412 bp, Homo sapiens
  chr19:56199006-56199418
  hypo
  colorectal vs. liver_bileduct,cervical,head_and_neck, bladder_and_urothelial,lung,lymphoid_neoplasm,melanoma,breast
cgctggcctcacctgtgccccacgctgcccttccatctgcccatcccctcagaaggccgcttacccacccaagtccgtcaatccctgctggttctctcgtcctttcctcactcataaccccagatggtcacccttcggccccgctctgccacccacatgctccctggagcatcccatgcacccagccctgctgggcacaccacacgggggccagcctgggggcccctggacccggtgcaggtggggccgccagacagctgcctgctgcggctccgggcaaggggagccagggcctgctcgtcagggagaggcctgggcctggggagtgggttgggtggggacacaagtacaggacacaggtgcaaggcggcgtcttggagctggagcagacagaacttgctgaccagtgcac

SEQ ID NO: 460235 - DNA, 133 bp, Homo sapiens; identical to SEQ ID NO: 356223
  chr19:56199619-56199752
  hypo
  colorectal vs. liver_bileduct,cervical,head_and_neck, bladder_and_urothelial,lung,lymphoid_neoplasm,melanoma,breast

SEQ ID NO: 460236 - DNA, 214 bp, Homo sapiens
  chr19:56200283-56200497
  hypo
  colorectal vs. cervical
cgtggccgcagagcagcggggaggaggagctgcagctccagctggccctggccatgagcaaggaggaggccgaccaggtactgggcgtgcagctggggctgtctgtccgccacccgcctccacgcctcacttcaggctccctcccagccaggcgtgggcctggccctcactgtcgctgctccacatgctgtcactcgtctcctccccagtcctg

SEQ ID NO: 460237 - DNA, 93 bp, Homo sapiens; identical to SEQ ID NO: 368237
  chr19:56200596-56200689
  hypo
  colorectal vs. cervical

SEQ ID NO: 460238 - DNA, 16 bp, Homo sapiens
  chr19:56727917-56727933
  hypo
caccgaatccctccac

SEQ ID NO: 460239 - DNA, 11 bp, Homo sapiens
  chr19:58039267-58039278
  hypo
  colorectal vs. bladder_and_urothelial,melanoma,prostate, myeloid_neoplasm,uterine
cctgagcaacc

SEQ ID NO: 460240 - DNA, 31 bp, Homo sapiens; identical to SEQ ID NO: 453076
  chr19:58125385-58125416
  hypo
  colorectal vs. bladder_and_urothelial

SEQ ID NO: 460241 - DNA, 91 bp, Homo sapiens; identical to SEQ ID NO: 455044
  chr2:10152958-10153049
  hypo
  colorectal vs. lymphoid_neoplasm,breast,prostate,renal, melanoma,liver_bileduct

SEQ ID NO: 460242 - DNA, 20 bp, Homo sapiens
  chr2:10153468-10153488
  hypo
  colorectal vs. lymphoid_neoplasm,breast,prostate,renal, melanoma,liver_bileduct
atatgggtatgtgtatgggc

SEQ ID NO: 460243 - DNA, 166 bp, Homo sapiens; identical to SEQ ID NO: 337532
  chr2:10155780-10155946
  hypo
  colorectal vs. lymphoid_neoplasm,renal

SEQ ID NO: 460244 - DNA, 63 bp, Homo sapiens; identical to SEQ ID NO: 455051
  chr2:10156251-10156314
  hypo
  colorectal vs. melanoma,lymphoid_neoplasm,sarcoma, liver_bileduct,prostate,breast,renal,non_cancer

SEQ ID NO: 460245 - DNA, 200 bp, Homo sapiens; identical to SEQ ID NO: 353077
  chr2:10742503-10742703
  hypo
  colorectal vs. lung,bladder_and_urothelial,head_and_neck, pancreas_gallbladder,lymphoid_neoplasm

SEQ ID NO: 460246 - DNA, 185 bp, Homo sapiens; identical to SEQ ID NO: 459562
  chr2:12857960-12858145
  hypo
  colorectal vs. upper_gi

SEQ ID NO: 460247 - DNA, 1 bp, Homo sapiens
  chr2:12858681-12858682
  hypo
  colorectal vs. upper_gi
c

SEQ ID NO: 460248 - DNA, 17 bp, Homo sapiens
  chr2:27484883-27484900
  hypo
  colorectal vs. uterine
cggacggtcagccgaca

SEQ ID NO: 460249 - DNA, 229 bp, Homo sapiens; identical to SEQ ID NO: 362857
  chr2:27668586-27668815
  hypo
  colorectal vs. liver_bileduct

SEQ ID NO: 460250 - DNA, 22 bp, Homo sapiens
  chr2:29337909-29337931
  hypo
  colorectal vs. pancreas_gallbladder,anorectal,cervical, renal,lung,bladder_and_urothelial,thyroid,myeloid_neoplasm, ovary,non_cancer,head_and_neck,multiple_myeloma,sarcoma,uterine, prostate,breast,lymphoid_neoplasm,upper_gi
cgtgggtgtagcacggattagg

SEQ ID NO: 460251 - DNA, 69 bp, Homo sapiens; identical to SEQ ID NO: 459569
  chr2:31361021-31361090
  hypo
  colorectal vs. breast,head_and_neck,ovary,renal,lung, prostate,bladder_and_urothelial,thyroid,cervical,non_cancer, sarcoma,myeloid_neoplasm,pancreas_gallbladder,uterine, lymphoid_neoplasm,anorectal,multiple_myeloma,melanoma

SEQ ID NO: 460252 - DNA, 179 bp, Homo sapiens; identical to SEQ ID NO: 459570
  chr2:31361118-31361297
  hypo
  colorectal vs. breast,head_and_neck,ovary,renal,lung, prostate,bladder_and_urothelial,thyroid,cervical,non_cancer, sarcoma,myeloid_neoplasm,pancreas_gallbladder,uterine, lymphoid_neoplasm,anorectal,multiple_myeloma,melanoma

SEQ ID NO: 460253 - DNA, 69 bp, Homo sapiens; identical to SEQ ID NO: 459569
  chr2:31361021-31361090
  hypo
  colorectal vs. head_and_neck,breast

SEQ ID NO: 460254 - DNA, 179 bp, Homo sapiens; identical to SEQ ID NO: 459570
  chr2:31361118-31361297
  hypo
  colorectal vs. head_and_neck,breast

SEQ ID NO: 460255 - DNA, 70 bp, Homo sapiens; identical to SEQ ID NO: 346429
  chr2:31361690-31361760
  hypo
  colorectal vs. head_and_neck,breast

SEQ ID NO: 460256 - DNA, 30 bp, Homo sapiens
  chr2:38762353-38762383
  hypo
  colorectal vs. upper_gi,liver_bileduct
cggtccaggccttggccagggaagcatcca

SEQ ID NO: 460257 - DNA, 228 bp, Homo sapiens; identical to SEQ ID NO: 362870
  chr2:38762412-38762640
  hypo
  colorectal vs. upper_gi,liver_bileduct

SEQ ID NO: 460258 - DNA, 9 bp, Homo sapiens
  chr2:40679688-40679697
  hypo
  colorectal vs. bladder_and_urothelial,thyroid,ovary, prostate,myeloid_neoplasm,non_cancer,sarcoma
cgcctaccc

SEQ ID NO: 460259 - DNA, 25 bp, Homo sapiens
  chr2:43413645-43413670
  hypo
  colorectal vs. upper_gi
cgcttctaacagagtcccaggtgac

SEQ ID NO: 460260 - DNA, 16 bp, Homo sapiens
  chr2:43413699-43413715
  hypo
  colorectal vs. upper_gi
ccgagaagaccttagc

SEQ ID NO: 460261 - DNA, 11 bp, Homo sapiens
  chr2:69720211-69720222
  hypo
  colorectal vs. liver_bileduct
acccgggaggc

SEQ ID NO: 460262 - DNA, 77 bp, Homo sapiens; identical to SEQ ID NO: 456821
  chr2:97427378-97427455
  hypo
  colorectal vs. melanoma,multiple_myeloma,head_and_neck, sarcoma

SEQ ID NO: 460263 - DNA, 147 bp, Homo sapiens; identical to SEQ ID NO: 457849
  chr2:101033445-101033592
  hypo
  colorectal vs. melanoma,anorectal,prostate, lymphoid_neoplasm,breast,sarcoma,lung,uterine,ovary,renal, multiple_myeloma,non_cancer,myeloid_neoplasm,thyroid, head_and_neck

SEQ ID NO: 460264 - DNA, 45 bp, Homo sapiens
  chr2:106959115-106959160
  hypo
  colorectal vs. upper_gi,lymphoid_neoplasm, pancreas_gallbladder
cgcttcacgtgctccaggcagagacgagctcaagagcctctggtc

SEQ ID NO: 460265 - DNA, 60 bp, Homo sapiens
  chr2:106959841-106959901
  hypo
  colorectal vs. pancreas_gallbladder,lymphoid_neoplasm, bladder_and_urothelial,upper_gi
cgtggtccccacggaagcggtgagaacgcacctggccggctcagccacacggcacggtgg

SEQ ID NO: 460266 - DNA, 66 bp, Homo sapiens; identical to SEQ ID NO: 459584
  chr2:109647974-109648040
  hypo
  colorectal vs. upper_gi,pancreas_gallbladder,cervical, uterine

SEQ ID NO: 460267 - DNA, 119 bp, Homo sapiens; identical to SEQ ID NO: 337737
  chr2:120754234-120754353
  hypo
  colorectal vs. upper_gi,pancreas_gallbladder

SEQ ID NO: 460268 - DNA, 382 bp, Homo sapiens; identical to SEQ ID NO: 459587
  chr2:127413347-127413729
  hypo
  colorectal vs. lymphoid_neoplasm,sarcoma

SEQ ID NO: 460269 - DNA, 53 bp, Homo sapiens; identical to SEQ ID NO: 459588
  chr2:127413676-127413729
  hypo
  colorectal vs. sarcoma,lymphoid_neoplasm

SEQ ID NO: 460270 - DNA, 255 bp, Homo sapiens; identical to SEQ ID NO: 349581
  chr2:127414108-127414363
  hypo
  colorectal vs. sarcoma,lymphoid_neoplasm

SEQ ID NO: 460271 - DNA, 184 bp, Homo sapiens; identical to SEQ ID NO: 346478
  chr2:135476396-135476580
  hypo
  colorectal vs. upper_gi,pancreas_gallbladder, myeloid_neoplasm,non_cancer,lung

SEQ ID NO: 460272 - DNA, 354 bp, Homo sapiens; identical to SEQ ID NO: 453117
  chr2:135476396-135476750
  hypo
  colorectal vs. upper_gi,pancreas_gallbladder,lung,ovary

SEQ ID NO: 460273 - DNA, 51 bp, Homo sapiens; identical to SEQ ID NO: 453124
  chr2:149632592-149632643
  hypo
  colorectal vs. sarcoma,prostate

SEQ ID NO: 460274 - DNA, 170 bp, Homo sapiens; identical to SEQ ID NO: 337786
  chr2:152295736-152295906
  hypo
  colorectal vs. upper_gi,cervical,lung, pancreas_gallbladder

SEQ ID NO: 460275 - DNA, 127 bp, Homo sapiens; identical to SEQ ID NO: 337805
  chr2:170569589-170569716
  hypo
  colorectal vs. lung,pancreas_gallbladder, lymphoid_neoplasm,cervical,anorectal,head_and_neck,breast,renal, uterine,bladder_and_urothelial

SEQ ID NO: 460276 - DNA, 237 bp, Homo sapiens; identical to SEQ ID NO: 459601
  chr2:225906168-225906405
  hypo
  colorectal vs. lymphoid_neoplasm

SEQ ID NO: 460277 - DNA, 77 bp, Homo sapiens; identical to SEQ ID NO: 454345
  chr2:225906328-225906405
  hypo
  colorectal vs. lymphoid_neoplasm

SEQ ID NO: 460278 - DNA, 68 bp, Homo sapiens
  chr2:232283630-232283698
  hypo
  colorectal vs. pancreas_gallbladder
cggggccccgggagtcgcaggcaccctgcctggacgctgttgtggggcctgaacgaagttcactgctg

SEQ ID NO: 460279 - DNA, 34 bp, Homo sapiens; identical to SEQ ID NO: 376575
  chr2:232283773-232283807
  hypo
  colorectal vs. pancreas_gallbladder

SEQ ID NO: 460280 - DNA, 624 bp, Homo sapiens; identical to SEQ ID NO: 457903
  chr2:232790030-232790654
  hypo
  colorectal vs. head_and_neck

SEQ ID NO: 460281 - DNA, 20 bp, Homo sapiens
  chr2:232790784-232790804
  hypo
  colorectal vs. head_and_neck
tctcctgggtcctgcgcgcc

SEQ ID NO: 460282 - DNA, 342 bp, Homo sapiens; identical to SEQ ID NO: 453146
  chr2:232790312-232790654
  hypo
  colorectal vs. head_and_neck,bladder_and_urothelial

SEQ ID NO: 460283 - DNA, 264 bp, Homo sapiens; identical to SEQ ID NO: 453147
  chr2:232790784-232791048
  hypo
  colorectal vs. head_and_neck,bladder_and_urothelial

SEQ ID NO: 460284 - DNA, 135 bp, Homo sapiens; identical to SEQ ID NO: 337903
  chr2:234206672-234206807
  hypo
  colorectal vs. upper_gi,pancreas_gallbladder, liver_bileduct

SEQ ID NO: 460285 - DNA, 108 bp, Homo sapiens; identical to SEQ ID NO: 337941
  chr2:239188890-239188998
  hypo
  colorectal vs. liver_bileduct

SEQ ID NO: 460286 - DNA, 193 bp, Homo sapiens; identical to SEQ ID NO: 337942
  chr2:239316302-239316495
  hypo
  colorectal vs. upper_gi,liver_bileduct

SEQ ID NO: 460287 - DNA, 85 bp, Homo sapiens
  chr2:240965878-240965963
  hypo
  colorectal vs. pancreas_gallbladder
cgattgtaaaacagtgggaatgcagctgtgtaaactacggccggttctatggatgtttctataattgaagaattgctttttgtca

SEQ ID NO: 460288 - DNA, 209 bp, Homo sapiens; identical to SEQ ID NO: 353265
  chr2:241157300-241157509
  hypo
  colorectal vs. melanoma,sarcoma,lymphoid_neoplasm,renal

SEQ ID NO: 460289 - DNA, 360 bp, Homo sapiens; identical to SEQ ID NO: 347959
  chr2:241542357-241542717
  hypo
  colorectal vs. lymphoid_neoplasm,liver_bileduct,melanoma, lung,prostate,breast,renal

SEQ ID NO: 460290 - DNA, 241 bp, Homo sapiens; identical to SEQ ID NO: 345785
  chr2:242436503-242436744
  hypo
  colorectal vs. liver_bileduct,cervical,lymphoid_neoplasm

SEQ ID NO: 460291 - DNA, 76 bp, Homo sapiens
  chr2:242735082-242735158
  hypo
  colorectal vs. pancreas_gallbladder,upper_gi, bladder_and_urothelial,melanoma,anorectal,lung,head_and_neck, breast,lymphoid_neoplasm,renal,ovary
cgcagaagtggcccaatggcagagcaggagctccgctctcagtgtggggcctcgtttgggtttgggaaaacatgtc

SEQ ID NO: 460292 - DNA, 268 bp, Homo sapiens; identical to SEQ ID NO: 353282
  chr2:242735246-242735514
  hypo
  colorectal vs. pancreas_gallbladder,upper_gi, bladder_and_urothelial,melanoma,anorectal,lung,head_and_neck, breast,lymphoid_neoplasm,renal,ovary

SEQ ID NO: 460293 - DNA, 93 bp, Homo sapiens; identical to SEQ ID NO: 356232
  chr20:400189-400282
  hypo
  colorectal vs. melanoma

SEQ ID NO: 460294 - DNA, 414 bp, Homo sapiens; identical to SEQ ID NO: 347652
  chr20:4804008-4804422
  hypo
  colorectal vs. bladder_and_urothelial,lymphoid_neoplasm, melanoma,multiple_myeloma,ovary,non_cancer,uterine,thyroid, sarcoma,breast,renal,myeloid_neoplasm,lung

SEQ ID NO: 460295 - DNA, 63 bp, Homo sapiens; identical to SEQ ID NO: 361804
  chr20:5297756-5297819
  hypo
  colorectal vs. multiple_myeloma,thyroid

SEQ ID NO: 460296 - DNA, 207 bp, Homo sapiens; identical to SEQ ID NO: 344209
  chr20:32332893-32333100
  hypo
  colorectal vs. upper_gi,melanoma

SEQ ID NO: 460297 - DNA, 215 bp, Homo sapiens; identical to SEQ ID NO: 382924
  chr20:33131642-33131857
  hypo
  colorectal vs. cervical

SEQ ID NO: 460298 - DNA, 1 bp, Homo sapiens
  chr20:33134788-33134789
  hypo
  colorectal vs. liver_bileduct
c

SEQ ID NO: 460299 - DNA, 73 bp, Homo sapiens
  chr20:34147099-34147172
  hypo
  colorectal vs. pancreas_gallbladder,upper_gi, head_and_neck,liver_bileduct
cgggcacccaccgtgaggatgtacacattgccacccatgtctgtgaactccaggtcttctggccggcccttcc

SEQ ID NO: 460300 - DNA, 131 bp, Homo sapiens; identical to SEQ ID NO: 356268
  chr20:34147230-34147361
  hypo
  colorectal vs. pancreas_gallbladder,upper_gi, head_and_neck,liver_bileduct

SEQ ID NO: 460301 - DNA, 100 bp, Homo sapiens; identical to SEQ ID NO: 352489
  chr20:37303401-37303501
  hypo
  colorectal vs. thyroid,non_cancer,ovary

SEQ ID NO: 460302 - DNA, 390 bp, Homo sapiens; identical to SEQ ID NO: 455936
  chr20:37433723-37434113
  hypo
  colorectal vs. ovary,bladder_and_urothelial,uterine, cervical,multiple_myeloma,lymphoid_neoplasm,myeloid_neoplasm, non_cancer,prostate,thyroid,lung,sarcoma

SEQ ID NO: 460303 - DNA, 27 bp, Homo sapiens
  chr20:37434086-37434113
  hypo
  colorectal vs. uterine,multiple_myeloma, bladder_and_urothelial,ovary,prostate,non_cancer, myeloid_neoplasm,thyroid,lymphoid_neoplasm,lung,cervical, sarcoma,breast,renal
cggggtgggggttaggaaaactatttt

SEQ ID NO: 460304 - DNA, 95 bp, Homo sapiens; identical to SEQ ID NO: 356286
  chr20:42931339-42931434
  hypo
  colorectal vs. upper_gi,lymphoid_neoplasm, pancreas_gallbladder,liver_bileduct

SEQ ID NO: 460305 - DNA, 52 bp, Homo sapiens
  chr20:43926539-43926591
  hypo
  colorectal vs. bladder_and_urothelial, pancreas_gallbladder
cgagagagatgcgctcacctggacagatgctgcctctgaggttctccagcag

SEQ ID NO: 460306 - DNA, 51 bp, Homo sapiens; identical to SEQ ID NO: 457931
  chr20:47934774-47934825
  hypo
  colorectal vs. sarcoma,prostate,breast,ovary, bladder_and_urothelial,myeloid_neoplasm

SEQ ID NO: 460307 - DNA, 62 bp, Homo sapiens; identical to SEQ ID NO: 349032
  chr20:49218808-49218870
  hypo
  colorectal vs. melanoma

SEQ ID NO: 460308 - DNA, 136 bp, Homo sapiens; identical to SEQ ID NO: 459635
  chr20:55206463-55206599
  hypo
  colorectal vs. cervical,breast

SEQ ID NO: 460309 - DNA, 4 bp, Homo sapiens
  chr20:55206736-55206740
  hypo
  colorectal vs. cervical,breast
cgag

SEQ ID NO: 460310 - DNA, 95 bp, Homo sapiens; identical to SEQ ID NO: 352515
  chr20:55206774-55206869
  hypo
  colorectal vs. cervical,breast

SEQ ID NO: 460311 - DNA, 168 bp, Homo sapiens
  chr20:57009378-57009546
  hypo
  colorectal vs. pancreas_gallbladder,upper_gi,melanoma, head_and_neck,anorectal,lung,liver_bileduct,cervical,uterine, bladder_and_urothelial
cggtaggcttgcagtagtgaaagatccatggactaggaatcagaagactgggtcctcggccttattcccagctctgtcatgcgtgattttgtggctcttaggttggtgacctgcaaaatggagatgttggtcatccttgcttacttcaccaggggcgtccatcctaag

SEQ ID NO: 460312 - DNA, 113 bp, Homo sapiens; identical to SEQ ID NO: 345643
  chr20:57225466-57225579
  hypo
  colorectal vs. multiple_myeloma,myeloid_neoplasm, non_cancer,thyroid

SEQ ID NO: 460313 - DNA, 1 bp, Homo sapiens
  chr20:61471909-61471910
  hypo
  colorectal vs. lymphoid_neoplasm
c

SEQ ID NO: 460314 - DNA, 158 bp, Homo sapiens; identical to SEQ ID NO: 368463
  chr20:61472199-61472357
  hypo
  colorectal vs. lymphoid_neoplasm

SEQ ID NO: 460315 - DNA, 193 bp, Homo sapiens; identical to SEQ ID NO: 459640
  chr20:61806216-61806409
  hypo
  colorectal vs. sarcoma

SEQ ID NO: 460316 - DNA, 248 bp, Homo sapiens; identical to SEQ ID NO: 459641
  chr20:61810310-61810558
  hypo
  colorectal vs. melanoma,uterine,ovary,prostate,sarcoma, breast,anorectal,thyroid

SEQ ID NO: 460317 - DNA, 248 bp, Homo sapiens; identical to SEQ ID NO: 459641
  chr20:61810310-61810558
  hypo
  colorectal vs. uterine,melanoma,ovary,breast,prostate

SEQ ID NO: 460318 - DNA, 270 bp, Homo sapiens; identical to SEQ ID NO: 361940
  chr20:61810632-61810902
  hypo
  colorectal vs. uterine,melanoma,ovary,breast,prostate

SEQ ID NO: 460319 - DNA, 79 bp, Homo sapiens; identical to SEQ ID NO: 375179
  chr20:62103897-62103976
  hypo
  colorectal vs. uterine

SEQ ID NO: 460320 - DNA, 22 bp, Homo sapiens
  chr20:62320890-62320912
  hypo
  colorectal vs. melanoma
cgtggtgtgattgtcacgggcc

SEQ ID NO: 460321 - DNA, 269 bp, Homo sapiens; identical to SEQ ID NO: 356359
  chr20:62322022-62322291
  hypo

SEQ ID NO: 460322 - DNA, 759 bp, Homo sapiens; identical to SEQ ID NO: 205913
  chr20:62600809-62601568
  hypo
  colorectal vs. liver_bileduct,lung,pancreas_gallbladder, cervical,ovary

SEQ ID NO: 460323 - DNA, 64 bp, Homo sapiens; identical to SEQ ID NO: 459646
  chr20:62601570-62601634
  hypo
  colorectal vs. liver_bileduct,lung,pancreas_gallbladder, cervical,ovary

SEQ ID NO: 460324 - DNA, 49 bp, Homo sapiens
  chr20:62662125-62662174
  hypo
  colorectal vs. bladder_and_urothelial,melanoma, liver_bileduct,cervical,lymphoid_neoplasm,pancreas_gallbladder, lung
cgggcaattaagaataccacaaggcttaaaaaacaatcaggttatcaga

SEQ ID NO: 460325 - DNA, 195 bp, Homo sapiens; identical to SEQ ID NO: 368507
  chr20:62662271-62662466
  hypo
  colorectal vs. bladder_and_urothelial,melanoma, liver_bileduct,cervical,lymphoid_neoplasm,pancreas_gallbladder, lung

SEQ ID NO: 460326 - DNA, 215 bp, Homo sapiens; identical to SEQ ID NO: 459647
  chr20:62680443-62680658
  hypo
  colorectal vs. head_and_neck,anorectal,sarcoma,breast

SEQ ID NO: 460327 - DNA, 211 bp, Homo sapiens; identical to SEQ ID NO: 459651
  chr20:62694767-62694978
  hypo
  colorectal vs. pancreas_gallbladder,lung,cervical, bladder_and_urothelial

SEQ ID NO: 460328 - DNA, 252 bp, Homo sapiens; identical to SEQ ID NO: 459652
  chr20:62694767-62695019
  hypo
  colorectal vs. pancreas_gallbladder,lung,cervical, bladder_and_urothelial

SEQ ID NO: 460329 - DNA, 197 bp, Homo sapiens; identical to SEQ ID NO: 352536
  chr20:62695048-62695245
  hypo
  colorectal vs. pancreas_gallbladder,lung,cervical, bladder_and_urothelial

SEQ ID NO: 460330 - DNA, 123 bp, Homo sapiens; identical to SEQ ID NO: 457941
  chr21:27011487-27011610
  hypo
  colorectal vs. uterine,sarcoma,lymphoid_neoplasm,breast, multiple_myeloma,non_cancer,myeloid_neoplasm,head_and_neck, thyroid,ovary,prostate,renal,lung

SEQ ID NO: 460331 - DNA, 134 bp, Homo sapiens; identical to SEQ ID NO: 457942
  chr21:27011639-27011773
  hypo
  colorectal vs. uterine,sarcoma,lymphoid_neoplasm,breast, multiple_myeloma,non_cancer,myeloid_neoplasm,head_and_neck, thyroid,ovary,prostate,renal,lung

SEQ ID NO: 460332 - DNA, 192 bp, Homo sapiens; identical to SEQ ID NO: 459657
  chr21:32716044-32716236
  hypo

SEQ ID NO: 460333 - DNA, 4 bp, Homo sapiens
  chr21:33954154-33954158
  hypo
  colorectal vs. liver_bileduct
cgtc

SEQ ID NO: 460334 - DNA, 108 bp, Homo sapiens; identical to SEQ ID NO: 356373
  chr21:33954435-33954543
  hypo
  colorectal vs. liver_bileduct

SEQ ID NO: 460335 - DNA, 91 bp, Homo sapiens; identical to SEQ ID NO: 344481
  chr21:40331586-40331677
  hypo
  colorectal vs. upper_gi

SEQ ID NO: 460336 - DNA, 79 bp, Homo sapiens
  chr21:43248413-43248492
  hypo
  colorectal vs. liver_bileduct
cggcaccgaactgctccccaaaggccctgctgactgctccatgccgccctgccccaccccgcaggagctgcctctcccc

SEQ ID NO: 460337 - DNA, 20 bp, Homo sapiens
  chr21:43248921-43248941
  hypo
  colorectal vs. liver_bileduct
atcaccaagcaacgccagcc

SEQ ID NO: 460338 - DNA, 34 bp, Homo sapiens; identical to SEQ ID NO: 459662
  chr21:44847478-44847512
  hypo
  colorectal vs. cervical,breast,lymphoid_neoplasm,renal, uterine

SEQ ID NO: 460339 - DNA, 41 bp, Homo sapiens
  chr21:45508577-45508618
  hypo
  colorectal vs. head_and_neck,lung
cgcgcagcactggtggcacctgtgctatgtgccgtgttatc

SEQ ID NO: 460340 - DNA, 224 bp, Homo sapiens; identical to SEQ ID NO: 368595
  chr21:45508695-45508919
  hypo
  colorectal vs. head_and_neck,lung

SEQ ID NO: 460341 - DNA, 162 bp, Homo sapiens; identical to SEQ ID NO: 344541
  chr21:45513811-45513973
  hypo
  colorectal vs. upper_gi,liver_bileduct, pancreas_gallbladder

SEQ ID NO: 460342 - DNA, 231 bp, Homo sapiens; identical to SEQ ID NO: 455160
  chr21:46894937-46895168
  hypo
  colorectal vs. liver_bileduct

SEQ ID NO: 460343 - DNA, 216 bp, Homo sapiens; identical to SEQ ID NO: 455161
  chr21:46895491-46895707
  hypo
  colorectal vs. liver_bileduct

SEQ ID NO: 460344 - DNA, 151 bp, Homo sapiens; identical to SEQ ID NO: 455162
  chr21:46895736-46895887
  hypo
  colorectal vs. liver_bileduct

SEQ ID NO: 460345 - DNA, 42 bp, Homo sapiens; identical to SEQ ID NO: 368672
  chr21:46925925-46925967
  hypo
  colorectal vs. liver_bileduct

SEQ ID NO: 460346 - DNA, 210 bp, Homo sapiens; identical to SEQ ID NO: 356488
  chr22:20929364-20929574
  hypo
  colorectal vs. liver_bileduct,upper_gi, pancreas_gallbladder

SEQ ID NO: 460347 - DNA, 174 bp, Homo sapiens; identical to SEQ ID NO: 457951
  chr22:24819901-24820075
  hypo
  colorectal vs. anorectal,breast

SEQ ID NO: 460348 - DNA, 61 bp, Homo sapiens; identical to SEQ ID NO: 295272
  chr22:24820486-24820547
  hypo
  colorectal vs. anorectal,breast

SEQ ID NO: 460349 - DNA, 61 bp, Homo sapiens; identical to SEQ ID NO: 453178
  chr22:25678186-25678247
  hypo
  colorectal vs. sarcoma,breast

SEQ ID NO: 460350 - DNA, 292 bp, Homo sapiens; identical to SEQ ID NO: 344764
  chr22:38506297-38506589
  hypo
  colorectal vs. lymphoid_neoplasm

SEQ ID NO: 460351 - DNA, 32 bp, Homo sapiens; identical to SEQ ID NO: 459669
  chr22:39853626-39853658
  hypo
  colorectal vs. bladder_and_urothelial,ovary,anorectal, cervical,prostate,breast,head_and_neck,sarcoma,uterine, multiple_myeloma,pancreas_gallbladder,lung,non_cancer,renal, lymphoid_neoplasm,thyroid,myeloid_neoplasm

SEQ ID NO: 460352 - DNA, 56 bp, Homo sapiens; identical to SEQ ID NO: 459670
  chr22:39853690-39853746
  hypo
  colorectal vs. bladder_and_urothelial,ovary,anorectal, cervical,prostate,breast,head_and_neck,sarcoma,uterine, multiple_myeloma,pancreas_gallbladder,lung,non_cancer,renal, lymphoid_neoplasm,thyroid,myeloid_neoplasm

SEQ ID NO: 460353 - DNA, 32 bp, Homo sapiens; identical to SEQ ID NO: 459669
  chr22:39853626-39853658
  hypo
  colorectal vs. bladder_and_urothelial,ovary,anorectal, prostate,cervical,head_and_neck,breast,uterine,sarcoma, pancreas_gallbladder,multiple_myeloma,non_cancer,lung, lymphoid_neoplasm,myeloid_neoplasm,renal,thyroid,melanoma

SEQ ID NO: 460354 - DNA, 210 bp, Homo sapiens; identical to SEQ ID NO: 459673
  chr22:39853690-39853900
  hypo
  colorectal vs. bladder_and_urothelial,ovary,anorectal, prostate,cervical,head_and_neck,breast,uterine,sarcoma, pancreas_gallbladder,multiple_myeloma,non_cancer,lung, lymphoid_neoplasm,myeloid_neoplasm,renal,thyroid,melanoma

SEQ ID NO: 460355 - DNA, 130 bp, Homo sapiens; identical to SEQ ID NO: 345661
  chr22:39853934-39854064
  hypo
  colorectal vs. bladder_and_urothelial,ovary,anorectal, prostate,cervical,head_and_neck,breast,uterine,sarcoma, pancreas_gallbladder,multiple_myeloma,non_cancer,lung, lymphoid_neoplasm,myeloid_neoplasm,renal,thyroid,melanoma

SEQ ID NO: 460356 - DNA, 351 bp, Homo sapiens; identical to SEQ ID NO: 344827
  chr22:46597084-46597435
  hypo
  colorectal vs. lung

SEQ ID NO: 460357 - DNA, 103 bp, Homo sapiens
  chr22:46599521-46599624
  hypo
  colorectal vs. melanoma
cgaaaaggaaaaaagaaaaaaactctcagcaaagctagaggggatcctgccaatgagttcccagctcacagactgattagcaggccaccacacatgagctgga

SEQ ID NO: 460358 - DNA, 1 bp, Homo sapiens
  chr22:46658633-46658634
  hypo
  colorectal vs. cervical
c

SEQ ID NO: 460359 - DNA, 25 bp, Homo sapiens
  chr3:13679108-13679133
  hypo
  colorectal vs. cervical,lymphoid_neoplasm
cgccagcgcgcatcacgcactacca

SEQ ID NO: 460360 - DNA, 78 bp, Homo sapiens; identical to SEQ ID NO: 345081
  chr3:16555426-16555504
  hypo
  colorectal vs. lymphoid_neoplasm,sarcoma,anorectal,renal, lung,ovary,myeloid_neoplasm

SEQ ID NO: 460361 - DNA, 123 bp, Homo sapiens; identical to SEQ ID NO: 338060
  chr3:31494150-31494273
  hypo
  colorectal vs. upper_gi

SEQ ID NO: 460362 - DNA, 119 bp, Homo sapiens
  chr3:36984260-36984379
  hypo
  colorectal vs. pancreas_gallbladder,liver_bileduct, upper_gi,lung,head_and_neck
cggtctcctcatactctgggagagcggcggaaacagaacctgcagttgccccataaagctggtcagtcggtcataaagtgaagttaacaatttatgacccgctttaaaaaaaaaaaaaa

SEQ ID NO: 460363 - DNA, 149 bp, Homo sapiens; identical to SEQ ID NO: 345798
  chr3:43655492-43655641
  hypo
  colorectal vs. liver_bileduct,upper_gi, pancreas_gallbladder,lung,head_and_neck

SEQ ID NO: 460364 - DNA, 261 bp, Homo sapiens; identical to SEQ ID NO: 338129
  chr3:69230152-69230413
  hypo
  colorectal vs. upper_gi

SEQ ID NO: 460365 - DNA, 178 bp, Homo sapiens; identical to SEQ ID NO: 338140
  chr3:72618825-72619003
  hypo
  colorectal vs. upper_gi

SEQ ID NO: 460366 - DNA, 81 bp, Homo sapiens; identical to SEQ ID NO: 338143
  chr3:73045605-73045686
  hypo
  colorectal vs. liver_bileduct

SEQ ID NO: 460367 - DNA, 30 bp, Homo sapiens
  chr3:123667353-123667383
  hypo
  colorectal vs. upper_gi
cgggattacaggcgtttagccacggcgctc

SEQ ID NO: 460368 - DNA, 71 bp, Homo sapiens
  chr3:127534744-127534815
  hypo
  colorectal vs. cervical,head_and_neck,melanoma,anorectal, renal,breast,bladder_and_urothelial,lymphoid_neoplasm,prostate
cgcccaaggaccatgtagacgtcaataaggaagtatttgctgaatgaatcgctgctttggatcctgggaga

SEQ ID NO: 460369 - DNA, 68 bp, Homo sapiens
  chr3:127534897-127534965
  hypo
  colorectal vs. cervical,head_and_neck,melanoma,anorectal, renal,breast,bladder_and_urothelial,lymphoid_neoplasm,prostate
agagactgacagagtggggttcaaaatggccacttgaagggacaataagctgtgtgatttagctgacc

SEQ ID NO: 460370 - DNA, 22 bp, Homo sapiens
  chr3:139258159-139258181
  hypo
  colorectal vs. pancreas_gallbladder,cervical
cgaggacgccctttctggcgtc

SEQ ID NO: 460371 - DNA, 267 bp, Homo sapiens; identical to SEQ ID NO: 349830
  chr3:139258672-139258939
  hypo
  colorectal vs. pancreas_gallbladder,cervical

SEQ ID NO: 460372 - DNA, 124 bp, Homo sapiens; identical to SEQ ID NO: 455226
  chr3:141174173-141174297
  hypo
  colorectal vs. melanoma

SEQ ID NO: 460373 - DNA, 8 bp, Homo sapiens
  chr3:141174671-141174679
  hypo
  colorectal vs. melanoma
gtttcagc

SEQ ID NO: 460374 - DNA, 15 bp, Homo sapiens
  chr3:142837817-142837832
  hypo
  colorectal vs. ovary,uterine,renal, bladder_and_urothelial,lymphoid_neoplasm,myeloid_neoplasm, multiple_myeloma,melanoma,non_cancer,prostate,thyroid, head_and_neck,lung
cgggacaagtatttt

SEQ ID NO: 460375 - DNA, 141 bp, Homo sapiens; identical to SEQ ID NO: 338229
  chr3:150237458-150237599
  hypo
  colorectal vs. pancreas_gallbladder

SEQ ID NO: 460376 - DNA, 54 bp, Homo sapiens; identical to SEQ ID NO: 345815
  chr3:169540679-169540733
  hypo
  colorectal vs. sarcoma,renal,melanoma,non_cancer, prostate,lymphoid_neoplasm,thyroid

SEQ ID NO: 460377 - DNA, 133 bp, Homo sapiens; identical to SEQ ID NO: 453234
  chr3:186079331-186079464
  hypo
  colorectal vs. thyroid,non_cancer,lymphoid_neoplasm, prostate,sarcoma,bladder_and_urothelial,multiple_myeloma,renal

SEQ ID NO: 460378 - DNA, 291 bp, Homo sapiens; identical to SEQ ID NO: 453235
  chr3:186079331-186079622
  hypo
  colorectal vs. prostate,multiple_myeloma, myeloid_neoplasm,lymphoid_neoplasm,non_cancer,thyroid,breast, sarcoma,ovary,uterine,renal

SEQ ID NO: 460379 - DNA, 125 bp, Homo sapiens; identical to SEQ ID NO: 453236
  chr3:186079497-186079622
  hypo
  colorectal vs. multiple_myeloma,ovary,uterine,non_cancer, prostate

SEQ ID NO: 460380 - DNA, 152 bp, Homo sapiens
  chr4:717901-718053
  hypo
  colorectal vs. head_and_neck,lung,bladder_and_urothelial, melanoma,lymphoid_neoplasm
cggcagaaagactcagggcagatggtggttgtcagccgggagggggcacggagccctgggggtggtcaggcccacgtggccttgggacgagagcgaagaggtgggatcggctgcgggagacagggaagtgggtgacaaggaggctcaggggc

SEQ ID NO: 460381 - DNA, 50 bp, Homo sapiens
  chr4:718112-718162
  hypo
  colorectal vs. head_and_neck,lung,bladder_and_urothelial, melanoma,lymphoid_neoplasm
ggtcaggggctcagtcctgtgggccaccacagccggccgcacaggcaggg

SEQ ID NO: 460382 - DNA, 189 bp, Homo sapiens
  chr4:905682-905871
  hypo
  colorectal vs. liver_bileduct,head_and_neck
cgaacccttacaattttagacgtcagagcggaagatgagggagagagcagtggacgaccgagagaaaggcagacagaggcaggaggagctgcaggagagggcggggacaaaggcaggcacaccggccacacacacctgaccacagcgacaccaaagtccatcccgcgcgtggcaggaggaggcagggcc

SEQ ID NO: 460383 - DNA, 18 bp, Homo sapiens
  chr4:905932-905950
  hypo
  colorectal vs. liver_bileduct,head_and_neck
gcagccggcgggctctcc

SEQ ID NO: 460384 - DNA, 250 bp, Homo sapiens; identical to SEQ ID NO: 363471
  chr4:957050-957300
  hypo
  colorectal vs. liver_bileduct

SEQ ID NO: 460385 - DNA, 221 bp, Homo sapiens
  chr4:1016366-1016587
  hypo
  colorectal vs. liver_bileduct
ccccggcagaaagccttccttcggtgccctgccccacctcagctggctgcacctctgccaccatcccccaggtatcctgtcccgttcctgtccccgtcaggctccagcctcggagccttcctcccagcggagggcggagggtggagggcgggagccgaaggcagtggtcccacagaagggctggggcccgaggccttggcagggtgtgccggccgtcggct

SEQ ID NO: 460386 - DNA, 129 bp, Homo sapiens; identical to SEQ ID NO: 338437
  chr4:6769454-6769583
  hypo
  colorectal vs. lymphoid_neoplasm

SEQ ID NO: 460387 - DNA, 25 bp, Homo sapiens
  chr4:10459327-10459352
  hypo
  colorectal vs. anorectal
gggtcccgcggagggcggccttggc

SEQ ID NO: 460388 - DNA, 133 bp, Homo sapiens; identical to SEQ ID NO: 338486
  chr4:48678686-48678819
  hypo
  colorectal vs. upper_gi

SEQ ID NO: 460389 - DNA, 172 bp, Homo sapiens; identical to SEQ ID NO: 338487
  chr4:48679706-48679878
  hypo
  colorectal vs. upper_gi,liver_bileduct

SEQ ID NO: 460390 - DNA, 61 bp, Homo sapiens; identical to SEQ ID NO: 459713
  chr4:142054594-142054655
  hypo
  colorectal vs. ovary

SEQ ID NO: 460391 - DNA, 155 bp, Homo sapiens; identical to SEQ ID NO: 357972
  chr4:142054757-142054912
  hypo
  colorectal vs. ovary

SEQ ID NO: 460392 - DNA, 40 bp, Homo sapiens; identical to SEQ ID NO: 350004
  chr4:156298073-156298113
  hypo
  colorectal vs. breast,lung,uterine,ovary,prostate, lymphoid_neoplasm

SEQ ID NO: 460393 - DNA, 164 bp, Homo sapiens; identical to SEQ ID NO: 338566
  chr4:183626546-183626710
  hypo
  colorectal vs. upper_gi

SEQ ID NO: 460394 - DNA, 12 bp, Homo sapiens
  chr5:1073469-1073481
  hypo
  colorectal vs. liver_bileduct
cggctctggacg

SEQ ID NO: 460395 - DNA, 431 bp, Homo sapiens; identical to SEQ ID NO: 453970
  chr5:1074389-1074820
  hypo
  colorectal vs. liver_bileduct

SEQ ID NO: 460396 - DNA, 171 bp, Homo sapiens; identical to SEQ ID NO: 456015
  chr5:10564301-10564472
  hypo
  colorectal vs. lymphoid_neoplasm,myeloid_neoplasm, thyroid,cervical,non_cancer,ovary,renal,sarcoma, bladder_and_urothelial,head_and_neck,anorectal,uterine, multiple_myeloma

SEQ ID NO: 460397 - DNA, 19 bp, Homo sapiens
  chr5:33936135-33936154
  hypo
  colorectal vs. melanoma
cgggtgggctttgcctgca

SEQ ID NO: 460398 - DNA, 50 bp, Homo sapiens; identical to SEQ ID NO: 345162
  chr5:49737299-49737349
  hypo
  colorectal vs. pancreas_gallbladder

SEQ ID NO: 460399 - DNA, 117 bp, Homo sapiens; identical to SEQ ID NO: 459731
  chr5:76506029-76506146
  hypo
  colorectal vs. uterine

SEQ ID NO: 460400 - DNA, 96 bp, Homo sapiens; identical to SEQ ID NO: 358151
  chr5:76507202-76507298
  hypo
  colorectal vs. bladder_and_urothelial,ovary,breast, uterine,prostate,myeloid_neoplasm

SEQ ID NO: 460401 - DNA, 38 bp, Homo sapiens; identical to SEQ ID NO: 456033
  chr5:77268330-77268368
  hypo
  colorectal vs. myeloid_neoplasm,thyroid

SEQ ID NO: 460402 - DNA, 27 bp, Homo sapiens
  chr5:132083840-132083867
  hypo
  colorectal vs. liver_bileduct
cgacgaaaagtgggcgcgaggggtggg

SEQ ID NO: 460403 - DNA, 104 bp, Homo sapiens; identical to SEQ ID NO: 363819
  chr5:132083964-132084068
  hypo
  colorectal vs. liver_bileduct

SEQ ID NO: 460404 - DNA, 625 bp, Homo sapiens; identical to SEQ ID NO: 456042
  chr5:142781875-142782500
  hypo
  colorectal vs. anorectal,multiple_myeloma

SEQ ID NO: 460405 - DNA, 78 bp, Homo sapiens; identical to SEQ ID NO: 456043
  chr5:142782625-142782703
  hypo
  colorectal vs. anorectal,multiple_myeloma

SEQ ID NO: 460406 - DNA, 283 bp, Homo sapiens; identical to SEQ ID NO: 459751
  chr5:142782217-142782500
  hypo
  colorectal vs. liver_bileduct,pancreas_gallbladder

SEQ ID NO: 460407 - DNA, 125 bp, Homo sapiens; identical to SEQ ID NO: 459752
  chr5:142782625-142782750
  hypo
  colorectal vs. liver_bileduct,pancreas_gallbladder

SEQ ID NO: 460408 - DNA, 410 bp, Homo sapiens; identical to SEQ ID NO: 345197
  chr5:142782794-142783204
  hypo
  colorectal vs. liver_bileduct,pancreas_gallbladder

SEQ ID NO: 460409 - DNA, 839 bp, Homo sapiens; identical to SEQ ID NO: 459754
  chr5:142783606-142784445
  hypo
  colorectal vs. liver_bileduct

SEQ ID NO: 460410 - DNA, 718 bp, Homo sapiens; identical to SEQ ID NO: 454427
  chr5:142783958-142784676
  hypo
  colorectal vs. liver_bileduct,lung,pancreas_gallbladder, head_and_neck,cervical,lymphoid_neoplasm,melanoma,anorectal, renal,multiple_myeloma,breast,ovary,sarcoma,prostate,non_cancer

SEQ ID NO: 460411 - DNA, 215 bp, Homo sapiens; identical to SEQ ID NO: 454428
  chr5:142784461-142784676
  hypo
  colorectal vs. liver_bileduct,pancreas_gallbladder,lung, cervical,head_and_neck,melanoma,anorectal,lymphoid_neoplasm, renal,prostate,breast,multiple_myeloma,sarcoma, bladder_and_urothelial,ovary,non_cancer,myeloid_neoplasm,
  CONT. FROM ABOVE: thyroid,upper_gi

SEQ ID NO: 460412 - DNA, 1 bp, Homo sapiens
  chr5:154318179-154318180
  hypo
c

SEQ ID NO: 460413 - DNA, 398 bp, Homo sapiens; identical to SEQ ID NO: 338842
  chr5:159707402-159707800
  hypo
  colorectal vs. upper_gi,pancreas_gallbladder

SEQ ID NO: 460414 - DNA, 91 bp, Homo sapiens
  chr5:175831167-175831258
  hypo
  colorectal vs. liver_bileduct,lung
cgccacatagtagctaatagggcccaaagtcacttctgtgacgcatagtttgtgtgcctgcttgtcttcctctcaagacaagactagagac

SEQ ID NO: 460415 - DNA, 460 bp, Homo sapiens; identical to SEQ ID NO: 363892
  chr5:175831326-175831786
  hypo
  colorectal vs. liver_bileduct,lung

SEQ ID NO: 460416 - DNA, 256 bp, Homo sapiens; identical to SEQ ID NO: 377537
  chr5:175832697-175832953
  hypo
  colorectal vs. head_and_neck

SEQ ID NO: 460417 - DNA, 195 bp, Homo sapiens; identical to SEQ ID NO: 453986
  chr5:176558657-176558852
  hypo
  colorectal vs. liver_bileduct

SEQ ID NO: 460418 - DNA, 144 bp, Homo sapiens; identical to SEQ ID NO: 345871
  chr5:176558908-176559052
  hypo
  colorectal vs. liver_bileduct

SEQ ID NO: 460419 - DNA, 24 bp, Homo sapiens
  chr5:177031080-177031104
  hypo
  colorectal vs. head_and_neck
cgagttatgtgcagcctcctcgtg

SEQ ID NO: 460420 - DNA, 18 bp, Homo sapiens
  chr5:177031565-177031583
  hypo
  colorectal vs. head_and_neck
ccctcggcacccctgccc

SEQ ID NO: 460421 - DNA, 165 bp, Homo sapiens; identical to SEQ ID NO: 338893
  chr5:177654009-177654174
  hypo
  colorectal vs. upper_gi,pancreas_gallbladder, liver_bileduct

SEQ ID NO: 460422 - DNA, 289 bp, Homo sapiens; identical to SEQ ID NO: 459760
  chr5:178770455-178770744
  hypo
  colorectal vs. bladder_and_urothelial,anorectal

SEQ ID NO: 460423 - DNA, 418 bp, Homo sapiens; identical to SEQ ID NO: 353718
  chr5:180326156-180326574
  hypo
  colorectal vs. cervical,head_and_neck,lung, lymphoid_neoplasm,bladder_and_urothelial

SEQ ID NO: 460424 - DNA, 55 bp, Homo sapiens; identical to SEQ ID NO: 346767
  chr6:393764-393819
  hypo
  colorectal vs. lymphoid_neoplasm,myeloid_neoplasm, melanoma,thyroid,non_cancer,multiple_myeloma,sarcoma,prostate

SEQ ID NO: 460425 - DNA, 161 bp, Homo sapiens; identical to SEQ ID NO: 338958
  chr6:4932028-4932189
  hypo
  colorectal vs. liver_bileduct

SEQ ID NO: 460426 - DNA, 108 bp, Homo sapiens; identical to SEQ ID NO: 338967
  chr6:6984882-6984990
  hypo
  colorectal vs. anorectal,pancreas_gallbladder, bladder_and_urothelial,head_and_neck,cervical

SEQ ID NO: 460427 - DNA, 78 bp, Homo sapiens; identical to SEQ ID NO: 459764
  chr6:11043624-11043702
  hypo
  colorectal vs. liver_bileduct,uterine,ovary,breast, prostate

SEQ ID NO: 460428 - DNA, 94 bp, Homo sapiens; identical to SEQ ID NO: 339001
  chr6:24662806-24662900
  hypo
  colorectal vs. pancreas_gallbladder,upper_gi, liver_bileduct

SEQ ID NO: 460429 - DNA, 71 bp, Homo sapiens
  chr6:35109297-35109368
  hypo
  colorectal vs. liver_bileduct
cgaggccagagcatgcatggggcttttcttcaggctgtttggacagccgagaagccgagccacacccagga

SEQ ID NO: 460430 - DNA, 125 bp, Homo sapiens; identical to SEQ ID NO: 377685
  chr6:35109423-35109548
  hypo
  colorectal vs. liver_bileduct

SEQ ID NO: 460431 - DNA, 3 bp, Homo sapiens
  chr6:36178301-36178304
  hypo
  colorectal vs. bladder_and_urothelial,head_and_neck,lung, liver_bileduct,lymphoid_neoplasm,melanoma,breast,uterine, sarcoma,cervical,anorectal
gac

SEQ ID NO: 460432 - DNA, 94 bp, Homo sapiens; identical to SEQ ID NO: 459765
  chr6:37665241-37665335
  hypo
  colorectal vs. bladder_and_urothelial

SEQ ID NO: 460433 - DNA, 502 bp, Homo sapiens; identical to SEQ ID NO: 339038
  chr6:38141432-38141934
  hypo
  colorectal vs. melanoma

SEQ ID NO: 460434 - DNA, 1 bp, Homo sapiens
  chr6:42813538-42813539
  hypo
c

SEQ ID NO: 460435 - DNA, 223 bp, Homo sapiens; identical to SEQ ID NO: 458206
  chr6:71665723-71665946
  hypo
  colorectal vs. lung

SEQ ID NO: 460436 - DNA, 72 bp, Homo sapiens
  chr6:71955569-71955641
  hypo
  colorectal vs. pancreas_gallbladder,head_and_neck, cervical,anorectal,lymphoid_neoplasm
cgccaccgatggcctgccgatgtctgctggtgtctgtgtgtttgcttttctgctcctcttgacgaccagcca

SEQ ID NO: 460437 - DNA, 7 bp, Homo sapiens
  chr6:71955662-71955669
  hypo
  colorectal vs. pancreas_gallbladder,head_and_neck, cervical,anorectal,lymphoid_neoplasm
gtctctc

SEQ ID NO: 460438 - DNA, 156 bp, Homo sapiens; identical to SEQ ID NO: 459772
  chr6:72129577-72129733
  hypo
  colorectal vs. pancreas_gallbladder,upper_gi, liver_bileduct,lung

SEQ ID NO: 460439 - DNA, 9 bp, Homo sapiens
  chr6:73333099-73333108
  hypo
  colorectal vs. head_and_neck,breast,anorectal,lung, thyroid,lymphoid_neoplasm,multiple_myeloma,prostate,non_cancer, renal,myeloid_neoplasm
ttgtggcgc

SEQ ID NO: 460440 - DNA, 41 bp, Homo sapiens; identical to SEQ ID NO: 454461
  chr6:74019373-74019414
  hypo
  colorectal vs. pancreas_gallbladder,anorectal,lung, upper_gi,lymphoid_neoplasm,cervical,multiple_myeloma, myeloid_neoplasm,prostate,head_and_neck

SEQ ID NO: 460441 - DNA, 102 bp, Homo sapiens; identical to SEQ ID NO: 346835
  chr6:74020094-74020196
  hypo
  colorectal vs. pancreas_gallbladder,anorectal,lung, upper_gi,lymphoid_neoplasm,cervical,multiple_myeloma, myeloid_neoplasm,prostate,head_and_neck

SEQ ID NO: 460442 - DNA, 179 bp, Homo sapiens; identical to SEQ ID NO: 459779
  chr6:74161321-74161500
  hypo
  colorectal vs. upper_gi

SEQ ID NO: 460443 - DNA, 179 bp, Homo sapiens; identical to SEQ ID NO: 459779
  chr6:74161321-74161500
  hypo
  colorectal vs. upper_gi

SEQ ID NO: 460444 - DNA, 256 bp, Homo sapiens; identical to SEQ ID NO: 459784
  chr6:90142647-90142903
  hypo
  colorectal vs. liver_bileduct,pancreas_gallbladder, bladder_and_urothelial,cervical,lung,ovary,renal

SEQ ID NO: 460445 - DNA, 372 bp, Homo sapiens; identical to SEQ ID NO: 346840
  chr6:91005702-91006074
  hypo
  colorectal vs. head_and_neck,cervical,anorectal, lymphoid_neoplasm,uterine,prostate

SEQ ID NO: 460446 - DNA, 135 bp, Homo sapiens; identical to SEQ ID NO: 339121
  chr6:111766152-111766287
  hypo
  colorectal vs. head_and_neck,lung

SEQ ID NO: 460447 - DNA, 69 bp, Homo sapiens; identical to SEQ ID NO: 358678
  chr6:151562596-151562665
  hypo
  colorectal vs. anorectal

SEQ ID NO: 460448 - DNA, 41 bp, Homo sapiens; identical to SEQ ID NO: 346866
  chr6:159591277-159591318
  hypo
  colorectal vs. sarcoma,prostate,myeloid_neoplasm,thyroid, lung,non_cancer,renal,multiple_myeloma

SEQ ID NO: 460449 - DNA, 50 bp, Homo sapiens; identical to SEQ ID NO: 339180
  chr6:160455514-160455564
  hypo
  colorectal vs. upper_gi,pancreas_gallbladder

SEQ ID NO: 460450 - DNA, 5 bp, Homo sapiens
  chr6:160511895-160511900
  hypo
  colorectal vs. liver_bileduct,head_and_neck,cervical
cgaga

SEQ ID NO: 460451 - DNA, 255 bp, Homo sapiens; identical to SEQ ID NO: 353852
  chr6:160512209-160512464
  hypo
  colorectal vs. liver_bileduct,head_and_neck,cervical

SEQ ID NO: 460452 - DNA, 205 bp, Homo sapiens; identical to SEQ ID NO: 459809
  chr6:163837231-163837436
  hypo
  colorectal vs. liver_bileduct,pancreas_gallbladder, head_and_neck,bladder_and_urothelial,anorectal,lung,ovary, cervical,breast,renal,prostate,melanoma,sarcoma,uterine, lymphoid_neoplasm,myeloid_neoplasm,thyroid,non_cancer,upper_gi,
  CONT. FROM ABOVE: multiple_myeloma

SEQ ID NO: 460453 - DNA, 239 bp, Homo sapiens; identical to SEQ ID NO: 459810
  chr6:163837231-163837470
  hypo
  colorectal vs. liver_bileduct,pancreas_gallbladder, bladder_and_urothelial,head_and_neck,cervical,melanoma, anorectal,ovary,renal,breast,lymphoid_neoplasm,multiple_myeloma, uterine,lung

SEQ ID NO: 460454 - DNA, 106 bp, Homo sapiens
  chr6:167834910-167835016
  hypo
  colorectal vs. cervical,lymphoid_neoplasm
cgtgcctgcacccgccaccgctccaatccccacgcagcccggtcacccggtgcctccactgccttggctggcgctgggccggggcctccaggtttctgtgtccaaa

SEQ ID NO: 460455 - DNA, 36 bp, Homo sapiens
  chr6:168462450-168462486
  hypo
  colorectal vs. liver_bileduct,pancreas_gallbladder
cggctgcggagcccagcatacccagcccagccccac

SEQ ID NO: 460456 - DNA, 186 bp, Homo sapiens; identical to SEQ ID NO: 364161
  chr6:168462521-168462707
  hypo
  colorectal vs. liver_bileduct,pancreas_gallbladder

SEQ ID NO: 460457 - DNA, 700 bp, Homo sapiens
  chr7:299930-300630
  hypo
  colorectal vs. pancreas_gallbladder
cgcctcggcgaggtagtgtccgccggccgctgcgctgcccgggacggagacagaggcgccggacctcccagcaagcgcatgcgcccgtcgtgaattcagtgaattcagaggcaggacgggatcatccggagtcgggagctgctgccacaggaggcgaggctccccaggtctcataggacacattttgtcagtgtttgaccagaaaagcttgggaaggaagcgctgtctgtgctcacggacagaggcggccggcgccggaggcattccatcctttctgtagggaaaggagcctttatttactattttgtatttatatttgatgaataagtatataaacagagacgtgtacacagatgccaatcacctaccaaaccaaacacgaggaccgccctccctggttctgggggcccctcaaggccaagctcacccctcaagtgctctcacactcgggacctaattcaagtaaaaaccctttctccttcctggggcctcggctcctggagggctggagggtctcgtctgaggacgggaggaggctctcgctggacgtctggcctgtgcgctggtggacggatgcctacgtggttttggaggacccgatgaccaggcgtcctgcgagtccgcccgctggcctgcagcacccacctcggacttggctgtggacggttggtgcaagtgcatcctgcagggctggctgtgc

SEQ ID NO: 460458 - DNA, 705 bp, Homo sapiens; identical to SEQ ID NO: 353870
  chr7:300272-300977
  hypo
  colorectal vs. pancreas_gallbladder,upper_gi,cervical, head_and_neck

SEQ ID NO: 460459 - DNA, 118 bp, Homo sapiens; identical to SEQ ID NO: 339230
  chr7:325309-325427
  hypo

SEQ ID NO: 460460 - DNA, 59 bp, Homo sapiens
  chr7:834245-834304
  hypo
  colorectal vs. melanoma,lymphoid_neoplasm,breast, bladder_and_urothelial,lung,uterine,prostate,liver_bileduct
cgggtccaggggatgtctctgagcccccaatcctttacggggccttttcctggggtccc

SEQ ID NO: 460461 - DNA, 317 bp, Homo sapiens; identical to SEQ ID NO: 353881
  chr7:834873-835190
  hypo
  colorectal vs. melanoma,lymphoid_neoplasm,breast, bladder_and_urothelial,lung,uterine,prostate,liver_bileduct

SEQ ID NO: 460462 - DNA, 171 bp, Homo sapiens
  chr7:965802-965973
  hypo
  colorectal vs. cervical,anorectal,bladder_and_urothelial
cgtccgctcccgccctgaggagccagggcaggccccgaaacaacagccgcccctcccgttcccctcccagaccgccaggagcacctgggagggcccctcagatccacccgagacccccaaggcctcagcgaacctgggtgggctgtagctactgatgcacaatgaccttcc

SEQ ID NO: 460463 - DNA, 501 bp, Homo sapiens; identical to SEQ ID NO: 364219
  chr7:966009-966510
  hypo
  colorectal vs. cervical,anorectal,bladder_and_urothelial

SEQ ID NO: 460464 - DNA, 178 bp, Homo sapiens; identical to SEQ ID NO: 364226
  chr7:1333680-1333858
  hypo
  colorectal vs. pancreas_gallbladder

SEQ ID NO: 460465 - DNA, 121 bp, Homo sapiens; identical to SEQ ID NO: 459812
  chr7:1705266-1705387
  hypo
  colorectal vs. sarcoma

SEQ ID NO: 460466 - DNA, 503 bp, Homo sapiens; identical to SEQ ID NO: 459813
  chr7:1705693-1706196
  hypo
  colorectal vs. sarcoma

SEQ ID NO: 460467 - DNA, 1 bp, Homo sapiens
  chr7:2727815-2727816
  hypo
  colorectal vs. breast,uterine
c

SEQ ID NO: 460468 - DNA, 43 bp, Homo sapiens; identical to SEQ ID NO: 284742
  chr7:2728259-2728302
  hypo
  colorectal vs. breast,uterine

SEQ ID NO: 460469 - DNA, 84 bp, Homo sapiens; identical to SEQ ID NO: 350505
  chr7:3083602-3083686
  hypo
  colorectal vs. pancreas_gallbladder

SEQ ID NO: 460470 - DNA, 3 bp, Homo sapiens
  chr7:6525091-6525094
  hypo
  colorectal vs. lymphoid_neoplasm,renal,melanoma, multiple_myeloma
ttc

SEQ ID NO: 460471 - DNA, 60 bp, Homo sapiens; identical to SEQ ID NO: 454474
  chr7:19156644-19156704
  hypo
  colorectal vs. melanoma,sarcoma,uterine,anorectal, prostate,head_and_neck,breast,myeloid_neoplasm

SEQ ID NO: 460472 - DNA, 60 bp, Homo sapiens; identical to SEQ ID NO: 454474
  chr7:19156644-19156704
  hypo
  colorectal vs. anorectal,uterine,sarcoma,breast, head_and_neck,prostate

SEQ ID NO: 460473 - DNA, 210 bp, Homo sapiens; identical to SEQ ID NO: 456111
  chr7:23052818-23053028
  hypo
  colorectal vs. lung,bladder_and_urothelial, lymphoid_neoplasm

SEQ ID NO: 460474 - DNA, 595 bp, Homo sapiens; identical to SEQ ID NO: 346883
  chr7:23053080-23053675
  hypo
  colorectal vs. lung,bladder_and_urothelial, lymphoid_neoplasm

SEQ ID NO: 460475 - DNA, 79 bp, Homo sapiens; identical to SEQ ID NO: 339428
  chr7:26198616-26198695
  hypo
  colorectal vs. upper_gi

SEQ ID NO: 460476 - DNA, 69 bp, Homo sapiens; identical to SEQ ID NO: 459826
  chr7:31091827-31091896
  hypo
  colorectal vs. melanoma

SEQ ID NO: 460477 - DNA, 7 bp, Homo sapiens
  chr7:37487365-37487372
  hypo
  colorectal vs. lymphoid_neoplasm,uterine,ovary, myeloid_neoplasm,thyroid,non_cancer,multiple_myeloma,sarcoma, breast,prostate,renal,melanoma,liver_bileduct
cgctcgc

SEQ ID NO: 460478 - DNA, 39 bp, Homo sapiens; identical to SEQ ID NO: 459830
  chr7:44364447-44364486
  hypo
  colorectal vs. uterine,breast,sarcoma,prostate, bladder_and_urothelial,ovary,head_and_neck

SEQ ID NO: 460479 - DNA, 27 bp, Homo sapiens
  chr7:44365258-44365285
  hypo
  colorectal vs. uterine,breast,sarcoma,prostate, bladder_and_urothelial,ovary,head_and_neck
caccgccgccgccgccgcgcccgcccc

SEQ ID NO: 460480 - DNA, 369 bp, Homo sapiens; identical to SEQ ID NO: 346904
  chr7:44365258-44365627
  hypo
  colorectal vs. anorectal,breast,prostate

SEQ ID NO: 460481 - DNA, 161 bp, Homo sapiens; identical to SEQ ID NO: 459833
  chr7:44924093-44924254
  hypo
  colorectal vs. upper_gi,liver_bileduct

SEQ ID NO: 460482 - DNA, 309 bp, Homo sapiens; identical to SEQ ID NO: 200961
  chr7:44924469-44924778
  hypo
  colorectal vs. upper_gi,liver_bileduct

SEQ ID NO: 460483 - DNA, 1 bp, Homo sapiens
  chr7:45613422-45613423
  hypo
  colorectal vs. bladder_and_urothelial
c

SEQ ID NO: 460484 - DNA, 102 bp, Homo sapiens; identical to SEQ ID NO: 345274
  chr7:50344738-50344840
  hypo
  colorectal vs. multiple_myeloma,anorectal, lymphoid_neoplasm,non_cancer,head_and_neck,uterine, myeloid_neoplasm,ovary,thyroid,breast,cervical,lung,prostate

SEQ ID NO: 460485 - DNA, 24 bp, Homo sapiens
  chr7:55145822-55145846
  hypo
  colorectal vs. head_and_neck
cgtgccgtgttcctgtcctggggt

SEQ ID NO: 460486 - DNA, 619 bp, Homo sapiens; identical to SEQ ID NO: 353990
  chr7:55145980-55146599
  hypo
  colorectal vs. head_and_neck

SEQ ID NO: 460487 - DNA, 5 bp, Homo sapiens
  chr7:64974264-64974269
  hypo
  colorectal vs. breast,melanoma,sarcoma
cggcg

SEQ ID NO: 460488 - DNA, 61 bp, Homo sapiens; identical to SEQ ID NO: 458263
  chr7:64974448-64974509
  hypo
  colorectal vs. breast,melanoma,sarcoma

SEQ ID NO: 460489 - DNA, 5 bp, Homo sapiens
  chr7:64974988-64974993
  hypo
  colorectal vs. breast,melanoma,sarcoma
tcggc

SEQ ID NO: 460490 - DNA, 422 bp, Homo sapiens; identical to SEQ ID NO: 459840
  chr7:69063038-69063460
  hypo
  colorectal vs. anorectal

SEQ ID NO: 460491 - DNA, 130 bp, Homo sapiens; identical to SEQ ID NO: 459841
  chr7:69064053-69064183
  hypo
  colorectal vs. renal,breast,melanoma,lung,prostate,ovary, cervical,uterine,sarcoma,myeloid_neoplasm, bladder_and_urothelial,head_and_neck,anorectal,non_cancer, thyroid

SEQ ID NO: 460492 - DNA, 296 bp, Homo sapiens; identical to SEQ ID NO: 459844
  chr7:90225450-90225746
  hypo
  colorectal vs. pancreas_gallbladder,liver_bileduct, cervical

SEQ ID NO: 460493 - DNA, 212 bp, Homo sapiens; identical to SEQ ID NO: 459845
  chr7:90226057-90226269
  hypo
  colorectal vs. pancreas_gallbladder,liver_bileduct, cervical

SEQ ID NO: 460494 - DNA, 212 bp, Homo sapiens; identical to SEQ ID NO: 459845
  chr7:90226057-90226269
  hypo
  colorectal vs. cervical,pancreas_gallbladder, bladder_and_urothelial,anorectal,liver_bileduct,uterine,breast, head_and_neck,ovary

SEQ ID NO: 460495 - DNA, 202 bp, Homo sapiens
  chr7:98639739-98639941
  hypo
  colorectal vs. lymphoid_neoplasm,head_and_neck
cggggttgattgaagaatccggatttatttgcaacatgtaaatattgtccgtagaatactggaagagcccgtaataaggattcagcatttcatggcacagcaagtaaagccactccctgggagcaaacaacaaaaatgcatttgagacgcgctaaaatttctacattttttttttttccctgagatggagtctcactctgtc

SEQ ID NO: 460496 - DNA, 15 bp, Homo sapiens
  chr7:99156600-99156615
  hypo
  colorectal vs. liver_bileduct,lymphoid_neoplasm,melanoma, anorectal
ccgccgtcaggagcc

SEQ ID NO: 460497 - DNA, 216 bp, Homo sapiens; identical to SEQ ID NO: 456137
  chr7:99156600-99156816
  hypo
  colorectal vs. liver_bileduct,melanoma,anorectal

SEQ ID NO: 460498 - DNA, 77 bp, Homo sapiens; identical to SEQ ID NO: 345277
  chr7:99156982-99157059
  hypo
  colorectal vs. liver_bileduct,melanoma,anorectal

SEQ ID NO: 460499 - DNA, 82 bp, Homo sapiens
  chr7:101627660-101627742
  hypo
  colorectal vs. liver_bileduct
cgtgggacaatgtagataaaaacctcgatatacagcctagtacacaaaggacggtgtaaatattctcttccgtgcttcgtag

SEQ ID NO: 460500 - DNA, 282 bp, Homo sapiens; identical to SEQ ID NO: 354034
  chr7:101627846-101628128
  hypo
  colorectal vs. liver_bileduct

SEQ ID NO: 460501 - DNA, 115 bp, Homo sapiens; identical to SEQ ID NO: 354037
  chr7:102782159-102782274
  hypo
  colorectal vs. liver_bileduct,lung

SEQ ID NO: 460502 - DNA, 32 bp, Homo sapiens
  chr7:105279344-105279376
  hypo
  colorectal vs. liver_bileduct,melanoma
cgagggaatgctagagttaatccaggtgcagg

SEQ ID NO: 460503 - DNA, 119 bp, Homo sapiens
  chr7:107483576-107483695
  hypo
  colorectal vs. upper_gi,breast,anorectal,cervical, pancreas_gallbladder,renal,lymphoid_neoplasm,lung, liver_bileduct,prostate,sarcoma,myeloid_neoplasm,uterine, bladder_and_urothelial,ovary,non_cancer,head_and_neck,thyroid,
  CONT. FROM ABOVE: multiple_myeloma
cgagaaaaagctgaagaccgtgatcagtgaagcacacaaacggggcatggtgatagagaaaaacagtgggcacgcaatctagcttgggaaaatgaggtagcacccctttcaggaggtga

SEQ ID NO: 460504 - DNA, 17 bp, Homo sapiens
  chr7:107483918-107483935
  hypo
  colorectal vs. upper_gi,breast,anorectal,cervical, pancreas_gallbladder,renal,lymphoid_neoplasm,lung, liver_bileduct,prostate,sarcoma,myeloid_neoplasm,uterine, bladder_and_urothelial,ovary,non_cancer,head_and_neck,thyroid,
  CONT. FROM ABOVE: multiple_myeloma
agtcatgtggatcacgc

SEQ ID NO: 460505 - DNA, 24 bp, Homo sapiens
  chr7:108095249-108095273
  hypo
  colorectal vs. ovary,uterine,renal,myeloid_neoplasm, thyroid,non_cancer,multiple_myeloma,breast,cervical, head_and_neck
cgaggaagagcccagtctcttaga

SEQ ID NO: 460506 - DNA, 90 bp, Homo sapiens; identical to SEQ ID NO: 339611
  chr7:127679932-127680022
  hypo
  colorectal vs. upper_gi,head_and_neck,cervical, pancreas_gallbladder,anorectal,liver_bileduct, bladder_and_urothelial

SEQ ID NO: 460507 - DNA, 32 bp, Homo sapiens
  chr7:140156493-140156525
  hypo
  colorectal vs. upper_gi,pancreas_gallbladder,cervical, lymphoid_neoplasm,breast,prostate,melanoma
cgaatgcacttgagacagtaggtgtggttgca

SEQ ID NO: 460508 - DNA, 100 bp, Homo sapiens
  chr7:150069580-150069680
  hypo
  colorectal vs. upper_gi,pancreas_gallbladder,melanoma, lymphoid_neoplasm,bladder_and_urothelial
cctggtggcgcactcgcgcgtgcactccggcgagcggcccttcgcctgcgaggagtgcggccgccgcttctcccagggcagccatctggcggcgcatcgg

SEQ ID NO: 460509 - DNA, 115 bp, Homo sapiens
  chr7:150069820-150069935
  hypo
  colorectal vs. upper_gi,pancreas_gallbladder,melanoma, lymphoid_neoplasm,bladder_and_urothelial
ccagaagtccaacctggtgtcgcaccggcgcatccacacgggcgagcggccctacgcctgtcccgactgcgaccgcagcttcagccagaagtccaacctcatcacccaccgcaag

SEQ ID NO: 460510 - DNA, 100 bp, Homo sapiens; identical to SEQ ID NO: 460508
  chr7:150069580-150069680
  hypo
  colorectal vs. upper_gi,pancreas_gallbladder

SEQ ID NO: 460511 - DNA, 115 bp, Homo sapiens; identical to SEQ ID NO: 460509
  chr7:150069820-150069935
  hypo
  colorectal vs. upper_gi,pancreas_gallbladder

SEQ ID NO: 460512 - DNA, 115 bp, Homo sapiens; identical to SEQ ID NO: 364537
  chr7:150079390-150079505
  hypo
  colorectal vs. liver_bileduct,cervical

SEQ ID NO: 460513 - DNA, 127 bp, Homo sapiens; identical to SEQ ID NO: 364538
  chr7:150081308-150081435
  hypo
  colorectal vs. pancreas_gallbladder,liver_bileduct

SEQ ID NO: 460514 - DNA, 42 bp, Homo sapiens; identical to SEQ ID NO: 455419
  chr7:157262486-157262528
  hypo
  colorectal vs. lymphoid_neoplasm,renal,thyroid, non_cancer

SEQ ID NO: 460515 - DNA, 215 bp, Homo sapiens; identical to SEQ ID NO: 354106
  chr7:157263471-157263686
  hypo
  colorectal vs. lymphoid_neoplasm,renal,thyroid

SEQ ID NO: 460516 - DNA, 140 bp, Homo sapiens; identical to SEQ ID NO: 339798
  chr7:158556274-158556414
  hypo
  colorectal vs. upper_gi,pancreas_gallbladder, liver_bileduct

SEQ ID NO: 460517 - DNA, 207 bp, Homo sapiens; identical to SEQ ID NO: 348291
  chr7:158570568-158570775
  hypo
  colorectal vs. upper_gi,liver_bileduct, pancreas_gallbladder,lung

SEQ ID NO: 460518 - DNA, 5 bp, Homo sapiens
  chr8:16884178-16884183
  hypo
  colorectal vs. lung
cggaa

SEQ ID NO: 460519 - DNA, 85 bp, Homo sapiens; identical to SEQ ID NO: 458295
  chr8:16884239-16884324
  hypo
  colorectal vs. lung

SEQ ID NO: 460520 - DNA, 100 bp, Homo sapiens; identical to SEQ ID NO: 339894
  chr8:42316852-42316952
  hypo
  colorectal vs. liver_bileduct

SEQ ID NO: 460521 - DNA, 55 bp, Homo sapiens; identical to SEQ ID NO: 346990
  chr8:72756949-72757004
  hypo
  colorectal vs. sarcoma,melanoma,renal,non_cancer, myeloid_neoplasm

SEQ ID NO: 460522 - DNA, 181 bp, Homo sapiens; identical to SEQ ID NO: 459870
  chr8:73449197-73449378
  hypo
  colorectal vs. head_and_neck

SEQ ID NO: 460523 - DNA, 208 bp, Homo sapiens; identical to SEQ ID NO: 459871
  chr8:73449432-73449640
  hypo
  colorectal vs. head_and_neck

SEQ ID NO: 460524 - DNA, 19 bp, Homo sapiens
  chr8:73450162-73450181
  hypo
  colorectal vs. head_and_neck
tttaagaatgaatcatcgc

SEQ ID NO: 460525 - DNA, 27 bp, Homo sapiens
  chr8:75896528-75896555
  hypo
  colorectal vs. lung
cgggcttgggtctcgggagcccaaagc

SEQ ID NO: 460526 - DNA, 209 bp, Homo sapiens; identical to SEQ ID NO: 459875
  chr8:80803900-80804109
  hypo
  colorectal vs. upper_gi,pancreas_gallbladder,anorectal, multiple_myeloma,cervical,uterine,ovary,breast, bladder_and_urothelial,renal,thyroid,non_cancer,liver_bileduct, lung

SEQ ID NO: 460527 - DNA, 71 bp, Homo sapiens; identical to SEQ ID NO: 339971
  chr8:92120822-92120893
  hypo
  colorectal vs. pancreas_gallbladder,upper_gi

SEQ ID NO: 460528 - DNA, 28 bp, Homo sapiens
  chr8:101717065-101717093
  hypo
  colorectal vs. liver_bileduct
cgatgtaagtgttctgtacaattaagtc

SEQ ID NO: 460529 - DNA, 39 bp, Homo sapiens; identical to SEQ ID NO: 364778
  chr8:101717122-101717161
  hypo
  colorectal vs. liver_bileduct

SEQ ID NO: 460530 - DNA, 89 bp, Homo sapiens; identical to SEQ ID NO: 339994
  chr8:103315038-103315127
  hypo
  colorectal vs. upper_gi,pancreas_gallbladder

SEQ ID NO: 460531 - DNA, 8 bp, Homo sapiens
  chr8:110406125-110406133
  hypo
  colorectal vs. pancreas_gallbladder,lymphoid_neoplasm, renal,upper_gi,cervical
ccgggcgc

SEQ ID NO: 460532 - DNA, 938 bp, Homo sapiens; identical to SEQ ID NO: 459880
  chr8:134582236-134583174
  hypo
  colorectal vs. pancreas_gallbladder

SEQ ID NO: 460533 - DNA, 436 bp, Homo sapiens; identical to SEQ ID NO: 459881
  chr8:134582738-134583174
  hypo
  colorectal vs. pancreas_gallbladder,liver_bileduct

SEQ ID NO: 460534 - DNA, 438 bp, Homo sapiens; identical to SEQ ID NO: 459882
  chr8:134583293-134583731
  hypo
  colorectal vs. pancreas_gallbladder,liver_bileduct

SEQ ID NO: 460535 - DNA, 926 bp, Homo sapiens; identical to SEQ ID NO: 359232
  chr8:134583293-134584219
  hypo
  colorectal vs. pancreas_gallbladder

SEQ ID NO: 460536 - DNA, 89 bp, Homo sapiens
  chr8:142243860-142243949
  hypo
  colorectal vs. melanoma,lymphoid_neoplasm
cggcaggcccctgggaaacggctatggagcgtggcacccgttttgctgtgcttttcccgttttgctggtgcagggccttggctaggcag

SEQ ID NO: 460537 - DNA, 66 bp, Homo sapiens; identical to SEQ ID NO: 354264
  chr8:142244214-142244280
  hypo
  colorectal vs. melanoma,lymphoid_neoplasm

SEQ ID NO: 460538 - DNA, 64 bp, Homo sapiens; identical to SEQ ID NO: 359243
  chr8:143531771-143531835
  hypo
  colorectal vs. anorectal

SEQ ID NO: 460539 - DNA, 121 bp, Homo sapiens; identical to SEQ ID NO: 458331
  chr8:143531858-143531979
  hypo
  colorectal vs. anorectal,lung,breast,prostate

SEQ ID NO: 460540 - DNA, 70 bp, Homo sapiens; identical to SEQ ID NO: 359268
  chr9:6412900-6412970
  hypo
  colorectal vs. lymphoid_neoplasm,cervical

SEQ ID NO: 460541 - DNA, 3 bp, Homo sapiens
  chr9:66494093-66494096
  hypo
  colorectal vs. bladder_and_urothelial,breast, lymphoid_neoplasm,multiple_myeloma,uterine,prostate,sarcoma, ovary,lung
cgc

SEQ ID NO: 460542 - DNA, 28 bp, Homo sapiens
  chr9:71583984-71584012
  hypo
  colorectal vs. upper_gi
tgttaaaactgtaaatgaggccgggcgc

SEQ ID NO: 460543 - DNA, 381 bp, Homo sapiens; identical to SEQ ID NO: 454519
  chr9:71788570-71788951
  hypo
  colorectal vs. head_and_neck,melanoma,renal

SEQ ID NO: 460544 - DNA, 96 bp, Homo sapiens; identical to SEQ ID NO: 340216
  chr9:80007524-80007620
  hypo
  colorectal vs. liver_bileduct

SEQ ID NO: 460545 - DNA, 432 bp, Homo sapiens; identical to SEQ ID NO: 459896
  chr9:89561318-89561750
  hypo
  colorectal vs. cervical

SEQ ID NO: 460546 - DNA, 30 bp, Homo sapiens
  chr9:101009718-101009748
  hypo
  colorectal vs. upper_gi
cgtaaagctgggctgggcacgatggctcac

SEQ ID NO: 460547 - DNA, 732 bp, Homo sapiens; identical to SEQ ID NO: 459899
  chr9:124131788-124132520
  hypo
  colorectal vs. liver_bileduct,upper_gi

SEQ ID NO: 460548 - DNA, 754 bp, Homo sapiens; identical to SEQ ID NO: 459900
  chr9:124132057-124132811
  hypo
  colorectal vs. liver_bileduct,upper_gi, bladder_and_urothelial

SEQ ID NO: 460549 - DNA, 147 bp, Homo sapiens
  chr9:126139066-126139213
  hypo
  colorectal vs. upper_gi,pancreas_gallbladder, head_and_neck
cgtcctccccttctctgcggtcttaggcctcggtgtcgtgtctcttgcagaagggcctgcccctgccgctgccattcccactgctggaggtggccgtacctgcagcctgtgcctgcctcctcctcctcctcctgggcctcctttcag

SEQ ID NO: 460550 - DNA, 57 bp, Homo sapiens; identical to SEQ ID NO: 340325
  chr9:128274789-128274846
  hypo
  colorectal vs. upper_gi

SEQ ID NO: 460551 - DNA, 456 bp, Homo sapiens; identical to SEQ ID NO: 333795
  chr9:130674546-130675002
  hypo
  colorectal vs. upper_gi

SEQ ID NO: 460552 - DNA, 704 bp, Homo sapiens; identical to SEQ ID NO: 350949
  chr9:131842946-131843650
  hypo
  colorectal vs. pancreas_gallbladder,upper_gi, bladder_and_urothelial,head_and_neck,cervical,lymphoid_neoplasm

SEQ ID NO: 460553 - DNA, 131 bp, Homo sapiens; identical to SEQ ID NO: 340360
  chr9:133513763-133513894
  hypo
  colorectal vs. liver_bileduct,pancreas_gallbladder, upper_gi,bladder_and_urothelial,lymphoid_neoplasm,cervical,lung, head_and_neck

SEQ ID NO: 460554 - DNA, 53 bp, Homo sapiens; identical to SEQ ID NO: 354398
  chr9:134126741-134126794
  hypo
  colorectal vs. lymphoid_neoplasm

SEQ ID NO: 460555 - DNA, 123 bp, Homo sapiens; identical to SEQ ID NO: 359451
  chr9:135037440-135037563
  hypo
  colorectal vs. uterine

SEQ ID NO: 460556 - DNA, 23 bp, Homo sapiens
  chr9:135285310-135285333
  hypo
  colorectal vs. head_and_neck
cgagccgggctctgttggcgtcc

SEQ ID NO: 460557 - DNA, 306 bp, Homo sapiens; identical to SEQ ID NO: 459908
  chr9:135286324-135286630
  hypo
  colorectal vs. head_and_neck

SEQ ID NO: 460558 - DNA, 141 bp, Homo sapiens; identical to SEQ ID NO: 340384
  chr9:135523845-135523986
  hypo
  colorectal vs. liver_bileduct,pancreas_gallbladder

SEQ ID NO: 460559 - DNA, 2 bp, Homo sapiens
  chr9:135898877-135898879
  hypo
  colorectal vs. cervical
cg

SEQ ID NO: 460560 - DNA, 258 bp, Homo sapiens; identical to SEQ ID NO: 340391
  chr9:135926595-135926853
  hypo
  colorectal vs. upper_gi

SEQ ID NO: 460561 - DNA, 419 bp, Homo sapiens
  chr9:139421476-139421895
  hypo
  colorectal vs. liver_bileduct,lymphoid_neoplasm
cgtgagacgcgctagctggggggaaccgggccgagcctggagaaagttttgagccaggtgtgggggtctgtgtgtggggggcagctttgggcccagtctcccgctgctgctgtgggcagcctccagcctgtgcccgccccagtctgtacctctctcccacatggccacagagctggagcaccctacagacggcgaacacctgccctccgcacagcacccagacgtccctgagaaggtgggagggacctcaggcctgcagcatggccatggccaggaccaccagcctgtgagcaaatccttcacagctttggcgctggccacacccccggtacccgggccactctgtcttcaatgctgtcccggcggccaggtgggtgtgggccgcgaggtgggcgccagggcttggccgagtgaggtgg

SEQ ID NO: 460562 - DNA, 100 bp, Homo sapiens; identical to SEQ ID NO: 379096
  chr9:139422123-139422223
  hypo
  colorectal vs. liver_bileduct,lymphoid_neoplasm

SEQ ID NO: 460563 - DNA, 292 bp, Homo sapiens
  chr9:139506149-139506441
  hypo
  colorectal vs. melanoma,liver_bileduct,lymphoid_neoplasm, renal,anorectal
cgcgtgcccggtccccactcacattgccacctgcctccggtgtggctgcgaagtcggagggaggagagagccagccaggggtgtgggcgccaagatcagagactcgcacgctgctggacggaatgtggaccggcccagctgctgggtcacctgccggcagctcccgaaacaaccagtcaccacgagacccagcaactccacccctaggtgtgcgcccaagataaacggaagctcctgtccgcacaaacacccgtgcggcttccttcactaagggtggaaacggcccgggtgc

SEQ ID NO: 460564 - DNA, 30 bp, Homo sapiens
  chr9:139506516-139506546
  hypo
  colorectal vs. melanoma,liver_bileduct,lymphoid_neoplasm, renal,anorectal
agaaattcggacgcaggcttcagtacggac

SEQ ID NO: 460565 - DNA, 45 bp, Homo sapiens; identical to SEQ ID NO: 340450
  chr9:139687851-139687896
  hypo
  colorectal vs. upper_gi

SEQ ID NO: 460566 - DNA, 712 bp, Homo sapiens; identical to SEQ ID NO: 459910
  chr9:140023901-140024613
  hypo
  colorectal vs. upper_gi

SEQ ID NO: 460567 - DNA, 376 bp, Homo sapiens; identical to SEQ ID NO: 459911
  chr9:140024237-140024613
  hypo
  colorectal vs. cervical,breast,melanoma,lung,renal, bladder_and_urothelial,upper_gi

SEQ ID NO: 460568 - DNA, 320 bp, Homo sapiens
  chr9:140382238-140382558
  hypo
  colorectal vs. cervical,lymphoid_neoplasm
cgagaggccgtcccatccagcctccacctgcctgtcaggggcatctcaggagcctgggccaccaccacaacctggcacgccctgcgaggtgtccccagcatcaccttcaccgcacgcacttcagcccctcactgcagctgagccttggccacacgggaggagcgggggactcaggcccagatgatgtgtctccgcctctaggcgctgagtggaaggcaggtggcttctataatcaggaggaaataactcccagatagcaaacaaacaatgcacacacacaccaaagtgctgctgagcacagaaagacggagaaccgcctc

SEQ ID NO: 460569 - DNA, 78 bp, Homo sapiens; identical to SEQ ID NO: 365193
  chr9:140382625-140382703
  hypo
  colorectal vs. cervical,lymphoid_neoplasm

SEQ ID NO: 460570 - DNA, 150 bp, Homo sapiens; identical to SEQ ID NO: 354457
  chr9:140392858-140393008
  hypo
  colorectal vs. lymphoid_neoplasm

SEQ ID NO: 460571 - DNA, 69 bp, Homo sapiens
  chr9:140682727-140682796
  hypo
  colorectal vs. lung,bladder_and_urothelial,head_and_neck, melanoma
cggtggcagatgaccgagcggctggtaggactggcatgcagcactcagggggcccaggacgttggcgaa

SEQ ID NO: 460572 - DNA, 175 bp, Homo sapiens; identical to SEQ ID NO: 365205
  chr9:140682922-140683097
  hypo
  colorectal vs. lung,bladder_and_urothelial,head_and_neck, melanoma

SEQ ID NO: 460573 - DNA, 624 bp, Homo sapiens; identical to SEQ ID NO: 454529
  chrY:16636060-16636684
  hypo
  colorectal vs. liver_bileduct,cervical

SEQ ID NO: 460574 - DNA, 949 bp, Homo sapiens; identical to SEQ ID NO: 454530
  chrY:16636193-16637142
  hypo
  colorectal vs. liver_bileduct,cervical

SEQ ID NO: 460575 - DNA, 14 bp, Homo sapiens
  chr1:2375641-2375655
  hyper
  head_and_neck vs. ovary,breast,melanoma,renal,uterine, prostate,myeloid_neoplasm,thyroid,non_cancer,multiple_myeloma, sarcoma,lung,colorectal
gggggccgcccctc

SEQ ID NO: 460576 - DNA, 109 bp, Homo sapiens
  chr1:6545271-6545380
  hyper
  head_and_neck vs. cervical
cgcggggcccatagtcacgggcaccccctccctggcctcccgcacaggactgggcggctgcaggcgagaactgggcacccagccccgttcccgccccgtcccggccccg

SEQ ID NO: 460577 - DNA, 247 bp, Homo sapiens
  chr1:6545639-6545886
  hyper
  head_and_neck vs. cervical
ccccccaggaaggcggacacctccctcccgcccgggccctcgccacccagccccggggatccccgcctccccgcccgggaacccctacacccccgcctccgcctgcccgggcgaccccccgcctccccgcctctgcccagacccggggactccacacccctacctctgcccggccgggggacccccacagccccgcctccgcccagtccccgggacccccaccttcccacctctgcctggcccgggg

SEQ ID NO: 460578 - DNA, 222 bp, Homo sapiens; identical to SEQ ID NO: 349161
  chr1:6545931-6546153
  hyper
  head_and_neck vs. cervical

SEQ ID NO: 460579 - DNA, 344 bp, Homo sapiens; identical to SEQ ID NO: 330677
  chr1:6546495-6546839
  hyper
  head_and_neck vs. cervical,upper_gi,lung

SEQ ID NO: 460580 - DNA, 262 bp, Homo sapiens; identical to SEQ ID NO: 452712
  chr1:32180427-32180689
  hyper
  head_and_neck vs. melanoma,colorectal,upper_gi

SEQ ID NO: 460581 - DNA, 262 bp, Homo sapiens; identical to SEQ ID NO: 452712
  chr1:32180427-32180689
  hyper
  head_and_neck vs. melanoma,colorectal,upper_gi, bladder_and_urothelial,pancreas_gallbladder,uterine,lung

SEQ ID NO: 460582 - DNA, 23 bp, Homo sapiens
  chr1:32181494-32181517
  hyper
  head_and_neck vs. melanoma,upper_gi,pancreas_gallbladder, colorectal,cervical,bladder_and_urothelial,lung,uterine,renal
ttctccttggaggtcccactggc

SEQ ID NO: 460583 - DNA, 130 bp, Homo sapiens; identical to SEQ ID NO: 454093
  chr1:32410105-32410235
  hyper
  head_and_neck vs. upper_gi

SEQ ID NO: 460584 - DNA, 21 bp, Homo sapiens
  chr1:36042458-36042479
  hyper
  head_and_neck vs. renal,non_cancer,multiple_myeloma, thyroid
cgggacgcggccgcgcggact

SEQ ID NO: 460585 - DNA, 114 bp, Homo sapiens; identical to SEQ ID NO: 344955
  chr1:50893877-50893991
  hyper
  head_and_neck vs. myeloid_neoplasm

SEQ ID NO: 460586 - DNA, 103 bp, Homo sapiens
  chr1:63791875-63791978
  hyper
  head_and_neck vs. cervical,bladder_and_urothelial
cggctcggccctgcgcgcgtccttttggttaatcccggccagtccccggtgttgtcgtccactttgcctccctggtggtggagatgcctccccgtctcggatc

SEQ ID NO: 460587 - DNA, 164 bp, Homo sapiens
  chr1:63792016-63792180
  hyper
  head_and_neck vs. cervical,bladder_and_urothelial
gctttgaaagacacttccttgcaaatacccaatctgttttcctggtaaacggtaaacattattgtgtcttgagtaaacattccttcgggatcagggtcctaaaataaaacaagctgccgggggtgagatagtttaacttgataaacaagaacctgataaccacc

SEQ ID NO: 460588 - DNA, 50 bp, Homo sapiens; identical to SEQ ID NO: 356786
  chr1:63792231-63792281
  hyper
  head_and_neck vs. cervical,bladder_and_urothelial

SEQ ID NO: 460589 - DNA, 260 bp, Homo sapiens; identical to SEQ ID NO: 452717
  chr1:63793072-63793332
  hyper
  head_and_neck vs. thyroid,non_cancer

SEQ ID NO: 460590 - DNA, 61 bp, Homo sapiens; identical to SEQ ID NO: 455531
  chr1:66999412-66999473
  hyper
  head_and_neck vs. non_cancer

SEQ ID NO: 460591 - DNA, 36 bp, Homo sapiens; identical to SEQ ID NO: 349259
  chr1:66999673-66999709
  hyper
  head_and_neck vs. non_cancer

SEQ ID NO: 460592 - DNA, 120 bp, Homo sapiens; identical to SEQ ID NO: 452723
  chr1:77333644-77333764
  hyper
  head_and_neck vs. ovary

SEQ ID NO: 460593 - DNA, 224 bp, Homo sapiens; identical to SEQ ID NO: 452724
  chr1:78956569-78956793
  hyper

SEQ ID NO: 460594 - DNA, 50 bp, Homo sapiens
  chr1:84326267-84326317
  hyper
  head_and_neck vs. anorectal
cggccactcgccgtctcagcgccccctcgcggcccttctctacccacctc

SEQ ID NO: 460595 - DNA, 385 bp, Homo sapiens; identical to SEQ ID NO: 349269
  chr1:84326357-84326742
  hyper
  head_and_neck vs. anorectal

SEQ ID NO: 460596 - DNA, 154 bp, Homo sapiens; identical to SEQ ID NO: 356828
  chr1:91183993-91184147
  hyper
  head_and_neck vs. sarcoma,melanoma

SEQ ID NO: 460597 - DNA, 306 bp, Homo sapiens; identical to SEQ ID NO: 452735
  chr1:108506290-108506596
  hyper
  head_and_neck vs. multiple_myeloma,non_cancer, myeloid_neoplasm,thyroid,lymphoid_neoplasm

SEQ ID NO: 460598 - DNA, 65 bp, Homo sapiens; identical to SEQ ID NO: 452738
  chr1:161368929-161368994
  hyper
  head_and_neck vs. cervical,upper_gi,liver_bileduct, pancreas_gallbladder,lung,breast,bladder_and_urothelial, colorectal,renal,lymphoid_neoplasm,melanoma,prostate,sarcoma, uterine,ovary,non_cancer,multiple_myeloma,thyroid,
  CONT. FROM ABOVE: myeloid_neoplasm

SEQ ID NO: 460599 - DNA, 95 bp, Homo sapiens; identical to SEQ ID NO: 344977
  chr1:161369405-161369500
  hyper
  head_and_neck vs. cervical,upper_gi,liver_bileduct, pancreas_gallbladder,lung,breast,bladder_and_urothelial, colorectal,renal,lymphoid_neoplasm,melanoma,prostate,sarcoma, uterine,ovary,non_cancer,multiple_myeloma,thyroid,
  CONT. FROM ABOVE: myeloid_neoplasm

SEQ ID NO: 460600 - DNA, 294 bp, Homo sapiens
  chr1:161369566-161369860
  hyper
  head_and_neck vs. lung,liver_bileduct,cervical, bladder_and_urothelial,upper_gi,pancreas_gallbladder,breast, lymphoid_neoplasm,colorectal,melanoma,prostate,uterine,sarcoma, multiple_myeloma,ovary
cggtggcaggttttccacaaatgactctgaaaagtcagaggctcaccactgtgtctctgacccacgagaaaagtacccgggcgggccacccacagcttcgggatcggggcgcgcagggaagtagccagcaaagcaggtaagtcccgggctgctcgcggcggggtcatgactgagggcacaggggtgaactccatggtgcttcctcaggaaacttccggcgcagtcagggctgcagccagagcccggagatagttgggcagggctccaggcgtccccgaatgctcgtcgtggagt

SEQ ID NO: 460601 - DNA, 299 bp, Homo sapiens; identical to SEQ ID NO: 344979
  chr1:161369945-161370244
  hyper
  head_and_neck vs. lung,liver_bileduct,cervical, bladder_and_urothelial,upper_gi,pancreas_gallbladder,breast, lymphoid_neoplasm,colorectal,melanoma,prostate,uterine,sarcoma, multiple_myeloma,ovary

SEQ ID NO: 460602 - DNA, 98 bp, Homo sapiens; identical to SEQ ID NO: 356938
  chr1:177140714-177140812
  hyper
  head_and_neck vs. ovary,breast

SEQ ID NO: 460603 - DNA, 32 bp, Homo sapiens
  chr1:177150742-177150774
  hyper
  head_and_neck vs. melanoma,bladder_and_urothelial,ovary, lung,renal,breast,uterine,sarcoma
cgcagtgaggactgtgggggcagctaatgtct

SEQ ID NO: 460604 - DNA, 43 bp, Homo sapiens; identical to SEQ ID NO: 356947
  chr1:181286822-181286865
  hyper
  head_and_neck vs. anorectal

SEQ ID NO: 460605 - DNA, 63 bp, Homo sapiens; identical to SEQ ID NO: 349387
  chr1:205400134-205400197
  hyper

SEQ ID NO: 460606 - DNA, 70 bp, Homo sapiens; identical to SEQ ID NO: 349391
  chr1:214387777-214387847
  hyper
  head_and_neck vs. breast,bladder_and_urothelial, pancreas_gallbladder,prostate,multiple_myeloma

SEQ ID NO: 460607 - DNA, 198 bp, Homo sapiens; identical to SEQ ID NO: 455570
  chr1:220700617-220700815
  hyper
  head_and_neck vs. anorectal

SEQ ID NO: 460608 - DNA, 38 bp, Homo sapiens; identical to SEQ ID NO: 452747
  chr1:223936543-223936581
  hyper
  head_and_neck vs. prostate,non_cancer,myeloid_neoplasm, thyroid,multiple_myeloma

SEQ ID NO: 460609 - DNA, 162 bp, Homo sapiens; identical to SEQ ID NO: 331158
  chr1:234812061-234812223
  hyper
  head_and_neck vs. upper_gi,multiple_myeloma,colorectal, pancreas_gallbladder,bladder_and_urothelial,uterine, lymphoid_neoplasm

SEQ ID NO: 460610 - DNA, 207 bp, Homo sapiens
  chr1:239549378-239549585
  hyper
  head_and_neck vs. lung
cgtcctctattacactgctctgcagaaacagactcactaaatgtcaaaaagtagatgcatcagactgttccttagagaaaggtttgccatggagtcgtatattgtaactgagctgaagttcactcatcgataagttgtgcccaaggaatcgaattccttccagtccttctaagcagtccagggaaaccaatttaaaagcgaacacaa

SEQ ID NO: 460611 - DNA, 220 bp, Homo sapiens
  chr1:239549815-239550035
  hyper
  head_and_neck vs. lung
gcatgctcagaagccgggcaggttttggtctcaagcacgcagcctgtgcattacaccagctctctcagtccggggaggaggaggagcaggaggaacgcgaggaggaaggagaggaggagcggccagcagtagccacgaccgccaccaccaggcagaggaagagttcgtggggaggaaaagacctctcctcccccttggagcgccttctctctgcttttgg

SEQ ID NO: 460612 - DNA, 220 bp, Homo sapiens; identical to SEQ ID NO: 460611
  chr1:239549815-239550035
  hyper
  head_and_neck vs. anorectal

SEQ ID NO: 460613 - DNA, 13 bp, Homo sapiens
  chr1:240775455-240775468
  hyper
  head_and_neck vs. bladder_and_urothelial,lung
gaatcctctcggc

SEQ ID NO: 460614 - DNA, 57 bp, Homo sapiens; identical to SEQ ID NO: 459299
  chr10:7449898-7449955
  hyper
  head_and_neck vs. renal,myeloid_neoplasm,thyroid,ovary, breast

SEQ ID NO: 460615 - DNA, 61 bp, Homo sapiens; identical to SEQ ID NO: 459300
  chr10:7453036-7453097
  hyper
  head_and_neck vs. breast,renal,cervical,lung,melanoma

SEQ ID NO: 460616 - DNA, 61 bp, Homo sapiens; identical to SEQ ID NO: 459300
  chr10:7453036-7453097
  hyper
  head_and_neck vs. anorectal

SEQ ID NO: 460617 - DNA, 42 bp, Homo sapiens; identical to SEQ ID NO: 333857
  chr10:7729428-7729470
  hyper
  head_and_neck vs. lung

SEQ ID NO: 460618 - DNA, 79 bp, Homo sapiens
  chr10:8095120-8095199
  hyper
  head_and_neck vs. anorectal
cgcatgaaaggaatccttcagaacttactttcagggacggcttcttctatctcgaatttttgcatttgtagggaatttt

SEQ ID NO: 460619 - DNA, 100 bp, Homo sapiens
  chr10:8095845-8095945
  hyper
  head_and_neck vs. anorectal
agccagtctcttcctcccctccccccttctcatccctcactgttgccactcaagtcaaaagcacacattgattacaaatattaggtctggaaagggcagc

SEQ ID NO: 460620 - DNA, 11 bp, Homo sapiens
  chr10:15762114-15762125
  hyper
  head_and_neck vs. prostate
gtcccatctca

SEQ ID NO: 460621 - DNA, 174 bp, Homo sapiens; identical to SEQ ID NO: 359507
  chr10:15762154-15762328
  hyper
  head_and_neck vs. prostate

SEQ ID NO: 460622 - DNA, 21 bp, Homo sapiens
  chr10:23001886-23001907
  hyper
  head_and_neck vs. lung,ovary,pancreas_gallbladder, melanoma,breast,bladder_and_urothelial,sarcoma
cgaaaaaccagcatggttttc

SEQ ID NO: 460623 - DNA, 215 bp, Homo sapiens; identical to SEQ ID NO: 459309
  chr10:23001984-23002199
  hyper
  head_and_neck vs. lung,ovary,pancreas_gallbladder, melanoma,breast,bladder_and_urothelial,sarcoma

SEQ ID NO: 460624 - DNA, 286 bp, Homo sapiens; identical to SEQ ID NO: 351010
  chr10:23002228-23002514
  hyper
  head_and_neck vs. lung,ovary,pancreas_gallbladder, melanoma,breast,bladder_and_urothelial,sarcoma

SEQ ID NO: 460625 - DNA, 91 bp, Homo sapiens; identical to SEQ ID NO: 459311
  chr10:26726986-26727077
  hyper
  head_and_neck vs. lymphoid_neoplasm

SEQ ID NO: 460626 - DNA, 65 bp, Homo sapiens; identical to SEQ ID NO: 351013
  chr10:26728108-26728173
  hyper
  head_and_neck vs. lymphoid_neoplasm,myeloid_neoplasm

SEQ ID NO: 460627 - DNA, 136 bp, Homo sapiens; identical to SEQ ID NO: 455587
  chr10:43697752-43697888
  hyper
  head_and_neck vs. anorectal

SEQ ID NO: 460628 - DNA, 125 bp, Homo sapiens; identical to SEQ ID NO: 455588
  chr10:43698155-43698280
  hyper
  head_and_neck vs. anorectal

SEQ ID NO: 460629 - DNA, 217 bp, Homo sapiens; identical to SEQ ID NO: 452762
  chr10:44185124-44185341
  hyper
  head_and_neck vs. melanoma,breast,pancreas_gallbladder, lung,prostate,bladder_and_urothelial,sarcoma,ovary, multiple_myeloma,myeloid_neoplasm

SEQ ID NO: 460630 - DNA, 78 bp, Homo sapiens; identical to SEQ ID NO: 347090
  chr10:44186043-44186121
  hyper
  head_and_neck vs. melanoma,breast,pancreas_gallbladder, lung,prostate,bladder_and_urothelial,sarcoma,ovary, multiple_myeloma,myeloid_neoplasm

SEQ ID NO: 460631 - DNA, 122 bp, Homo sapiens; identical to SEQ ID NO: 351041
  chr10:54073737-54073859
  hyper
  head_and_neck vs. bladder_and_urothelial

SEQ ID NO: 460632 - DNA, 127 bp, Homo sapiens; identical to SEQ ID NO: 359578
  chr10:63213212-63213339
  hyper
  head_and_neck vs. bladder_and_urothelial, multiple_myeloma

SEQ ID NO: 460633 - DNA, 195 bp, Homo sapiens
  chr10:63656701-63656896
  hyper
  head_and_neck vs. anorectal
cgagttccctgtgtctctcttggctccggctccaagttcatgagaaatctgtccccatacccatccttctgaagcttccagcctttaccacctggacctgggctggagtcccacccccaccacagctcttgagacaggcgacgaatagacccaaatttgagatgtagctcaacctttgaccactagaggtctcct

SEQ ID NO: 460634 - DNA, 86 bp, Homo sapiens
  chr10:72015065-72015151
  hyper
  head_and_neck vs. anorectal
cgaaggggaaggcgtagacggtgaccaggtgcagctgcggcgcgctgagctgcccgtagtcgatgagcagcagcagcgcccagagc

SEQ ID NO: 460635 - DNA, 761 bp, Homo sapiens; identical to SEQ ID NO: 345363
  chr10:98479725-98480486
  hyper
  head_and_neck vs. upper_gi,liver_bileduct, pancreas_gallbladder,colorectal

SEQ ID NO: 460636 - DNA, 20 bp, Homo sapiens
  chr10:100993468-100993488
  hyper
  head_and_neck vs. thyroid
cgtggctaccccagggtctt

SEQ ID NO: 460637 - DNA, 24 bp, Homo sapiens
  chr10:101283158-101283182
  hyper
  head_and_neck vs. anorectal
cggggacgagggctggcagcccca

SEQ ID NO: 460638 - DNA, 34 bp, Homo sapiens; identical to SEQ ID NO: 455599
  chr10:102995986-102996020
  hyper
  head_and_neck vs. thyroid,myeloid_neoplasm

SEQ ID NO: 460639 - DNA, 38 bp, Homo sapiens; identical to SEQ ID NO: 452783
  chr10:112431835-112431873
  hyper
  head_and_neck vs. renal

SEQ ID NO: 460640 - DNA, 236 bp, Homo sapiens; identical to SEQ ID NO: 452784
  chr10:112432125-112432361
  hyper
  head_and_neck vs. renal

SEQ ID NO: 460641 - DNA, 240 bp, Homo sapiens; identical to SEQ ID NO: 454122
  chr10:118891774-118892014
  hyper
  head_and_neck vs. multiple_myeloma,thyroid,non_cancer

SEQ ID NO: 460642 - DNA, 296 bp, Homo sapiens; identical to SEQ ID NO: 452785
  chr10:118927594-118927890
  hyper
  head_and_neck vs. lung

SEQ ID NO: 460643 - DNA, 138 bp, Homo sapiens; identical to SEQ ID NO: 345371
  chr10:122708760-122708898
  hyper
  head_and_neck vs. multiple_myeloma,myeloid_neoplasm, renal,thyroid,pancreas_gallbladder,non_cancer,melanoma,sarcoma, prostate,lymphoid_neoplasm,colorectal

SEQ ID NO: 460644 - DNA, 50 bp, Homo sapiens; identical to SEQ ID NO: 359717
  chr10:126136723-126136773
  hyper
  head_and_neck vs. cervical

SEQ ID NO: 460645 - DNA, 67 bp, Homo sapiens
  chr10:134676272-134676339
  hyper
  head_and_neck vs. bladder_and_urothelial,melanoma
cgccggcctcggggagcaggttcaggagaggctggagggggacggggcggccgggctgcactggctg

SEQ ID NO: 460646 - DNA, 41 bp, Homo sapiens; identical to SEQ ID NO: 347131
  chr10:134676653-134676694
  hyper
  head_and_neck vs. bladder_and_urothelial,melanoma

SEQ ID NO: 460647 - DNA, 61 bp, Homo sapiens
  chr11:308266-308327
  hyper
  head_and_neck vs. cervical
gcaggaagtggctatgctgggggtgccccacaaccctgctcccccgatgtccaccgtgatc

SEQ ID NO: 460648 - DNA, 93 bp, Homo sapiens; identical to SEQ ID NO: 351138
  chr11:308362-308455
  hyper
  head_and_neck vs. cervical

SEQ ID NO: 460649 - DNA, 17 bp, Homo sapiens
  chr11:16634123-16634140
  hyper
  head_and_neck vs. multiple_myeloma, bladder_and_urothelial
cgggggggcggggttgg

SEQ ID NO: 460650 - DNA, 79 bp, Homo sapiens; identical to SEQ ID NO: 351157
  chr11:16634452-16634531
  hyper
  head_and_neck vs. multiple_myeloma, bladder_and_urothelial

SEQ ID NO: 460651 - DNA, 56 bp, Homo sapiens; identical to SEQ ID NO: 452790
  chr11:43599961-43600017
  hyper
  head_and_neck vs. lung,melanoma,bladder_and_urothelial, sarcoma,ovary

SEQ ID NO: 460652 - DNA, 239 bp, Homo sapiens; identical to SEQ ID NO: 452791
  chr11:43600215-43600454
  hyper
  head_and_neck vs. lung,melanoma,bladder_and_urothelial, sarcoma,ovary

SEQ ID NO: 460653 - DNA, 174 bp, Homo sapiens; identical to SEQ ID NO: 452792
  chr11:43600280-43600454
  hyper
  head_and_neck vs. melanoma,sarcoma,lung

SEQ ID NO: 460654 - DNA, 28 bp, Homo sapiens
  chr11:45377196-45377224
  hyper
  head_and_neck vs. multiple_myeloma,thyroid,non_cancer, prostate
ctgaaggcgaccaacgagagggagggcc

SEQ ID NO: 460655 - DNA, 5 bp, Homo sapiens
  chr11:59333339-59333344
  hyper
  head_and_neck vs. lung,lymphoid_neoplasm,sarcoma,renal, melanoma,non_cancer,upper_gi,thyroid
cggtc

SEQ ID NO: 460656 - DNA, 190 bp, Homo sapiens; identical to SEQ ID NO: 347158
  chr11:59333673-59333863
  hyper
  head_and_neck vs. lung,lymphoid_neoplasm,sarcoma,renal, melanoma,non_cancer,upper_gi,thyroid

SEQ ID NO: 460657 - DNA, 510 bp, Homo sapiens; identical to SEQ ID NO: 452797
  chr11:76381512-76382022
  hyper
  head_and_neck vs. bladder_and_urothelial, multiple_myeloma,lymphoid_neoplasm,non_cancer,myeloid_neoplasm, lung,thyroid

SEQ ID NO: 460658 - DNA, 30 bp, Homo sapiens; identical to SEQ ID NO: 452798
  chr11:76382264-76382294
  hyper
  head_and_neck vs. bladder_and_urothelial, multiple_myeloma,lymphoid_neoplasm,non_cancer,myeloid_neoplasm, lung,thyroid

SEQ ID NO: 460659 - DNA, 240 bp, Homo sapiens
  chr11:86382607-86382847
  hyper
  head_and_neck vs. anorectal
cgcctctctccacgcataaaagggagaggagggacaagaaagccaaaccaagtcacaacaagcccctgcaaggcaaaaacagaaaaaccgctggaagggcgcccgggaggatcctttctgggtccagggggcggggcgcaattttccggcagccacgggatcgcaacgcgggccgtcctgccctctggcccattaccttgttgagatgagggttcctggtgacatcgtatccgcgcttct

SEQ ID NO: 460660 - DNA, 63 bp, Homo sapiens
  chr11:86383105-86383168
  hyper
  head_and_neck vs. anorectal
ggcaggtgctcccaaagggttaaatgttccagcccccgccactcctcggctgccacctgctcg

SEQ ID NO: 460661 - DNA, 91 bp, Homo sapiens; identical to SEQ ID NO: 359948
  chr11:119612432-119612523
  hyper
  head_and_neck vs. multiple_myeloma

SEQ ID NO: 460662 - DNA, 13 bp, Homo sapiens
  chr11:119613444-119613457
  hyper
  head_and_neck vs. bladder_and_urothelial, multiple_myeloma,anorectal,ovary
ggcttatcagcgc

SEQ ID NO: 460663 - DNA, 238 bp, Homo sapiens; identical to SEQ ID NO: 457398
  chr11:131781335-131781573
  hyper
  head_and_neck vs. anorectal

SEQ ID NO: 460664 - DNA, 1 bp, Homo sapiens
  chr11:131781648-131781649
  hyper
  head_and_neck vs. anorectal
c

SEQ ID NO: 460665 - DNA, 17 bp, Homo sapiens
  chr11:133938756-133938773
  hyper
  head_and_neck vs. melanoma,sarcoma
cgccaagttcattgaaa

SEQ ID NO: 460666 - DNA, 161 bp, Homo sapiens; identical to SEQ ID NO: 345407
  chr11:133939437-133939598
  hyper
  head_and_neck vs. melanoma,sarcoma

SEQ ID NO: 460667 - DNA, 65 bp, Homo sapiens
  chr12:1762097-1762162
  hyper
  head_and_neck vs. liver_bileduct,cervical, pancreas_gallbladder,upper_gi
cggccttaggtcggagcaaatgatcagcctggaacccactccagactggtctgcagttctgcatg

SEQ ID NO: 460668 - DNA, 94 bp, Homo sapiens; identical to SEQ ID NO: 459372
  chr12:15374050-15374144
  hyper
  head_and_neck vs. lung,renal,breast,cervical, pancreas_gallbladder,prostate

SEQ ID NO: 460669 - DNA, 82 bp, Homo sapiens
  chr12:16500402-16500484
  hyper
  head_and_neck vs. cervical,lung,pancreas_gallbladder, upper_gi,bladder_and_urothelial,ovary,uterine
cgccaaatagaagggctcaaagggaatcagcaggcgatggttactgtgggcgggtaaatcaggtgatttagaggaggggttt

SEQ ID NO: 460670 - DNA, 393 bp, Homo sapiens; identical to SEQ ID NO: 347216
  chr12:16500621-16501014
  hyper
  head_and_neck vs. cervical,lung,pancreas_gallbladder, upper_gi,bladder_and_urothelial,ovary,uterine

SEQ ID NO: 460671 - DNA, 2 bp, Homo sapiens
  chr12:16758691-16758693
  hyper
  head_and_neck vs. anorectal
cg

SEQ ID NO: 460672 - DNA, 869 bp, Homo sapiens; identical to SEQ ID NO: 360034
  chr12:16758732-16759601
  hyper
  head_and_neck vs. anorectal

SEQ ID NO: 460673 - DNA, 70 bp, Homo sapiens
  chr12:43944719-43944789
  hyper
  head_and_neck vs. thyroid,prostate
cgcataagctgacgacggccttgtaatcctcctgtgagttgacctggccgcggtagaagcagtggcgcag

SEQ ID NO: 460674 - DNA, 939 bp, Homo sapiens; identical to SEQ ID NO: 334505
  chr12:48591606-48592545
  hyper

SEQ ID NO: 460675 - DNA, 1 bp, Homo sapiens
  chr12:52626747-52626748
  hyper
  head_and_neck vs. cervical
c

SEQ ID NO: 460676 - DNA, 71 bp, Homo sapiens; identical to SEQ ID NO: 202986
  chr12:52627438-52627509
  hyper
  head_and_neck vs. cervical

SEQ ID NO: 460677 - DNA, 156 bp, Homo sapiens; identical to SEQ ID NO: 334530
  chr12:53272458-53272614
  hyper
  head_and_neck vs. pancreas_gallbladder,uterine,melanoma, renal,lymphoid_neoplasm

SEQ ID NO: 460678 - DNA, 44 bp, Homo sapiens
  chr12:54348695-54348739
  hyper
  head_and_neck vs. anorectal
cggtcgggccccgcggaaatgggcgagcataatctcctgaatcc

SEQ ID NO: 460679 - DNA, 226 bp, Homo sapiens; identical to SEQ ID NO: 360101
  chr12:54349391-54349617
  hyper
  head_and_neck vs. anorectal

SEQ ID NO: 460680 - DNA, 104 bp, Homo sapiens
  chr12:54811879-54811983
  hyper
  head_and_neck vs. sarcoma
cgaccccagccccagaagtcccggtctcagcacagctccagccgaccagctacaggaaaccagcttttctcttcctcccaagagccagaggaagagggaaaccg

SEQ ID NO: 460681 - DNA, 184 bp, Homo sapiens; identical to SEQ ID NO: 345428
  chr12:63026256-63026440
  hyper
  head_and_neck vs. pancreas_gallbladder,sarcoma,anorectal, ovary,multiple_myeloma,uterine,upper_gi,non_cancer, myeloid_neoplasm,cervical,renal,colorectal

SEQ ID NO: 460682 - DNA, 119 bp, Homo sapiens; identical to SEQ ID NO: 360157
  chr12:77719613-77719732
  hyper
  head_and_neck vs. anorectal

SEQ ID NO: 460683 - DNA, 118 bp, Homo sapiens; identical to SEQ ID NO: 334615
  chr12:91502991-91503109
  hyper
  head_and_neck vs. bladder_and_urothelial

SEQ ID NO: 460684 - DNA, 31 bp, Homo sapiens; identical to SEQ ID NO: 452825
  chr12:94543992-94544023
  hyper
  head_and_neck vs. thyroid,non_cancer,melanoma, multiple_myeloma,prostate

SEQ ID NO: 460685 - DNA, 86 bp, Homo sapiens; identical to SEQ ID NO: 345430
  chr12:94544052-94544138
  hyper
  head_and_neck vs. thyroid,non_cancer,melanoma, multiple_myeloma,prostate

SEQ ID NO: 460686 - DNA, 268 bp, Homo sapiens; identical to SEQ ID NO: 452828
  chr12:103351149-103351417
  hyper
  head_and_neck vs. thyroid,multiple_myeloma,prostate

SEQ ID NO: 460687 - DNA, 9 bp, Homo sapiens
  chr12:116946078-116946087
  hyper
  head_and_neck vs. multiple_myeloma,uterine,non_cancer, ovary
cgccaagct

SEQ ID NO: 460688 - DNA, 58 bp, Homo sapiens; identical to SEQ ID NO: 345435
  chr12:116946548-116946606
  hyper
  head_and_neck vs. multiple_myeloma,uterine,non_cancer, ovary

SEQ ID NO: 460689 - DNA, 406 bp, Homo sapiens
  chr12:128750713-128751119
  hyper
  head_and_neck vs. melanoma
cgcgtggcagaaagagcagagcatgagcatcaggaaccgcacagggaagccgctgagatcacctgggatcaccaccatgagggaggccagccctggagaaatcagagggaaaagatagagagaacgaagtcgggggggggggggggagggcggatcttccttgtctgagtctgcagagaaattgcctattgcaggagcaagtctagagaggggctattctccacccactgaaaagataataaaacacatgctatgggcggcggggagatgattggggagtggaagccccacagacatgcagtgaaaaatgatcctttcttcccctctgcgttctcgtccccttcccagagacaccgctgtgatctcgtgcctcgccccctccgcacacgcacaggtgcacacccgc

SEQ ID NO: 460690 - DNA, 3 bp, Homo sapiens
  chr12:133484584-133484587
  hyper
  head_and_neck vs. breast
cgc

SEQ ID NO: 460691 - DNA, 127 bp, Homo sapiens; identical to SEQ ID NO: 351453
  chr13:28491488-28491615
  hyper
  head_and_neck vs. upper_gi

SEQ ID NO: 460692 - DNA, 177 bp, Homo sapiens; identical to SEQ ID NO: 452839
  chr13:28491617-28491794
  hyper
  head_and_neck vs. upper_gi

SEQ ID NO: 460693 - DNA, 38 bp, Homo sapiens; identical to SEQ ID NO: 454161
  chr13:28527202-28527240
  hyper
  head_and_neck vs. liver_bileduct,colorectal,upper_gi, anorectal,pancreas_gallbladder,lung,ovary,uterine,renal

SEQ ID NO: 460694 - DNA, 462 bp, Homo sapiens; identical to SEQ ID NO: 454162
  chr13:28527384-28527846
  hyper
  head_and_neck vs. liver_bileduct,colorectal,upper_gi, anorectal,pancreas_gallbladder,lung,ovary,uterine,renal

SEQ ID NO: 460695 - DNA, 197 bp, Homo sapiens; identical to SEQ ID NO: 454163
  chr13:28527649-28527846
  hyper
  head_and_neck vs. upper_gi,pancreas_gallbladder, colorectal,liver_bileduct,lung,uterine,renal,ovary,prostate, myeloid_neoplasm,thyroid,non_cancer

SEQ ID NO: 460696 - DNA, 201 bp, Homo sapiens; identical to SEQ ID NO: 452842
  chr13:29292491-29292692
  hyper
  head_and_neck vs. ovary,lung,uterine,colorectal, non_cancer,lymphoid_neoplasm,breast,multiple_myeloma,thyroid, sarcoma,pancreas_gallbladder,renal

SEQ ID NO: 460697 - DNA, 242 bp, Homo sapiens; identical to SEQ ID NO: 345442
  chr13:29293342-29293584
  hyper
  head_and_neck vs. lymphoid_neoplasm,lung,ovary,uterine, multiple_myeloma,colorectal,breast,non_cancer,thyroid,renal, pancreas_gallbladder,sarcoma

SEQ ID NO: 460698 - DNA, 34 bp, Homo sapiens; identical to SEQ ID NO: 457496
  chr13:79160914-79160948
  hyper
  head_and_neck vs. anorectal

SEQ ID NO: 460699 - DNA, 65 bp, Homo sapiens; identical to SEQ ID NO: 360319
  chr13:79161096-79161161
  hyper
  head_and_neck vs. anorectal

SEQ ID NO: 460700 - DNA, 352 bp, Homo sapiens; identical to SEQ ID NO: 457508
  chr13:112760444-112760796
  hyper
  head_and_neck vs. multiple_myeloma, bladder_and_urothelial,renal,myeloid_neoplasm,prostate,breast

SEQ ID NO: 460701 - DNA, 247 bp, Homo sapiens; identical to SEQ ID NO: 452857
  chr14:21098618-21098865
  hyper
  head_and_neck vs. upper_gi,uterine,ovary,breast, pancreas_gallbladder

SEQ ID NO: 460702 - DNA, 196 bp, Homo sapiens; identical to SEQ ID NO: 351514
  chr14:21099147-21099343
  hyper
  head_and_neck vs. upper_gi,uterine,ovary,breast, pancreas_gallbladder

SEQ ID NO: 460703 - DNA, 686 bp, Homo sapiens; identical to SEQ ID NO: 334837
  chr14:21099793-21100479
  hyper
  head_and_neck vs. upper_gi,uterine,breast, bladder_and_urothelial,renal

SEQ ID NO: 460704 - DNA, 113 bp, Homo sapiens; identical to SEQ ID NO: 345453
  chr14:21101056-21101169
  hyper
  head_and_neck vs. melanoma,upper_gi,multiple_myeloma, uterine,non_cancer,prostate,thyroid,ovary,colorectal, myeloid_neoplasm,renal,breast,bladder_and_urothelial

SEQ ID NO: 460705 - DNA, 4 bp, Homo sapiens
  chr14:23291730-23291734
  hyper
  head_and_neck vs. anorectal
cgct

SEQ ID NO: 460706 - DNA, 377 bp, Homo sapiens; identical to SEQ ID NO: 347283
  chr14:23291965-23292342
  hyper
  head_and_neck vs. anorectal

SEQ ID NO: 460707 - DNA, 39 bp, Homo sapiens; identical to SEQ ID NO: 452862
  chr14:23355352-23355391
  hyper
  head_and_neck vs. bladder_and_urothelial

SEQ ID NO: 460708 - DNA, 53 bp, Homo sapiens; identical to SEQ ID NO: 351522
  chr14:23355484-23355537
  hyper
  head_and_neck vs. bladder_and_urothelial

SEQ ID NO: 460709 - DNA, 270 bp, Homo sapiens; identical to SEQ ID NO: 334851
  chr14:25601990-25602260
  hyper
  head_and_neck vs. upper_gi,pancreas_gallbladder

SEQ ID NO: 460710 - DNA, 207 bp, Homo sapiens
  chr14:29243307-29243514
  hyper
  head_and_neck vs. bladder_and_urothelial
cgttctgggcttgactttgtccctgctgggaatatcccagttcctggctttggaaatctcaggcaaataattgattcttaatgcacacttaggagacgtcggtagtacgctcgagagcctctctgtcccagagtggctgagagcacgcgccagacacaggttggctcggcccgaagcgaatttgggactctcgtcgcggtgtcctat

SEQ ID NO: 460711 - DNA, 77 bp, Homo sapiens; identical to SEQ ID NO: 334894
  chr14:50511831-50511908
  hyper
  head_and_neck vs. liver_bileduct

SEQ ID NO: 460712 - DNA, 12 bp, Homo sapiens
  chr14:57279657-57279669
  hyper
  head_and_neck vs. multiple_myeloma
ccaataaactac

SEQ ID NO: 460713 - DNA, 173 bp, Homo sapiens; identical to SEQ ID NO: 351562
  chr14:60043607-60043780
  hyper
  head_and_neck vs. colorectal

SEQ ID NO: 460714 - DNA, 80 bp, Homo sapiens; identical to SEQ ID NO: 452877
  chr14:60097114-60097194
  hyper
  head_and_neck vs. breast,prostate,myeloid_neoplasm

SEQ ID NO: 460715 - DNA, 30 bp, Homo sapiens
  chr14:60974092-60974122
  hyper
  head_and_neck vs. multiple_myeloma
aaagttgtccttccggctgattcggaagtc

SEQ ID NO: 460716 - DNA, 277 bp, Homo sapiens
  chr14:60974092-60974369
  hyper
  head_and_neck vs. bladder_and_urothelial, multiple_myeloma
aaagttgtccttccggctgattcggaagtcgctccaagggaaagaaggtttatgctttgtcattatcttcatcgccctctttattttgcccctgccttgtcgtatttcaagaaaatgaactcttagaaaagaaagcctctccgttgaggcggttggcaatctcacagaaatgatgtaaatggtttcagggcttttttcttcccctctgctatttttttcgagtgaactgtgaagatctgtgaaaataatatcagggttttccgtcagaacgagcttt

SEQ ID NO: 460717 - DNA, 110 bp, Homo sapiens; identical to SEQ ID NO: 351567
  chr14:60974415-60974525
  hyper
  head_and_neck vs. bladder_and_urothelial, multiple_myeloma

SEQ ID NO: 460718 - DNA, 167 bp, Homo sapiens; identical to SEQ ID NO: 345459
  chr14:61104864-61105031
  hyper
  head_and_neck vs. myeloid_neoplasm

SEQ ID NO: 460719 - DNA, 133 bp, Homo sapiens
  chr14:61116736-61116869
  hyper
  head_and_neck vs. cervical
cgcgcatgcagcctctggaagagtggcttcgggttggcttcagctcgaggagtccaaccctatttcctcctccctccccccaccaactaccactgtcctccccccactgctgcacaccaccctccaaagggca

SEQ ID NO: 460720 - DNA, 186 bp, Homo sapiens; identical to SEQ ID NO: 351573
  chr14:61117028-61117214
  hyper
  head_and_neck vs. cervical

SEQ ID NO: 460721 - DNA, 619 bp, Homo sapiens
  chr14:61123686-61124305
  hyper
  head_and_neck vs. cervical
cgcagccaagtatccgcgcgcggacgccggggaggcttcaccgcccggtgtgctggcggccccgcccgctggctcgcagagcggggtctcgcagagctgggcctcacccgtcgccccgccgcctgcaccagaaactccctccccgggctgtgcgggagctcttgggcgccgcgtctgcgccggggccgactccgcccaggcttgtagccagaggtcgcgctatctcgccgggctggcccggcgctctctggggttgttccctcgggcggtgcatggggcccacaggcgtcggggcttgagggaagaggggccggggcctgaagggcggggaccacaacgaggcgcggggaggtcagtggagcggagagccggcgcaggccggcggcggcgcggccggaggagaaagagggcgctgtcttcctggcaaaggagttttcgcctggccggcaggaaccgaaacaacaacaacaacaaaaaaaaaagaaagaaagaaaatctgctccgccgagtccccggagtgaagagcgcgcggcgggaagggtctggggtagcggagcggattctcggcccaaagcctggggaccgctcagcccaccttggcttcgccagcgccacgtag

SEQ ID NO: 460722 - DNA, 114 bp, Homo sapiens; identical to SEQ ID NO: 347307
  chr14:62584399-62584513
  hyper
  head_and_neck vs. thyroid,non_cancer,myeloid_neoplasm

SEQ ID NO: 460723 - DNA, 48 bp, Homo sapiens
  chr14:85996094-85996142
  hyper
  head_and_neck vs. anorectal
cgggggcggagagcagagaagtaaaggaataaaaccaacttcgctggc

SEQ ID NO: 460724 - DNA, 67 bp, Homo sapiens; identical to SEQ ID NO: 351600
  chr14:89818034-89818101
  hyper
  head_and_neck vs. prostate,non_cancer

SEQ ID NO: 460725 - DNA, 102 bp, Homo sapiens; identical to SEQ ID NO: 347317
  chr14:94889915-94890017
  hyper
  head_and_neck vs. upper_gi,pancreas_gallbladder, bladder_and_urothelial,colorectal,renal,cervical

SEQ ID NO: 460726 - DNA, 145 bp, Homo sapiens; identical to SEQ ID NO: 335062
  chr15:29432142-29432287
  hyper
  head_and_neck vs. liver_bileduct,upper_gi, bladder_and_urothelial,lung

SEQ ID NO: 460727 - DNA, 61 bp, Homo sapiens; identical to SEQ ID NO: 452890
  chr15:29561185-29561246
  hyper
  head_and_neck vs. bladder_and_urothelial,lung

SEQ ID NO: 460728 - DNA, 700 bp, Homo sapiens; identical to SEQ ID NO: 347323
  chr15:29561316-29562016
  hyper
  head_and_neck vs. bladder_and_urothelial,lung

SEQ ID NO: 460729 - DNA, 507 bp, Homo sapiens; identical to SEQ ID NO: 351653
  chr15:31774606-31775113
  hyper
  head_and_neck vs. pancreas_gallbladder,lung,colorectal, breast,upper_gi

SEQ ID NO: 460730 - DNA, 385 bp, Homo sapiens
  chr15:41786420-41786805
  hyper
  head_and_neck vs. anorectal
cggagcgggagagggactgcctcccggcagcgggctcttcgcacctgcagcagccgcgccgcctttccacctcgtcggtctcctccactggctcctcgtcgctgctcgaggactcggaggacgacctgctgagcgacagtgagagccggagccgcggcaacgtgcagctggaagcgggcgaggacgtgggtcaggtacgggccgcgggggcggggccagcgccgggcgcgggggctgcacgggggacctggctgggtgctcccggaggacccgctcctgtccatgctccctccagcggaaggtcctgttctcgcggtttaggaggaatctgggggtcagagggaggcgcctggccgacctctcgcctgggcaactttcacctcgg

SEQ ID NO: 460731 - DNA, 119 bp, Homo sapiens; identical to SEQ ID NO: 452893
  chr15:48469946-48470065
  hyper
  head_and_neck vs. lung,breast,ovary,prostate, bladder_and_urothelial,renal

SEQ ID NO: 460732 - DNA, 53 bp, Homo sapiens; identical to SEQ ID NO: 452894
  chr15:48470094-48470147
  hyper
  head_and_neck vs. lung,breast,ovary,prostate, bladder_and_urothelial,renal

SEQ ID NO: 460733 - DNA, 159 bp, Homo sapiens; identical to SEQ ID NO: 452895
  chr15:48470215-48470374
  hyper
  head_and_neck vs. lung,breast,ovary,prostate, bladder_and_urothelial,renal

SEQ ID NO: 460734 - DNA, 1 bp, Homo sapiens
  chr15:48470626-48470627
  hyper
  head_and_neck vs. lung,breast,ovary,prostate, bladder_and_urothelial,renal
c

SEQ ID NO: 460735 - DNA, 344 bp, Homo sapiens; identical to SEQ ID NO: 360640
  chr15:51386268-51386612
  hyper
  head_and_neck vs. anorectal

SEQ ID NO: 460736 - DNA, 72 bp, Homo sapiens; identical to SEQ ID NO: 452902
  chr15:63795400-63795472
  hyper
  head_and_neck vs. upper_gi,liver_bileduct, bladder_and_urothelial,colorectal,renal,pancreas_gallbladder

SEQ ID NO: 460737 - DNA, 351 bp, Homo sapiens; identical to SEQ ID NO: 452903
  chr15:63795501-63795852
  hyper
  head_and_neck vs. upper_gi,liver_bileduct, bladder_and_urothelial,colorectal,renal,pancreas_gallbladder

SEQ ID NO: 460738 - DNA, 338 bp, Homo sapiens; identical to SEQ ID NO: 347348
  chr15:63795894-63796232
  hyper
  head_and_neck vs. upper_gi,liver_bileduct, bladder_and_urothelial,colorectal,renal,pancreas_gallbladder

SEQ ID NO: 460739 - DNA, 61 bp, Homo sapiens; identical to SEQ ID NO: 457569
  chr15:79383268-79383329
  hyper
  head_and_neck vs. lung

SEQ ID NO: 460740 - DNA, 61 bp, Homo sapiens; identical to SEQ ID NO: 457569
  chr15:79383268-79383329
  hyper
  head_and_neck vs. anorectal,sarcoma,prostate,lung,breast

SEQ ID NO: 460741 - DNA, 62 bp, Homo sapiens; identical to SEQ ID NO: 351730
  chr15:79384146-79384208
  hyper
  head_and_neck vs. anorectal,sarcoma,prostate,lung,breast

SEQ ID NO: 460742 - DNA, 68 bp, Homo sapiens; identical to SEQ ID NO: 360734
  chr15:89913879-89913947
  hyper
  head_and_neck vs. anorectal

SEQ ID NO: 460743 - DNA, 77 bp, Homo sapiens
  chr15:89956224-89956301
  hyper
  head_and_neck vs. upper_gi
cgcccccgacctactgacccctcttcccccctgacatgaatagtgggactcacagcctccccagcctctccaactag

SEQ ID NO: 460744 - DNA, 40 bp, Homo sapiens; identical to SEQ ID NO: 335222
  chr15:90016187-90016227
  hyper
  head_and_neck vs. upper_gi

SEQ ID NO: 460745 - DNA, 86 bp, Homo sapiens; identical to SEQ ID NO: 455720
  chr16:2040762-2040848
  hyper
  head_and_neck vs. myeloid_neoplasm,non_cancer

SEQ ID NO: 460746 - DNA, 5 bp, Homo sapiens
  chr16:3220283-3220288
  hyper
  head_and_neck vs. thyroid,sarcoma,multiple_myeloma, non_cancer
cggcc

SEQ ID NO: 460747 - DNA, 212 bp, Homo sapiens; identical to SEQ ID NO: 345485
  chr16:3222239-3222451
  hyper
  head_and_neck vs. non_cancer,thyroid,multiple_myeloma, lymphoid_neoplasm,myeloid_neoplasm,renal,bladder_and_urothelial, prostate

SEQ ID NO: 460748 - DNA, 18 bp, Homo sapiens
  chr16:3234164-3234182
  hyper
  head_and_neck vs. thyroid,non_cancer,multiple_myeloma
cgcacccaaagcgagaat

SEQ ID NO: 460749 - DNA, 50 bp, Homo sapiens; identical to SEQ ID NO: 452914
  chr16:3238043-3238093
  hyper
  head_and_neck vs. multiple_myeloma,uterine,thyroid, non_cancer

SEQ ID NO: 460750 - DNA, 145 bp, Homo sapiens
  chr16:3241328-3241473
  hyper
  head_and_neck vs. bladder_and_urothelial
cgcagagcggtgagcaaagtcttgcaccagcggggatgtcggggtggaactgaacctgttgtaggggacccccagtgtgccctggtttctggggctgattcattacgtcacttagtttctactattctcatgccaccccgccaat

SEQ ID NO: 460751 - DNA, 2 bp, Homo sapiens
  chr16:3241991-3241993
  hyper
  head_and_neck vs. bladder_and_urothelial
tc

SEQ ID NO: 460752 - DNA, 49 bp, Homo sapiens; identical to SEQ ID NO: 452915
  chr16:4363872-4363921
  hyper
  head_and_neck vs. liver_bileduct,colorectal, pancreas_gallbladder,upper_gi,uterine,renal,multiple_myeloma, prostate,bladder_and_urothelial,myeloid_neoplasm,non_cancer, thyroid

SEQ ID NO: 460753 - DNA, 158 bp, Homo sapiens; identical to SEQ ID NO: 345488
  chr16:4364080-4364238
  hyper
  head_and_neck vs. liver_bileduct,colorectal, pancreas_gallbladder,upper_gi,uterine,renal,multiple_myeloma, prostate,bladder_and_urothelial,myeloid_neoplasm,non_cancer, thyroid

SEQ ID NO: 460754 - DNA, 1 bp, Homo sapiens
  chr16:4377508-4377509
  hyper
  head_and_neck vs. multiple_myeloma,non_cancer,uterine, myeloid_neoplasm,thyroid
c

SEQ ID NO: 460755 - DNA, 342 bp, Homo sapiens; identical to SEQ ID NO: 457587
  chr16:4377552-4377894
  hyper
  head_and_neck vs. multiple_myeloma,non_cancer,uterine, myeloid_neoplasm,thyroid

SEQ ID NO: 460756 - DNA, 91 bp, Homo sapiens
  chr16:12211189-12211280
  hyper
  head_and_neck vs. cervical
cgaaccgtggaaacaggcgtggtcaatacgtgcttcagtgcggacgaaccgtggaaacaggcgtggtcaatacgtgcttcaatgcggacga

SEQ ID NO: 460757 - DNA, 10 bp, Homo sapiens
  chr16:23846783-23846793
  hyper
  head_and_neck vs. non_cancer,thyroid,melanoma, myeloid_neoplasm,cervical,bladder_and_urothelial, multiple_myeloma
cgctcctccc

SEQ ID NO: 460758 - DNA, 107 bp, Homo sapiens; identical to SEQ ID NO: 454210
  chr16:54966659-54966766
  hyper
  head_and_neck vs. anorectal

SEQ ID NO: 460759 - DNA, 8 bp, Homo sapiens
  chr16:54967414-54967422
  hyper
  head_and_neck vs. anorectal
cgtgtccc

SEQ ID NO: 460760 - DNA, 85 bp, Homo sapiens; identical to SEQ ID NO: 360832
  chr16:55690809-55690894
  hyper
  head_and_neck vs. sarcoma

SEQ ID NO: 460761 - DNA, 44 bp, Homo sapiens; identical to SEQ ID NO: 360838
  chr16:56659821-56659865
  hyper
  head_and_neck vs. pancreas_gallbladder

SEQ ID NO: 460762 - DNA, 3 bp, Homo sapiens
  chr16:67433333-67433336
  hyper
  head_and_neck vs. anorectal
cgc

SEQ ID NO: 460763 - DNA, 81 bp, Homo sapiens; identical to SEQ ID NO: 351822
  chr16:67433472-67433553
  hyper
  head_and_neck vs. anorectal

SEQ ID NO: 460764 - DNA, 49 bp, Homo sapiens; identical to SEQ ID NO: 452920
  chr16:77822069-77822118
  hyper
  head_and_neck vs. sarcoma

SEQ ID NO: 460765 - DNA, 178 bp, Homo sapiens; identical to SEQ ID NO: 452923
  chr16:85932121-85932299
  hyper
  head_and_neck vs. colorectal,upper_gi,thyroid, lymphoid_neoplasm,non_cancer,pancreas_gallbladder,cervical, ovary,liver_bileduct,prostate,renal,multiple_myeloma

SEQ ID NO: 460766 - DNA, 245 bp, Homo sapiens; identical to SEQ ID NO: 360924
  chr17:1881128-1881373
  hyper

SEQ ID NO: 460767 - DNA, 159 bp, Homo sapiens
  chr17:1901335-1901494
  hyper
  head_and_neck vs. pancreas_gallbladder, bladder_and_urothelial,liver_bileduct,upper_gi,colorectal
cgcctccgccccaggccgcgatcgatcccggcctctcccggcctcattaccgagggagagctgccggggctggcaggggagccagacggcggcggagggggcggggaggcctccttggctccctggcccggattaaatatttactatgttttgtttggc

SEQ ID NO: 460768 - DNA, 100 bp, Homo sapiens; identical to SEQ ID NO: 351869
  chr17:1901970-1902070
  hyper
  head_and_neck vs. pancreas_gallbladder, bladder_and_urothelial,liver_bileduct,upper_gi,colorectal

SEQ ID NO: 460769 - DNA, 230 bp, Homo sapiens
  chr17:7348518-7348748
  hyper
  head_and_neck vs. pancreas_gallbladder
cgaaggggcagtgacggggccagcggtcgtggccaggcaccagggctgcacttattctctcctcccccaggcgtccgcggctcggaggcggagggtcgactccgggagaaacttttctctggctatgatagctccgtgcggccagcgcgggaggtgggagaccgtgtcagggtcagcgttggtctcatcctggcgcaactcatcagcctggtgagggcgcgcggggggtg

SEQ ID NO: 460770 - DNA, 230 bp, Homo sapiens
  chr17:7348997-7349227
  hyper
  head_and_neck vs. pancreas_gallbladder
gggacggacctcgacgtagggccacatgagtcctgagtgcccagggtggggcggagcttggtgctcaggggtcaataaatggcagcgggtggaggttcggggctgggtggattatgagctgaaggcagggccggggacagagctaggcggagggctaggcaggggcgggtctggtaggttgataggctgggagtgtagacggcaggaagaggtgtttctgagatagaggc

SEQ ID NO: 460771 - DNA, 42 bp, Homo sapiens; identical to SEQ ID NO: 374027
  chr17:7349259-7349301
  hyper
  head_and_neck vs. pancreas_gallbladder

SEQ ID NO: 460772 - DNA, 23 bp, Homo sapiens
  chr17:8055144-8055167
  hyper
  head_and_neck vs. cervical
cgtccaaccacacccctactact

SEQ ID NO: 460773 - DNA, 69 bp, Homo sapiens; identical to SEQ ID NO: 345505
  chr17:8055823-8055892
  hyper
  head_and_neck vs. cervical

SEQ ID NO: 460774 - DNA, 11 bp, Homo sapiens
  chr17:16472788-16472799
  hyper
  head_and_neck vs. anorectal
gaaaactgggc

SEQ ID NO: 460775 - DNA, 4 bp, Homo sapiens
  chr17:27949429-27949433
  hyper
  head_and_neck vs. cervical,ovary
cgtg

SEQ ID NO: 460776 - DNA, 2 bp, Homo sapiens
  chr17:36105728-36105730
  hyper
  head_and_neck vs. pancreas_gallbladder,colorectal, liver_bileduct,renal,non_cancer,upper_gi,multiple_myeloma, uterine,lymphoid_neoplasm,cervical
cc

SEQ ID NO: 460777 - DNA, 54 bp, Homo sapiens; identical to SEQ ID NO: 459477
  chr17:46620299-46620353
  hyper
  head_and_neck vs. cervical,anorectal,ovary

SEQ ID NO: 460778 - DNA, 260 bp, Homo sapiens; identical to SEQ ID NO: 345530
  chr17:46621458-46621718
  hyper
  head_and_neck vs. cervical,ovary

SEQ ID NO: 460779 - DNA, 322 bp, Homo sapiens; identical to SEQ ID NO: 459479
  chr17:46621458-46621780
  hyper
  head_and_neck vs. cervical,anorectal

SEQ ID NO: 460780 - DNA, 182 bp, Homo sapiens; identical to SEQ ID NO: 455779
  chr17:46659093-46659275
  hyper
  head_and_neck vs. cervical,bladder_and_urothelial

SEQ ID NO: 460781 - DNA, 46 bp, Homo sapiens; identical to SEQ ID NO: 455780
  chr17:46659384-46659430
  hyper
  head_and_neck vs. cervical,bladder_and_urothelial

SEQ ID NO: 460782 - DNA, 64 bp, Homo sapiens
  chr17:46687527-46687591
  hyper
  head_and_neck vs. anorectal,cervical,ovary, bladder_and_urothelial,colorectal,uterine,upper_gi
cggccttcctccgcaagacaaacggcctcgtctccagcccgtgccggcgctgctgataaatatt

SEQ ID NO: 460783 - DNA, 13 bp, Homo sapiens
  chr17:46688806-46688819
  hyper
  head_and_neck vs. anorectal,cervical,colorectal, bladder_and_urothelial,uterine,ovary
gggaagttggtcc

SEQ ID NO: 460784 - DNA, 321 bp, Homo sapiens; identical to SEQ ID NO: 351971
  chr17:46688806-46689127
  hyper
  head_and_neck vs. anorectal,cervical

SEQ ID NO: 460785 - DNA, 149 bp, Homo sapiens; identical to SEQ ID NO: 347451
  chr17:46690905-46691054
  hyper
  head_and_neck vs. anorectal,cervical, bladder_and_urothelial

SEQ ID NO: 460786 - DNA, 16 bp, Homo sapiens
  chr17:46692424-46692440
  hyper
  head_and_neck vs. cervical
agaagggatgccagtt

SEQ ID NO: 460787 - DNA, 172 bp, Homo sapiens; identical to SEQ ID NO: 457614
  chr17:46801836-46802008
  hyper
  head_and_neck vs. prostate,non_cancer,renal, multiple_myeloma,myeloid_neoplasm

SEQ ID NO: 460788 - DNA, 82 bp, Homo sapiens; identical to SEQ ID NO: 455783
  chr17:46826849-46826931
  hyper
  head_and_neck vs. cervical,multiple_myeloma, bladder_and_urothelial,myeloid_neoplasm,non_cancer,thyroid

SEQ ID NO: 460789 - DNA, 528 bp, Homo sapiens; identical to SEQ ID NO: 351984
  chr17:49021815-49022343
  hyper
  head_and_neck vs. liver_bileduct,pancreas_gallbladder, colorectal

SEQ ID NO: 460790 - DNA, 216 bp, Homo sapiens
  chr17:50235416-50235632
  hyper
  head_and_neck vs. lung
cgcgtgtctcttctcttcgcaccagcggcggaaaccgcactagcagcggcggcggcggcggcggcggcagcagccacctgaagccaccaacactgggctcttccagcaaaaacgagaccccgattcgtctggcgccccaagaagacatagacgatagccccccgccgggctgcgccgtgcaattccgggctcccgggagcgcgtagctcgctggct

SEQ ID NO: 460791 - DNA, 170 bp, Homo sapiens
  chr17:53341536-53341706
  hyper
  head_and_neck vs. uterine,non_cancer,ovary, myeloid_neoplasm,bladder_and_urothelial,cervical,prostate
ggatactttacaaaattattttaatcaccgtgcaaacctaataacttgacccaagcgcaatcacctgtattcacccagagtaaatattcctaaaatcccgttcagtgtgtctgtgtctctcccgcctctttccgtttcaggcaaatgtctaccccccctctccccccacc

SEQ ID NO: 460792 - DNA, 1 bp, Homo sapiens
  chr17:53341786-53341787
  hyper
  head_and_neck vs. uterine,non_cancer,ovary, myeloid_neoplasm,bladder_and_urothelial,cervical,prostate
c

SEQ ID NO: 460793 - DNA, 27 bp, Homo sapiens
  chr17:59467400-59467427
  hyper
  head_and_neck vs. cervical
cggcccgatcctaaggaagcccctgct

SEQ ID NO: 460794 - DNA, 15 bp, Homo sapiens
  chr17:59532358-59532373
  hyper
  head_and_neck vs. myeloid_neoplasm,thyroid
actcctaggtttccg

SEQ ID NO: 460795 - DNA, 132 bp, Homo sapiens; identical to SEQ ID NO: 455793
  chr17:59532387-59532519
  hyper
  head_and_neck vs. myeloid_neoplasm,thyroid

SEQ ID NO: 460796 - DNA, 1 bp, Homo sapiens
  chr17:59532591-59532592
  hyper
  head_and_neck vs. myeloid_neoplasm,thyroid
c

SEQ ID NO: 460797 - DNA, 1 bp, Homo sapiens
  chr17:73073429-73073430
  hyper
  head_and_neck vs. upper_gi,colorectal
c

SEQ ID NO: 460798 - DNA, 65 bp, Homo sapiens; identical to SEQ ID NO: 347468
  chr17:73073967-73074032
  hyper
  head_and_neck vs. upper_gi,colorectal

SEQ ID NO: 460799 - DNA, 365 bp, Homo sapiens; identical to SEQ ID NO: 335717
  chr17:80452529-80452894
  hyper
  head_and_neck vs. lymphoid_neoplasm,upper_gi,melanoma

SEQ ID NO: 460800 - DNA, 94 bp, Homo sapiens; identical to SEQ ID NO: 452939
  chr18:13823932-13824026
  hyper
  head_and_neck vs. lung,pancreas_gallbladder

SEQ ID NO: 460801 - DNA, 113 bp, Homo sapiens; identical to SEQ ID NO: 452940
  chr18:13824102-13824215
  hyper
  head_and_neck vs. lung,pancreas_gallbladder

SEQ ID NO: 460802 - DNA, 2 bp, Homo sapiens
  chr18:14450448-14450450
  hyper
  head_and_neck vs. lung,bladder_and_urothelial
cc

SEQ ID NO: 460803 - DNA, 49 bp, Homo sapiens; identical to SEQ ID NO: 335760
  chr18:14450819-14450868
  hyper
  head_and_neck vs. lung

SEQ ID NO: 460804 - DNA, 891 bp, Homo sapiens; identical to SEQ ID NO: 452951
  chr18:32556625-32557516
  hyper
  head_and_neck vs. lung,upper_gi,ovary,colorectal, pancreas_gallbladder,breast,uterine,renal

SEQ ID NO: 460805 - DNA, 769 bp, Homo sapiens; identical to SEQ ID NO: 452952
  chr18:32557064-32557833
  hyper
  head_and_neck vs. liver_bileduct,upper_gi,colorectal, lung,pancreas_gallbladder,breast,prostate,renal, myeloid_neoplasm,non_cancer,uterine,ovary,multiple_myeloma, sarcoma

SEQ ID NO: 460806 - DNA, 18 bp, Homo sapiens
  chr18:32557864-32557882
  hyper
  head_and_neck vs. liver_bileduct,upper_gi,colorectal, lung,pancreas_gallbladder,breast,prostate,renal, myeloid_neoplasm,non_cancer,uterine,ovary,multiple_myeloma, sarcoma
tctgaacctggggcgctc

SEQ ID NO: 460807 - DNA, 45 bp, Homo sapiens; identical to SEQ ID NO: 452954
  chr18:32557884-32557929
  hyper
  head_and_neck vs. liver_bileduct,upper_gi,colorectal, lung,pancreas_gallbladder,breast,prostate,renal, myeloid_neoplasm,non_cancer,uterine,ovary,multiple_myeloma, sarcoma

SEQ ID NO: 460808 - DNA, 291 bp, Homo sapiens; identical to SEQ ID NO: 452955
  chr18:32557542-32557833
  hyper
  head_and_neck vs. upper_gi,lung,pancreas_gallbladder, colorectal,renal,breast,liver_bileduct,non_cancer,prostate, ovary,myeloid_neoplasm,multiple_myeloma,thyroid,uterine

SEQ ID NO: 460809 - DNA, 18 bp, Homo sapiens
  chr18:32557864-32557882
  hyper
  head_and_neck vs. upper_gi,lung,pancreas_gallbladder, colorectal,renal,breast,liver_bileduct,non_cancer,prostate, ovary,myeloid_neoplasm,multiple_myeloma,thyroid,uterine
tctgaacctggggcgctc

SEQ ID NO: 460810 - DNA, 45 bp, Homo sapiens; identical to SEQ ID NO: 452954
  chr18:32557884-32557929
  hyper
  head_and_neck vs. upper_gi,lung,pancreas_gallbladder, colorectal,renal,breast,liver_bileduct,non_cancer,prostate, ovary,myeloid_neoplasm,multiple_myeloma,thyroid,uterine

SEQ ID NO: 460811 - DNA, 445 bp, Homo sapiens; identical to SEQ ID NO: 345550
  chr18:32558003-32558448
  hyper
  head_and_neck vs. upper_gi,lung,pancreas_gallbladder, colorectal,renal,breast,liver_bileduct,non_cancer,prostate, ovary,myeloid_neoplasm,multiple_myeloma,thyroid,uterine

SEQ ID NO: 460812 - DNA, 80 bp, Homo sapiens; identical to SEQ ID NO: 452959
  chr18:44335955-44336035
  hyper
  head_and_neck vs. sarcoma,myeloid_neoplasm,non_cancer

SEQ ID NO: 460813 - DNA, 14 bp, Homo sapiens
  chr18:44337138-44337152
  hyper
  head_and_neck vs. myeloid_neoplasm,thyroid,sarcoma, non_cancer,breast,prostate,renal
caggggctgggcgc

SEQ ID NO: 460814 - DNA, 196 bp, Homo sapiens; identical to SEQ ID NO: 452964
  chr18:47339411-47339607
  hyper
  head_and_neck vs. liver_bileduct,pancreas_gallbladder, colorectal,renal,upper_gi,multiple_myeloma,lymphoid_neoplasm, non_cancer,cervical,lung,bladder_and_urothelial, myeloid_neoplasm,ovary,breast,melanoma

SEQ ID NO: 460815 - DNA, 401 bp, Homo sapiens; identical to SEQ ID NO: 452965
  chr18:47339758-47340159
  hyper
  head_and_neck vs. liver_bileduct,pancreas_gallbladder, colorectal,renal,upper_gi,multiple_myeloma,lymphoid_neoplasm, non_cancer,cervical,lung,bladder_and_urothelial, myeloid_neoplasm,ovary,breast,melanoma

SEQ ID NO: 460816 - DNA, 50 bp, Homo sapiens; identical to SEQ ID NO: 452966
  chr18:55104759-55104809
  hyper
  head_and_neck vs. liver_bileduct,upper_gi,sarcoma,ovary, pancreas_gallbladder

SEQ ID NO: 460817 - DNA, 280 bp, Homo sapiens; identical to SEQ ID NO: 452967
  chr18:55105185-55105465
  hyper
  head_and_neck vs. liver_bileduct,upper_gi,sarcoma,ovary, pancreas_gallbladder

SEQ ID NO: 460818 - DNA, 255 bp, Homo sapiens; identical to SEQ ID NO: 452968
  chr18:55105210-55105465
  hyper
  head_and_neck vs. ovary,pancreas_gallbladder,upper_gi

SEQ ID NO: 460819 - DNA, 57 bp, Homo sapiens; identical to SEQ ID NO: 347514
  chr18:55106090-55106147
  hyper
  head_and_neck vs. ovary,pancreas_gallbladder,upper_gi

SEQ ID NO: 460820 - DNA, 146 bp, Homo sapiens
  chr18:57069721-57069867
  hyper
  head_and_neck vs. colorectal,liver_bileduct,upper_gi, bladder_and_urothelial,pancreas_gallbladder
cggttcggtgttgaagccaaatctcagtctgtgttgtgacactgccattgctgccgcctgcagtaccactgccgcatctgactcacattctagaaggaaggtaggtttgtcccaatgaatgcagcttggggcagctgccttgtgga

SEQ ID NO: 460821 - DNA, 168 bp, Homo sapiens; identical to SEQ ID NO: 361300
  chr18:57069918-57070086
  hyper
  head_and_neck vs. colorectal,liver_bileduct,upper_gi, bladder_and_urothelial,pancreas_gallbladder

SEQ ID NO: 460822 - DNA, 34 bp, Homo sapiens
  chr18:57365422-57365456
  hyper
  head_and_neck vs. cervical
cgccgcgcacatcagagctggaaacgcccccccc

SEQ ID NO: 460823 - DNA, 62 bp, Homo sapiens; identical to SEQ ID NO: 374471
  chr18:67069292-67069354
  hyper
  head_and_neck vs. sarcoma

SEQ ID NO: 460824 - DNA, 24 bp, Homo sapiens
  chr19:814406-814430
  hyper
  head_and_neck vs. renal,multiple_myeloma
cgacccccatcagaacctgccact

SEQ ID NO: 460825 - DNA, 14 bp, Homo sapiens
  chr19:1775063-1775077
  hyper
  head_and_neck vs. sarcoma,breast,bladder_and_urothelial, prostate,multiple_myeloma
cgggcggcgtgcgc

SEQ ID NO: 460826 - DNA, 15 bp, Homo sapiens
  chr19:1856948-1856963
  hyper
  head_and_neck vs. colorectal
cggggtggggggggc

SEQ ID NO: 460827 - DNA, 109 bp, Homo sapiens; identical to SEQ ID NO: 345559
  chr19:1857456-1857565
  hyper
  head_and_neck vs. colorectal

SEQ ID NO: 460828 - DNA, 116 bp, Homo sapiens; identical to SEQ ID NO: 345560
  chr19:1979018-1979134
  hyper
  head_and_neck vs. liver_bileduct,lymphoid_neoplasm, melanoma,renal

SEQ ID NO: 460829 - DNA, 219 bp, Homo sapiens; identical to SEQ ID NO: 457663
  chr19:2273763-2273982
  hyper
  head_and_neck vs. pancreas_gallbladder

SEQ ID NO: 460830 - DNA, 10 bp, Homo sapiens
  chr19:2274020-2274030
  hyper
  head_and_neck vs. pancreas_gallbladder
ccgtctgagc

SEQ ID NO: 460831 - DNA, 601 bp, Homo sapiens; identical to SEQ ID NO: 335900
  chr19:2461998-2462599
  hyper
  head_and_neck vs. pancreas_gallbladder,upper_gi

SEQ ID NO: 460832 - DNA, 73 bp, Homo sapiens; identical to SEQ ID NO: 452976
  chr19:2702445-2702518
  hyper
  head_and_neck vs. ovary,breast,lung,melanoma, bladder_and_urothelial

SEQ ID NO: 460833 - DNA, 453 bp, Homo sapiens; identical to SEQ ID NO: 347529
  chr19:2702553-2703006
  hyper
  head_and_neck vs. ovary,breast,lung,melanoma, bladder_and_urothelial

SEQ ID NO: 460834 - DNA, 3 bp, Homo sapiens
  chr19:10407174-10407177
  hyper
  head_and_neck vs. anorectal
agc

SEQ ID NO: 460835 - DNA, 166 bp, Homo sapiens; identical to SEQ ID NO: 452981
  chr19:11805261-11805427
  hyper
  head_and_neck vs. lung,breast,bladder_and_urothelial, colorectal,ovary,uterine,pancreas_gallbladder,upper_gi,prostate

SEQ ID NO: 460836 - DNA, 369 bp, Homo sapiens; identical to SEQ ID NO: 347539
  chr19:11805597-11805966
  hyper
  head_and_neck vs. lung,breast,bladder_and_urothelial, colorectal,ovary,uterine,pancreas_gallbladder,upper_gi,prostate

SEQ ID NO: 460837 - DNA, 161 bp, Homo sapiens; identical to SEQ ID NO: 452983
  chr19:11909173-11909334
  hyper
  head_and_neck vs. breast,pancreas_gallbladder,colorectal, prostate,lung,ovary,uterine,bladder_and_urothelial,renal, myeloid_neoplasm,upper_gi,thyroid,non_cancer,sarcoma, multiple_myeloma,cervical

SEQ ID NO: 460838 - DNA, 61 bp, Homo sapiens; identical to SEQ ID NO: 452984
  chr19:11909732-11909793
  hyper
  head_and_neck vs. breast,pancreas_gallbladder,colorectal, prostate,lung,ovary,uterine,bladder_and_urothelial,renal, myeloid_neoplasm,upper_gi,thyroid,non_cancer,sarcoma, multiple_myeloma,cervical

SEQ ID NO: 460839 - DNA, 7 bp, Homo sapiens
  chr19:11909951-11909958
  hyper
  head_and_neck vs. breast,pancreas_gallbladder,colorectal, prostate,lung,ovary,uterine,bladder_and_urothelial,renal, myeloid_neoplasm,upper_gi,thyroid,non_cancer,sarcoma, multiple_myeloma,cervical
aacaccc

SEQ ID NO: 460840 - DNA, 50 bp, Homo sapiens; identical to SEQ ID NO: 452986
  chr19:11959378-11959428
  hyper
  head_and_neck vs. ovary,uterine,myeloid_neoplasm, bladder_and_urothelial,non_cancer,renal,breast,prostate,lung

SEQ ID NO: 460841 - DNA, 14 bp, Homo sapiens
  chr19:11998456-11998470
  hyper
  head_and_neck vs. anorectal,colorectal, bladder_and_urothelial,pancreas_gallbladder,prostate,breast, lung,upper_gi,uterine,renal,multiple_myeloma,thyroid,non_cancer
cgcccttggaaaag

SEQ ID NO: 460842 - DNA, 172 bp, Homo sapiens; identical to SEQ ID NO: 352202
  chr19:11999219-11999391
  hyper
  head_and_neck vs. anorectal,colorectal, bladder_and_urothelial,pancreas_gallbladder,prostate,breast, lung,upper_gi,uterine,renal,multiple_myeloma,thyroid,non_cancer

SEQ ID NO: 460843 - DNA, 255 bp, Homo sapiens; identical to SEQ ID NO: 452987
  chr19:12075818-12076073
  hyper
  head_and_neck vs. bladder_and_urothelial,sarcoma, colorectal,prostate,uterine,ovary,multiple_myeloma,breast, non_cancer,myeloid_neoplasm,thyroid,lung,upper_gi, pancreas_gallbladder,renal,lymphoid_neoplasm,melanoma

SEQ ID NO: 460844 - DNA, 333 bp, Homo sapiens; identical to SEQ ID NO: 457683
  chr19:12098300-12098633
  hyper
  head_and_neck vs. breast,ovary,bladder_and_urothelial, colorectal,melanoma,prostate,lung,sarcoma

SEQ ID NO: 460845 - DNA, 31 bp, Homo sapiens; identical to SEQ ID NO: 452988
  chr19:12163025-12163056
  hyper
  head_and_neck vs. bladder_and_urothelial,ovary,breast, lung,sarcoma

SEQ ID NO: 460846 - DNA, 118 bp, Homo sapiens; identical to SEQ ID NO: 452989
  chr19:12163331-12163449
  hyper
  head_and_neck vs. bladder_and_urothelial,ovary,breast, lung,sarcoma

SEQ ID NO: 460847 - DNA, 16 bp, Homo sapiens
  chr19:12203656-12203672
  hyper
  head_and_neck vs. multiple_myeloma,sarcoma,breast, prostate,thyroid,myeloid_neoplasm,non_cancer,renal, bladder_and_urothelial,uterine
ctgaggtcaggagttc

SEQ ID NO: 460848 - DNA, 3 bp, Homo sapiens
  chr19:12266891-12266894
  hyper
  head_and_neck vs. bladder_and_urothelial,lung,sarcoma, breast
cga

SEQ ID NO: 460849 - DNA, 585 bp, Homo sapiens; identical to SEQ ID NO: 335975
  chr19:12444060-12444645
  hyper
  head_and_neck vs. anorectal

SEQ ID NO: 460850 - DNA, 262 bp, Homo sapiens; identical to SEQ ID NO: 452993
  chr19:19843330-19843592
  hyper
  head_and_neck vs. breast,uterine,melanoma,lung, bladder_and_urothelial,ovary,sarcoma,prostate

SEQ ID NO: 460851 - DNA, 47 bp, Homo sapiens; identical to SEQ ID NO: 352250
  chr19:19844044-19844091
  hyper
  head_and_neck vs. breast,uterine,melanoma,lung, bladder_and_urothelial,ovary,sarcoma,prostate

SEQ ID NO: 460852 - DNA, 694 bp, Homo sapiens; identical to SEQ ID NO: 452995
  chr19:19976556-19977250
  hyper
  head_and_neck vs. bladder_and_urothelial,lung

SEQ ID NO: 460853 - DNA, 35 bp, Homo sapiens; identical to SEQ ID NO: 345584
  chr19:19977294-19977329
  hyper
  head_and_neck vs. bladder_and_urothelial,lung

SEQ ID NO: 460854 - DNA, 69 bp, Homo sapiens; identical to SEQ ID NO: 347569
  chr19:20011652-20011721
  hyper
  head_and_neck vs. bladder_and_urothelial,breast,lung

SEQ ID NO: 460855 - DNA, 47 bp, Homo sapiens; identical to SEQ ID NO: 452998
  chr19:20011723-20011770
  hyper
  head_and_neck vs. bladder_and_urothelial,breast,lung

SEQ ID NO: 460856 - DNA, 54 bp, Homo sapiens; identical to SEQ ID NO: 457704
  chr19:20162601-20162655
  hyper
  head_and_neck vs. breast,sarcoma,prostate, bladder_and_urothelial,ovary,renal,uterine,lung, myeloid_neoplasm,non_cancer

SEQ ID NO: 460857 - DNA, 76 bp, Homo sapiens; identical to SEQ ID NO: 336043
  chr19:21512126-21512202
  hyper
  head_and_neck vs. lung,upper_gi,bladder_and_urothelial, liver_bileduct

SEQ ID NO: 460858 - DNA, 120 bp, Homo sapiens; identical to SEQ ID NO: 457706
  chr19:21541712-21541832
  hyper
  head_and_neck vs. bladder_and_urothelial

SEQ ID NO: 460859 - DNA, 173 bp, Homo sapiens; identical to SEQ ID NO: 457707
  chr19:21542078-21542251
  hyper
  head_and_neck vs. bladder_and_urothelial

SEQ ID NO: 460860 - DNA, 309 bp, Homo sapiens; identical to SEQ ID NO: 336046
  chr19:21579832-21580141
  hyper
  head_and_neck vs. upper_gi,lung,bladder_and_urothelial, prostate,pancreas_gallbladder,breast,colorectal,uterine, liver_bileduct,ovary

SEQ ID NO: 460861 - DNA, 104 bp, Homo sapiens; identical to SEQ ID NO: 457709
  chr19:21580233-21580337
  hyper
  head_and_neck vs. bladder_and_urothelial

SEQ ID NO: 460862 - DNA, 159 bp, Homo sapiens; identical to SEQ ID NO: 336048
  chr19:21688303-21688462
  hyper
  head_and_neck vs. breast,ovary,bladder_and_urothelial, prostate,uterine,lung,colorectal

SEQ ID NO: 460863 - DNA, 77 bp, Homo sapiens; identical to SEQ ID NO: 457711
  chr19:21688738-21688815
  hyper
  head_and_neck vs. bladder_and_urothelial,liver_bileduct, breast,lung,ovary,colorectal,uterine,pancreas_gallbladder, prostate

SEQ ID NO: 460864 - DNA, 24 bp, Homo sapiens
  chr19:21688893-21688917
  hyper
  head_and_neck vs. bladder_and_urothelial,liver_bileduct, breast,lung,ovary,colorectal,uterine,pancreas_gallbladder, prostate
gactcgggatgcgggttcatgagc

SEQ ID NO: 460865 - DNA, 18 bp, Homo sapiens
  chr19:22018891-22018909
  hyper
  head_and_neck vs. bladder_and_urothelial,prostate, melanoma,breast,lung,sarcoma,renal,uterine,myeloid_neoplasm, non_cancer,thyroid,multiple_myeloma
cgcaggtcacagagccac

SEQ ID NO: 460866 - DNA, 61 bp, Homo sapiens; identical to SEQ ID NO: 453000
  chr19:22019028-22019089
  hyper
  head_and_neck vs. bladder_and_urothelial,prostate, melanoma,breast,lung,sarcoma,renal,uterine,myeloid_neoplasm, non_cancer,thyroid,multiple_myeloma

SEQ ID NO: 460867 - DNA, 39 bp, Homo sapiens; identical to SEQ ID NO: 453006
  chr19:23577711-23577750
  hyper
  head_and_neck vs. lung

SEQ ID NO: 460868 - DNA, 68 bp, Homo sapiens; identical to SEQ ID NO: 336059
  chr19:23578240-23578308
  hyper
  head_and_neck vs. liver_bileduct,bladder_and_urothelial, lung,pancreas_gallbladder,colorectal,upper_gi

SEQ ID NO: 460869 - DNA, 702 bp, Homo sapiens; identical to SEQ ID NO: 453008
  chr19:24216103-24216805
  hyper
  head_and_neck vs. lung,bladder_and_urothelial,breast

SEQ ID NO: 460870 - DNA, 13 bp, Homo sapiens
  chr19:30019101-30019114
  hyper
  head_and_neck vs. ovary,prostate,bladder_and_urothelial, myeloid_neoplasm,thyroid,uterine
cggcaggtgtgca

SEQ ID NO: 460871 - DNA, 61 bp, Homo sapiens; identical to SEQ ID NO: 455841
  chr19:30718934-30718995
  hyper
  head_and_neck vs. melanoma,sarcoma,prostate, bladder_and_urothelial,thyroid,non_cancer,myeloid_neoplasm, ovary,uterine,lung,renal

SEQ ID NO: 460872 - DNA, 61 bp, Homo sapiens; identical to SEQ ID NO: 455841
  chr19:30718934-30718995
  hyper
  head_and_neck vs. melanoma,sarcoma,prostate,uterine, bladder_and_urothelial,renal,thyroid,myeloid_neoplasm,ovary, non_cancer

SEQ ID NO: 460873 - DNA, 4 bp, Homo sapiens
  chr19:36909065-36909069
  hyper
  head_and_neck vs. sarcoma,bladder_and_urothelial, prostate,breast,renal,myeloid_neoplasm,ovary,non_cancer, multiple_myeloma,lymphoid_neoplasm,melanoma,lung,thyroid
cgcc

SEQ ID NO: 460874 - DNA, 32 bp, Homo sapiens; identical to SEQ ID NO: 459521
  chr19:37095634-37095666
  hyper
  head_and_neck vs. breast,ovary,uterine,myeloid_neoplasm, sarcoma,bladder_and_urothelial

SEQ ID NO: 460875 - DNA, 105 bp, Homo sapiens; identical to SEQ ID NO: 347589
  chr19:37096594-37096699
  hyper
  head_and_neck vs. uterine,breast,prostate, myeloid_neoplasm,ovary,sarcoma

SEQ ID NO: 460876 - DNA, 42 bp, Homo sapiens; identical to SEQ ID NO: 453018
  chr19:37463952-37463994
  hyper
  head_and_neck vs. bladder_and_urothelial

SEQ ID NO: 460877 - DNA, 38 bp, Homo sapiens; identical to SEQ ID NO: 453024
  chr19:38182720-38182758
  hyper
  head_and_neck vs. sarcoma,prostate,breast,ovary, non_cancer,myeloid_neoplasm,multiple_myeloma,melanoma,thyroid, bladder_and_urothelial,uterine

SEQ ID NO: 460878 - DNA, 68 bp, Homo sapiens; identical to SEQ ID NO: 345595
  chr19:44711963-44712031
  hyper
  head_and_neck vs. pancreas_gallbladder,liver_bileduct, colorectal,upper_gi

SEQ ID NO: 460879 - DNA, 57 bp, Homo sapiens; identical to SEQ ID NO: 453034
  chr19:46929939-46929996
  hyper
  head_and_neck vs. ovary,uterine,non_cancer,thyroid, multiple_myeloma

SEQ ID NO: 460880 - DNA, 219 bp, Homo sapiens; identical to SEQ ID NO: 453035
  chr19:50553779-50553998
  hyper
  head_and_neck vs. bladder_and_urothelial,uterine

SEQ ID NO: 460881 - DNA, 77 bp, Homo sapiens; identical to SEQ ID NO: 336229
  chr19:51111319-51111396
  hyper
  head_and_neck vs. sarcoma

SEQ ID NO: 460882 - DNA, 71 bp, Homo sapiens; identical to SEQ ID NO: 457763
  chr19:51161615-51161686
  hyper
  head_and_neck vs. melanoma

SEQ ID NO: 460883 - DNA, 12 bp, Homo sapiens
  chr19:51925116-51925128
  hyper
  head_and_neck vs. bladder_and_urothelial
cgcaggtgcggc

SEQ ID NO: 460884 - DNA, 88 bp, Homo sapiens; identical to SEQ ID NO: 352381
  chr19:51925272-51925360
  hyper
  head_and_neck vs. bladder_and_urothelial

SEQ ID NO: 460885 - DNA, 78 bp, Homo sapiens; identical to SEQ ID NO: 453036
  chr19:52531282-52531360
  hyper
  head_and_neck vs. bladder_and_urothelial

SEQ ID NO: 460886 - DNA, 208 bp, Homo sapiens; identical to SEQ ID NO: 345609
  chr19:52531884-52532092
  hyper
  head_and_neck vs. bladder_and_urothelial

SEQ ID NO: 460887 - DNA, 8 bp, Homo sapiens
  chr19:52839404-52839412
  hyper
  head_and_neck vs. anorectal,bladder_and_urothelial, breast,prostate,sarcoma,ovary,melanoma,renal,uterine
cggaaaac

SEQ ID NO: 460888 - DNA, 1 bp, Homo sapiens
  chr19:53073241-53073242
  hyper
  head_and_neck vs. bladder_and_urothelial,melanoma,breast, sarcoma,ovary
c

SEQ ID NO: 460889 - DNA, 61 bp, Homo sapiens; identical to SEQ ID NO: 453044
  chr19:53141353-53141414
  hyper
  head_and_neck vs. breast,bladder_and_urothelial,prostate, ovary,uterine,pancreas_gallbladder,renal,lung,sarcoma, myeloid_neoplasm,non_cancer,thyroid

SEQ ID NO: 460890 - DNA, 819 bp, Homo sapiens; identical to SEQ ID NO: 453045
  chr19:53237625-53238444
  hyper
  head_and_neck vs. lung

SEQ ID NO: 460891 - DNA, 352 bp, Homo sapiens; identical to SEQ ID NO: 453047
  chr19:53445359-53445711
  hyper
  head_and_neck vs. lung

SEQ ID NO: 460892 - DNA, 231 bp, Homo sapiens; identical to SEQ ID NO: 352399
  chr19:53445822-53446053
  hyper
  head_and_neck vs. lung

SEQ ID NO: 460893 - DNA, 149 bp, Homo sapiens; identical to SEQ ID NO: 453049
  chr19:53465713-53465862
  hyper
  head_and_neck vs. lung

SEQ ID NO: 460894 - DNA, 105 bp, Homo sapiens
  chr19:53496055-53496160
  hyper
  head_and_neck vs. bladder_and_urothelial
cgagcagcagggcccggcacgaggagggagttagggggcgacggctccttaagacaagggtggggtctgcaggatcccaggaccaggcagaggatgcggcctcct

SEQ ID NO: 460895 - DNA, 35 bp, Homo sapiens; identical to SEQ ID NO: 352403
  chr19:53496405-53496440
  hyper
  head_and_neck vs. bladder_and_urothelial

SEQ ID NO: 460896 - DNA, 29 bp, Homo sapiens
  chr19:53496620-53496649
  hyper
  head_and_neck vs. bladder_and_urothelial
cgaaggaagaatggtagaaatttccaggt

SEQ ID NO: 460897 - DNA, 181 bp, Homo sapiens
  chr19:53497109-53497290
  hyper
  head_and_neck vs. bladder_and_urothelial
gcaaaccagaatgtgaaatgcaaagccctgcctgggcggaacgtattatttcatgctgacgaccacagaacagaatagaaatcctctccctttctattctccactcactcaagagggagagtccaccctgtgtcagcttcagagacttccctagagccaccgcctgggatgcgggatggag

SEQ ID NO: 460898 - DNA, 161 bp, Homo sapiens
  chr19:53635604-53635765
  hyper
  head_and_neck vs. bladder_and_urothelial
aggccctgagcacctccccagcgcgggctcaggggaggcctggggagcagcggggcccggcacgaggaggagggaggtggggcgcgacagcgccttcagacaggggtggggtctgcaggatcccaggaccaggcagaggacgcaaggctccccgggactgc

SEQ ID NO: 460899 - DNA, 102 bp, Homo sapiens
  chr19:53635784-53635886
  hyper
  head_and_neck vs. bladder_and_urothelial
cgctccaggggccgacgagggcaaggctgggaggcacccaggacgggaatacacctcttgggtgaagactttaaaaagcccggggatgggggagggggtcag

SEQ ID NO: 460900 - DNA, 17 bp, Homo sapiens
  chr19:53636091-53636108
  hyper
  head_and_neck vs. bladder_and_urothelial
cacagagggtcactcac

SEQ ID NO: 460901 - DNA, 119 bp, Homo sapiens
  chr19:53636110-53636229
  hyper
  head_and_neck vs. bladder_and_urothelial
tcgacgccgtcaccttcacccaacgcgatccgtttccgggcctgtaggaaactgcgcatgcgcggagagaagagcccgggcagcctgaaggaatggctggagtgggcggggtctgcgcc

SEQ ID NO: 460902 - DNA, 84 bp, Homo sapiens; identical to SEQ ID NO: 457782
  chr19:53696029-53696113
  hyper
  head_and_neck vs. ovary,breast

SEQ ID NO: 460903 - DNA, 198 bp, Homo sapiens; identical to SEQ ID NO: 457783
  chr19:53700110-53700308
  hyper
  head_and_neck vs. breast,ovary,bladder_and_urothelial

SEQ ID NO: 460904 - DNA, 16 bp, Homo sapiens
  chr19:53700699-53700715
  hyper
  head_and_neck vs. breast,ovary,bladder_and_urothelial
tttaagacggagtctc

SEQ ID NO: 460905 - DNA, 4 bp, Homo sapiens
  chr19:54409948-54409952
  hyper
  head_and_neck vs. renal,uterine,sarcoma, bladder_and_urothelial,prostate,multiple_myeloma,thyroid, non_cancer,lung
cgtc

SEQ ID NO: 460906 - DNA, 2 bp, Homo sapiens
  chr19:54411124-54411126
  hyper
  head_and_neck vs. bladder_and_urothelial,ovary
cg

SEQ ID NO: 460907 - DNA, 20 bp, Homo sapiens
  chr19:54411897-54411917
  hyper
  head_and_neck vs. bladder_and_urothelial,ovary
actccgctctgcgcccgccc

SEQ ID NO: 460908 - DNA, 85 bp, Homo sapiens; identical to SEQ ID NO: 457790
  chr19:54412564-54412649
  hyper
  head_and_neck vs. sarcoma,multiple_myeloma

SEQ ID NO: 460909 - DNA, 34 bp, Homo sapiens
  chr19:54485370-54485404
  hyper
  head_and_neck vs. cervical
cgccaacgcgggcgagccgggcccgaagcgggac

SEQ ID NO: 460910 - DNA, 124 bp, Homo sapiens; identical to SEQ ID NO: 361740
  chr19:54486197-54486321
  hyper
  head_and_neck vs. cervical

SEQ ID NO: 460911 - DNA, 546 bp, Homo sapiens; identical to SEQ ID NO: 336285
  chr19:55677520-55678066
  hyper
  head_and_neck vs. lung,anorectal,upper_gi,cervical

SEQ ID NO: 460912 - DNA, 25 bp, Homo sapiens
  chr19:55690206-55690231
  hyper
  head_and_neck vs. anorectal,ovary
cgacccgggatcccagccggatttt

SEQ ID NO: 460913 - DNA, 182 bp, Homo sapiens; identical to SEQ ID NO: 347636
  chr19:55691158-55691340
  hyper
  head_and_neck vs. ovary

SEQ ID NO: 460914 - DNA, 134 bp, Homo sapiens; identical to SEQ ID NO: 336290
  chr19:56112791-56112925
  hyper
  head_and_neck vs. multiple_myeloma,lymphoid_neoplasm, renal,uterine,melanoma,ovary,myeloid_neoplasm,colorectal,breast

SEQ ID NO: 460915 - DNA, 18 bp, Homo sapiens
  chr19:56915935-56915953
  hyper
  head_and_neck vs. prostate,myeloid_neoplasm,uterine, thyroid,non_cancer,sarcoma,breast,ovary,bladder_and_urothelial, lung
gtttgacagtgtggaatc

SEQ ID NO: 460916 - DNA, 61 bp, Homo sapiens; identical to SEQ ID NO: 361754
  chr19:57276931-57276992
  hyper
  head_and_neck vs. melanoma,bladder_and_urothelial

SEQ ID NO: 460917 - DNA, 2 bp, Homo sapiens
  chr19:58011548-58011550
  hyper
  head_and_neck vs. prostate,sarcoma,multiple_myeloma, ovary,non_cancer,myeloid_neoplasm,bladder_and_urothelial, thyroid,lung
cc

SEQ ID NO: 460918 - DNA, 11 bp, Homo sapiens
  chr19:58039267-58039278
  hyper
  head_and_neck vs. sarcoma,melanoma,prostate, myeloid_neoplasm,thyroid,breast,bladder_and_urothelial,uterine, non_cancer
cctgagcaacc

SEQ ID NO: 460919 - DNA, 31 bp, Homo sapiens; identical to SEQ ID NO: 453076
  chr19:58125385-58125416
  hyper
  head_and_neck vs. bladder_and_urothelial

SEQ ID NO: 460920 - DNA, 170 bp, Homo sapiens; identical to SEQ ID NO: 453077
  chr19:58144201-58144371
  hyper
  head_and_neck vs. bladder_and_urothelial

SEQ ID NO: 460921 - DNA, 210 bp, Homo sapiens; identical to SEQ ID NO: 453078
  chr19:58144745-58144955
  hyper
  head_and_neck vs. bladder_and_urothelial

SEQ ID NO: 460922 - DNA, 11 bp, Homo sapiens
  chr19:58144987-58144998
  hyper
  head_and_neck vs. bladder_and_urothelial
gacgggcaacc

SEQ ID NO: 460923 - DNA, 29 bp, Homo sapiens
  chr19:58239193-58239222
  hyper
  head_and_neck vs. prostate,melanoma,myeloid_neoplasm, thyroid,multiple_myeloma,sarcoma,lymphoid_neoplasm,non_cancer, renal,uterine
ccgagtttcaaagggctgacaggacttcc

SEQ ID NO: 460924 - DNA, 627 bp, Homo sapiens; identical to SEQ ID NO: 336321
  chr19:58258088-58258715
  hyper
  head_and_neck vs. lung,pancreas_gallbladder, liver_bileduct,upper_gi,bladder_and_urothelial

SEQ ID NO: 460925 - DNA, 39 bp, Homo sapiens
  chr19:58446258-58446297
  hyper
  head_and_neck vs. breast
cgcctcacacgttgttccctacaggcgcctgtggacccc

SEQ ID NO: 460926 - DNA, 4 bp, Homo sapiens
  chr2:10151899-10151903
  hyper
cgta

SEQ ID NO: 460927 - DNA, 2 bp, Homo sapiens
  chr2:10152022-10152024
  hyper
gc

SEQ ID NO: 460928 - DNA, 166 bp, Homo sapiens; identical to SEQ ID NO: 331200
  chr2:10152421-10152587
  hyper
  head_and_neck vs. liver_bileduct,anorectal,breast, lymphoid_neoplasm,uterine,prostate

SEQ ID NO: 460929 - DNA, 50 bp, Homo sapiens; identical to SEQ ID NO: 357135
  chr2:27165764-27165814
  hyper

SEQ ID NO: 460930 - DNA, 703 bp, Homo sapiens
  chr2:37899247-37899950
  hyper
  head_and_neck vs. anorectal,lung
cggtgacccgcagggaagcgaggccacctgagtgcgccgccccggccaggccgcagctccccaggtccctctcagcccgggctccggtgggcgcggagggggagggtcgcgttctgtcagtttctagctcgctcccctcagagctgcagccaaaacccggagagtggaataagcgccctgaagatgccggagctcccggctgagcaactggacacgcgacgaacagcagacgctacaggttctcctacccagagggaggcgtttcttctccctcagggtctttcaaaaggatttgcctaaagctggggcaagccggtggcggctgccccagacgcgcgacgaggcgcaagtggcgcagctgccggcccgagagagtaaaattcaggccgcggtggcacctgcgcccgccggtcacccggccaccgccagcgccgccgcccggcgcgcccctcccctccgccggggccggagcgtgaaccgggttaatgaatgctaattttcttaatcggcctccgtctcttcctcctccgcgagtcgtcggcctggggaaggagtaggcgacaggaaagggcggtgttttccggctgggaggtcccagcccgcatggtcagccaggggagggggctgggacccctgggagtcggacgctgggggcctggcctctgccctgagactctcgggttggatggaaatcctggcacaa

SEQ ID NO: 460931 - DNA, 60 bp, Homo sapiens; identical to SEQ ID NO: 357152
  chr2:37899997-37900057
  hyper
  head_and_neck vs. anorectal,lung

SEQ ID NO: 460932 - DNA, 542 bp, Homo sapiens; identical to SEQ ID NO: 453098
  chr2:60783811-60784353
  hyper
  head_and_neck vs. upper_gi,colorectal,uterine, bladder_and_urothelial,ovary,pancreas_gallbladder,cervical

SEQ ID NO: 460933 - DNA, 77 bp, Homo sapiens; identical to SEQ ID NO: 346438
  chr2:60784505-60784582
  hyper
  head_and_neck vs. upper_gi,colorectal,uterine, bladder_and_urothelial,ovary,pancreas_gallbladder,cervical

SEQ ID NO: 460934 - DNA, 234 bp, Homo sapiens; identical to SEQ ID NO: 453100
  chr2:60784119-60784353
  hyper
  head_and_neck vs. upper_gi,colorectal, bladder_and_urothelial,uterine,cervical

SEQ ID NO: 460935 - DNA, 373 bp, Homo sapiens; identical to SEQ ID NO: 349503
  chr2:60784505-60784878
  hyper
  head_and_neck vs. upper_gi,colorectal, bladder_and_urothelial,uterine,cervical

SEQ ID NO: 460936 - DNA, 2 bp, Homo sapiens
  chr2:64836206-64836208
  hyper
  head_and_neck vs. pancreas_gallbladder,cervical, multiple_myeloma,ovary,uterine,non_cancer,myeloid_neoplasm, thyroid,upper_gi,breast,renal,liver_bileduct, bladder_and_urothelial,lymphoid_neoplasm
cg

SEQ ID NO: 460937 - DNA, 318 bp, Homo sapiens; identical to SEQ ID NO: 454321
  chr2:70351179-70351497
  hyper
  head_and_neck vs. cervical

SEQ ID NO: 460938 - DNA, 236 bp, Homo sapiens; identical to SEQ ID NO: 346442
  chr2:70351563-70351799
  hyper
  head_and_neck vs. cervical

SEQ ID NO: 460939 - DNA, 192 bp, Homo sapiens
  chr2:74740324-74740516
  hyper
  head_and_neck vs. multiple_myeloma
cgttggtgcccacccgccaccgccaccgcaggatggtagaagcgcccccctctctgagcccagtctcaccggctcagaggcgccagggcccccccgggggccggggcgggccggggaaggtaatgtaattccggcccagctaacccgattaccgcggcctgcaccgggcagggcggcggcgggggcgggtct

SEQ ID NO: 460940 - DNA, 236 bp, Homo sapiens; identical to SEQ ID NO: 453103
  chr2:74781700-74781936
  hyper
  head_and_neck vs. upper_gi,colorectal, pancreas_gallbladder,lymphoid_neoplasm,renal,uterine, multiple_myeloma,myeloid_neoplasm,ovary,thyroid,non_cancer, cervical,sarcoma

SEQ ID NO: 460941 - DNA, 123 bp, Homo sapiens; identical to SEQ ID NO: 453104
  chr2:74782349-74782472
  hyper
  head_and_neck vs. upper_gi,colorectal, pancreas_gallbladder,lymphoid_neoplasm,renal,uterine, multiple_myeloma,myeloid_neoplasm,ovary,thyroid,non_cancer, cervical,sarcoma

SEQ ID NO: 460942 - DNA, 265 bp, Homo sapiens
  chr2:79739586-79739851
  hyper
  head_and_neck vs. lung
cgcggcagtcactacctttgcagcactctggccctgccctcctcctgccacgtgtcggacccctgctgggctggccctcctttcctactctgcgacacccctatcccccccgcccctatcctgcccgctcccgcacccggtccctctccccgggcctcgcgactccggcgattcagctccgggtccccgcccgcagggtaacgcggttgtcatggacacggcacctgcgccctacggcggtgccccttcgccgccgtcccctccc

SEQ ID NO: 460943 - DNA, 490 bp, Homo sapiens
  chr2:80530839-80531329
  hyper
  head_and_neck vs. anorectal
ggcggcgggcagcatctgaaagcaggcccccagcagacacaagaccacccccgagggcctcctcagcagccagtatagacagagaccgagcagcaggaaatccattagcgagaatctttccagagagactggagaatgtccattggaagcgctcggtcagaaatctacatcatattttattccgagggaggggaagcgggggagggggagaaaagggcaaaaaatcaaataaatacatagaaataaagaaggacccccctccccaaaaaccacacgttcacctctaagcatgcagaaagctgggcagcatagaaagttcacagccacggaaagatcaaagagatggtgatttggtccatgttagatgctgcagcaaagaaaagggaggaaaaaaaaaatcttcgggaaagaatttaattaaaaagtgtcttacccacccttttccagagagtgacaacctccattcagctgctccctttgtgtgcaggct

SEQ ID NO: 460944 - DNA, 78 bp, Homo sapiens
  chr2:85360795-85360873
  hyper
  head_and_neck vs. anorectal
cgcggccccaccatgccccagctcggcggcgggggcggcggcggcggcggcggcagcgggggaggcggcggctccagc

SEQ ID NO: 460945 - DNA, 6 bp, Homo sapiens
  chr2:85361628-85361634
  hyper
  head_and_neck vs. anorectal
gccccc

SEQ ID NO: 460946 - DNA, 144 bp, Homo sapiens; identical to SEQ ID NO: 345031
  chr2:105471069-105471213
  hyper
  head_and_neck vs. melanoma

SEQ ID NO: 460947 - DNA, 338 bp, Homo sapiens; identical to SEQ ID NO: 453108
  chr2:105489278-105489616
  hyper
  head_and_neck vs. ovary,uterine,multiple_myeloma,lung, breast,prostate,bladder_and_urothelial

SEQ ID NO: 460948 - DNA, 338 bp, Homo sapiens; identical to SEQ ID NO: 453108
  chr2:105489278-105489616
  hyper
  head_and_neck vs. lung,bladder_and_urothelial,breast, colorectal,pancreas_gallbladder,ovary,uterine,prostate,sarcoma, multiple_myeloma

SEQ ID NO: 460949 - DNA, 112 bp, Homo sapiens; identical to SEQ ID NO: 345033
  chr2:105490035-105490147
  hyper
  head_and_neck vs. lung,bladder_and_urothelial,breast, colorectal,pancreas_gallbladder,ovary,uterine,prostate,sarcoma, multiple_myeloma

SEQ ID NO: 460950 - DNA, 6 bp, Homo sapiens
  chr2:114034670-114034676
  hyper
  head_and_neck vs. cervical
cgcgcc

SEQ ID NO: 460951 - DNA, 34 bp, Homo sapiens
  chr2:114035443-114035477
  hyper
  head_and_neck vs. cervical
ggctcccgggcccgggaccaccggctccattgcc

SEQ ID NO: 460952 - DNA, 31 bp, Homo sapiens; identical to SEQ ID NO: 453113
  chr2:118981062-118981093
  hyper
  head_and_neck vs. non_cancer,myeloid_neoplasm, multiple_myeloma,thyroid,prostate

SEQ ID NO: 460953 - DNA, 49 bp, Homo sapiens; identical to SEQ ID NO: 453114
  chr2:127782995-127783044
  hyper
  head_and_neck vs. lung,renal,thyroid

SEQ ID NO: 460954 - DNA, 2 bp, Homo sapiens
  chr2:131792026-131792028
  hyper
  head_and_neck vs. anorectal
cg

SEQ ID NO: 460955 - DNA, 136 bp, Homo sapiens; identical to SEQ ID NO: 457861
  chr2:131792037-131792173
  hyper
  head_and_neck vs. anorectal

SEQ ID NO: 460956 - DNA, 95 bp, Homo sapiens; identical to SEQ ID NO: 457879
  chr2:162930102-162930197
  hyper
  head_and_neck vs. colorectal,pancreas_gallbladder, upper_gi,uterine,lung,thyroid,renal

SEQ ID NO: 460957 - DNA, 263 bp, Homo sapiens; identical to SEQ ID NO: 457880
  chr2:162930659-162930922
  hyper
  head_and_neck vs. colorectal,pancreas_gallbladder, upper_gi,uterine,lung,thyroid,renal

SEQ ID NO: 460958 - DNA, 178 bp, Homo sapiens; identical to SEQ ID NO: 349622
  chr2:171671978-171672156
  hyper
  head_and_neck vs. multiple_myeloma,breast,renal

SEQ ID NO: 460959 - DNA, 86 bp, Homo sapiens; identical to SEQ ID NO: 453138
  chr2:173099596-173099682
  hyper
  head_and_neck vs. colorectal,pancreas_gallbladder, upper_gi,ovary,uterine,thyroid,sarcoma,myeloid_neoplasm, non_cancer,prostate

SEQ ID NO: 460960 - DNA, 85 bp, Homo sapiens; identical to SEQ ID NO: 453139
  chr2:176975945-176976030
  hyper
  head_and_neck vs. renal,multiple_myeloma, myeloid_neoplasm,thyroid,uterine,colorectal,breast

SEQ ID NO: 460961 - DNA, 25 bp, Homo sapiens
  chr2:176986474-176986499
  hyper
  head_and_neck vs. anorectal
cgaaccgcgcgaagcggccctgccc

SEQ ID NO: 460962 - DNA, 22 bp, Homo sapiens
  chr2:177001081-177001103
  hyper
  head_and_neck vs. anorectal,colorectal,cervical, bladder_and_urothelial,sarcoma
cgggggagagagaaagcagaag

SEQ ID NO: 460963 - DNA, 40 bp, Homo sapiens; identical to SEQ ID NO: 346500
  chr2:177005679-177005719
  hyper
  head_and_neck vs. anorectal,bladder_and_urothelial

SEQ ID NO: 460964 - DNA, 5 bp, Homo sapiens
  chr2:182321353-182321358
  hyper
  head_and_neck vs. multiple_myeloma,lymphoid_neoplasm, myeloid_neoplasm,non_cancer,sarcoma
cgtgg

SEQ ID NO: 460965 - DNA, 34 bp, Homo sapiens; identical to SEQ ID NO: 345053
  chr2:182323095-182323129
  hyper
  head_and_neck vs. thyroid,myeloid_neoplasm,non_cancer, lymphoid_neoplasm,multiple_myeloma

SEQ ID NO: 460966 - DNA, 72 bp, Homo sapiens; identical to SEQ ID NO: 453142
  chr2:182818959-182819031
  hyper
  head_and_neck vs. renal,lymphoid_neoplasm,prostate, multiple_myeloma

SEQ ID NO: 460967 - DNA, 197 bp, Homo sapiens; identical to SEQ ID NO: 357433
  chr2:200329745-200329942
  hyper
  head_and_neck vs. anorectal

SEQ ID NO: 460968 - DNA, 129 bp, Homo sapiens; identical to SEQ ID NO: 455910
  chr2:219735657-219735786
  hyper
  head_and_neck vs. myeloid_neoplasm,thyroid,non_cancer, renal,multiple_myeloma

SEQ ID NO: 460969 - DNA, 139 bp, Homo sapiens
  chr2:222435635-222435774
  hyper
  head_and_neck vs. lung
cggatggacggacggatagatagatggatgccggaaaggagaagaatgagagacggatgtgagactagatgcacgcaggccagagcaccagcatacgctggaacagagcacgagcatacactcgaacacacgcgcacac

SEQ ID NO: 460970 - DNA, 2 bp, Homo sapiens
  chr2:222435863-222435865
  hyper
  head_and_neck vs. lung
gc

SEQ ID NO: 460971 - DNA, 360 bp, Homo sapiens; identical to SEQ ID NO: 453149
  chr2:234474820-234475180
  hyper
  head_and_neck vs. liver_bileduct,upper_gi,colorectal, pancreas_gallbladder

SEQ ID NO: 460972 - DNA, 102 bp, Homo sapiens; identical to SEQ ID NO: 349707
  chr2:234475503-234475605
  hyper
  head_and_neck vs. liver_bileduct,upper_gi,colorectal, pancreas_gallbladder

SEQ ID NO: 460973 - DNA, 4 bp, Homo sapiens
  chr2:239757293-239757297
  hyper
  head_and_neck vs. anorectal
cgtg

SEQ ID NO: 460974 - DNA, 7 bp, Homo sapiens
  chr20:291046-291053
  hyper
  head_and_neck vs. sarcoma,ovary,multiple_myeloma, myeloid_neoplasm,uterine,thyroid,non_cancer,renal,cervical, melanoma
cgccggc

SEQ ID NO: 460975 - DNA, 47 bp, Homo sapiens; identical to SEQ ID NO: 457908
  chr20:708554-708601
  hyper
  head_and_neck vs. ovary

SEQ ID NO: 460976 - DNA, 52 bp, Homo sapiens; identical to SEQ ID NO: 457909
  chr20:708851-708903
  hyper
  head_and_neck vs. ovary

SEQ ID NO: 460977 - DNA, 460 bp, Homo sapiens; identical to SEQ ID NO: 375005
  chr20:708944-709404
  hyper
  head_and_neck vs. ovary

SEQ ID NO: 460978 - DNA, 17 bp, Homo sapiens
  chr20:2668754-2668771
  hyper
  head_and_neck vs. bladder_and_urothelial
cggggatctgacaggaa

SEQ ID NO: 460979 - DNA, 143 bp, Homo sapiens; identical to SEQ ID NO: 294514
  chr20:2820861-2821004
  hyper
  head_and_neck vs. lung,breast,renal,pancreas_gallbladder, uterine,prostate,liver_bileduct

SEQ ID NO: 460980 - DNA, 127 bp, Homo sapiens
  chr20:9048369-9048496
  hyper
  head_and_neck vs. bladder_and_urothelial
cggaccggctcaggcggctgagcatgcctagtgcagctgcgagcatggccccagtccccaatgcgcaggtgccacgtctccgggttttggtggccgccggccgggagaaggaggaggcggagtgggg

SEQ ID NO: 460981 - DNA, 632 bp, Homo sapiens
  chr20:9048532-9049164
  hyper
  head_and_neck vs. bladder_and_urothelial
gtgagggtccacacaagggtgatgccagaccgaacaccattagggcctgggtgtgagtgtgactcggaggcacctgggggccgttgtagggccgggaaaagccaggaactggctggagcagcaccccagcatcccagggaccaaagtctgggggatttgcatgtctgaggttgcacttgtgggaagactttttggaaccacttaatctctgtggctctgtgtaagacccgcgaaataaaaagaggcagtagtactctttggaagattgttttagggattaaatgaataaaaagcgtttagaacactgcaggacgcattgtaggcgctgtatgggtttatgaaaccgaatataaacaaataagcacgtcccccacccagccaacggctttgggggccccgttctggccagtcctgagcccctccacacggcccacggcgggctgcgggtctcccatccgaggagggtgccgcttttctgcccccgctccctgggttctgcgcccagcgccatcccgtgcgcccccgacccttgggcatggggcacatgccgcggggagccgccagggagaccccagaggagcgcgccgcgggccggcttccccggatgccccacccacctcctcttggcgctg

SEQ ID NO: 460982 - DNA, 35 bp, Homo sapiens
  chr20:9049238-9049273
  hyper
  head_and_neck vs. bladder_and_urothelial
gccctgcgggctcgcggcaactgggcggccggccc

SEQ ID NO: 460983 - DNA, 339 bp, Homo sapiens
  chr20:9048825-9049164
  hyper
  head_and_neck vs. lung
cgtttagaacactgcaggacgcattgtaggcgctgtatgggtttatgaaaccgaatataaacaaataagcacgtcccccacccagccaacggctttgggggccccgttctggccagtcctgagcccctccacacggcccacggcgggctgcgggtctcccatccgaggagggtgccgcttttctgcccccgctccctgggttctgcgcccagcgccatcccgtgcgcccccgacccttgggcatggggcacatgccgcggggagccgccagggagaccccagaggagcgcgccgcgggccggcttccccggatgccccacccacctcctcttggcgctg

SEQ ID NO: 460984 - DNA, 230 bp, Homo sapiens
  chr20:9049238-9049468
  hyper
  head_and_neck vs. lung
gccctgcgggctcgcggcaactgggcggccggcccggcccctgcccacccccagcccagcccggcgcgccgcactgggcatgctccgtagcctgggcaggttggggctgcgaggcgacagctcgggctctggagccgggaggcgagaacgaggagggaggctcgggggcaggggaggaggaagcggctggccgctgaggggcggcggggcccggagcgggggacgcgcag

SEQ ID NO: 460985 - DNA, 111 bp, Homo sapiens; identical to SEQ ID NO: 361813
  chr20:9049670-9049781
  hyper
  head_and_neck vs. lung

SEQ ID NO: 460986 - DNA, 148 bp, Homo sapiens; identical to SEQ ID NO: 336377
  chr20:20343543-20343691
  hyper
  head_and_neck vs. colorectal,ovary,lung,upper_gi, prostate,uterine

SEQ ID NO: 460987 - DNA, 259 bp, Homo sapiens; identical to SEQ ID NO: 453164
  chr20:22558283-22558542
  hyper
  head_and_neck vs. pancreas_gallbladder

SEQ ID NO: 460988 - DNA, 227 bp, Homo sapiens; identical to SEQ ID NO: 375061
  chr20:22558696-22558923
  hyper
  head_and_neck vs. pancreas_gallbladder

SEQ ID NO: 460989 - DNA, 201 bp, Homo sapiens
  chr20:22563363-22563564
  hyper
  head_and_neck vs. cervical
cgagatgtacgagtagggcggctttgcgtgcgtgtagctgcgcctgtaggtcttggggtcgcgggcgcggctcaggcccgcctgcccgtacatggggctcatggagttcatgttggcgtagggggccaggccgcccatggccccggccgcctgccccccgagcgggctcaggctgggactcaagtgcggccccatgcccgc

SEQ ID NO: 460990 - DNA, 35 bp, Homo sapiens
  chr20:22563602-22563637
  hyper
  head_and_neck vs. cervical
tggcgcccgcgccgggggacatccccgccagggac

SEQ ID NO: 460991 - DNA, 102 bp, Homo sapiens
  chr20:22563663-22563765
  hyper
  head_and_neck vs. cervical
cgacatgttcatggagcccgcgctcatgttgcccgagccgctgcccatggcggccgccgacatgctcatgtacgtgttcatgccgttcatccccaggccggc

SEQ ID NO: 460992 - DNA, 361 bp, Homo sapiens
  chr20:22563794-22564155
  hyper
  head_and_neck vs. cervical
gcggacagagccccgggagggaggcgacagcgttagcaccgcggctggagggtgcccagacctcccacccaccgcccaggcctccgcgtccggggaggcctccggggagccctttcgtccccgatggcccagtctccggactccgagtctgtttcattcagggagagtcatgatcgatcgcccttgggaaggtggcgagcggattgctgcttgggcatgtggcccgttcctagcccttctccacctcgcccagattctagaacaggggtcccatggagtactcccaagccagcaccccaaatacattcccctaccccagagtctccccaaactctcccaccagcatactgagctggcgccg

SEQ ID NO: 460993 - DNA, 48 bp, Homo sapiens
  chr20:22564188-22564236
  hyper
  head_and_neck vs. cervical
cagcaagcaacctgcgggacaacgcgcggggcgcctcgggctgcctcc

SEQ ID NO: 460994 - DNA, 1 bp, Homo sapiens
  chr20:22564265-22564266
  hyper
  head_and_neck vs. cervical
c

SEQ ID NO: 460995 - DNA, 1 bp, Homo sapiens
  chr20:22567354-22567355
  hyper
  head_and_neck vs. pancreas_gallbladder,upper_gi
c

SEQ ID NO: 460996 - DNA, 67 bp, Homo sapiens; identical to SEQ ID NO: 453167
  chr20:22567768-22567835
  hyper
  head_and_neck vs. pancreas_gallbladder,upper_gi

SEQ ID NO: 460997 - DNA, 62 bp, Homo sapiens; identical to SEQ ID NO: 453168
  chr20:30639044-30639106
  hyper
  head_and_neck vs. multiple_myeloma,thyroid,non_cancer

SEQ ID NO: 460998 - DNA, 139 bp, Homo sapiens; identical to SEQ ID NO: 453169
  chr20:30639494-30639633
  hyper
  head_and_neck vs. multiple_myeloma,thyroid,non_cancer

SEQ ID NO: 460999 - DNA, 33 bp, Homo sapiens; identical to SEQ ID NO: 361871
  chr20:36793833-36793866
  hyper
  head_and_neck vs. lung

SEQ ID NO: 461000 - DNA, 48 bp, Homo sapiens
  chr20:43729515-43729563
  hyper
  head_and_neck vs. pancreas_gallbladder,cervical
cgggaccgtcccggagccacgtccctccccaaaggaggccccttacct

SEQ ID NO: 461001 - DNA, 33 bp, Homo sapiens
  chr20:44879699-44879732
  hyper
  head_and_neck vs. bladder_and_urothelial
cgtgcccgtgtactcctctaccacgaagaactg

SEQ ID NO: 461002 - DNA, 180 bp, Homo sapiens; identical to SEQ ID NO: 336458
  chr20:45825086-45825266
  hyper

SEQ ID NO: 461003 - DNA, 115 bp, Homo sapiens; identical to SEQ ID NO: 345644
  chr20:58514400-58514515
  hyper
  head_and_neck vs. colorectal,pancreas_gallbladder, lymphoid_neoplasm,renal,sarcoma,uterine,prostate

SEQ ID NO: 461004 - DNA, 31 bp, Homo sapiens
  chr21:38119724-38119755
  hyper
  head_and_neck vs. cervical,liver_bileduct,renal
cgtgtattacttaacaggcattccacctgtt

SEQ ID NO: 461005 - DNA, 2 bp, Homo sapiens
  chr21:38120712-38120714
  hyper
  head_and_neck vs. cervical,liver_bileduct,renal
cc

SEQ ID NO: 461006 - DNA, 45 bp, Homo sapiens
  chr21:39047626-39047671
  hyper
  head_and_neck vs. bladder_and_urothelial, pancreas_gallbladder,melanoma,lung,sarcoma,liver_bileduct, prostate,uterine
cggggatttttccgcgagtggctgcattggctttaagaaactgcg

SEQ ID NO: 461007 - DNA, 137 bp, Homo sapiens; identical to SEQ ID NO: 453177
  chr22:22862472-22862609
  hyper
  head_and_neck vs. uterine,prostate,myeloid_neoplasm, multiple_myeloma,lymphoid_neoplasm,non_cancer,melanoma,ovary, colorectal

SEQ ID NO: 461008 - DNA, 171 bp, Homo sapiens; identical to SEQ ID NO: 453187
  chr22:29550509-29550680
  hyper
  head_and_neck vs. pancreas_gallbladder,liver_bileduct, upper_gi,colorectal

SEQ ID NO: 461009 - DNA, 14 bp, Homo sapiens
  chr22:29550707-29550721
  hyper
  head_and_neck vs. pancreas_gallbladder,liver_bileduct, upper_gi,colorectal
cagcgcggtgatgc

SEQ ID NO: 461010 - DNA, 82 bp, Homo sapiens
  chr22:32571858-32571940
  hyper
  head_and_neck vs. sarcoma
cgacttggggagggcggacggcaggaaacgcgggaggcgaaggcgaggctgctcagcggcggctcgggatgcctccagcaac

SEQ ID NO: 461011 - DNA, 14 bp, Homo sapiens
  chr22:42354024-42354038
  hyper
  head_and_neck vs. lymphoid_neoplasm,multiple_myeloma, pancreas_gallbladder,upper_gi
gcctgggccctccc

SEQ ID NO: 461012 - DNA, 1 bp, Homo sapiens
  chr22:42679388-42679389
  hyper
  head_and_neck vs. bladder_and_urothelial
c

SEQ ID NO: 461013 - DNA, 10 bp, Homo sapiens
  chr22:46262409-46262419
  hyper
  head_and_neck vs. cervical
cgggtgctgg

SEQ ID NO: 461014 - DNA, 59 bp, Homo sapiens; identical to SEQ ID NO: 453192
  chr22:50170525-50170584
  hyper
  head_and_neck vs. ovary,melanoma,liver_bileduct, multiple_myeloma

SEQ ID NO: 461015 - DNA, 559 bp, Homo sapiens; identical to SEQ ID NO: 453194
  chr3:32433054-32433613
  hyper
  head_and_neck vs. bladder_and_urothelial, pancreas_gallbladder,lung,ovary,upper_gi,liver_bileduct,uterine, colorectal,multiple_myeloma,renal

SEQ ID NO: 461016 - DNA, 180 bp, Homo sapiens; identical to SEQ ID NO: 453195
  chr3:32433665-32433845
  hyper
  head_and_neck vs. bladder_and_urothelial, pancreas_gallbladder,lung,ovary,upper_gi,liver_bileduct,uterine, colorectal,multiple_myeloma,renal

SEQ ID NO: 461017 - DNA, 247 bp, Homo sapiens; identical to SEQ ID NO: 453196
  chr3:32433366-32433613
  hyper
  head_and_neck vs. pancreas_gallbladder, bladder_and_urothelial,ovary,upper_gi,lung,uterine, liver_bileduct,colorectal,multiple_myeloma,renal

SEQ ID NO: 461018 - DNA, 201 bp, Homo sapiens; identical to SEQ ID NO: 453197
  chr3:32433665-32433866
  hyper
  head_and_neck vs. pancreas_gallbladder, bladder_and_urothelial,ovary,upper_gi,lung,uterine, liver_bileduct,colorectal,multiple_myeloma,renal

SEQ ID NO: 461019 - DNA, 81 bp, Homo sapiens; identical to SEQ ID NO: 345086
  chr3:32434068-32434149
  hyper
  head_and_neck vs. pancreas_gallbladder, bladder_and_urothelial,ovary,upper_gi,lung,uterine, liver_bileduct,colorectal,multiple_myeloma,renal

SEQ ID NO: 461020 - DNA, 14 bp, Homo sapiens
  chr3:35680722-35680736
  hyper
  head_and_neck vs. ovary
cgcgggcgcccggc

SEQ ID NO: 461021 - DNA, 64 bp, Homo sapiens; identical to SEQ ID NO: 349753
  chr3:35681641-35681705
  hyper
  head_and_neck vs. ovary

SEQ ID NO: 461022 - DNA, 50 bp, Homo sapiens; identical to SEQ ID NO: 331738
  chr3:39250115-39250165
  hyper
  head_and_neck vs. upper_gi,pancreas_gallbladder, colorectal,bladder_and_urothelial

SEQ ID NO: 461023 - DNA, 225 bp, Homo sapiens; identical to SEQ ID NO: 370126
  chr3:62861325-62861550
  hyper
  head_and_neck vs. melanoma

SEQ ID NO: 461024 - DNA, 28 bp, Homo sapiens
  chr3:116163681-116163709
  hyper
  head_and_neck vs. lung
cgtgtagacgcgcgcagcagaaaagttg

SEQ ID NO: 461025 - DNA, 302 bp, Homo sapiens; identical to SEQ ID NO: 349804
  chr3:116163989-116164291
  hyper
  head_and_neck vs. lung

SEQ ID NO: 461026 - DNA, 60 bp, Homo sapiens; identical to SEQ ID NO: 229708
  chr3:120627258-120627318
  hyper
  head_and_neck vs. anorectal

SEQ ID NO: 461027 - DNA, 1 bp, Homo sapiens
  chr3:120628011-120628012
  hyper
  head_and_neck vs. anorectal
c

SEQ ID NO: 461028 - DNA, 30 bp, Homo sapiens; identical to SEQ ID NO: 453214
  chr3:130064848-130064878
  hyper
  head_and_neck vs. sarcoma

SEQ ID NO: 461029 - DNA, 36 bp, Homo sapiens; identical to SEQ ID NO: 453216
  chr3:136751341-136751377
  hyper
  head_and_neck vs. ovary,multiple_myeloma

SEQ ID NO: 461030 - DNA, 192 bp, Homo sapiens; identical to SEQ ID NO: 458012
  chr3:137480764-137480956
  hyper
  head_and_neck vs. sarcoma,multiple_myeloma,breast

SEQ ID NO: 461031 - DNA, 357 bp, Homo sapiens
  chr3:137480764-137481121
  hyper
  head_and_neck vs. sarcoma
gtcggggggtcagctggcgccctgcccaccatcgaacgcccttcgtatcactccgctcctcattgcgaattggactgcgcattggctgcgacccaaggctgaacacaagaagcttggagaggagctcgggcgtttgaggagaaggaaatatgaggaattgcaggaaggcgctcgcctgcccgaactgcctccgggcaactggaaaggattgtcctggaaactgagaggagagaaaggacgtaggaccttgtgccagatccccttgctgagtaatttccaagagcttggtttgcattaacccagaactttgggtgtgcgtttggtgtcccctggggggttctagagtgagagattggc

SEQ ID NO: 461032 - DNA, 269 bp, Homo sapiens; identical to SEQ ID NO: 331913
  chr3:150481645-150481914
  hyper
  head_and_neck vs. cervical,liver_bileduct

SEQ ID NO: 461033 - DNA, 64 bp, Homo sapiens; identical to SEQ ID NO: 453219
  chr3:154797121-154797185
  hyper
  head_and_neck vs. lung,melanoma,ovary, bladder_and_urothelial,sarcoma,prostate,renal,liver_bileduct

SEQ ID NO: 461034 - DNA, 121 bp, Homo sapiens; identical to SEQ ID NO: 453220
  chr3:154797214-154797335
  hyper
  head_and_neck vs. lung,melanoma,ovary, bladder_and_urothelial,sarcoma,prostate,renal,liver_bileduct

SEQ ID NO: 461035 - DNA, 4 bp, Homo sapiens
  chr3:157812151-157812155
  hyper
  head_and_neck vs. non_cancer,thyroid,prostate, multiple_myeloma
cgca

SEQ ID NO: 461036 - DNA, 194 bp, Homo sapiens
  chr3:157821711-157821905
  hyper
  head_and_neck vs. myeloid_neoplasm,prostate,non_cancer
gtccttctcctccctttaaaaacaggagctcttctagtgtgagcatatacagccaccatatatatatccccctggaacctttatcctctgcgcccgaatcagagactccgggttttaagaagtcaaagctgagtttagatagtcgaggctgtttgcagttcttcccagcgcaggatccaggccagcatgggtgt

SEQ ID NO: 461037 - DNA, 23 bp, Homo sapiens
  chr3:157822008-157822031
  hyper
  head_and_neck vs. myeloid_neoplasm,prostate,non_cancer
gaacctcgccgtcaggcgcgctg

SEQ ID NO: 461038 - DNA, 140 bp, Homo sapiens; identical to SEQ ID NO: 349857
  chr3:157825408-157825548
  hyper
  head_and_neck vs. thyroid,bladder_and_urothelial, colorectal,uterine,myeloid_neoplasm

SEQ ID NO: 461039 - DNA, 271 bp, Homo sapiens; identical to SEQ ID NO: 349862
  chr3:169379645-169379916
  hyper
  head_and_neck vs. upper_gi,colorectal, pancreas_gallbladder

SEQ ID NO: 461040 - DNA, 87 bp, Homo sapiens; identical to SEQ ID NO: 453229
  chr3:179754092-179754179
  hyper
  head_and_neck vs. sarcoma,prostate

SEQ ID NO: 461041 - DNA, 207 bp, Homo sapiens; identical to SEQ ID NO: 453230
  chr3:180397104-180397311
  hyper
  head_and_neck vs. lung

SEQ ID NO: 461042 - DNA, 98 bp, Homo sapiens; identical to SEQ ID NO: 453231
  chr3:181421152-181421250
  hyper
  head_and_neck vs. myeloid_neoplasm,thyroid,non_cancer, prostate,cervical

SEQ ID NO: 461043 - DNA, 48 bp, Homo sapiens; identical to SEQ ID NO: 454385
  chr3:181444767-181444815
  hyper
  head_and_neck vs. anorectal

SEQ ID NO: 461044 - DNA, 809 bp, Homo sapiens; identical to SEQ ID NO: 345120
  chr3:183165024-183165833
  hyper
  head_and_neck vs. liver_bileduct,bladder_and_urothelial, lung,ovary,melanoma,renal,uterine,prostate,multiple_myeloma, pancreas_gallbladder,lymphoid_neoplasm,colorectal,non_cancer, upper_gi

SEQ ID NO: 461045 - DNA, 253 bp, Homo sapiens; identical to SEQ ID NO: 357777
  chr3:184322331-184322584
  hyper
  head_and_neck vs. ovary

SEQ ID NO: 461046 - DNA, 3 bp, Homo sapiens
  chr3:186078710-186078713
  hyper
  head_and_neck vs. thyroid,non_cancer,sarcoma,prostate, lymphoid_neoplasm
cgt

SEQ ID NO: 461047 - DNA, 133 bp, Homo sapiens; identical to SEQ ID NO: 453234
  chr3:186079331-186079464
  hyper
  head_and_neck vs. thyroid,non_cancer,sarcoma,prostate, lymphoid_neoplasm

SEQ ID NO: 461048 - DNA, 291 bp, Homo sapiens; identical to SEQ ID NO: 453235
  chr3:186079331-186079622
  hyper
  head_and_neck vs. myeloid_neoplasm,prostate,thyroid, lymphoid_neoplasm,non_cancer,multiple_myeloma,sarcoma,breast, ovary,uterine

SEQ ID NO: 461049 - DNA, 125 bp, Homo sapiens; identical to SEQ ID NO: 453236
  chr3:186079497-186079622
  hyper
  head_and_neck vs. ovary,prostate,non_cancer, myeloid_neoplasm,multiple_myeloma,uterine,thyroid, lymphoid_neoplasm,breast,lung,sarcoma,renal

SEQ ID NO: 461050 - DNA, 447 bp, Homo sapiens; identical to SEQ ID NO: 454389
  chr3:187456666-187457113
  hyper

SEQ ID NO: 461051 - DNA, 380 bp, Homo sapiens; identical to SEQ ID NO: 454390
  chr3:187456733-187457113
  hyper

SEQ ID NO: 461052 - DNA, 60 bp, Homo sapiens; identical to SEQ ID NO: 454391
  chr3:187457654-187457714
  hyper

SEQ ID NO: 461053 - DNA, 509 bp, Homo sapiens; identical to SEQ ID NO: 345125
  chr3:187457654-187458163
  hyper

SEQ ID NO: 461054 - DNA, 40 bp, Homo sapiens; identical to SEQ ID NO: 349887
  chr3:190529763-190529803
  hyper

SEQ ID NO: 461055 - DNA, 147 bp, Homo sapiens; identical to SEQ ID NO: 459701
  chr3:194407289-194407436
  hyper
  head_and_neck vs. anorectal

SEQ ID NO: 461056 - DNA, 154 bp, Homo sapiens; identical to SEQ ID NO: 459702
  chr3:194407836-194407990
  hyper
  head_and_neck vs. anorectal

SEQ ID NO: 461057 - DNA, 3 bp, Homo sapiens
  chr3:194407996-194407999
  hyper
  head_and_neck vs. anorectal
cgg

SEQ ID NO: 461058 - DNA, 102 bp, Homo sapiens; identical to SEQ ID NO: 459704
  chr3:194408028-194408130
  hyper
  head_and_neck vs. anorectal

SEQ ID NO: 461059 - DNA, 2 bp, Homo sapiens
  chr4:4855717-4855719
  hyper
ac

SEQ ID NO: 461060 - DNA, 58 bp, Homo sapiens
  chr4:5052378-5052436
  hyper
  head_and_neck vs. anorectal
cggagagctgggcccgcaggactgcaaggcagggggacctgcctgtccctcagggagc

SEQ ID NO: 461061 - DNA, 290 bp, Homo sapiens
  chr4:5052556-5052846
  hyper
  head_and_neck vs. anorectal
accctcatgctagcctcgcccctaaatcggacgccgatgccgcccaattttgggggaatcccgagactcatgcccagccattcccagggagaatggtttggggcaaactatggctgtctggggcctcagtttccccatgtacaatgaaggggtcagattagtatctaatcttaaggggtcagaaagtaaacagatactttcattcattaaacactgagaaaaaccttaagaggaacagcgtcggttggagagccagcagacactccactgcccatcccaatatgaatggg

SEQ ID NO: 461062 - DNA, 80 bp, Homo sapiens; identical to SEQ ID NO: 453239
  chr4:6201800-6201880
  hyper
  head_and_neck vs. lung,ovary,breast

SEQ ID NO: 461063 - DNA, 65 bp, Homo sapiens; identical to SEQ ID NO: 346630
  chr4:6202658-6202723
  hyper
  head_and_neck vs. lung,ovary,breast

SEQ ID NO: 461064 - DNA, 207 bp, Homo sapiens; identical to SEQ ID NO: 332046
  chr4:10090148-10090355
  hyper
  head_and_neck vs. cervical,ovary

SEQ ID NO: 461065 - DNA, 202 bp, Homo sapiens; identical to SEQ ID NO: 456000
  chr4:30723862-30724064
  hyper
  head_and_neck vs. anorectal,cervical

SEQ ID NO: 461066 - DNA, 91 bp, Homo sapiens; identical to SEQ ID NO: 456001
  chr4:30724126-30724217
  hyper
  head_and_neck vs. anorectal,cervical

SEQ ID NO: 461067 - DNA, 66 bp, Homo sapiens
  chr4:41752247-41752313
  hyper
  head_and_neck vs. anorectal
cgttcagtgtttgccaaactaagtggtttaattcgatgctagtgccggggagtggatgggctcccg

SEQ ID NO: 461068 - DNA, 3 bp, Homo sapiens
  chr4:42155097-42155100
  hyper
  head_and_neck vs. prostate,thyroid,non_cancer, myeloid_neoplasm
gac

SEQ ID NO: 461069 - DNA, 25 bp, Homo sapiens
  chr4:42401057-42401082
  hyper
  head_and_neck vs. uterine,ovary,myeloid_neoplasm, non_cancer,multiple_myeloma
ctgacttcagagcggaataaatcac

SEQ ID NO: 461070 - DNA, 6 bp, Homo sapiens
  chr4:44449073-44449079
  hyper
  head_and_neck vs. anorectal
ccgcgc

SEQ ID NO: 461071 - DNA, 2 bp, Homo sapiens
  chr4:44449386-44449388
  hyper
  head_and_neck vs. anorectal
cg

SEQ ID NO: 461072 - DNA, 35 bp, Homo sapiens
  chr4:44449403-44449438
  hyper
  head_and_neck vs. anorectal
gtgaaatgtaaatcgtgtctactgcataagggaat

SEQ ID NO: 461073 - DNA, 105 bp, Homo sapiens
  chr4:47033907-47034012
  hyper
cggtccctacttcttccccttagcaccaatgaacccagcaacatgtcatacgtgaaagagacagtggacagattgctcaaaggatatgacattcgcttgcggccg

SEQ ID NO: 461074 - DNA, 233 bp, Homo sapiens
  chr4:111543735-111543968
  hyper
  head_and_neck vs. cervical
caggggacgcaacccccgccgagttctcaagccaagctgcccccgtctcctccggaaggctcaagcgaaaaagtccggagacggaaagtcagcgggcaaacgaagacatgggatgtgggcagaagggcaccactcagagcgtctttagggagcaggcttccaagctccaaagcgaaacaagagtgggcaaagacccccttcttctctccctccctcccccaagaacccctcca

SEQ ID NO: 461075 - DNA, 61 bp, Homo sapiens
  chr4:111543907-111543968
  hyper
  head_and_neck vs. cervical,colorectal
cgaaacaagagtgggcaaagacccccttcttctctccctccctcccccaagaacccctcca

SEQ ID NO: 461076 - DNA, 157 bp, Homo sapiens; identical to SEQ ID NO: 349965
  chr4:113442552-113442709
  hyper
  head_and_neck vs. thyroid

SEQ ID NO: 461077 - DNA, 11 bp, Homo sapiens
  chr4:113443992-113444003
  hyper
  head_and_neck vs. non_cancer,myeloid_neoplasm,thyroid
cgtgtctacag

SEQ ID NO: 461078 - DNA, 193 bp, Homo sapiens
  chr4:143767433-143767626
  hyper
  head_and_neck vs. cervical
cgagcgtgtgagcgtgtgcgcgcccaggaggagctgtaacctgctatttatagaccgaagcctcagtacccggggctgagaacccggaggaaactagcaggcggcggcgacggcgcagggcgccggccgcggcttcgcgaggctccagcagctcccccagcctctggcttcggccgcgctccctgctcgctcc

SEQ ID NO: 461079 - DNA, 82 bp, Homo sapiens; identical to SEQ ID NO: 370565
  chr4:144622231-144622313
  hyper

SEQ ID NO: 461080 - DNA, 271 bp, Homo sapiens; identical to SEQ ID NO: 459715
  chr4:147560617-147560888
  hyper
  head_and_neck vs. melanoma

SEQ ID NO: 461081 - DNA, 13 bp, Homo sapiens
  chr4:155254035-155254048
  hyper
  head_and_neck vs. multiple_myeloma,prostate
cgcctgtgtttgc

SEQ ID NO: 461082 - DNA, 127 bp, Homo sapiens
  chr4:174443425-174443552
  hyper
  head_and_neck vs. sarcoma
cgccgattacacccaactcggctgggatggctccgagccgtctgccctgacgtcagcgaggctccggccccgccgcggcaagataggcgagcgcggccgggcgcgggtgcggcactaatcactccca

SEQ ID NO: 461083 - DNA, 71 bp, Homo sapiens; identical to SEQ ID NO: 350015
  chr4:175750738-175750809
  hyper
  head_and_neck vs. lung

SEQ ID NO: 461084 - DNA, 69 bp, Homo sapiens; identical to SEQ ID NO: 453270
  chr4:176922585-176922654
  hyper
  head_and_neck vs. lung,ovary,breast

SEQ ID NO: 461085 - DNA, 43 bp, Homo sapiens; identical to SEQ ID NO: 453271
  chr4:176986744-176986787
  hyper
  head_and_neck vs. melanoma,sarcoma,lung,ovary,non_cancer, myeloid_neoplasm,renal,prostate,breast,thyroid, bladder_and_urothelial,lymphoid_neoplasm

SEQ ID NO: 461086 - DNA, 19 bp, Homo sapiens
  chr5:1879488-1879507
  hyper
  head_and_neck vs. melanoma
cggtttgcacggtgaccgc

SEQ ID NO: 461087 - DNA, 87 bp, Homo sapiens; identical to SEQ ID NO: 358057
  chr5:1879747-1879834
  hyper
  head_and_neck vs. melanoma

SEQ ID NO: 461088 - DNA, 97 bp, Homo sapiens
  chr5:3121996-3122093
  hyper
  head_and_neck vs. anorectal
cgaggatggccaggaaacagttaatttgatttgcgaggcgaaaaggtcgcatgttttgttcagccctttctcagccccttcctccctcgctcggccc

SEQ ID NO: 461089 - DNA, 83 bp, Homo sapiens; identical to SEQ ID NO: 346676
  chr5:3122204-3122287
  hyper
  head_and_neck vs. anorectal

SEQ ID NO: 461090 - DNA, 74 bp, Homo sapiens; identical to SEQ ID NO: 458097
  chr5:11903295-11903369
  hyper
  head_and_neck vs. melanoma,bladder_and_urothelial,breast, prostate

SEQ ID NO: 461091 - DNA, 99 bp, Homo sapiens; identical to SEQ ID NO: 453281
  chr5:42950747-42950846
  hyper
  head_and_neck vs. sarcoma

SEQ ID NO: 461092 - DNA, 3 bp, Homo sapiens
  chr5:42993305-42993308
  hyper
  head_and_neck vs. anorectal
cgc

SEQ ID NO: 461093 - DNA, 175 bp, Homo sapiens; identical to SEQ ID NO: 346682
  chr5:42995428-42995603
  hyper
  head_and_neck vs. lymphoid_neoplasm

SEQ ID NO: 461094 - DNA, 355 bp, Homo sapiens
  chr5:50677760-50678115
  hyper
  head_and_neck vs. cervical
aatgcggccggccaggatttacagctcttatcaagggttagattttgcgaaagatataaagaaaggagtttcctaacacaccgggtcttctcacagcaacaagacaccgaaattaagccttctatggtttgtgtctgtaggactttttagataaaactggcagccccattagataagaaatggctttttagaagctttgggggaagcgcgggggttcttcgtggccttcctgtgactgtctttgggagaccgtaacagatgatgggaacatgtaagaatgattgaagaaggttaccggcgagttgcacctaacagtcttctctctccaagtagtttctcgagagaaaattatata

SEQ ID NO: 461095 - DNA, 76 bp, Homo sapiens; identical to SEQ ID NO: 454408
  chr5:54518558-54518634
  hyper
  head_and_neck vs. multiple_myeloma,myeloid_neoplasm, non_cancer

SEQ ID NO: 461096 - DNA, 210 bp, Homo sapiens
  chr5:54526958-54527168
  hyper
  head_and_neck vs. cervical
cgcagacagacacttgcaggatttagacaaaccacaactgtttattggtgaaagactcagcttcctcatgtgctcgctgcaaaataaataaaataccagatgctagtatcgtacactatttacaacctgcagctgaccaagcaggtcctgaagccttctctgtggaccagtactgcactcttctgaggctacgggagaggtccagcagcc

SEQ ID NO: 461097 - DNA, 1 bp, Homo sapiens
  chr5:54527844-54527845
  hyper
  head_and_neck vs. cervical
c

SEQ ID NO: 461098 - DNA, 2 bp, Homo sapiens
  chr5:57877796-57877798
  hyper
  head_and_neck vs. sarcoma,bladder_and_urothelial,breast, lung,ovary,prostate,myeloid_neoplasm,thyroid,renal,melanoma, non_cancer,uterine,upper_gi
cg

SEQ ID NO: 461099 - DNA, 38 bp, Homo sapiens; identical to SEQ ID NO: 453283
  chr5:57878673-57878711
  hyper
  head_and_neck vs. sarcoma,melanoma,breast,renal,lung, myeloid_neoplasm,bladder_and_urothelial,ovary,non_cancer, prostate,uterine,multiple_myeloma,pancreas_gallbladder

SEQ ID NO: 461100 - DNA, 159 bp, Homo sapiens; identical to SEQ ID NO: 453284
  chr5:57878752-57878911
  hyper
  head_and_neck vs. sarcoma,melanoma,breast,renal,lung, myeloid_neoplasm,bladder_and_urothelial,ovary,non_cancer, prostate,uterine,multiple_myeloma,pancreas_gallbladder

SEQ ID NO: 461101 - DNA, 38 bp, Homo sapiens; identical to SEQ ID NO: 453283
  chr5:57878673-57878711
  hyper
  head_and_neck vs. sarcoma,renal,ovary,breast,lung, prostate,myeloid_neoplasm,thyroid,non_cancer,uterine, bladder_and_urothelial

SEQ ID NO: 461102 - DNA, 159 bp, Homo sapiens; identical to SEQ ID NO: 453284
  chr5:57878752-57878911
  hyper
  head_and_neck vs. sarcoma,renal,ovary,breast,lung, prostate,myeloid_neoplasm,thyroid,non_cancer,uterine, bladder_and_urothelial

SEQ ID NO: 461103 - DNA, 227 bp, Homo sapiens; identical to SEQ ID NO: 345168
  chr5:57879190-57879417
  hyper
  head_and_neck vs. sarcoma,renal,ovary,breast,lung, prostate,myeloid_neoplasm,thyroid,non_cancer,uterine, bladder_and_urothelial

SEQ ID NO: 461104 - DNA, 9 bp, Homo sapiens
  chr5:67584441-67584450
  hyper
  head_and_neck vs. pancreas_gallbladder
ctgcctgcc

SEQ ID NO: 461105 - DNA, 292 bp, Homo sapiens; identical to SEQ ID NO: 453288
  chr5:75378714-75379006
  hyper
  head_and_neck vs. lung,bladder_and_urothelial

SEQ ID NO: 461106 - DNA, 53 bp, Homo sapiens; identical to SEQ ID NO: 453291
  chr5:75698192-75698245
  hyper
  head_and_neck vs. cervical,pancreas_gallbladder

SEQ ID NO: 461107 - DNA, 916 bp, Homo sapiens; identical to SEQ ID NO: 453292
  chr5:75698274-75699190
  hyper
  head_and_neck vs. cervical,pancreas_gallbladder

SEQ ID NO: 461108 - DNA, 752 bp, Homo sapiens; identical to SEQ ID NO: 453293
  chr5:75698708-75699460
  hyper
  head_and_neck vs. cervical,upper_gi

SEQ ID NO: 461109 - DNA, 267 bp, Homo sapiens; identical to SEQ ID NO: 453294
  chr5:75699193-75699460
  hyper
  head_and_neck vs. upper_gi,pancreas_gallbladder,cervical

SEQ ID NO: 461110 - DNA, 19 bp, Homo sapiens
  chr5:75700173-75700192
  hyper
  head_and_neck vs. upper_gi,pancreas_gallbladder,cervical
ccagattaacaccaaccac

SEQ ID NO: 461111 - DNA, 111 bp, Homo sapiens
  chr5:76011064-76011175
  hyper
  head_and_neck vs. cervical,uterine
cgttcaagaacgtgtgaaggacacttggaaagttaccaggccatttctctcctgggcgcccgcggccctagaacgccggcctcaccggcagacgcgcgccctcctcccaga

SEQ ID NO: 461112 - DNA, 188 bp, Homo sapiens; identical to SEQ ID NO: 350097
  chr5:76011754-76011942
  hyper
  head_and_neck vs. cervical,uterine

SEQ ID NO: 461113 - DNA, 411 bp, Homo sapiens
  chr5:76011754-76012165
  hyper
  head_and_neck vs. cervical,anorectal,lung
gccagggccccccagtagggcagggcggggcggggcggggcgcacagagccagaggggcttgcgagcggcggctgagggaccgcggggagggggcgccgagcggctccagcgcagagactctcactgcacgccggagggcgcccttcctcgctcgcgcccgcgcgaccgcgcgccccagtcccgccccgccccgctaaccgccccagacacagcgctcgccgagggtcgcttggaccctgatcttacccgtgggcaccctgcgctctgcctgccgcgaagaccggctccccgacccgcagaagtcaggagagagggtgaagcggagcagcccgaggcggggcagcctcccggagcagcgccgcgcagagcccgggacaatggggccgcggcggctgctgctggtggccgcc

SEQ ID NO: 461114 - DNA, 229 bp, Homo sapiens
  chr5:76012199-76012428
  hyper
  head_and_neck vs. cervical,anorectal,lung
gcacccgggcccgcaggccaggtgagagatgcacgggaatggggtgcgcgggcggagggacgccgaggggagactgcgggggtcactgttgcgccttctcctcacccctgcctcagtttcctccgaaagccaaactggcatttgggctgagatctggagttttttccagtcacgtttaggtggggcgtgccacccccttcgcgggcccagccgatgcccctttggactc

SEQ ID NO: 461115 - DNA, 219 bp, Homo sapiens
  chr5:76011946-76012165
  hyper
  head_and_neck vs. cervical
cgctaaccgccccagacacagcgctcgccgagggtcgcttggaccctgatcttacccgtgggcaccctgcgctctgcctgccgcgaagaccggctccccgacccgcagaagtcaggagagagggtgaagcggagcagcccgaggcggggcagcctcccggagcagcgccgcgcagagcccgggacaatggggccgcggcggctgctgctggtggccgcc

SEQ ID NO: 461116 - DNA, 378 bp, Homo sapiens
  chr5:76012199-76012577
  hyper
  head_and_neck vs. cervical
gcacccgggcccgcaggccaggtgagagatgcacgggaatggggtgcgcgggcggagggacgccgaggggagactgcgggggtcactgttgcgccttctcctcacccctgcctcagtttcctccgaaagccaaactggcatttgggctgagatctggagttttttccagtcacgtttaggtggggcgtgccacccccttcgcgggcccagccgatgcccctttggactcgatcttggagggtgcagcccgcctgccacggggtgttggatatggaggaggatggagcggaagccccctgggggagcctgcagtcctgcgttgcacttgtcattgtgtttctcccaggaccacccccaaaaagaaaagctctcacgttg

SEQ ID NO: 461117 - DNA, 184 bp, Homo sapiens; identical to SEQ ID NO: 358146
  chr5:76012643-76012827
  hyper
  head_and_neck vs. cervical

SEQ ID NO: 461118 - DNA, 21 bp, Homo sapiens
  chr5:76924480-76924501
  hyper
  head_and_neck vs. myeloid_neoplasm
ccccacgagacccctcccgcc

SEQ ID NO: 461119 - DNA, 46 bp, Homo sapiens; identical to SEQ ID NO: 453298
  chr5:87436549-87436595
  hyper
  head_and_neck vs. lung

SEQ ID NO: 461120 - DNA, 735 bp, Homo sapiens; identical to SEQ ID NO: 345179
  chr5:87436769-87437504
  hyper
  head_and_neck vs. lung

SEQ ID NO: 461121 - DNA, 80 bp, Homo sapiens; identical to SEQ ID NO: 345180
  chr5:87957200-87957280
  hyper
  head_and_neck vs. prostate,melanoma,uterine, myeloid_neoplasm,non_cancer,thyroid,breast,lung,ovary,sarcoma

SEQ ID NO: 461122 - DNA, 157 bp, Homo sapiens; identical to SEQ ID NO: 453301
  chr5:87969885-87970042
  hyper
  head_and_neck vs. sarcoma,uterine,thyroid,non_cancer, ovary,multiple_myeloma,breast,prostate,myeloid_neoplasm,renal, melanoma

SEQ ID NO: 461123 - DNA, 317 bp, Homo sapiens; identical to SEQ ID NO: 453302
  chr5:87970918-87971235
  hyper
  head_and_neck vs. sarcoma,uterine,thyroid, myeloid_neoplasm,non_cancer,breast,ovary,multiple_myeloma, prostate,melanoma,renal

SEQ ID NO: 461124 - DNA, 600 bp, Homo sapiens; identical to SEQ ID NO: 453303
  chr5:87970918-87971518
  hyper
  head_and_neck vs. uterine,myeloid_neoplasm,thyroid, non_cancer,ovary,sarcoma,breast

SEQ ID NO: 461125 - DNA, 254 bp, Homo sapiens; identical to SEQ ID NO: 453304
  chr5:87971264-87971518
  hyper
  head_and_neck vs. uterine,ovary,myeloid_neoplasm,thyroid, non_cancer,melanoma,breast,lung,sarcoma

SEQ ID NO: 461126 - DNA, 38 bp, Homo sapiens; identical to SEQ ID NO: 453305
  chr5:87975991-87976029
  hyper
  head_and_neck vs. ovary,breast,melanoma,prostate,lung, sarcoma,renal,uterine,multiple_myeloma,colorectal,non_cancer, bladder_and_urothelial,thyroid,myeloid_neoplasm, pancreas_gallbladder,liver_bileduct

SEQ ID NO: 461127 - DNA, 243 bp, Homo sapiens; identical to SEQ ID NO: 345184
  chr5:87976663-87976906
  hyper
  head_and_neck vs. ovary,breast,melanoma,prostate,lung, sarcoma,renal,uterine,multiple_myeloma,colorectal,non_cancer, bladder_and_urothelial,thyroid,myeloid_neoplasm, pancreas_gallbladder,liver_bileduct

SEQ ID NO: 461128 - DNA, 263 bp, Homo sapiens; identical to SEQ ID NO: 453307
  chr5:87986873-87987136
  hyper

SEQ ID NO: 461129 - DNA, 139 bp, Homo sapiens; identical to SEQ ID NO: 346715
  chr5:87987165-87987304
  hyper

SEQ ID NO: 461130 - DNA, 423 bp, Homo sapiens; identical to SEQ ID NO: 453309
  chr5:88179429-88179852
  hyper
  head_and_neck vs. lung,bladder_and_urothelial

SEQ ID NO: 461131 - DNA, 312 bp, Homo sapiens; identical to SEQ ID NO: 453310
  chr5:88179540-88179852
  hyper
  head_and_neck vs. lung,melanoma,sarcoma,prostate, bladder_and_urothelial

SEQ ID NO: 461132 - DNA, 42 bp, Homo sapiens; identical to SEQ ID NO: 345186
  chr5:88180346-88180388
  hyper
  head_and_neck vs. lung,melanoma,sarcoma,prostate, bladder_and_urothelial

SEQ ID NO: 461133 - DNA, 22 bp, Homo sapiens
  chr5:92906252-92906274
  hyper
  head_and_neck vs. thyroid,non_cancer
cgccaactgcccgcgcggaacc

SEQ ID NO: 461134 - DNA, 115 bp, Homo sapiens; identical to SEQ ID NO: 453314
  chr5:100236036-100236151
  hyper
  head_and_neck vs. lung,lymphoid_neoplasm

SEQ ID NO: 461135 - DNA, 87 bp, Homo sapiens; identical to SEQ ID NO: 453315
  chr5:100238197-100238284
  hyper
  head_and_neck vs. lymphoid_neoplasm,lung, multiple_myeloma,sarcoma,bladder_and_urothelial,renal, non_cancer,thyroid,prostate,ovary

SEQ ID NO: 461136 - DNA, 345 bp, Homo sapiens; identical to SEQ ID NO: 453316
  chr5:100239724-100240069
  hyper
  head_and_neck vs. lymphoid_neoplasm,sarcoma, bladder_and_urothelial,lung,thyroid,renal,non_cancer, myeloid_neoplasm,ovary,multiple_myeloma

SEQ ID NO: 461137 - DNA, 400 bp, Homo sapiens; identical to SEQ ID NO: 458140
  chr5:101631635-101632035
  hyper
  head_and_neck vs. lung,ovary

SEQ ID NO: 461138 - DNA, 146 bp, Homo sapiens; identical to SEQ ID NO: 458141
  chr5:101632074-101632220
  hyper
  head_and_neck vs. lung,ovary

SEQ ID NO: 461139 - DNA, 313 bp, Homo sapiens; identical to SEQ ID NO: 453317
  chr5:101631722-101632035
  hyper
  head_and_neck vs. lung

SEQ ID NO: 461140 - DNA, 222 bp, Homo sapiens; identical to SEQ ID NO: 453318
  chr5:101632074-101632296
  hyper
  head_and_neck vs. lung

SEQ ID NO: 461141 - DNA, 219 bp, Homo sapiens; identical to SEQ ID NO: 453319
  chr5:113696733-113696952
  hyper
  head_and_neck vs. lung

SEQ ID NO: 461142 - DNA, 139 bp, Homo sapiens; identical to SEQ ID NO: 458149
  chr5:113696813-113696952
  hyper
  head_and_neck vs. melanoma,lung

SEQ ID NO: 461143 - DNA, 98 bp, Homo sapiens
  chr5:113698167-113698265
  hyper
  head_and_neck vs. lung,melanoma
cctgctgctgctgctgctgctcgtcgcgccggggcagccagctcaatgtgagcgagctgacgccgtccagccatgccagtgcgctccggcagcagtac

SEQ ID NO: 461144 - DNA, 58 bp, Homo sapiens; identical to SEQ ID NO: 453320
  chr5:114515671-114515729
  hyper
  head_and_neck vs. prostate

SEQ ID NO: 461145 - DNA, 68 bp, Homo sapiens; identical to SEQ ID NO: 454414
  chr5:114515769-114515837
  hyper
  head_and_neck vs. prostate

SEQ ID NO: 461146 - DNA, 58 bp, Homo sapiens; identical to SEQ ID NO: 453320
  chr5:114515671-114515729
  hyper
  head_and_neck vs. prostate,ovary,cervical,thyroid, non_cancer,myeloid_neoplasm,colorectal

SEQ ID NO: 461147 - DNA, 132 bp, Homo sapiens; identical to SEQ ID NO: 453321
  chr5:114515769-114515901
  hyper
  head_and_neck vs. prostate,ovary,cervical,thyroid, non_cancer,myeloid_neoplasm,colorectal

SEQ ID NO: 461148 - DNA, 44 bp, Homo sapiens; identical to SEQ ID NO: 346728
  chr5:114516274-114516318
  hyper
  head_and_neck vs. prostate,ovary,cervical,thyroid, non_cancer,myeloid_neoplasm,colorectal

SEQ ID NO: 461149 - DNA, 51 bp, Homo sapiens; identical to SEQ ID NO: 350147
  chr5:115911175-115911226
  hyper
  head_and_neck vs. pancreas_gallbladder,uterine,breast, prostate,colorectal,bladder_and_urothelial,melanoma

SEQ ID NO: 461150 - DNA, 105 bp, Homo sapiens; identical to SEQ ID NO: 346729
  chr5:115911590-115911695
  hyper
  head_and_neck vs. liver_bileduct,pancreas_gallbladder, bladder_and_urothelial,cervical,breast,uterine

SEQ ID NO: 461151 - DNA, 2 bp, Homo sapiens
  chr5:115912114-115912116
  hyper
  head_and_neck vs. pancreas_gallbladder
cc

SEQ ID NO: 461152 - DNA, 95 bp, Homo sapiens; identical to SEQ ID NO: 453328
  chr5:124082318-124082413
  hyper
  head_and_neck vs. lung,upper_gi,pancreas_gallbladder

SEQ ID NO: 461153 - DNA, 642 bp, Homo sapiens; identical to SEQ ID NO: 453329
  chr5:124082442-124083084
  hyper
  head_and_neck vs. lung,upper_gi,pancreas_gallbladder

SEQ ID NO: 461154 - DNA, 742 bp, Homo sapiens; identical to SEQ ID NO: 453330
  chr5:124082625-124083367
  hyper
  head_and_neck vs. pancreas_gallbladder,liver_bileduct, upper_gi,lung,colorectal,uterine,lymphoid_neoplasm,ovary,renal

SEQ ID NO: 461155 - DNA, 267 bp, Homo sapiens; identical to SEQ ID NO: 453331
  chr5:124083100-124083367
  hyper
  head_and_neck vs. pancreas_gallbladder,liver_bileduct, upper_gi,uterine,lung,colorectal,lymphoid_neoplasm, bladder_and_urothelial,ovary,renal,prostate,non_cancer, myeloid_neoplasm,thyroid

SEQ ID NO: 461156 - DNA, 38 bp, Homo sapiens; identical to SEQ ID NO: 453332
  chr5:124084158-124084196
  hyper
  head_and_neck vs. pancreas_gallbladder,colorectal, upper_gi,liver_bileduct,lymphoid_neoplasm,lung, bladder_and_urothelial,uterine,renal,prostate,ovary, myeloid_neoplasm,non_cancer,breast

SEQ ID NO: 461157 - DNA, 60 bp, Homo sapiens; identical to SEQ ID NO: 346734
  chr5:124084302-124084362
  hyper
  head_and_neck vs. pancreas_gallbladder,colorectal, upper_gi,liver_bileduct,lymphoid_neoplasm,lung, bladder_and_urothelial,uterine,renal,prostate,ovary, myeloid_neoplasm,non_cancer,breast

SEQ ID NO: 461158 - DNA, 112 bp, Homo sapiens; identical to SEQ ID NO: 453334
  chr5:124084660-124084772
  hyper
  head_and_neck vs. liver_bileduct,pancreas_gallbladder, upper_gi,colorectal,lung,ovary,uterine,prostate, bladder_and_urothelial,renal,non_cancer,myeloid_neoplasm, thyroid,lymphoid_neoplasm,breast

SEQ ID NO: 461159 - DNA, 64 bp, Homo sapiens; identical to SEQ ID NO: 345193
  chr5:124084977-124085041
  hyper
  head_and_neck vs. liver_bileduct,pancreas_gallbladder, upper_gi,colorectal,lung,ovary,uterine,prostate, bladder_and_urothelial,renal,non_cancer,myeloid_neoplasm, thyroid,lymphoid_neoplasm,breast

SEQ ID NO: 461160 - DNA, 95 bp, Homo sapiens; identical to SEQ ID NO: 453336
  chr5:125930492-125930587
  hyper
  head_and_neck vs. liver_bileduct,pancreas_gallbladder, colorectal,upper_gi,breast,ovary

SEQ ID NO: 461161 - DNA, 170 bp, Homo sapiens; identical to SEQ ID NO: 350157
  chr5:125931062-125931232
  hyper
  head_and_neck vs. liver_bileduct,pancreas_gallbladder, colorectal,upper_gi,breast,ovary

SEQ ID NO: 461162 - DNA, 46 bp, Homo sapiens
  chr5:134827217-134827263
  hyper
  head_and_neck vs. cervical,upper_gi,pancreas_gallbladder, colorectal
cgagcttctttcttctccaaccccacccccacccgcagctctggag

SEQ ID NO: 461163 - DNA, 73 bp, Homo sapiens; identical to SEQ ID NO: 345194
  chr5:134880614-134880687
  hyper
  head_and_neck vs. thyroid,myeloid_neoplasm,non_cancer, multiple_myeloma

SEQ ID NO: 461164 - DNA, 1 bp, Homo sapiens
  chr5:136835144-136835145
  hyper
  head_and_neck vs. anorectal,lung
c

SEQ ID NO: 461165 - DNA, 324 bp, Homo sapiens; identical to SEQ ID NO: 332521
  chr5:140419818-140420142
  hyper
  head_and_neck vs. anorectal

SEQ ID NO: 461166 - DNA, 156 bp, Homo sapiens; identical to SEQ ID NO: 454425
  chr5:141931151-141931307
  hyper
  head_and_neck vs. colorectal

SEQ ID NO: 461167 - DNA, 11 bp, Homo sapiens
  chr5:141931539-141931550
  hyper
  head_and_neck vs. colorectal
ccctcccctcc

SEQ ID NO: 461168 - DNA, 13 bp, Homo sapiens
  chr5:169063996-169064009
  hyper
  head_and_neck vs. bladder_and_urothelial, lymphoid_neoplasm,multiple_myeloma
cggcaatcaggaa

SEQ ID NO: 461169 - DNA, 4 bp, Homo sapiens
  chr5:170741050-170741054
  hyper
  head_and_neck vs. multiple_myeloma,myeloid_neoplasm
tggc

SEQ ID NO: 461170 - DNA, 23 bp, Homo sapiens
  chr5:173738806-173738829
  hyper
  head_and_neck vs. lung
cgctgcactggacgctgggaaga

SEQ ID NO: 461171 - DNA, 2 bp, Homo sapiens
  chr5:173739343-173739345
  hyper
  head_and_neck vs. lung
cc

SEQ ID NO: 461172 - DNA, 1 bp, Homo sapiens
  chr5:174148214-174148215
  hyper
  head_and_neck vs. anorectal
c

SEQ ID NO: 461173 - DNA, 305 bp, Homo sapiens; identical to SEQ ID NO: 358320
  chr5:174148214-174148519
  hyper
  head_and_neck vs. anorectal,cervical

SEQ ID NO: 461174 - DNA, 415 bp, Homo sapiens
  chr5:174150711-174151126
  hyper
  head_and_neck vs. cervical
cgaggcaaacactggcattcaaacacgcacgacaaacacaggctcaaacaaactcatgaatgcacacttgcactgtcttgagaaaaaggtcggatccggatcgcgctcagaaaggaggttcaggagacaagtacagagatttcaactttctaaaagtgcgctggatttgctttctagtgagagagatggggacaactgatttaaattcttcactccgaaccatttgggagagaggcactcctgaccacttctcgggctccttccggcccctcttttccaggggaaagagttgtaataataacagtgggcgcttttgagcgctggctagtggcgagttactcttctaagtgcatacatttctttcacagggatactggcctgtgagtttcagcaccgactttctggaactgtaaag

SEQ ID NO: 461175 - DNA, 247 bp, Homo sapiens
  chr5:174151197-174151444
  hyper
  head_and_neck vs. cervical
ttctggcggtagagggagagtgggatgggcgcagggtcccttttaaagaagggtcaaaagagagaagaaatgggactcggcgaacttccgctttaaataatcgctcttaattaggtctcgggcttttcagtttcggcgtgattataacccttcagggatcgcctaataacaactctgctgactgctcctgtaattaactcctaatttatttcaaacaggaaaaaaaaaaaaaaaaaaaaaaaggagg

SEQ ID NO: 461176 - DNA, 107 bp, Homo sapiens
  chr5:174151019-174151126
  hyper
  head_and_neck vs. cervical,upper_gi
cgcttttgagcgctggctagtggcgagttactcttctaagtgcatacatttctttcacagggatactggcctgtgagtttcagcaccgactttctggaactgtaaag

SEQ ID NO: 461177 - DNA, 247 bp, Homo sapiens; identical to SEQ ID NO: 461175
  chr5:174151197-174151444
  hyper
  head_and_neck vs. cervical,upper_gi

SEQ ID NO: 461178 - DNA, 210 bp, Homo sapiens
  chr5:174151769-174151979
  hyper
  head_and_neck vs. cervical,upper_gi
ggagcgccgcgtcaaggtctccagcctgcccttcagcgtggaggcgctcatgtccgacaagaagccgcccaaggaggcgtccccgctgccggccgaaagcgcctcggccggggccaccctgcggccactgctgctgtcggggcacggcgctcgggaagcgcacagccccgggccgctggtgaagcccttcgagaccgcctcggtcaagtc

SEQ ID NO: 461179 - DNA, 769 bp, Homo sapiens
  chr5:174151999-174152768
  hyper
  head_and_neck vs. upper_gi
cggcgtggatgcaggaacccggccgatattcgccgccgccaagtgagtgcgcgccggggcaggagtaggaggtagcgcggggtactggagggagcggggggcgggtgttccagggctgagggtaccgagacccttctgcgtgcgctacactcccgggaaagcaagcccagggcctctggactcctgggtgcccggggcgttcggcgcgcccagtgcgccgtccgcatccaagacaccctctgggtaataaccgcgctgtgtgtgtctgagactccctcgacatacagattgttttttcaagagcgaaccccagctgggtttacggggtcgctcggtggtccgtttctacagccctcggccctgcgctctggccacttggcttgtttttgtttcactgttccccggagtctctgcctggggagtgaaggagttggatccatgttcagtgagcacttggatgtaccaggaacgagacaggttcaaaactcaaccctgagagttgtgcccccattttaaagatgagctaactgggcttagccagacattgaggagaaaccattttctttcgtgagtcccgcgggtgtcgaagccggatcccacgaagggatggtggcaccagggatggtggcatcagagtctggtgcggggaggaaatgtctctctgtggtctccgcagccagcacctccccggcaaggttctgagcttcgccgggagcgggctggggccagaagcgcacgggctcttcttggctcacagtaataattaacc

SEQ ID NO: 461180 - DNA, 93 bp, Homo sapiens
  chr5:174162402-174162495
  hyper
  head_and_neck vs. cervical
cgccaggagcggtgcgcccagcgcagggggctcctagtcacctcgacccttccggcgcccttccctccttagctgcacctggcaagccagcaa

SEQ ID NO: 461181 - DNA, 19 bp, Homo sapiens
  chr5:174162856-174162875
  hyper
  head_and_neck vs. cervical
cccttgtcccccatcatta

SEQ ID NO: 461182 - DNA, 87 bp, Homo sapiens; identical to SEQ ID NO: 350223
  chr5:174162904-174162991
  hyper
  head_and_neck vs. cervical

SEQ ID NO: 461183 - DNA, 79 bp, Homo sapiens
  chr5:174220739-174220818
  hyper
  head_and_neck vs. anorectal
cggcggctcctcctcgcagaaaccctccgcagtcccctaccccagaaaggtttcccttccctccccttcccgcaggccc

SEQ ID NO: 461184 - DNA, 30 bp, Homo sapiens
  chr5:174220942-174220972
  hyper
  head_and_neck vs. anorectal
attcaattagattaagttcaggggcaggga

SEQ ID NO: 461185 - DNA, 46 bp, Homo sapiens; identical to SEQ ID NO: 358329
  chr5:174221001-174221047
  hyper
  head_and_neck vs. anorectal

SEQ ID NO: 461186 - DNA, 8 bp, Homo sapiens
  chr5:177412210-177412218
  hyper
  head_and_neck vs. thyroid,renal
tggctcac

SEQ ID NO: 461187 - DNA, 365 bp, Homo sapiens; identical to SEQ ID NO: 358348
  chr5:180046947-180047312
  hyper
  head_and_neck vs. lymphoid_neoplasm

SEQ ID NO: 461188 - DNA, 61 bp, Homo sapiens; identical to SEQ ID NO: 453345
  chr6:391113-391174
  hyper
  head_and_neck vs. lymphoid_neoplasm,non_cancer,thyroid

SEQ ID NO: 461189 - DNA, 55 bp, Homo sapiens; identical to SEQ ID NO: 346767
  chr6:393764-393819
  hyper
  head_and_neck vs. lymphoid_neoplasm

SEQ ID NO: 461190 - DNA, 465 bp, Homo sapiens; identical to SEQ ID NO: 332643
  chr6:4948996-4949461
  hyper
  head_and_neck vs. upper_gi,colorectal,melanoma,sarcoma, uterine,ovary

SEQ ID NO: 461191 - DNA, 138 bp, Homo sapiens
  chr6:10418940-10419078
  hyper
  head_and_neck vs. anorectal
cgttggttttggcaaattcaccacccccctgcctcctcacccaccattctcacactccctcatccgtagcccaggcggcaaaaacccatttcaggaagtggagtgagttgctagctaaacttcgggcaaactttgtat

SEQ ID NO: 461192 - DNA, 24 bp, Homo sapiens
  chr6:10420695-10420719
  hyper
  head_and_neck vs. anorectal
cgctgcttctaattagaggggagc

SEQ ID NO: 461193 - DNA, 353 bp, Homo sapiens; identical to SEQ ID NO: 453359
  chr6:26313163-26313516
  hyper
  head_and_neck vs. cervical,upper_gi

SEQ ID NO: 461194 - DNA, 345 bp, Homo sapiens; identical to SEQ ID NO: 350312
  chr6:26313545-26313890
  hyper
  head_and_neck vs. cervical,upper_gi

SEQ ID NO: 461195 - DNA, 124 bp, Homo sapiens; identical to SEQ ID NO: 332704
  chr6:26330521-26330645
  hyper
  head_and_neck vs. bladder_and_urothelial,colorectal, upper_gi

SEQ ID NO: 461196 - DNA, 71 bp, Homo sapiens; identical to SEQ ID NO: 453362
  chr6:26331633-26331704
  hyper
  head_and_neck vs. colorectal,bladder_and_urothelial, uterine,non_cancer,thyroid,myeloid_neoplasm,upper_gi, lymphoid_neoplasm,breast,multiple_myeloma,prostate,renal,ovary

SEQ ID NO: 461197 - DNA, 324 bp, Homo sapiens; identical to SEQ ID NO: 453363
  chr6:26331811-26332135
  hyper
  head_and_neck vs. colorectal,bladder_and_urothelial, uterine,non_cancer,thyroid,myeloid_neoplasm,upper_gi, lymphoid_neoplasm,breast,multiple_myeloma,prostate,renal,ovary

SEQ ID NO: 461198 - DNA, 243 bp, Homo sapiens; identical to SEQ ID NO: 345222
  chr6:26332283-26332526
  hyper
  head_and_neck vs. colorectal,bladder_and_urothelial, uterine,non_cancer,thyroid,myeloid_neoplasm,upper_gi, lymphoid_neoplasm,breast,multiple_myeloma,prostate,renal,ovary

SEQ ID NO: 461199 - DNA, 67 bp, Homo sapiens; identical to SEQ ID NO: 358449
  chr6:26555496-26555563
  hyper
  head_and_neck vs. anorectal

SEQ ID NO: 461200 - DNA, 248 bp, Homo sapiens; identical to SEQ ID NO: 453365
  chr6:26577475-26577723
  hyper
  head_and_neck vs. multiple_myeloma,non_cancer,thyroid, cervical

SEQ ID NO: 461201 - DNA, 205 bp, Homo sapiens; identical to SEQ ID NO: 453371
  chr6:27560506-27560711
  hyper
  head_and_neck vs. upper_gi

SEQ ID NO: 461202 - DNA, 14 bp, Homo sapiens
  chr6:27598659-27598673
  hyper
  head_and_neck vs. multiple_myeloma
cgaaagacagccca

SEQ ID NO: 461203 - DNA, 19 bp, Homo sapiens
  chr6:27636317-27636336
  hyper
  head_and_neck vs. bladder_and_urothelial,breast,uterine, upper_gi,ovary,multiple_myeloma,non_cancer,prostate,thyroid, colorectal
cgaatttatatatggtttc

SEQ ID NO: 461204 - DNA, 93 bp, Homo sapiens; identical to SEQ ID NO: 453373
  chr6:27636531-27636624
  hyper
  head_and_neck vs. bladder_and_urothelial,breast,uterine, upper_gi,ovary,multiple_myeloma,non_cancer,prostate,thyroid, colorectal

SEQ ID NO: 461205 - DNA, 9 bp, Homo sapiens
  chr6:27640042-27640051
  hyper
  head_and_neck vs. multiple_myeloma,uterine
cggggattg

SEQ ID NO: 461206 - DNA, 87 bp, Homo sapiens; identical to SEQ ID NO: 358470
  chr6:27640312-27640399
  hyper
  head_and_neck vs. multiple_myeloma,uterine

SEQ ID NO: 461207 - DNA, 752 bp, Homo sapiens; identical to SEQ ID NO: 454444
  chr6:27655169-27655921
  hyper
  head_and_neck vs. upper_gi,colorectal,ovary,melanoma, breast,uterine,anorectal

SEQ ID NO: 461208 - DNA, 782 bp, Homo sapiens; identical to SEQ ID NO: 454445
  chr6:27655460-27656242
  hyper
  head_and_neck vs. colorectal,upper_gi,ovary,breast, uterine,melanoma,lung,anorectal

SEQ ID NO: 461209 - DNA, 136 bp, Homo sapiens; identical to SEQ ID NO: 358472
  chr6:27662125-27662261
  hyper
  head_and_neck vs. colorectal,multiple_myeloma,lung, prostate,breast,non_cancer

SEQ ID NO: 461210 - DNA, 191 bp, Homo sapiens
  chr6:28303261-28303452
  hyper
  head_and_neck vs. anorectal
cggcaggcgctctactttcctttattaggactataagcccagcttctgtgaatcatcacctcagcccctgattggtccggggccaaactttcacttcggcttctgataggtcctgggccaagctaagcagcagctatgaatcatcatttcagctcctgattggtcccggaccaagctgagtcaagcgttcg

SEQ ID NO: 461211 - DNA, 74 bp, Homo sapiens
  chr6:28303489-28303563
  hyper
  head_and_neck vs. anorectal
ttccagtccataaaaaccccagaacgggccccataatgggtactcccggtcgggaccccttctctgctggcaga

SEQ ID NO: 461212 - DNA, 209 bp, Homo sapiens
  chr6:28303607-28303816
  hyper
  head_and_neck vs. anorectal
tttgtgtctgcgctcctttatcgtcttggaggcaggacaaagaactccgggcgttatctcagacaaagaaaggctgtttaatcttcaggataaggggcgggacctccacctactccacgggggcttcaggccagtgaatgtgtaggggcgggggtcacgcctgcgcagacgttccctccccgcctactccaaggcacagacctgaaatc

SEQ ID NO: 461213 - DNA, 86 bp, Homo sapiens; identical to SEQ ID NO: 459766
  chr6:41605681-41605767
  hyper
  head_and_neck vs. cervical,anorectal,ovary,sarcoma, bladder_and_urothelial,multiple_myeloma

SEQ ID NO: 461214 - DNA, 1 bp, Homo sapiens
  chr6:43612825-43612826
  hyper
  head_and_neck vs. anorectal
c

SEQ ID NO: 461215 - DNA, 373 bp, Homo sapiens; identical to SEQ ID NO: 453380
  chr6:46097250-46097623
  hyper
  head_and_neck vs. pancreas_gallbladder,uterine,lung, renal,lymphoid_neoplasm,ovary

SEQ ID NO: 461216 - DNA, 521 bp, Homo sapiens; identical to SEQ ID NO: 345237
  chr6:46097694-46098215
  hyper
  head_and_neck vs. pancreas_gallbladder,uterine,lung, renal,lymphoid_neoplasm,ovary

SEQ ID NO: 461217 - DNA, 53 bp, Homo sapiens; identical to SEQ ID NO: 358544
  chr6:50692556-50692609
  hyper
  head_and_neck vs. thyroid

SEQ ID NO: 461218 - DNA, 22 bp, Homo sapiens
  chr6:50789353-50789375
  hyper
  head_and_neck vs. ovary
cgtctgattacatctagtaatt

SEQ ID NO: 461219 - DNA, 22 bp, Homo sapiens
  chr6:50789579-50789601
  hyper
  head_and_neck vs. ovary
tgcatctggagccccgaagaac

SEQ ID NO: 461220 - DNA, 2 bp, Homo sapiens
  chr6:50791122-50791124
  hyper
  head_and_neck vs. thyroid,multiple_myeloma,non_cancer
cg

SEQ ID NO: 461221 - DNA, 14 bp, Homo sapiens
  chr6:50803791-50803805
  hyper
  head_and_neck vs. myeloid_neoplasm
cggtgacttctcta

SEQ ID NO: 461222 - DNA, 44 bp, Homo sapiens; identical to SEQ ID NO: 456074
  chr6:50805695-50805739
  hyper
  head_and_neck vs. multiple_myeloma

SEQ ID NO: 461223 - DNA, 8 bp, Homo sapiens
  chr6:50805846-50805854
  hyper
  head_and_neck vs. multiple_myeloma
taactgtc

SEQ ID NO: 461224 - DNA, 43 bp, Homo sapiens
  chr6:50810509-50810552
  hyper
  head_and_neck vs. myeloid_neoplasm
cgaatgtcccaaagcgagtccaggcggtcctggaatggagggg

SEQ ID NO: 461225 - DNA, 30 bp, Homo sapiens
  chr6:50817420-50817450
  hyper
  head_and_neck vs. thyroid,myeloid_neoplasm,sarcoma, non_cancer
agctgccttccacgcttggactttgagggc

SEQ ID NO: 461226 - DNA, 189 bp, Homo sapiens; identical to SEQ ID NO: 346826
  chr6:56716695-56716884
  hyper
  head_and_neck vs. pancreas_gallbladder

SEQ ID NO: 461227 - DNA, 71 bp, Homo sapiens
  chr6:56820686-56820757
  hyper
  head_and_neck vs. anorectal
cgtttcttcataaccagcaaaaagtatatggcagttggtggccaggggatttaacactgatgcaatgccag

SEQ ID NO: 461228 - DNA, 164 bp, Homo sapiens; identical to SEQ ID NO: 456082
  chr6:73329621-73329785
  hyper
  head_and_neck vs. lymphoid_neoplasm

SEQ ID NO: 461229 - DNA, 82 bp, Homo sapiens; identical to SEQ ID NO: 346833
  chr6:73330126-73330208
  hyper
  head_and_neck vs. lymphoid_neoplasm

SEQ ID NO: 461230 - DNA, 354 bp, Homo sapiens; identical to SEQ ID NO: 458212
  chr6:86159095-86159449
  hyper
  head_and_neck vs. upper_gi

SEQ ID NO: 461231 - DNA, 270 bp, Homo sapiens; identical to SEQ ID NO: 458213
  chr6:86159509-86159779
  hyper
  head_and_neck vs. upper_gi

SEQ ID NO: 461232 - DNA, 89 bp, Homo sapiens; identical to SEQ ID NO: 458214
  chr6:86159903-86159992
  hyper
  head_and_neck vs. upper_gi

SEQ ID NO: 461233 - DNA, 270 bp, Homo sapiens; identical to SEQ ID NO: 458213
  chr6:86159509-86159779
  hyper
  head_and_neck vs. anorectal

SEQ ID NO: 461234 - DNA, 244 bp, Homo sapiens
  chr6:86159903-86160147
  hyper
  head_and_neck vs. anorectal
tgggcgcggtgctgtggcctgcggctggcgcctgggagcttacgattttgcacaccaacgacgtgcacagccggctggagcagaccagcgaggactccagcaagtgcgtcaacgccagccgctgcatgggtggcgtggctcggctcttcaccaaggttcagcagatccgccgcgccgaacccaacgtgctgctgctggacgccggcgaccagtaccagggcactatctggttcaccgtgtacaa

SEQ ID NO: 461235 - DNA, 124 bp, Homo sapiens; identical to SEQ ID NO: 453391
  chr6:87646737-87646861
  hyper
  head_and_neck vs. melanoma,ovary,bladder_and_urothelial, lung,breast

SEQ ID NO: 461236 - DNA, 171 bp, Homo sapiens; identical to SEQ ID NO: 453392
  chr6:87646944-87647115
  hyper
  head_and_neck vs. melanoma,ovary,bladder_and_urothelial, lung,breast

SEQ ID NO: 461237 - DNA, 75 bp, Homo sapiens; identical to SEQ ID NO: 453393
  chr6:87647143-87647218
  hyper
  head_and_neck vs. melanoma,ovary,bladder_and_urothelial, lung,breast

SEQ ID NO: 461238 - DNA, 69 bp, Homo sapiens; identical to SEQ ID NO: 350453
  chr6:119030678-119030747
  hyper

SEQ ID NO: 461239 - DNA, 97 bp, Homo sapiens; identical to SEQ ID NO: 458227
  chr6:134499457-134499554
  hyper
  head_and_neck vs. upper_gi,bladder_and_urothelial, multiple_myeloma,lymphoid_neoplasm,colorectal,uterine

SEQ ID NO: 461240 - DNA, 369 bp, Homo sapiens; identical to SEQ ID NO: 453400
  chr6:143247975-143248344
  hyper
  head_and_neck vs. cervical,liver_bileduct, pancreas_gallbladder,upper_gi

SEQ ID NO: 461241 - DNA, 341 bp, Homo sapiens
  chr6:167764611-167764952
  hyper
  head_and_neck vs. lung
cggagccccgcaggcccgtggccccctgcctggttctcccgcctctgcaagcctagccttcaggactccgcctcgcccccctcttttctgttcggagactcacggggccgtctgtctggaccacgtgtgcacatttctgaccacgattcctccgcacaccagctacaggcaccgcagcgctggggacggcacagctgaactgtgctggcagcgaaggggcctcacggggacggctcagctccctgagggcgcaacccacctggtccgggggcgggggggggggtgaggaataaacttccgcggttttcagtgacccagtttgttgcatggcacatgttgga

SEQ ID NO: 461242 - DNA, 23 bp, Homo sapiens
  chr6:167765145-167765168
  hyper
  head_and_neck vs. lung
tgcgccttgctctattgtgcctc

SEQ ID NO: 461243 - DNA, 274 bp, Homo sapiens; identical to SEQ ID NO: 332994
  chr7:889360-889634
  hyper

SEQ ID NO: 461244 - DNA, 396 bp, Homo sapiens; identical to SEQ ID NO: 453404
  chr7:3082731-3083127
  hyper
  head_and_neck vs. pancreas_gallbladder,cervical, bladder_and_urothelial

SEQ ID NO: 461245 - DNA, 84 bp, Homo sapiens; identical to SEQ ID NO: 350505
  chr7:3083602-3083686
  hyper
  head_and_neck vs. pancreas_gallbladder,cervical, bladder_and_urothelial

SEQ ID NO: 461246 - DNA, 322 bp, Homo sapiens; identical to SEQ ID NO: 345260
  chr7:8476750-8477072
  hyper
  head_and_neck vs. upper_gi,ovary,colorectal,uterine, prostate,renal,lung,pancreas_gallbladder,bladder_and_urothelial, multiple_myeloma,breast

SEQ ID NO: 461247 - DNA, 28 bp, Homo sapiens
  chr7:25891919-25891947
  hyper
  head_and_neck vs. anorectal
cgttacagggtgggactgggtggagcag

SEQ ID NO: 461248 - DNA, 189 bp, Homo sapiens
  chr7:25892243-25892432
  hyper
  head_and_neck vs. anorectal
ccgggagtggagaaaggctgatttacagccggccggccgcactcttgcaaaatcactgcggccggggaaacccactcccaggactcagcccggaagaggccctgaaggggagcggagactgggcgctggggtgggggcgggggcgccgagcctcaacttcccgcgtctgctggaagcttgctctgagcg

SEQ ID NO: 461249 - DNA, 6 bp, Homo sapiens
  chr7:25892608-25892614
  hyper
  head_and_neck vs. anorectal
gggatc

SEQ ID NO: 461250 - DNA, 3 bp, Homo sapiens
  chr7:27191273-27191276
  hyper
  head_and_neck vs. anorectal,sarcoma
aac

SEQ ID NO: 461251 - DNA, 21 bp, Homo sapiens
  chr7:27196839-27196860
  hyper
  head_and_neck vs. anorectal
tgtggttcgaataaagtcaac

SEQ ID NO: 461252 - DNA, 67 bp, Homo sapiens
  chr7:27203938-27204005
  hyper
  head_and_neck vs. cervical,anorectal
cgccctaaggccgctgatcacgtctgtggcttatttgaataatctgtcatggggacccttgtggccc

SEQ ID NO: 461253 - DNA, 22 bp, Homo sapiens
  chr7:27204090-27204112
  hyper
  head_and_neck vs. cervical,anorectal
cgtcccagctccggctgccctg

SEQ ID NO: 461254 - DNA, 244 bp, Homo sapiens
  chr7:27204141-27204385
  hyper
  head_and_neck vs. cervical,anorectal
tacaaaaggctctctgggctgcactgctttcgaagaacggcccaaagtatctcggtcctgggcctgggcagccaaggagaggggcggccagtcttggctcgtcccgaagtgcccgccccgccccctctcgctgcagcagccgcctcctctcccgtagccctgcgggccgctcttcactgctctccagacttggggccctatctgaggcgtcccaaacaccaacttctggctcctggccccaact

SEQ ID NO: 461255 - DNA, 104 bp, Homo sapiens; identical to SEQ ID NO: 454482
  chr7:27204281-27204385
  hyper
  head_and_neck vs. anorectal,cervical

SEQ ID NO: 461256 - DNA, 22 bp, Homo sapiens
  chr7:27206083-27206105
  hyper
  head_and_neck vs. anorectal,prostate,colorectal
gtccccggccctcgaccccacg

SEQ ID NO: 461257 - DNA, 7 bp, Homo sapiens
  chr7:37487365-37487372
  hyper
  head_and_neck vs. ovary,multiple_myeloma,uterine, lymphoid_neoplasm,non_cancer,thyroid,myeloid_neoplasm,sarcoma, breast,prostate,renal,melanoma,lung,bladder_and_urothelial, liver_bileduct
cgctcgc

SEQ ID NO: 461258 - DNA, 41 bp, Homo sapiens
  chr7:37955597-37955638
  hyper
  head_and_neck vs. sarcoma
cgcccctggcagccttaggtgtggccgcccagttctcgatt

SEQ ID NO: 461259 - DNA, 205 bp, Homo sapiens
  chr7:37956056-37956261
  hyper
  head_and_neck vs. sarcoma
cgcaccgcctcgcagggcgcgccgcgcacgcccagcgccaggtgcagccacaggcacagcgccactaggatggagaggaacatggcactgccctctcgcgctgcgaccccggcagacagaaagcgcccttctcttcctgccaccctcatctttcgctgtcccttcgccgaggaagaaatcctctggggcgcaggagagtttcttc

SEQ ID NO: 461260 - DNA, 205 bp, Homo sapiens; identical to SEQ ID NO: 461259
  chr7:37956056-37956261
  hyper
  head_and_neck vs. bladder_and_urothelial,lung

SEQ ID NO: 461261 - DNA, 136 bp, Homo sapiens; identical to SEQ ID NO: 358829
  chr7:37956568-37956704
  hyper
  head_and_neck vs. bladder_and_urothelial,lung

SEQ ID NO: 461262 - DNA, 168 bp, Homo sapiens; identical to SEQ ID NO: 345273
  chr7:37960958-37961126
  hyper
  head_and_neck vs. lung,pancreas_gallbladder, liver_bileduct,renal,ovary,sarcoma,uterine,myeloid_neoplasm, thyroid,prostate,bladder_and_urothelial,non_cancer, multiple_myeloma,melanoma,breast

SEQ ID NO: 461263 - DNA, 52 bp, Homo sapiens; identical to SEQ ID NO: 453417
  chr7:42927739-42927791
  hyper
  head_and_neck vs. pancreas_gallbladder,colorectal,renal, ovary

SEQ ID NO: 461264 - DNA, 412 bp, Homo sapiens; identical to SEQ ID NO: 346903
  chr7:42928175-42928587
  hyper
  head_and_neck vs. pancreas_gallbladder,colorectal,renal, ovary

SEQ ID NO: 461265 - DNA, 17 bp, Homo sapiens
  chr7:44349372-44349389
  hyper
  head_and_neck vs. uterine,cervical
cggaagaaactggggac

SEQ ID NO: 461266 - DNA, 37 bp, Homo sapiens
  chr7:44349523-44349560
  hyper
  head_and_neck vs. uterine,cervical
cgcctgagcagccagaaccaggccgaggccgcgcggc

SEQ ID NO: 461267 - DNA, 193 bp, Homo sapiens
  chr7:64349139-64349332
  hyper
  head_and_neck vs. melanoma,pancreas_gallbladder
aaacgctgccactgccgactccatgctgccgggaagtgcactgtggaggccactttctggaaagaagaaaccgtctgaacacaaagttgctcaagccatgttcatctatctgccagggaaacggaggccctgagtgccagagtccaagtcaccctgcaagagaaaactctggtggagcccagggtgtccagcc

SEQ ID NO: 461268 - DNA, 413 bp, Homo sapiens
  chr7:64349470-64349883
  hyper
  head_and_neck vs. melanoma,pancreas_gallbladder
acagtccgggctccgggagccaagcagggatccgggcctcgttgcggaggggacgcccgggctgagctgagctcacttgctggcggcggcagcccctgcagtcatggggtcaccggcttgtggagaggggctggcgctgttccttggccccgctccccgcccgcaaagggccgggaggtcgggctcccggcagtgtccaggctctcgcccgccggtgcctgagccgtacccaccgcgtcccctccgccccaacagctggtgctgagggtccggcccggggtcatctggcagggccgtgcggctcctgcgggtgaccaggagcgcggagccccttcccactcgggctcgggtggcctcacctttcctggggctgcgtccccgcgggacgccaggttcccggtttcttctaggtc

SEQ ID NO: 461269 - DNA, 18 bp, Homo sapiens
  chr7:64349983-64350001
  hyper
  head_and_neck vs. melanoma,pancreas_gallbladder
cgctgttggaaagcagcg

SEQ ID NO: 461270 - DNA, 48 bp, Homo sapiens; identical to SEQ ID NO: 371572
  chr7:64350036-64350084
  hyper
  head_and_neck vs. melanoma,pancreas_gallbladder

SEQ ID NO: 461271 - DNA, 57 bp, Homo sapiens; identical to SEQ ID NO: 453420
  chr7:64734140-64734197
  hyper
  head_and_neck vs. ovary,uterine,sarcoma,lung, myeloid_neoplasm,non_cancer

SEQ ID NO: 461272 - DNA, 59 bp, Homo sapiens; identical to SEQ ID NO: 458265
  chr7:76145303-76145362
  hyper
  head_and_neck vs. melanoma,lymphoid_neoplasm,sarcoma, colorectal,prostate,upper_gi,pancreas_gallbladder

SEQ ID NO: 461273 - DNA, 107 bp, Homo sapiens
  chr7:76751570-76751677
  hyper
  head_and_neck vs. liver_bileduct,upper_gi,lung, pancreas_gallbladder,bladder_and_urothelial,cervical,colorectal, melanoma,breast,multiple_myeloma,uterine,ovary
cggttggcttgactaggcgatgtaaacatcagctgcgtaatccccaggggcaagttgggatttgaaagctctgaactctgacctggaccccttgcctaagtccaccc

SEQ ID NO: 461274 - DNA, 230 bp, Homo sapiens; identical to SEQ ID NO: 346913
  chr7:76751716-76751946
  hyper
  head_and_neck vs. liver_bileduct,upper_gi,lung, pancreas_gallbladder,bladder_and_urothelial,cervical,colorectal, melanoma,breast,multiple_myeloma,uterine,ovary

SEQ ID NO: 461275 - DNA, 204 bp, Homo sapiens; identical to SEQ ID NO: 358894
  chr7:93203842-93204046
  hyper
  head_and_neck vs. lung

SEQ ID NO: 461276 - DNA, 170 bp, Homo sapiens; identical to SEQ ID NO: 458273
  chr7:93204048-93204218
  hyper
  head_and_neck vs. lung

SEQ ID NO: 461277 - DNA, 139 bp, Homo sapiens; identical to SEQ ID NO: 350613
  chr7:94285147-94285286
  hyper
  head_and_neck vs. sarcoma

SEQ ID NO: 461278 - DNA, 3 bp, Homo sapiens
  chr7:113723783-113723786
  hyper
  head_and_neck vs. anorectal,colorectal,breast,prostate, myeloid_neoplasm,multiple_myeloma,non_cancer,cervical,thyroid, renal,bladder_and_urothelial,ovary,uterine
ttc

SEQ ID NO: 461279 - DNA, 227 bp, Homo sapiens
  chr7:121946146-121946373
  hyper
  head_and_neck vs. thyroid
gaaccccgcagctaggcgcgcaggaagggctgcacagagtttgaagacacggcagctgtaagctggcgtgaggaggccaaaggagcgcgcagagctgcaagcaaagggcggtggggcctggaccctgaagtgagtggccgaccgcagcagctcaaggtgccatctgcctggtgagttaaccccacgtggctgtgagacaggtggtggcgggtgtcaggtattgggcc

SEQ ID NO: 461280 - DNA, 254 bp, Homo sapiens
  chr7:150863966-150864220
  hyper
  head_and_neck vs. lung,bladder_and_urothelial
cgcgcgatctaaaggtctgggacttcaaggctccaggcaggtgccgaggtgccgaggttccgagcaggttcctgtctggaatttccaggtgaaccggcctcccgccagccctggtcggccctagcacttaccgggcagacttggaaaagtctctgagaagtgcggaggcggaggtggtgggggctctgccactttctcccgggccggcagcagctcatcagcttccagcccaccctctgggcgtcggccgcctg

SEQ ID NO: 461281 - DNA, 154 bp, Homo sapiens; identical to SEQ ID NO: 358999
  chr7:152591569-152591723
  hyper
  head_and_neck vs. uterine,melanoma

SEQ ID NO: 461282 - DNA, 83 bp, Homo sapiens
  chr7:155257774-155257857
  hyper
  head_and_neck vs. thyroid
cggtgctattccagtgactacatttttttaaattttgcgaagttcaacaggtctccctccggctgggtgctcactggccctgc

SEQ ID NO: 461283 - DNA, 15 bp, Homo sapiens
  chr7:156409835-156409850
  hyper
  head_and_neck vs. anorectal,cervical,colorectal
catgccgggactgac

SEQ ID NO: 461284 - DNA, 85 bp, Homo sapiens
  chr8:4848968-4849053
  hyper
  head_and_neck vs. bladder_and_urothelial
cgaccgcctccagcctcacgactccgcaaacaggtcacgaattatgccccacgcatcaaaaactctgcgcctgccttcgccacag

SEQ ID NO: 461285 - DNA, 398 bp, Homo sapiens
  chr8:4849835-4850233
  hyper
  head_and_neck vs. melanoma
aagcagccgagctagggccgccgcggtctccacgcagcaacctctgctaattgcgggggaaggcagccggagcgtgcggaactcgagggaaccgagagtgagctcagaggctgagttgcctgcctggaaaggaggaagccccgggcccagttaggcttggagtgcaggggaaagggcgggaagttttgcggagttgcgtggcaggtgtttcctctccacgcaggggctcggctggaaaaagccaggtcctgtcccttgggctcctgccctcaccccgctgcgacacacacgccccagcacacctcacagggcacaaccctcttttccctagactttagctgcctcgccttccaattcccagccagtccagtgctgaccagaggccgctgccagtcggg

SEQ ID NO: 461286 - DNA, 110 bp, Homo sapiens; identical to SEQ ID NO: 453442
  chr8:11561282-11561392
  hyper
  head_and_neck vs. liver_bileduct,pancreas_gallbladder

SEQ ID NO: 461287 - DNA, 21 bp, Homo sapiens
  chr8:23566783-23566804
  hyper
  head_and_neck vs. anorectal
cgagtgcctggtctacgggtg

SEQ ID NO: 461288 - DNA, 88 bp, Homo sapiens; identical to SEQ ID NO: 350729
  chr8:25904367-25904455
  hyper
  head_and_neck vs. melanoma,lung,breast,sarcoma

SEQ ID NO: 461289 - DNA, 982 bp, Homo sapiens
  chr8:29206374-29207356
  hyper
  head_and_neck vs. anorectal,lung,cervical
cggcggcgggaggcggaggcgcagcgcggcggggggcgcccggaccccacgcgccctgcccgctccctagcccgagggccgcggacccaccctgccctgcaggtgtggcgggcgccaggtccctccagggactcggacagcacgcgatttttccaggatttccgactaccaaatgtgacaagacagtctcgccgccgagagtttcgccagggctcgctaaaatccggcacgcgccgccatcagatagtcgaaaatccgggctgaacaaaaggtgatcattctccgctgcccggatttgcaggcgctagaggaccggttccgcccggcgtcccccagatacccagtccttcagcctcccgctcccagagcctggatctagcccgggacggggattggccaccttccaagctgagcttggagttgggcagcgggaacgcagatacagatcgctctacacagtgtgtgcaacccaatctccctttctgcatttgccagggtcttgttttcagtgaaactggcaaggccaattgtacctcggcgcccacccctcttcaccttttctccacctctgggattctcccggtccggctcagtgtagggccccagcacgccaaaccaacaggcctatcttgtccccacgcgccccgtggtacttggaaactgttcccgggactcaagatggaccgcgcagaggagtcgcttcatcctcgaggctaggaccgttaatgtcaataaacggggcctcgctaggacggtgcggaattgcaggtgaccggagaaacccgtccgcactttccctgaggacttgaacctcgcacttgcacagaaaccttgcaaacccctacacaccaacacacacaaaggggcgcgcggggatccccgcaaccacgaatcacgccggggactccttcccgtgccaataaggcgcaggccgccaagaccccctccatctccccgactccagctagcgcccggagccctc

SEQ ID NO: 461290 - DNA, 962 bp, Homo sapiens
  chr8:29206909-29207871
  hyper
  head_and_neck vs. anorectal
cggcgcccacccctcttcaccttttctccacctctgggattctcccggtccggctcagtgtagggccccagcacgccaaaccaacaggcctatcttgtccccacgcgccccgtggtacttggaaactgttcccgggactcaagatggaccgcgcagaggagtcgcttcatcctcgaggctaggaccgttaatgtcaataaacggggcctcgctaggacggtgcggaattgcaggtgaccggagaaacccgtccgcactttccctgaggacttgaacctcgcacttgcacagaaaccttgcaaacccctacacaccaacacacacaaaggggcgcgcggggatccccgcaaccacgaatcacgccggggactccttcccgtgccaataaggcgcaggccgccaagaccccctccatctccccgactccagctagcgcccggagccctcgtttacctttgagcaggcagatgtcggtgcgctcggcgttgcggcgcagcgcctgcaccaccagcgacacggtgctgtcctcgcggaggctctcggcgcgcgggctgcgctcgtcgtagacgatgaccgccgagtagaggccggagcgcaagcgggcgcgtacctcctcctcggcgggcaggatctgctccaggctcacggagcccttagcccgccgccgcacgatggtgttacagcgcacgttgaccgaacctaggatgtagcccgcgctgtgcgccaggaacggtctgcagtccagcagcaggcacttgccgccgctcggcagccccagggtgccgtggctgccgctgccgcccgcgccgccgccattctcgtcccggttcatcagccttttgagcacactgcagtccatctcccgcagctcctccatcgtcaccatggtcgccgggaaccgaggcggctgggcgcgcgaggaagagaagagaacccgggccgcctaggctgcagaaaggggc

SEQ ID NO: 461291 - DNA, 283 bp, Homo sapiens
  chr8:29387050-29387333
  hyper
  head_and_neck vs. anorectal
cgccatccgtcatttctcggcttcctcccacgcgccttcatgcggatgtgtaggtatctcctctccctggctgagtcaagtcactcagagactgaaaagagagagaggatgtggcgtgaagctgaagcctgcacccagggcctggcacctactgggttgggcttggcgctgcgtgcttgcatttccgcggatagaccgagatggcatctgggctgtgacactggctgcccagcttttcttttctttttttccaacagcatctggaagaggctctgggagggtc

SEQ ID NO: 461292 - DNA, 270 bp, Homo sapiens
  chr8:29387367-29387637
  hyper
  head_and_neck vs. anorectal
gtgctgggacgagtgggcggaaacagccgcaggtctctctcttctcttcagcctgaaactcactgcacaaataccagaggttttttttagagattagataaatttgcatccttctccccccaaccccgcccctaagccagaggaagtgcttgaggaagtaatgtgtttaaagaatgtgggggaggggagcttacattaggaagcaggactcttagcgtgtagccagaaaccccaataacctttaagctgttaacccttgaggatacggct

SEQ ID NO: 461293 - DNA, 231 bp, Homo sapiens; identical to SEQ ID NO: 359092
  chr8:33372206-33372437
  hyper
  head_and_neck vs. pancreas_gallbladder,myeloid_neoplasm, uterine,colorectal,non_cancer,bladder_and_urothelial

SEQ ID NO: 461294 - DNA, 6 bp, Homo sapiens
  chr8:38008624-38008630
  hyper
  head_and_neck vs. thyroid,myeloid_neoplasm,sarcoma, anorectal,uterine,non_cancer
tggggc

SEQ ID NO: 461295 - DNA, 25 bp, Homo sapiens
  chr8:38323132-38323157
  hyper
cggcaaagacggccggcaatagcag

SEQ ID NO: 461296 - DNA, 232 bp, Homo sapiens
  chr8:54570292-54570524
  hyper
  head_and_neck vs. anorectal,upper_gi,colorectal,cervical, pancreas_gallbladder
cgcagctcccacccggcctcccctccgcagagctgggaccgtccccccaccccccatccttgctctgtgggcgccgcctgcactctctgaagcgcgaggctctgcacggtgtggggctggggcctttcgctccccttggctggctctctcctcctttgtcatttgcctttgtttgctgtgtgtgtctggttcaaagggcacgcctaccgagctggatagagtaaaggaagaa

SEQ ID NO: 461297 - DNA, 61 bp, Homo sapiens; identical to SEQ ID NO: 350747
  chr8:54570562-54570623
  hyper
  head_and_neck vs. anorectal,upper_gi,colorectal,cervical, pancreas_gallbladder

SEQ ID NO: 461298 - DNA, 212 bp, Homo sapiens; identical to SEQ ID NO: 345302
  chr8:61193765-61193977
  hyper
  head_and_neck vs. breast,ovary,sarcoma,upper_gi,uterine, prostate,lung,multiple_myeloma,bladder_and_urothelial, colorectal,myeloid_neoplasm,non_cancer,thyroid, pancreas_gallbladder

SEQ ID NO: 461299 - DNA, 293 bp, Homo sapiens; identical to SEQ ID NO: 453456
  chr8:61193765-61194058
  hyper
  head_and_neck vs. breast,ovary,melanoma,upper_gi,uterine, prostate,lung,colorectal,multiple_myeloma,myeloid_neoplasm, thyroid,non_cancer,pancreas_gallbladder,bladder_and_urothelial

SEQ ID NO: 461300 - DNA, 85 bp, Homo sapiens
  chr8:65499649-65499734
  hyper
  head_and_neck vs. bladder_and_urothelial, myeloid_neoplasm,non_cancer,cervical
cgaggagagtgtttgtgctgggacctggcaggactggaggaggaaaggagccgccttccagcaggtccagcatccctaggttgca

SEQ ID NO: 461301 - DNA, 29 bp, Homo sapiens
  chr8:67025640-67025669
  hyper
  head_and_neck vs. multiple_myeloma,pancreas_gallbladder, cervical,upper_gi,colorectal,renal,lymphoid_neoplasm,breast, lung,non_cancer,uterine,prostate,thyroid,melanoma,sarcoma, myeloid_neoplasm
acttcctcagcaggagacatccttaggtc

SEQ ID NO: 461302 - DNA, 281 bp, Homo sapiens; identical to SEQ ID NO: 453458
  chr8:67025640-67025921
  hyper
  head_and_neck vs. pancreas_gallbladder,lung,cervical, prostate,melanoma,upper_gi,sarcoma,colorectal,renal, multiple_myeloma,uterine,lymphoid_neoplasm,breast,non_cancer, myeloid_neoplasm,thyroid,liver_bileduct

SEQ ID NO: 461303 - DNA, 245 bp, Homo sapiens; identical to SEQ ID NO: 453459
  chr8:67025676-67025921
  hyper
  head_and_neck vs. lung,upper_gi,pancreas_gallbladder, cervical,breast,renal,lymphoid_neoplasm,melanoma,colorectal, prostate,sarcoma,multiple_myeloma,uterine,liver_bileduct,ovary, non_cancer,thyroid,myeloid_neoplasm

SEQ ID NO: 461304 - DNA, 5 bp, Homo sapiens
  chr8:67026485-67026490
  hyper
  head_and_neck vs. lung,cervical,upper_gi, pancreas_gallbladder,colorectal,breast,lymphoid_neoplasm, prostate,ovary,renal,uterine,sarcoma,multiple_myeloma,melanoma, thyroid,liver_bileduct,non_cancer
cgcat

SEQ ID NO: 461305 - DNA, 235 bp, Homo sapiens; identical to SEQ ID NO: 453461
  chr8:67026578-67026813
  hyper
  head_and_neck vs. lung,cervical,upper_gi, pancreas_gallbladder,colorectal,breast,lymphoid_neoplasm, prostate,ovary,renal,uterine,sarcoma,multiple_myeloma,melanoma, thyroid,liver_bileduct,non_cancer

SEQ ID NO: 461306 - DNA, 170 bp, Homo sapiens
  chr8:101920213-101920383
  hyper
  head_and_neck vs. lung,cervical,upper_gi, pancreas_gallbladder,colorectal,bladder_and_urothelial
cggagtgagaagctcttatccgcaggcaggtcatcctgacatctctctgcgagtctagctgagtctgggacttctacgggttttgaagggaggaagtgtgtgctgattggtccatgggtggccatcggcggggctggaaaaaacaccaaaagttctcactcccgcggtgg

SEQ ID NO: 461307 - DNA, 62 bp, Homo sapiens; identical to SEQ ID NO: 350802
  chr8:101920468-101920530
  hyper
  head_and_neck vs. lung,cervical,upper_gi, pancreas_gallbladder,colorectal,bladder_and_urothelial

SEQ ID NO: 461308 - DNA, 174 bp, Homo sapiens; identical to SEQ ID NO: 350818
  chr8:110987222-110987396
  hyper
  head_and_neck vs. lung

SEQ ID NO: 461309 - DNA, 342 bp, Homo sapiens; identical to SEQ ID NO: 453483
  chr8:114447448-114447790
  hyper
  head_and_neck vs. sarcoma

SEQ ID NO: 461310 - DNA, 19 bp, Homo sapiens
  chr8:114447852-114447871
  hyper
  head_and_neck vs. sarcoma
ccgcgacacacagacaccc

SEQ ID NO: 461311 - DNA, 818 bp, Homo sapiens; identical to SEQ ID NO: 345315
  chr8:114449602-114450420
  hyper
  head_and_neck vs. lung

SEQ ID NO: 461312 - DNA, 125 bp, Homo sapiens
  chr8:121136702-121136827
  hyper
  head_and_neck vs. myeloid_neoplasm
cgggtggggaatcagcaggttatgaggtacaaccacacgaaattgcctacattcgtctttttgtaacctacagaaatgtccatttcgatacctccagctgattcccctgcaccttaaagtttgag

SEQ ID NO: 461313 - DNA, 151 bp, Homo sapiens; identical to SEQ ID NO: 453487
  chr8:140643192-140643343
  hyper
  head_and_neck vs. bladder_and_urothelial, lymphoid_neoplasm,melanoma,lung

SEQ ID NO: 461314 - DNA, 121 bp, Homo sapiens; identical to SEQ ID NO: 454515
  chr8:144636569-144636690
  hyper
  head_and_neck vs. lymphoid_neoplasm,breast

SEQ ID NO: 461315 - DNA, 28 bp, Homo sapiens
  chr9:969529-969557
  hyper
  head_and_neck vs. anorectal
cgtgtgcccttcggcgggcggctgtagc

SEQ ID NO: 461316 - DNA, 587 bp, Homo sapiens; identical to SEQ ID NO: 359278
  chr9:14348452-14349039
  hyper
  head_and_neck vs. cervical

SEQ ID NO: 461317 - DNA, 224 bp, Homo sapiens; identical to SEQ ID NO: 333625
  chr9:16133902-16134126
  hyper
  head_and_neck vs. upper_gi

SEQ ID NO: 461318 - DNA, 55 bp, Homo sapiens; identical to SEQ ID NO: 359280
  chr9:16154771-16154826
  hyper
  head_and_neck vs. bladder_and_urothelial

SEQ ID NO: 461319 - DNA, 138 bp, Homo sapiens; identical to SEQ ID NO: 333627
  chr9:16192269-16192407
  hyper
  head_and_neck vs. cervical

SEQ ID NO: 461320 - DNA, 97 bp, Homo sapiens; identical to SEQ ID NO: 453494
  chr9:19127135-19127232
  hyper
  head_and_neck vs. bladder_and_urothelial,renal,melanoma, uterine,upper_gi,non_cancer,breast,multiple_myeloma,lung, myeloid_neoplasm,cervical,pancreas_gallbladder,thyroid, liver_bileduct,colorectal

SEQ ID NO: 461321 - DNA, 16 bp, Homo sapiens
  chr9:19127549-19127565
  hyper
  head_and_neck vs. bladder_and_urothelial,renal,melanoma, uterine,upper_gi,non_cancer,breast,multiple_myeloma,lung, myeloid_neoplasm,cervical,pancreas_gallbladder,thyroid, liver_bileduct,colorectal
gcagcacgtgacccgc

SEQ ID NO: 461322 - DNA, 72 bp, Homo sapiens; identical to SEQ ID NO: 453496
  chr9:21395928-21396000
  hyper
  head_and_neck vs. pancreas_gallbladder

SEQ ID NO: 461323 - DNA, 36 bp, Homo sapiens; identical to SEQ ID NO: 345322
  chr9:21396327-21396363
  hyper
  head_and_neck vs. pancreas_gallbladder

SEQ ID NO: 461324 - DNA, 543 bp, Homo sapiens; identical to SEQ ID NO: 453498
  chr9:34701753-34702296
  hyper

SEQ ID NO: 461325 - DNA, 894 bp, Homo sapiens; identical to SEQ ID NO: 333655
  chr9:35756575-35757469
  hyper
  head_and_neck vs. pancreas_gallbladder,upper_gi, colorectal,cervical,uterine,liver_bileduct,multiple_myeloma, bladder_and_urothelial,lung,renal

SEQ ID NO: 461326 - DNA, 22 bp, Homo sapiens
  chr9:36036762-36036784
  hyper
  head_and_neck vs. lung,melanoma,sarcoma,renal
cgacacacagttgggccataac

SEQ ID NO: 461327 - DNA, 9 bp, Homo sapiens
  chr9:37028066-37028075
  hyper
  head_and_neck vs. lymphoid_neoplasm
agagcagtc

SEQ ID NO: 461328 - DNA, 163 bp, Homo sapiens; identical to SEQ ID NO: 333671
  chr9:74640002-74640165
  hyper
  head_and_neck vs. liver_bileduct,lymphoid_neoplasm, bladder_and_urothelial

SEQ ID NO: 461329 - DNA, 545 bp, Homo sapiens
  chr9:93955385-93955930
  hyper
  head_and_neck vs. cervical
cgtgaaacacaacgtgagaatgggaatctgacatatgagtaacccggccgagaggcacctcttggaaatgacactgggccttggctagaattacgcacaggccctgggagggctgcggctcgtaggcccgtagggggcagggtgagggcggaggtcctggcgcccccaggcctgacccgcccgcaccgctgggctatttttagcgtccactaaacttagccgactccaccctcttgaataacccacatcttaaaatgctatttttctccaacaggtcaaaagaattctgcgagttagagcgcagattaagttgctagcgacgggcattgaaggttttagaaccgagaaaatgagccggtggcggggagcgcgtcctcagcggccaggcccggcacggggctcgggcactcggggacacacggtggtcgtcgctgtgtctcagcaggaccctgtgcgctggagagcttggggccgcgagtcgcgcagcaaggaggcttctggcttctctatttttagcctctgaacgttttccaaaataattacca

SEQ ID NO: 461330 - DNA, 82 bp, Homo sapiens
  chr9:93956177-93956259
  hyper
  head_and_neck vs. cervical
gacccgcaggaatgcgaggggcaagacagatcgccggaggagcaggggtcagaagtcagtgtttaaccactcactggctttc

SEQ ID NO: 461331 - DNA, 156 bp, Homo sapiens; identical to SEQ ID NO: 453504
  chr9:93955774-93955930
  hyper
  head_and_neck vs. cervical,pancreas_gallbladder

SEQ ID NO: 461332 - DNA, 268 bp, Homo sapiens; identical to SEQ ID NO: 453505
  chr9:93956177-93956445
  hyper
  head_and_neck vs. cervical,pancreas_gallbladder

SEQ ID NO: 461333 - DNA, 156 bp, Homo sapiens
  chr9:96720648-96720804
  hyper
  head_and_neck vs. cervical,non_cancer
cggcggcggcggcggggcctcctctgctcaggcactgccgcgttggcggccgaaaaaagagggtcccagagaaggggaaccccctccctgtcgaggacaccgaggcccagagaggggaagcctcctccccagtggggtgcagtctgggattgcagt

SEQ ID NO: 461334 - DNA, 202 bp, Homo sapiens; identical to SEQ ID NO: 453506
  chr9:100610480-100610682
  hyper
  head_and_neck vs. myeloid_neoplasm,thyroid, multiple_myeloma,melanoma,non_cancer

SEQ ID NO: 461335 - DNA, 202 bp, Homo sapiens; identical to SEQ ID NO: 453506
  chr9:100610480-100610682
  hyper
  head_and_neck vs. sarcoma,multiple_myeloma, myeloid_neoplasm,thyroid

SEQ ID NO: 461336 - DNA, 17 bp, Homo sapiens
  chr9:110399862-110399879
  hyper
  head_and_neck vs. melanoma
cgaggtcaaggtcgggg

SEQ ID NO: 461337 - DNA, 154 bp, Homo sapiens; identical to SEQ ID NO: 458356
  chr9:126780315-126780469
  hyper
  head_and_neck vs. uterine,myeloid_neoplasm

SEQ ID NO: 461338 - DNA, 250 bp, Homo sapiens; identical to SEQ ID NO: 458357
  chr9:126780315-126780565
  hyper
  head_and_neck vs. ovary,bladder_and_urothelial,uterine, myeloid_neoplasm,thyroid,multiple_myeloma,breast

SEQ ID NO: 461339 - DNA, 3 bp, Homo sapiens
  chr9:127212652-127212655
  hyper
  head_and_neck vs. thyroid,non_cancer,prostate,anorectal
cga

SEQ ID NO: 461340 - DNA, 7 bp, Homo sapiens
  chr9:131872920-131872927
  hyper
  head_and_neck vs. liver_bileduct
gccagcc

SEQ ID NO: 461341 - DNA, 90 bp, Homo sapiens; identical to SEQ ID NO: 454526
  chrY:2655227-2655317
  hyper
  head_and_neck vs. cervical,anorectal,breast,ovary

SEQ ID NO: 461342 - DNA, 596 bp, Homo sapiens; identical to SEQ ID NO: 345675
  chrY:2655346-2655942
  hyper
  head_and_neck vs. cervical,anorectal,breast,ovary

SEQ ID NO: 461343 - DNA, 52 bp, Homo sapiens
  chrY:4869596-4869648
  hyper
  head_and_neck vs. cervical,breast,ovary,uterine
cgcgtagcgataaaacggctcttttttttttcgaggaaagtaatgtaccttt

SEQ ID NO: 461344 - DNA, 49 bp, Homo sapiens; identical to SEQ ID NO: 347757
  chrY:4869714-4869763
  hyper
  head_and_neck vs. cervical,breast,ovary,uterine

SEQ ID NO: 461345 - DNA, 246 bp, Homo sapiens; identical to SEQ ID NO: 345676
  chrY:7140850-7141096
  hyper
  head_and_neck vs. anorectal,cervical

SEQ ID NO: 461346 - DNA, 237 bp, Homo sapiens; identical to SEQ ID NO: 336737
  chrY:14532909-14533146
  hyper
  head_and_neck vs. anorectal,cervical

SEQ ID NO: 461347 - DNA, 241 bp, Homo sapiens
  chrY:14533316-14533557
  hyper
  head_and_neck vs. anorectal,cervical,breast,ovary,lung, uterine
cgatcccctgcaccccgctgcagcccccgcacctcttccggcgccctggctgcctctgcccaaagccggcgctgggggcccggagggcagcgattggcctctgtcctgaagcccggccccgcctccgcccagccctggtaggcgcgggtcagctcctcagccctgcagcccctgcccgcaagcccgcgcgcctcctggtgtccagccccagctaccaaggagagagacccaggaaccgcca

SEQ ID NO: 461348 - DNA, 41 bp, Homo sapiens; identical to SEQ ID NO: 347760
  chrY:14533613-14533654
  hyper
  head_and_neck vs. anorectal,cervical,breast,ovary,lung, uterine

SEQ ID NO: 461349 - DNA, 74 bp, Homo sapiens; identical to SEQ ID NO: 454528
  chrY:16635744-16635818
  hyper
  head_and_neck vs. anorectal,cervical,breast,ovary

SEQ ID NO: 461350 - DNA, 624 bp, Homo sapiens; identical to SEQ ID NO: 454529
  chrY:16636060-16636684
  hyper
  head_and_neck vs. anorectal,cervical,breast,ovary

SEQ ID NO: 461351 - DNA, 4 bp, Homo sapiens
  JH636052.4:5118715-5118719
  hyper
  head_and_neck vs. anorectal
cgcc

SEQ ID NO: 461352 - DNA, 410 bp, Homo sapiens; identical to SEQ ID NO: 453535
  chr1:898245-898655
  hypo
  head_and_neck vs. breast,melanoma,lymphoid_neoplasm,lung

SEQ ID NO: 461353 - DNA, 39 bp, Homo sapiens; identical to SEQ ID NO: 453536
  chr1:898690-898729
  hypo
  head_and_neck vs. breast,melanoma,lymphoid_neoplasm,lung

SEQ ID NO: 461354 - DNA, 88 bp, Homo sapiens; identical to SEQ ID NO: 352707
  chr1:898776-898864
  hypo
  head_and_neck vs. breast,melanoma,lymphoid_neoplasm,lung

SEQ ID NO: 461355 - DNA, 360 bp, Homo sapiens; identical to SEQ ID NO: 336758
  chr1:1152902-1153262
  hypo
  head_and_neck vs. lung

SEQ ID NO: 461356 - DNA, 76 bp, Homo sapiens; identical to SEQ ID NO: 453538
  chr1:1168275-1168351
  hypo
  head_and_neck vs. bladder_and_urothelial,lung,melanoma, renal,lymphoid_neoplasm,pancreas_gallbladder,breast,non_cancer, colorectal,liver_bileduct,sarcoma

SEQ ID NO: 461357 - DNA, 114 bp, Homo sapiens; identical to SEQ ID NO: 453539
  chr1:1168984-1169098
  hypo
  head_and_neck vs. bladder_and_urothelial,lung,melanoma, renal,lymphoid_neoplasm,pancreas_gallbladder,breast,non_cancer, colorectal,liver_bileduct,sarcoma

SEQ ID NO: 461358 - DNA, 462 bp, Homo sapiens; identical to SEQ ID NO: 345682
  chr1:1168984-1169446
  hypo
  head_and_neck vs. lung,melanoma,bladder_and_urothelial, renal,lymphoid_neoplasm,pancreas_gallbladder,breast,colorectal, non_cancer,liver_bileduct,thyroid

SEQ ID NO: 461359 - DNA, 367 bp, Homo sapiens; identical to SEQ ID NO: 336762
  chr1:1194390-1194757
  hypo
  head_and_neck vs. upper_gi,colorectal,breast

SEQ ID NO: 461360 - DNA, 575 bp, Homo sapiens; identical to SEQ ID NO: 345683
  chr1:1562211-1562786
  hypo
  head_and_neck vs. liver_bileduct,breast

SEQ ID NO: 461361 - DNA, 18 bp, Homo sapiens
  chr1:2141579-2141597
  hypo
  head_and_neck vs. liver_bileduct
cggctcacctgcctgcct

SEQ ID NO: 461362 - DNA, 102 bp, Homo sapiens; identical to SEQ ID NO: 352724
  chr1:2141684-2141786
  hypo
  head_and_neck vs. liver_bileduct

SEQ ID NO: 461363 - DNA, 221 bp, Homo sapiens; identical to SEQ ID NO: 336787
  chr1:2142332-2142553
  hypo
  head_and_neck vs. liver_bileduct

SEQ ID NO: 461364 - DNA, 157 bp, Homo sapiens
  chr1:2265957-2266114
  hypo
  head_and_neck vs. breast
cggggctcccttgggggagcaggcctggttttgggctgcctgtcccaacacgacgagagggccctggctgtgtggccgtggagccggcaggaggcaggggaagtggccgctggtcacagatgtgtgccccgaagagacgacatcatttgaacactga

SEQ ID NO: 461365 - DNA, 168 bp, Homo sapiens; identical to SEQ ID NO: 375522
  chr1:2266194-2266362
  hypo
  head_and_neck vs. breast

SEQ ID NO: 461366 - DNA, 255 bp, Homo sapiens
  chr1:2275835-2276090
  hypo
  head_and_neck vs. cervical
cacattctcactattggggtggcaggaaggcccagcgaccaggagcatgtgtggggtctgggaaaggcctgggggacggggtgtggggtgcaggagccccaaggccgatgctgctgaggaggccaggagcggggaccgcacagacggcagttcctctggaggggggtcccgtgtgggccgggctgtgcaaaggacacactggtccctgctggcctctcagggcaagcgtgaggaccctggcctgctccggcctcc

SEQ ID NO: 461367 - DNA, 386 bp, Homo sapiens
  chr1:2276200-2276586
  hypo
  head_and_neck vs. cervical
gcctgcagagcctgggggcagggctgaagctggccatggaggaccttgggggccacctccaccttccagcagcaaatgccaagtccccgaatgcagaattctgccagagggagcatgaccgtctctctgttggcacaaagcgagagcatcaaagacagcgtcagcccccgcgagggtccacgcatgctcacactctgcgctcatggatggccacacacaccctgaaaacggcgtcagcctccgggagggtccacgcgtgctcacagcactcatagatgaccatatgtgccccgaagacagtgtcagcctccaggagggtccacgcgtgctcacgctctacgctcatggatggccacatgtgccccgaagacaacgtcagcccccgc

SEQ ID NO: 461368 - DNA, 48 bp, Homo sapiens
  chr1:2331316-2331364
  hypo
  head_and_neck vs. anorectal
cgaggttaccttttcccgtagccagagggttccacaggcagctcactg

SEQ ID NO: 461369 - DNA, 183 bp, Homo sapiens; identical to SEQ ID NO: 345687
  chr1:2331437-2331620
  hypo
  head_and_neck vs. anorectal

SEQ ID NO: 461370 - DNA, 35 bp, Homo sapiens; identical to SEQ ID NO: 336798
  chr1:2331916-2331951
  hypo

SEQ ID NO: 461371 - DNA, 79 bp, Homo sapiens
  chr1:2359894-2359973
  hypo
  head_and_neck vs. renal
cgtggactgcatctgtcctgcatggggtcctgcgtctggctcgcccggtgccgtgctgtggggcccacgccaacggctg

SEQ ID NO: 461372 - DNA, 44 bp, Homo sapiens; identical to SEQ ID NO: 375533
  chr1:2360320-2360364
  hypo
  head_and_neck vs. renal

SEQ ID NO: 461373 - DNA, 489 bp, Homo sapiens; identical to SEQ ID NO: 454539
  chr1:3321510-3321999
  hypo
  head_and_neck vs. upper_gi

SEQ ID NO: 461374 - DNA, 121 bp, Homo sapiens; identical to SEQ ID NO: 362275
  chr1:3322260-3322381
  hypo
  head_and_neck vs. upper_gi

SEQ ID NO: 461375 - DNA, 390 bp, Homo sapiens; identical to SEQ ID NO: 336849
  chr1:3389586-3389976
  hypo
  head_and_neck vs. pancreas_gallbladder

SEQ ID NO: 461376 - DNA, 68 bp, Homo sapiens; identical to SEQ ID NO: 362288
  chr1:3408704-3408772
  hypo
  head_and_neck vs. breast

SEQ ID NO: 461377 - DNA, 39 bp, Homo sapiens; identical to SEQ ID NO: 454548
  chr1:3659512-3659551
  hypo
  head_and_neck vs. anorectal

SEQ ID NO: 461378 - DNA, 89 bp, Homo sapiens; identical to SEQ ID NO: 336902
  chr1:9725455-9725544
  hypo

SEQ ID NO: 461379 - DNA, 241 bp, Homo sapiens; identical to SEQ ID NO: 453546
  chr1:12304451-12304692
  hypo
  head_and_neck vs. upper_gi,pancreas_gallbladder

SEQ ID NO: 461380 - DNA, 15 bp, Homo sapiens
  chr1:12304747-12304762
  hypo
  head_and_neck vs. upper_gi,pancreas_gallbladder
agtttctcatttctc

SEQ ID NO: 461381 - DNA, 334 bp, Homo sapiens; identical to SEQ ID NO: 453548
  chr1:19676386-19676720
  hypo
  head_and_neck vs. upper_gi,renal,liver_bileduct, pancreas_gallbladder,colorectal

SEQ ID NO: 461382 - DNA, 51 bp, Homo sapiens; identical to SEQ ID NO: 347798
  chr1:19676822-19676873
  hypo
  head_and_neck vs. upper_gi,renal,liver_bileduct, pancreas_gallbladder,colorectal

SEQ ID NO: 461383 - DNA, 158 bp, Homo sapiens; identical to SEQ ID NO: 362397
  chr1:23693515-23693673
  hypo
  head_and_neck vs. lymphoid_neoplasm

SEQ ID NO: 461384 - DNA, 234 bp, Homo sapiens
  chr1:27189675-27189909
  hypo
  head_and_neck vs. anorectal
cgccgcccgcctgtgtgtccccagagccatggagagagccagtctgatccagaaggccaagctggcagagcaggccgaacgctatgaggacatggcagccttcatgaaaggcgccgtggagaagggcgaggagctctcctgcgaagagcgaaacctgctctcagtagcctataagaacgtggtgggcggccagagggctgcctggagggtgctgtccagtattgagcagaaaag

SEQ ID NO: 461385 - DNA, 317 bp, Homo sapiens; identical to SEQ ID NO: 352840
  chr1:32826720-32827037
  hypo
  head_and_neck vs. lymphoid_neoplasm,lung,liver_bileduct

SEQ ID NO: 461386 - DNA, 289 bp, Homo sapiens; identical to SEQ ID NO: 352842
  chr1:33441642-33441931
  hypo
  head_and_neck vs. melanoma,liver_bileduct,upper_gi, bladder_and_urothelial,pancreas_gallbladder,colorectal,lung, breast,renal,sarcoma

SEQ ID NO: 461387 - DNA, 334 bp, Homo sapiens; identical to SEQ ID NO: 337032
  chr1:41281568-41281902
  hypo
  head_and_neck vs. breast,pancreas_gallbladder,cervical, uterine,ovary,lung,renal,melanoma,colorectal,lymphoid_neoplasm

SEQ ID NO: 461388 - DNA, 148 bp, Homo sapiens; identical to SEQ ID NO: 337042
  chr1:44132677-44132825
  hypo
  head_and_neck vs. breast,upper_gi,ovary, lymphoid_neoplasm,renal,pancreas_gallbladder,liver_bileduct, uterine,thyroid

SEQ ID NO: 461389 - DNA, 60 bp, Homo sapiens; identical to SEQ ID NO: 453555
  chr1:44351032-44351092
  hypo
  head_and_neck vs. liver_bileduct,lymphoid_neoplasm, prostate,melanoma,sarcoma,renal,anorectal

SEQ ID NO: 461390 - DNA, 24 bp, Homo sapiens
  chr1:45156613-45156637
  hypo
  head_and_neck vs. lymphoid_neoplasm
cgcgcccagtgaagcttcttgaaa

SEQ ID NO: 461391 - DNA, 154 bp, Homo sapiens; identical to SEQ ID NO: 356828
  chr1:91183993-91184147
  hypo
  head_and_neck vs. sarcoma,melanoma

SEQ ID NO: 461392 - DNA, 79 bp, Homo sapiens; identical to SEQ ID NO: 453558
  chr1:100928315-100928394
  hypo

SEQ ID NO: 461393 - DNA, 60 bp, Homo sapiens; identical to SEQ ID NO: 362506
  chr1:100928423-100928483
  hypo

SEQ ID NO: 461394 - DNA, 280 bp, Homo sapiens; identical to SEQ ID NO: 337131
  chr1:109839458-109839738
  hypo
  head_and_neck vs. upper_gi

SEQ ID NO: 461395 - DNA, 158 bp, Homo sapiens; identical to SEQ ID NO: 337206
  chr1:161367435-161367593
  hypo
  head_and_neck vs. melanoma,sarcoma,lymphoid_neoplasm, prostate,renal

SEQ ID NO: 461396 - DNA, 294 bp, Homo sapiens; identical to SEQ ID NO: 460600
  chr1:161369566-161369860
  hypo
  head_and_neck vs. lung,liver_bileduct,cervical, bladder_and_urothelial,upper_gi,pancreas_gallbladder,breast, lymphoid_neoplasm,colorectal,melanoma,prostate,uterine,sarcoma, multiple_myeloma,ovary

SEQ ID NO: 461397 - DNA, 299 bp, Homo sapiens; identical to SEQ ID NO: 344979
  chr1:161369945-161370244
  hypo
  head_and_neck vs. lung,liver_bileduct,cervical, bladder_and_urothelial,upper_gi,pancreas_gallbladder,breast, lymphoid_neoplasm,colorectal,melanoma,prostate,uterine,sarcoma, multiple_myeloma,ovary

SEQ ID NO: 461398 - DNA, 32 bp, Homo sapiens; identical to SEQ ID NO: 453566
  chr1:167393552-167393584
  hypo
  head_and_neck vs. ovary,upper_gi,renal,breast, lymphoid_neoplasm,uterine,colorectal,liver_bileduct, pancreas_gallbladder,melanoma

SEQ ID NO: 461399 - DNA, 187 bp, Homo sapiens; identical to SEQ ID NO: 352930
  chr1:167393613-167393800
  hypo
  head_and_neck vs. ovary,upper_gi,renal,breast, lymphoid_neoplasm,uterine,colorectal,liver_bileduct, pancreas_gallbladder,melanoma

SEQ ID NO: 461400 - DNA, 70 bp, Homo sapiens; identical to SEQ ID NO: 453568
  chr1:171554936-171555006
  hypo
  head_and_neck vs. liver_bileduct,sarcoma,colorectal, renal,lymphoid_neoplasm,breast,ovary,upper_gi,melanoma,prostate, uterine,pancreas_gallbladder,multiple_myeloma,non_cancer

SEQ ID NO: 461401 - DNA, 122 bp, Homo sapiens; identical to SEQ ID NO: 347839
  chr1:171555061-171555183
  hypo
  head_and_neck vs. liver_bileduct,sarcoma,colorectal, renal,lymphoid_neoplasm,breast,ovary,upper_gi,melanoma,prostate, uterine,pancreas_gallbladder,multiple_myeloma,non_cancer

SEQ ID NO: 461402 - DNA, 114 bp, Homo sapiens; identical to SEQ ID NO: 454590
  chr1:178531640-178531754
  hypo
  head_and_neck vs. upper_gi,melanoma,colorectal

SEQ ID NO: 461403 - DNA, 51 bp, Homo sapiens; identical to SEQ ID NO: 362598
  chr1:178531798-178531849
  hypo
  head_and_neck vs. upper_gi,melanoma,colorectal

SEQ ID NO: 461404 - DNA, 13 bp, Homo sapiens
  chr1:180925259-180925272
  hypo
  head_and_neck vs. liver_bileduct
cgctctctggctg

SEQ ID NO: 461405 - DNA, 3 bp, Homo sapiens
  chr1:180925402-180925405
  hypo
  head_and_neck vs. liver_bileduct
gct

SEQ ID NO: 461406 - DNA, 133 bp, Homo sapiens; identical to SEQ ID NO: 362622
  chr1:201851148-201851281
  hypo

SEQ ID NO: 461407 - DNA, 225 bp, Homo sapiens; identical to SEQ ID NO: 337294
  chr1:205245793-205246018
  hypo
  head_and_neck vs. upper_gi,colorectal

SEQ ID NO: 461408 - DNA, 64 bp, Homo sapiens; identical to SEQ ID NO: 337327
  chr1:224368640-224368704
  hypo
  head_and_neck vs. upper_gi,liver_bileduct

SEQ ID NO: 461409 - DNA, 331 bp, Homo sapiens; identical to SEQ ID NO: 454598
  chr1:228280981-228281312
  hypo
  head_and_neck vs. cervical

SEQ ID NO: 461410 - DNA, 203 bp, Homo sapiens; identical to SEQ ID NO: 337351
  chr1:228361379-228361582
  hypo
  head_and_neck vs. anorectal

SEQ ID NO: 461411 - DNA, 359 bp, Homo sapiens; identical to SEQ ID NO: 454601
  chr1:228528433-228528792
  hypo
  head_and_neck vs. anorectal

SEQ ID NO: 461412 - DNA, 50 bp, Homo sapiens; identical to SEQ ID NO: 347858
  chr1:228529382-228529432
  hypo
  head_and_neck vs. anorectal

SEQ ID NO: 461413 - DNA, 216 bp, Homo sapiens; identical to SEQ ID NO: 453572
  chr1:234724591-234724807
  hypo
  head_and_neck vs. upper_gi,colorectal,liver_bileduct, breast,renal,pancreas_gallbladder,lung,lymphoid_neoplasm, prostate,ovary,melanoma

SEQ ID NO: 461414 - DNA, 209 bp, Homo sapiens; identical to SEQ ID NO: 353003
  chr1:234724836-234725045
  hypo
  head_and_neck vs. upper_gi,colorectal,liver_bileduct, breast,renal,pancreas_gallbladder,lung,lymphoid_neoplasm, prostate,ovary,melanoma

SEQ ID NO: 461415 - DNA, 97 bp, Homo sapiens; identical to SEQ ID NO: 453579
  chr1:246330213-246330310
  hypo
  head_and_neck vs. sarcoma,liver_bileduct, lymphoid_neoplasm

SEQ ID NO: 461416 - DNA, 102 bp, Homo sapiens; identical to SEQ ID NO: 453581
  chr10:524407-524509
  hypo
  head_and_neck vs. upper_gi,lymphoid_neoplasm, pancreas_gallbladder,melanoma,colorectal,breast,prostate

SEQ ID NO: 461417 - DNA, 84 bp, Homo sapiens; identical to SEQ ID NO: 453582
  chr10:524671-524755
  hypo
  head_and_neck vs. upper_gi,lymphoid_neoplasm, pancreas_gallbladder,melanoma,colorectal,breast,prostate

SEQ ID NO: 461418 - DNA, 9 bp, Homo sapiens
  chr10:524784-524793
  hypo
  head_and_neck vs. upper_gi,lymphoid_neoplasm, pancreas_gallbladder,melanoma,colorectal,breast,prostate
gatagcaac

SEQ ID NO: 461419 - DNA, 142 bp, Homo sapiens; identical to SEQ ID NO: 453584
  chr10:851108-851250
  hypo
  head_and_neck vs. liver_bileduct,melanoma, lymphoid_neoplasm,pancreas_gallbladder

SEQ ID NO: 461420 - DNA, 175 bp, Homo sapiens; identical to SEQ ID NO: 354474
  chr10:851504-851679
  hypo
  head_and_neck vs. liver_bileduct,melanoma, lymphoid_neoplasm,pancreas_gallbladder

SEQ ID NO: 461421 - DNA, 55 bp, Homo sapiens; identical to SEQ ID NO: 453586
  chr10:5523206-5523261
  hypo
  head_and_neck vs. colorectal

SEQ ID NO: 461422 - DNA, 381 bp, Homo sapiens; identical to SEQ ID NO: 453589
  chr10:5540271-5540652
  hypo
  head_and_neck vs. colorectal,pancreas_gallbladder, liver_bileduct,renal,prostate,uterine,sarcoma, bladder_and_urothelial,upper_gi,melanoma,lung

SEQ ID NO: 461423 - DNA, 198 bp, Homo sapiens; identical to SEQ ID NO: 348416
  chr10:5541528-5541726
  hypo
  head_and_neck vs. colorectal,renal,sarcoma, pancreas_gallbladder,prostate,lymphoid_neoplasm,liver_bileduct, upper_gi,lung,melanoma,bladder_and_urothelial,uterine

SEQ ID NO: 461424 - DNA, 146 bp, Homo sapiens
  chr10:5576085-5576231
  hypo
cgctccctcgcaggcgcacaggccctttctcaggaaagccccacacttggcttaaggctctgctgttgctgccttgaactcttaatgagttttgaacaaggcgccccgcattttcattttgcattaagccccccaaattatgtgcc

SEQ ID NO: 461425 - DNA, 11 bp, Homo sapiens
  chr10:5576288-5576299
  hypo
cagactgtcgc

SEQ ID NO: 461426 - DNA, 421 bp, Homo sapiens; identical to SEQ ID NO: 340545
  chr10:5960358-5960779
  hypo
  head_and_neck vs. liver_bileduct,upper_gi, pancreas_gallbladder,ovary,colorectal

SEQ ID NO: 461427 - DNA, 61 bp, Homo sapiens; identical to SEQ ID NO: 459300
  chr10:7453036-7453097
  hypo
  head_and_neck vs. breast,renal,cervical,lung,melanoma

SEQ ID NO: 461428 - DNA, 61 bp, Homo sapiens; identical to SEQ ID NO: 459300
  chr10:7453036-7453097
  hypo
  head_and_neck vs. anorectal

SEQ ID NO: 461429 - DNA, 11 bp, Homo sapiens
  chr10:15762114-15762125
  hypo
  head_and_neck vs. prostate
gtcccatctca

SEQ ID NO: 461430 - DNA, 174 bp, Homo sapiens; identical to SEQ ID NO: 359507
  chr10:15762154-15762328
  hypo
  head_and_neck vs. prostate

SEQ ID NO: 461431 - DNA, 215 bp, Homo sapiens; identical to SEQ ID NO: 459309
  chr10:23001984-23002199
  hypo
  head_and_neck vs. lung,ovary,pancreas_gallbladder, melanoma,breast,bladder_and_urothelial,sarcoma

SEQ ID NO: 461432 - DNA, 286 bp, Homo sapiens; identical to SEQ ID NO: 351010
  chr10:23002228-23002514
  hypo
  head_and_neck vs. lung,ovary,pancreas_gallbladder, melanoma,breast,bladder_and_urothelial,sarcoma

SEQ ID NO: 461433 - DNA, 634 bp, Homo sapiens; identical to SEQ ID NO: 340649
  chr10:71133924-71134558
  hypo
  head_and_neck vs. lymphoid_neoplasm,cervical,upper_gi

SEQ ID NO: 461434 - DNA, 116 bp, Homo sapiens; identical to SEQ ID NO: 340667
  chr10:75574077-75574193
  hypo
  head_and_neck vs. cervical

SEQ ID NO: 461435 - DNA, 38 bp, Homo sapiens; identical to SEQ ID NO: 452783
  chr10:112431835-112431873
  hypo
  head_and_neck vs. renal

SEQ ID NO: 461436 - DNA, 236 bp, Homo sapiens; identical to SEQ ID NO: 452784
  chr10:112432125-112432361
  hypo
  head_and_neck vs. renal

SEQ ID NO: 461437 - DNA, 70 bp, Homo sapiens
  chr10:126314669-126314739
  hypo
  head_and_neck vs. lung
cgcccgaacgcgtgccagcgttttctgcgagctgtcatgtgaggggcctggggcgtggcctgctgcgagt

SEQ ID NO: 461438 - DNA, 31 bp, Homo sapiens
  chr10:134913663-134913694
  hypo
  head_and_neck vs. lymphoid_neoplasm
cgtgcccccggcctgggcctgggcctgggcc

SEQ ID NO: 461439 - DNA, 808 bp, Homo sapiens; identical to SEQ ID NO: 340878
  chr11:376596-377404
  hypo
  head_and_neck vs. anorectal

SEQ ID NO: 461440 - DNA, 258 bp, Homo sapiens; identical to SEQ ID NO: 354658
  chr11:859386-859644
  hypo
  head_and_neck vs. anorectal,lymphoid_neoplasm

SEQ ID NO: 461441 - DNA, 513 bp, Homo sapiens; identical to SEQ ID NO: 340902
  chr11:993208-993721
  hypo
  head_and_neck vs. breast

SEQ ID NO: 461442 - DNA, 104 bp, Homo sapiens; identical to SEQ ID NO: 354667
  chr11:1471460-1471564
  hypo
  head_and_neck vs. anorectal

SEQ ID NO: 461443 - DNA, 227 bp, Homo sapiens; identical to SEQ ID NO: 354668
  chr11:1521171-1521398
  hypo
  head_and_neck vs. liver_bileduct,upper_gi,colorectal, melanoma,breast

SEQ ID NO: 461444 - DNA, 21 bp, Homo sapiens
  chr11:2209823-2209844
  hypo
  head_and_neck vs. anorectal
cgtaaaaaggcaactcccaga

SEQ ID NO: 461445 - DNA, 311 bp, Homo sapiens; identical to SEQ ID NO: 454642
  chr11:9554670-9554981
  hypo

SEQ ID NO: 461446 - DNA, 28 bp, Homo sapiens
  chr11:33874006-33874034
  hypo
  head_and_neck vs. anorectal,cervical
cgtgccctgttcactcggcccgccatgc

SEQ ID NO: 461447 - DNA, 29 bp, Homo sapiens
  chr11:33874072-33874101
  hypo
  head_and_neck vs. anorectal,cervical
gcaggatctggccggctgctttgggcagc

SEQ ID NO: 461448 - DNA, 115 bp, Homo sapiens; identical to SEQ ID NO: 341029
  chr11:34897239-34897354
  hypo
  head_and_neck vs. pancreas_gallbladder

SEQ ID NO: 461449 - DNA, 17 bp, Homo sapiens
  chr11:47358910-47358927
  hypo
  head_and_neck vs. prostate,lymphoid_neoplasm,breast, thyroid,sarcoma,melanoma
cggggggcaggaccagg

SEQ ID NO: 461450 - DNA, 106 bp, Homo sapiens; identical to SEQ ID NO: 348490
  chr11:47359237-47359343
  hypo
  head_and_neck vs. prostate,lymphoid_neoplasm,breast, thyroid,sarcoma,melanoma

SEQ ID NO: 461451 - DNA, 101 bp, Homo sapiens; identical to SEQ ID NO: 348491
  chr11:61036547-61036648
  hypo
  head_and_neck vs. liver_bileduct,upper_gi,ovary, colorectal,pancreas_gallbladder

SEQ ID NO: 461452 - DNA, 306 bp, Homo sapiens
  chr11:64129097-64129403
  hypo
  head_and_neck vs. cervical,lung
cggctccacccggcaggctgtggactggtggagcctgggcatcttgctcttcgagctgctgacgggggcctcgcccttcaccctggagggcgagaggaacacgcaggctgaggtgtctcggtgagtagggctggacgtggagggcggccagagggctgcagggcctgcctgggcagggctgtgggtggggggcttgctgcccctgacacccccccaatcctcccagacggatcctgaagtgctcccctcccttcccccctcggatcgggcccgtggcgcaggacctgctgcagcggctgctttgta

SEQ ID NO: 461453 - DNA, 227 bp, Homo sapiens; identical to SEQ ID NO: 379780
  chr11:66454454-66454681
  hypo
  head_and_neck vs. colorectal

SEQ ID NO: 461454 - DNA, 98 bp, Homo sapiens
  chr11:70022862-70022960
  hypo
cgagacgatgaaccccattcaaatggttcgggggacccttagaattttatttttggtttacagagatccttagagcagtgagtgtcaccctggaatgt

SEQ ID NO: 461455 - DNA, 268 bp, Homo sapiens
  chr11:70022989-70023257
  hypo
caccccaggagaggcggatcccgtgggctggggctggggtgccggttcagcatttctctaacacaccccgcggatgtgcagggccacacggagagccatccgcctggacgtagatatcctgcagacctgtcaggacaggctccatcggggcccggaagcgaggaagaccccgctcccggctccatctcatccccgcctcatccctcccatttcctgttgtctctctgggccggttgggcgatcacctgggcggacccccttgcctgcc

SEQ ID NO: 461456 - DNA, 121 bp, Homo sapiens; identical to SEQ ID NO: 379818
  chr11:70023286-70023407
  hypo

SEQ ID NO: 461457 - DNA, 522 bp, Homo sapiens; identical to SEQ ID NO: 454653
  chr11:71192127-71192649
  hypo
  head_and_neck vs. lymphoid_neoplasm

SEQ ID NO: 461458 - DNA, 169 bp, Homo sapiens; identical to SEQ ID NO: 348516
  chr11:71192889-71193058
  hypo
  head_and_neck vs. lymphoid_neoplasm

SEQ ID NO: 461459 - DNA, 192 bp, Homo sapiens; identical to SEQ ID NO: 453610
  chr11:71507748-71507940
  hypo
  head_and_neck vs. upper_gi

SEQ ID NO: 461460 - DNA, 6 bp, Homo sapiens
  chr11:71508037-71508043
  hypo
  head_and_neck vs. upper_gi
ttccac

SEQ ID NO: 461461 - DNA, 218 bp, Homo sapiens; identical to SEQ ID NO: 454658
  chr11:75152263-75152481
  hypo
  head_and_neck vs. lymphoid_neoplasm

SEQ ID NO: 461462 - DNA, 359 bp, Homo sapiens; identical to SEQ ID NO: 365779
  chr11:75152536-75152895
  hypo
  head_and_neck vs. lymphoid_neoplasm

SEQ ID NO: 461463 - DNA, 510 bp, Homo sapiens; identical to SEQ ID NO: 452797
  chr11:76381512-76382022
  hypo
  head_and_neck vs. bladder_and_urothelial, multiple_myeloma,lymphoid_neoplasm,non_cancer,myeloid_neoplasm, lung,thyroid

SEQ ID NO: 461464 - DNA, 30 bp, Homo sapiens; identical to SEQ ID NO: 452798
  chr11:76382264-76382294
  hypo
  head_and_neck vs. bladder_and_urothelial, multiple_myeloma,lymphoid_neoplasm,non_cancer,myeloid_neoplasm, lung,thyroid

SEQ ID NO: 461465 - DNA, 48 bp, Homo sapiens; identical to SEQ ID NO: 454666
  chr11:120008024-120008072
  hypo
  head_and_neck vs. lymphoid_neoplasm

SEQ ID NO: 461466 - DNA, 49 bp, Homo sapiens
  chr11:126272994-126273043
  hypo
  head_and_neck vs. cervical
cggaagccctggaatgcctggggccactgagcaatcctcaccctcagcc

SEQ ID NO: 461467 - DNA, 115 bp, Homo sapiens; identical to SEQ ID NO: 379921
  chr11:126273273-126273388
  hypo
  head_and_neck vs. cervical

SEQ ID NO: 461468 - DNA, 17 bp, Homo sapiens
  chr11:133938756-133938773
  hypo
  head_and_neck vs. melanoma,sarcoma
cgccaagttcattgaaa

SEQ ID NO: 461469 - DNA, 161 bp, Homo sapiens; identical to SEQ ID NO: 345407
  chr11:133939437-133939598
  hypo
  head_and_neck vs. melanoma,sarcoma

SEQ ID NO: 461470 - DNA, 155 bp, Homo sapiens; identical to SEQ ID NO: 341313
  chr12:1992067-1992222
  hypo
  head_and_neck vs. uterine,breast

SEQ ID NO: 461471 - DNA, 215 bp, Homo sapiens; identical to SEQ ID NO: 341359
  chr12:9108820-9109035
  hypo
  head_and_neck vs. upper_gi,colorectal,ovary

SEQ ID NO: 461472 - DNA, 97 bp, Homo sapiens; identical to SEQ ID NO: 341398
  chr12:49065604-49065701
  hypo
  head_and_neck vs. pancreas_gallbladder,liver_bileduct, upper_gi,colorectal,breast,lymphoid_neoplasm,ovary,uterine, prostate,melanoma

SEQ ID NO: 461473 - DNA, 40 bp, Homo sapiens
  chr12:52387815-52387855
  hypo
  head_and_neck vs. cervical,upper_gi
cggcgcagcccgcctgacggccctgcgcatcaagaagacc

SEQ ID NO: 461474 - DNA, 7 bp, Homo sapiens
  chr12:52388498-52388505
  hypo
  head_and_neck vs. cervical,upper_gi
cacgtgc

SEQ ID NO: 461475 - DNA, 156 bp, Homo sapiens; identical to SEQ ID NO: 334530
  chr12:53272458-53272614
  hypo
  head_and_neck vs. pancreas_gallbladder,uterine,melanoma, renal,lymphoid_neoplasm

SEQ ID NO: 461476 - DNA, 117 bp, Homo sapiens; identical to SEQ ID NO: 341466
  chr12:94145777-94145894
  hypo
  head_and_neck vs. liver_bileduct,lymphoid_neoplasm

SEQ ID NO: 461477 - DNA, 31 bp, Homo sapiens; identical to SEQ ID NO: 452825
  chr12:94543992-94544023
  hypo
  head_and_neck vs. thyroid,non_cancer,melanoma, multiple_myeloma,prostate

SEQ ID NO: 461478 - DNA, 86 bp, Homo sapiens; identical to SEQ ID NO: 345430
  chr12:94544052-94544138
  hypo
  head_and_neck vs. thyroid,non_cancer,melanoma, multiple_myeloma,prostate

SEQ ID NO: 461479 - DNA, 114 bp, Homo sapiens
  chr12:110783979-110784093
  hypo
  head_and_neck vs. liver_bileduct,pancreas_gallbladder, melanoma,lymphoid_neoplasm,colorectal
cgtgacacgtcttccctgtgtgtcagctcatcttccagatcacaccgctgaacgtgacccagtggctgatggtgctgaaaatctccttgcccgtgattctcatggatgagacgc

SEQ ID NO: 461480 - DNA, 113 bp, Homo sapiens; identical to SEQ ID NO: 341495
  chr12:110784858-110784971
  hypo
  head_and_neck vs. liver_bileduct

SEQ ID NO: 461481 - DNA, 61 bp, Homo sapiens; identical to SEQ ID NO: 453628
  chr12:110983646-110983707
  hypo
  head_and_neck vs. liver_bileduct,colorectal,prostate, breast

SEQ ID NO: 461482 - DNA, 136 bp, Homo sapiens; identical to SEQ ID NO: 354932
  chr12:110983736-110983872
  hypo
  head_and_neck vs. liver_bileduct,colorectal,prostate, breast

SEQ ID NO: 461483 - DNA, 292 bp, Homo sapiens; identical to SEQ ID NO: 453632
  chr12:113725566-113725858
  hypo
  head_and_neck vs. liver_bileduct

SEQ ID NO: 461484 - DNA, 146 bp, Homo sapiens; identical to SEQ ID NO: 341524
  chr12:114334084-114334230
  hypo
  head_and_neck vs. liver_bileduct

SEQ ID NO: 461485 - DNA, 285 bp, Homo sapiens
  chr12:114337479-114337764
  hypo
  head_and_neck vs. lymphoid_neoplasm
cgacaagttatttcttaactaaaaagcagtgtttgagacctcccttttccgtggaaaactctgcgatgcgtgaggggagagaagctgttcctaaagaggaatcccccaagctgtctggggctccctgctgcctttcaccacccagaatgctggaagacatggcgcgcaattatcagctccaacaatgagccaacggcggccctccgagcaagcccagacaaagcacagagaccttgcagctgaaaaggctctgaatgcagacaggggaggtgtgaaagcaaggtt

SEQ ID NO: 461486 - DNA, 147 bp, Homo sapiens
  chr12:114337793-114337940
  hypo
  head_and_neck vs. lymphoid_neoplasm
ggaggggaggaatgagggcgcacaatgccacccttcccccggtacaggcacgctctccctggggcaccctgttccactgtctgagcttttgtcgcccactctggaaccagtctaggcgtgcagtgagggaaaacgccagctgcagcg

SEQ ID NO: 461487 - DNA, 704 bp, Homo sapiens; identical to SEQ ID NO: 453635
  chr12:121687598-121688302
  hypo

SEQ ID NO: 461488 - DNA, 239 bp, Homo sapiens; identical to SEQ ID NO: 348574
  chr12:121688331-121688570
  hypo

SEQ ID NO: 461489 - DNA, 276 bp, Homo sapiens; identical to SEQ ID NO: 354973
  chr12:122439511-122439787
  hypo
  head_and_neck vs. sarcoma

SEQ ID NO: 461490 - DNA, 210 bp, Homo sapiens; identical to SEQ ID NO: 453637
  chr12:122622385-122622595
  hypo
  head_and_neck vs. sarcoma,cervical,melanoma

SEQ ID NO: 461491 - DNA, 261 bp, Homo sapiens; identical to SEQ ID NO: 366105
  chr12:122622642-122622903
  hypo
  head_and_neck vs. sarcoma,cervical,melanoma

SEQ ID NO: 461492 - DNA, 152 bp, Homo sapiens
  chr12:124788624-124788776
  hypo
  head_and_neck vs. anorectal
cgcgagaggcacttcccttgcccactccccaggctggctggagtccacagggcgccacgaccgtttcgatgttcgaatagccctgcagccagaaagacgaagctgcgagcctcaggatgaactggtggctgccaccatcttcccttggtgtc

SEQ ID NO: 461493 - DNA, 406 bp, Homo sapiens; identical to SEQ ID NO: 460689
  chr12:128750713-128751119
  hypo
  head_and_neck vs. melanoma

SEQ ID NO: 461494 - DNA, 198 bp, Homo sapiens; identical to SEQ ID NO: 366157
  chr12:131268482-131268680
  hypo
  head_and_neck vs. pancreas_gallbladder,liver_bileduct

SEQ ID NO: 461495 - DNA, 237 bp, Homo sapiens; identical to SEQ ID NO: 454705
  chr12:131271740-131271977
  hypo
  head_and_neck vs. liver_bileduct

SEQ ID NO: 461496 - DNA, 299 bp, Homo sapiens; identical to SEQ ID NO: 454706
  chr12:131272032-131272331
  hypo
  head_and_neck vs. liver_bileduct

SEQ ID NO: 461497 - DNA, 212 bp, Homo sapiens; identical to SEQ ID NO: 454707
  chr12:131272367-131272579
  hypo
  head_and_neck vs. liver_bileduct

SEQ ID NO: 461498 - DNA, 237 bp, Homo sapiens
  chr12:131272094-131272331
  hypo
  head_and_neck vs. liver_bileduct,pancreas_gallbladder
cggacatgacgcttaggaccttaccttgctctccagctcagagcccggcccccatggccgggccagacctgccccggcctctcccctccgcctgagccacgccccggcttcctgctcaccaggcctgcgttagcatctgcagctgtgcttcttcaggccgccgcaacaccagccttcccgcactgctccaagacactgagcctggtgcatgctcaggaaattcaacaatttcaaaac

SEQ ID NO: 461499 - DNA, 714 bp, Homo sapiens; identical to SEQ ID NO: 346068
  chr12:131272367-131273081
  hypo
  head_and_neck vs. liver_bileduct,pancreas_gallbladder

SEQ ID NO: 461500 - DNA, 623 bp, Homo sapiens; identical to SEQ ID NO: 366167
  chr12:132218722-132219345
  hypo
  head_and_neck vs. liver_bileduct,ovary,upper_gi, colorectal

SEQ ID NO: 461501 - DNA, 99 bp, Homo sapiens; identical to SEQ ID NO: 341656
  chr12:132411621-132411720
  hypo
  head_and_neck vs. colorectal,pancreas_gallbladder, liver_bileduct,lymphoid_neoplasm,prostate,breast, bladder_and_urothelial,renal,upper_gi,anorectal,melanoma, cervical,lung,multiple_myeloma

SEQ ID NO: 461502 - DNA, 160 bp, Homo sapiens; identical to SEQ ID NO: 458599
  chr12:132643296-132643456
  hypo

SEQ ID NO: 461503 - DNA, 321 bp, Homo sapiens; identical to SEQ ID NO: 458600
  chr12:132643525-132643846
  hypo

SEQ ID NO: 461504 - DNA, 92 bp, Homo sapiens; identical to SEQ ID NO: 366183
  chr12:132644008-132644100
  hypo

SEQ ID NO: 461505 - DNA, 425 bp, Homo sapiens; identical to SEQ ID NO: 454711
  chr12:132665953-132666378
  hypo

SEQ ID NO: 461506 - DNA, 86 bp, Homo sapiens; identical to SEQ ID NO: 366185
  chr12:132666502-132666588
  hypo

SEQ ID NO: 461507 - DNA, 126 bp, Homo sapiens; identical to SEQ ID NO: 341665
  chr12:132675105-132675231
  hypo

SEQ ID NO: 461508 - DNA, 506 bp, Homo sapiens; identical to SEQ ID NO: 341686
  chr13:20979799-20980305
  hypo
  head_and_neck vs. liver_bileduct,colorectal

SEQ ID NO: 461509 - DNA, 201 bp, Homo sapiens; identical to SEQ ID NO: 452842
  chr13:29292491-29292692
  hypo
  head_and_neck vs. ovary,lung,uterine,colorectal, non_cancer,lymphoid_neoplasm,breast,multiple_myeloma,thyroid, sarcoma,pancreas_gallbladder,renal

SEQ ID NO: 461510 - DNA, 242 bp, Homo sapiens; identical to SEQ ID NO: 345442
  chr13:29293342-29293584
  hypo
  head_and_neck vs. lymphoid_neoplasm,lung,ovary,uterine, multiple_myeloma,colorectal,breast,non_cancer,thyroid,renal, pancreas_gallbladder,sarcoma

SEQ ID NO: 461511 - DNA, 199 bp, Homo sapiens; identical to SEQ ID NO: 341709
  chr13:30079657-30079856
  hypo
  head_and_neck vs. melanoma

SEQ ID NO: 461512 - DNA, 140 bp, Homo sapiens
  chr13:111289028-111289168
  hypo
  head_and_neck vs. liver_bileduct
cggtggaggcctcgctcggtgttgccctgtatggttgagctgtggtttaaggtgaactctggagtgtgggctgcaggtgagggctccgtccctgggagctggtgggaggagctggaggctggcgccgccctgctcagagc

SEQ ID NO: 461513 - DNA, 288 bp, Homo sapiens; identical to SEQ ID NO: 366302
  chr13:113667314-113667602
  hypo
  head_and_neck vs. liver_bileduct

SEQ ID NO: 461514 - DNA, 45 bp, Homo sapiens; identical to SEQ ID NO: 454739
  chr13:113985425-113985470
  hypo
  head_and_neck vs. anorectal

SEQ ID NO: 461515 - DNA, 169 bp, Homo sapiens; identical to SEQ ID NO: 380502
  chr13:114305760-114305929
  hypo
  head_and_neck vs. cervical

SEQ ID NO: 461516 - DNA, 18 bp, Homo sapiens
  chr13:114497796-114497814
  hypo
  head_and_neck vs. lymphoid_neoplasm,renal,thyroid, prostate,myeloid_neoplasm,non_cancer
cgtgtgatgagcacacat

SEQ ID NO: 461517 - DNA, 139 bp, Homo sapiens; identical to SEQ ID NO: 454748
  chr13:114748186-114748325
  hypo
  head_and_neck vs. melanoma

SEQ ID NO: 461518 - DNA, 3 bp, Homo sapiens
  chr13:114807499-114807502
  hypo
  head_and_neck vs. melanoma,colorectal,lymphoid_neoplasm, renal,pancreas_gallbladder,breast,upper_gi,prostate,uterine
cgc

SEQ ID NO: 461519 - DNA, 92 bp, Homo sapiens; identical to SEQ ID NO: 346082
  chr13:114807847-114807939
  hypo
  head_and_neck vs. melanoma,colorectal,lymphoid_neoplasm, renal,pancreas_gallbladder,breast,upper_gi,prostate,uterine

SEQ ID NO: 461520 - DNA, 39 bp, Homo sapiens; identical to SEQ ID NO: 452862
  chr14:23355352-23355391
  hypo
  head_and_neck vs. bladder_and_urothelial

SEQ ID NO: 461521 - DNA, 53 bp, Homo sapiens; identical to SEQ ID NO: 351522
  chr14:23355484-23355537
  hypo
  head_and_neck vs. bladder_and_urothelial

SEQ ID NO: 461522 - DNA, 20 bp, Homo sapiens
  chr14:23777239-23777259
  hypo
  head_and_neck vs. lymphoid_neoplasm,multiple_myeloma
agggggccccaactggggcc

SEQ ID NO: 461523 - DNA, 80 bp, Homo sapiens; identical to SEQ ID NO: 452877
  chr14:60097114-60097194
  hypo
  head_and_neck vs. breast,prostate,myeloid_neoplasm

SEQ ID NO: 461524 - DNA, 30 bp, Homo sapiens; identical to SEQ ID NO: 460715
  chr14:60974092-60974122
  hypo
  head_and_neck vs. multiple_myeloma

SEQ ID NO: 461525 - DNA, 277 bp, Homo sapiens; identical to SEQ ID NO: 460716
  chr14:60974092-60974369
  hypo
  head_and_neck vs. bladder_and_urothelial, multiple_myeloma

SEQ ID NO: 461526 - DNA, 619 bp, Homo sapiens; identical to SEQ ID NO: 460721
  chr14:61123686-61124305
  hypo
  head_and_neck vs. cervical

SEQ ID NO: 461527 - DNA, 111 bp, Homo sapiens; identical to SEQ ID NO: 341982
  chr14:89875711-89875822
  hypo
  head_and_neck vs. liver_bileduct

SEQ ID NO: 461528 - DNA, 160 bp, Homo sapiens; identical to SEQ ID NO: 454771
  chr14:93154728-93154888
  hypo
  head_and_neck vs. melanoma,breast,lymphoid_neoplasm, renal

SEQ ID NO: 461529 - DNA, 100 bp, Homo sapiens
  chr14:94404099-94404199
  hypo
  head_and_neck vs. anorectal
cgcgagcagagctgcacgttgcccacgtagtccaggaggacatcgatgatgggccccgcccagcggctcacctctggggcagatacgaactcacagaact

SEQ ID NO: 461530 - DNA, 42 bp, Homo sapiens; identical to SEQ ID NO: 380644
  chr14:94404228-94404270
  hypo
  head_and_neck vs. anorectal

SEQ ID NO: 461531 - DNA, 21 bp, Homo sapiens
  chr14:101250330-101250351
  hypo
  head_and_neck vs. breast
caggctgcatgatgtcatttc

SEQ ID NO: 461532 - DNA, 599 bp, Homo sapiens; identical to SEQ ID NO: 453658
  chr14:104048314-104048913
  hypo
  head_and_neck vs. liver_bileduct,breast,renal,melanoma, lymphoid_neoplasm,prostate,uterine,ovary,multiple_myeloma, sarcoma

SEQ ID NO: 461533 - DNA, 127 bp, Homo sapiens; identical to SEQ ID NO: 346089
  chr14:104048982-104049109
  hypo
  head_and_neck vs. liver_bileduct,breast,renal,melanoma, lymphoid_neoplasm,prostate,uterine,ovary,multiple_myeloma, sarcoma

SEQ ID NO: 461534 - DNA, 507 bp, Homo sapiens; identical to SEQ ID NO: 351653
  chr15:31774606-31775113
  hypo
  head_and_neck vs. pancreas_gallbladder,lung,colorectal, breast,upper_gi

SEQ ID NO: 461535 - DNA, 1 bp, Homo sapiens
  chr15:35310730-35310731
  hypo
  head_and_neck vs. anorectal
c

SEQ ID NO: 461536 - DNA, 90 bp, Homo sapiens; identical to SEQ ID NO: 355244
  chr15:40532821-40532911
  hypo
  head_and_neck vs. colorectal,upper_gi,lymphoid_neoplasm, prostate,pancreas_gallbladder,melanoma,uterine

SEQ ID NO: 461537 - DNA, 2 bp, Homo sapiens
  chr15:43467925-43467927
  hypo
  head_and_neck vs. liver_bileduct
cc

SEQ ID NO: 461538 - DNA, 351 bp, Homo sapiens; identical to SEQ ID NO: 452903
  chr15:63795501-63795852
  hypo
  head_and_neck vs. upper_gi,liver_bileduct, bladder_and_urothelial,colorectal,renal,pancreas_gallbladder

SEQ ID NO: 461539 - DNA, 338 bp, Homo sapiens; identical to SEQ ID NO: 347348
  chr15:63795894-63796232
  hypo
  head_and_neck vs. upper_gi,liver_bileduct, bladder_and_urothelial,colorectal,renal,pancreas_gallbladder

SEQ ID NO: 461540 - DNA, 114 bp, Homo sapiens
  chr15:83572357-83572471
  hypo
  head_and_neck vs. lymphoid_neoplasm
cgaaactcctctaaacacacacacacacacggcaacaagagcgaaactcctctaaacacacacacacacacacgccacaccccacatcaagtaaaaagctgaacaagactgggc

SEQ ID NO: 461541 - DNA, 107 bp, Homo sapiens; identical to SEQ ID NO: 342273
  chr15:90378787-90378894
  hypo
  head_and_neck vs. liver_bileduct

SEQ ID NO: 461542 - DNA, 106 bp, Homo sapiens; identical to SEQ ID NO: 342275
  chr15:90501638-90501744
  hypo
  head_and_neck vs. sarcoma,lymphoid_neoplasm,melanoma, renal

SEQ ID NO: 461543 - DNA, 184 bp, Homo sapiens; identical to SEQ ID NO: 453668
  chr15:90755573-90755757
  hypo
  head_and_neck vs. breast,sarcoma,multiple_myeloma, uterine,ovary

SEQ ID NO: 461544 - DNA, 42 bp, Homo sapiens; identical to SEQ ID NO: 366658
  chr15:90756079-90756121
  hypo
  head_and_neck vs. breast,sarcoma,multiple_myeloma, uterine,ovary

SEQ ID NO: 461545 - DNA, 196 bp, Homo sapiens; identical to SEQ ID NO: 458654
  chr16:410000-410196
  hypo
  head_and_neck vs. pancreas_gallbladder,prostate, colorectal,renal,liver_bileduct

SEQ ID NO: 461546 - DNA, 140 bp, Homo sapiens; identical to SEQ ID NO: 355321
  chr16:410714-410854
  hypo
  head_and_neck vs. pancreas_gallbladder,prostate, colorectal,renal,liver_bileduct

SEQ ID NO: 461547 - DNA, 282 bp, Homo sapiens; identical to SEQ ID NO: 454818
  chr16:410714-410996
  hypo
  head_and_neck vs. prostate

SEQ ID NO: 461548 - DNA, 101 bp, Homo sapiens; identical to SEQ ID NO: 454819
  chr16:410895-410996
  hypo
  head_and_neck vs. lymphoid_neoplasm,renal,prostate

SEQ ID NO: 461549 - DNA, 111 bp, Homo sapiens; identical to SEQ ID NO: 346109
  chr16:411606-411717
  hypo
  head_and_neck vs. lymphoid_neoplasm,renal,prostate

SEQ ID NO: 461550 - DNA, 72 bp, Homo sapiens; identical to SEQ ID NO: 342335
  chr16:440413-440485
  hypo

SEQ ID NO: 461551 - DNA, 576 bp, Homo sapiens; identical to SEQ ID NO: 342342
  chr16:594129-594705
  hypo
  head_and_neck vs. liver_bileduct

SEQ ID NO: 461552 - DNA, 151 bp, Homo sapiens; identical to SEQ ID NO: 454821
  chr16:611800-611951
  hypo
  head_and_neck vs. lymphoid_neoplasm,prostate, myeloid_neoplasm,thyroid

SEQ ID NO: 461553 - DNA, 83 bp, Homo sapiens; identical to SEQ ID NO: 355329
  chr16:612320-612403
  hypo
  head_and_neck vs. lymphoid_neoplasm,prostate, myeloid_neoplasm,thyroid

SEQ ID NO: 461554 - DNA, 512 bp, Homo sapiens; identical to SEQ ID NO: 342349
  chr16:717202-717714
  hypo
  head_and_neck vs. liver_bileduct

SEQ ID NO: 461555 - DNA, 82 bp, Homo sapiens
  chr16:1154990-1155072
  hypo
  head_and_neck vs. anorectal
cgtctccacgtagtcgcccacgaggtaagggtgccagcattgctcgtggtactgcaggttgttggtggcgatggagaagggc

SEQ ID NO: 461556 - DNA, 385 bp, Homo sapiens; identical to SEQ ID NO: 355348
  chr16:1397859-1398244
  hypo
  head_and_neck vs. renal,sarcoma,upper_gi,breast, lymphoid_neoplasm,uterine

SEQ ID NO: 461557 - DNA, 133 bp, Homo sapiens; identical to SEQ ID NO: 453675
  chr16:1424307-1424440
  hypo
  head_and_neck vs. melanoma,renal,uterine,prostate, lymphoid_neoplasm,cervical,ovary,pancreas_gallbladder,breast, colorectal,upper_gi,liver_bileduct

SEQ ID NO: 461558 - DNA, 177 bp, Homo sapiens; identical to SEQ ID NO: 355350
  chr16:1424469-1424646
  hypo
  head_and_neck vs. melanoma,renal,uterine,prostate, lymphoid_neoplasm,cervical,ovary,pancreas_gallbladder,breast, colorectal,upper_gi,liver_bileduct

SEQ ID NO: 461559 - DNA, 473 bp, Homo sapiens; identical to SEQ ID NO: 453677
  chr16:1424928-1425401
  hypo
  head_and_neck vs. cervical,bladder_and_urothelial

SEQ ID NO: 461560 - DNA, 71 bp, Homo sapiens; identical to SEQ ID NO: 453678
  chr16:1425684-1425755
  hypo
  head_and_neck vs. cervical,bladder_and_urothelial

SEQ ID NO: 461561 - DNA, 117 bp, Homo sapiens; identical to SEQ ID NO: 453679
  chr16:1425284-1425401
  hypo
  head_and_neck vs. bladder_and_urothelial,melanoma,lung

SEQ ID NO: 461562 - DNA, 407 bp, Homo sapiens; identical to SEQ ID NO: 346114
  chr16:1425684-1426091
  hypo
  head_and_neck vs. bladder_and_urothelial,melanoma,lung

SEQ ID NO: 461563 - DNA, 212 bp, Homo sapiens
  chr16:1580458-1580670
  hypo
  head_and_neck vs. breast
cgattgtgcacaccctctcccgaggcccaggtgtggggctggacagggctgggacctgcctctacctgccccgcgtggctcctttcctctcccttgtcctgaaaacaactggttccttccgtccacatccaattgcggtggaaaatcacaaacaagcacaggaatgtggcagctgacttgggtcccagacgggctcccctgtgctctgaacg

SEQ ID NO: 461564 - DNA, 124 bp, Homo sapiens; identical to SEQ ID NO: 381016
  chr16:1580699-1580823
  hypo
  head_and_neck vs. breast

SEQ ID NO: 461565 - DNA, 184 bp, Homo sapiens; identical to SEQ ID NO: 458663
  chr16:1813299-1813483
  hypo
  head_and_neck vs. bladder_and_urothelial,liver_bileduct, melanoma,uterine,lymphoid_neoplasm,prostate,multiple_myeloma, lung

SEQ ID NO: 461566 - DNA, 90 bp, Homo sapiens; identical to SEQ ID NO: 346118
  chr16:1814037-1814127
  hypo
  head_and_neck vs. bladder_and_urothelial,liver_bileduct, melanoma,uterine,lymphoid_neoplasm,prostate,multiple_myeloma, lung

SEQ ID NO: 461567 - DNA, 217 bp, Homo sapiens; identical to SEQ ID NO: 458665
  chr16:1814037-1814254
  hypo
  head_and_neck vs. liver_bileduct,bladder_and_urothelial, lung,lymphoid_neoplasm

SEQ ID NO: 461568 - DNA, 112 bp, Homo sapiens; identical to SEQ ID NO: 355365
  chr16:1814369-1814481
  hypo
  head_and_neck vs. liver_bileduct,bladder_and_urothelial, lung,lymphoid_neoplasm

SEQ ID NO: 461569 - DNA, 1 bp, Homo sapiens
  chr16:2029207-2029208
  hypo
  head_and_neck vs. lymphoid_neoplasm
c

SEQ ID NO: 461570 - DNA, 228 bp, Homo sapiens; identical to SEQ ID NO: 348700
  chr16:2042997-2043225
  hypo
  head_and_neck vs. liver_bileduct,bladder_and_urothelial, lung,pancreas_gallbladder,breast,lymphoid_neoplasm,colorectal, uterine,melanoma,upper_gi

SEQ ID NO: 461571 - DNA, 183 bp, Homo sapiens; identical to SEQ ID NO: 355374
  chr16:2129581-2129764
  hypo
  head_and_neck vs. lung,liver_bileduct,upper_gi, bladder_and_urothelial,pancreas_gallbladder,lymphoid_neoplasm, cervical,colorectal,ovary,breast

SEQ ID NO: 461572 - DNA, 2 bp, Homo sapiens
  chr16:2213312-2213314
  hypo
gt

SEQ ID NO: 461573 - DNA, 303 bp, Homo sapiens; identical to SEQ ID NO: 453685
  chr16:2213343-2213646
  hypo

SEQ ID NO: 461574 - DNA, 267 bp, Homo sapiens; identical to SEQ ID NO: 366786
  chr16:2213723-2213990
  hypo

SEQ ID NO: 461575 - DNA, 76 bp, Homo sapiens
  chr16:2229615-2229691
  hypo
  head_and_neck vs. lymphoid_neoplasm,pancreas_gallbladder, renal,liver_bileduct,cervical,multiple_myeloma
cggcaccttcttggaggtgggtgtgggcgagccctggagcttgggcacaggctgcgtcaggacgggcttgggagag

SEQ ID NO: 461576 - DNA, 257 bp, Homo sapiens
  chr16:2230223-2230480
  hypo
  head_and_neck vs. lymphoid_neoplasm,pancreas_gallbladder, renal,liver_bileduct,cervical,multiple_myeloma
gtttcactgaggccagcacggtggccacccggcccggctctgggctggcagggcggggagtggggtggccctcaggaggcctgcgggcagcccggcccccacccccaatggaggacagctccagcatggccgcgatgctcttcacactgccggcactacccgtgtccacgctgccggccaggtcactggcccgccggcactgtgcccggacccccagcaggccatcctcaggctcggcgtcaggcaccggctcatcc

SEQ ID NO: 461577 - DNA, 266 bp, Homo sapiens; identical to SEQ ID NO: 453687
  chr16:2230223-2230489
  hypo
  head_and_neck vs. renal,lymphoid_neoplasm, pancreas_gallbladder,liver_bileduct,prostate,breast

SEQ ID NO: 461578 - DNA, 182 bp, Homo sapiens; identical to SEQ ID NO: 355382
  chr16:2231183-2231365
  hypo
  head_and_neck vs. lymphoid_neoplasm,pancreas_gallbladder, renal,liver_bileduct,prostate

SEQ ID NO: 461579 - DNA, 389 bp, Homo sapiens; identical to SEQ ID NO: 453689
  chr16:2280815-2281204
  hypo
  head_and_neck vs. colorectal,breast,melanoma,prostate, upper_gi,liver_bileduct,renal,pancreas_gallbladder, lymphoid_neoplasm,uterine,multiple_myeloma,sarcoma, myeloid_neoplasm,non_cancer,cervical,bladder_and_urothelial,
  CONT. FROM ABOVE: ovary

SEQ ID NO: 461580 - DNA, 238 bp, Homo sapiens; identical to SEQ ID NO: 453690
  chr16:2281402-2281640
  hypo
  head_and_neck vs. colorectal,breast,melanoma,prostate, upper_gi,liver_bileduct,renal,pancreas_gallbladder, lymphoid_neoplasm,uterine,multiple_myeloma,sarcoma, myeloid_neoplasm,non_cancer,cervical,bladder_and_urothelial,
  CONT. FROM ABOVE: ovary

SEQ ID NO: 461581 - DNA, 61 bp, Homo sapiens; identical to SEQ ID NO: 346128
  chr16:2281702-2281763
  hypo
  head_and_neck vs. colorectal,breast,melanoma,prostate, upper_gi,liver_bileduct,renal,pancreas_gallbladder, lymphoid_neoplasm,uterine,multiple_myeloma,sarcoma, myeloid_neoplasm,non_cancer,cervical,bladder_and_urothelial,
  CONT. FROM ABOVE: ovary

SEQ ID NO: 461582 - DNA, 173 bp, Homo sapiens; identical to SEQ ID NO: 348719
  chr16:2974650-2974823
  hypo
  head_and_neck vs. upper_gi,lung,colorectal,ovary,renal, breast,uterine,cervical,bladder_and_urothelial, lymphoid_neoplasm,pancreas_gallbladder,prostate,anorectal

SEQ ID NO: 461583 - DNA, 164 bp, Homo sapiens; identical to SEQ ID NO: 453694
  chr16:3772855-3773019
  hypo
  head_and_neck vs. melanoma,liver_bileduct,breast

SEQ ID NO: 461584 - DNA, 2 bp, Homo sapiens
  chr16:3773136-3773138
  hypo
  head_and_neck vs. melanoma,liver_bileduct,breast
cc

SEQ ID NO: 461585 - DNA, 145 bp, Homo sapiens; identical to SEQ ID NO: 342489
  chr16:11770890-11771035
  hypo
  head_and_neck vs. liver_bileduct

SEQ ID NO: 461586 - DNA, 151 bp, Homo sapiens
  chr16:12210622-12210773
  hypo
  head_and_neck vs. cervical,pancreas_gallbladder, bladder_and_urothelial,upper_gi,lung,colorectal,liver_bileduct
cgtggaaacaggcttagtcaatacctgcttcaacgcggacgaaccgtggaaacaggcttagtcaatacgtgcttcaacgaggacgaaccatggaaacaggcttagtcaatacctgcttcaacgcggacgaaccgtggaaacaggcacggtc

SEQ ID NO: 461587 - DNA, 91 bp, Homo sapiens; identical to SEQ ID NO: 348733
  chr16:12210896-12210987
  hypo
  head_and_neck vs. cervical,pancreas_gallbladder, bladder_and_urothelial,upper_gi,lung,colorectal,liver_bileduct

SEQ ID NO: 461588 - DNA, 91 bp, Homo sapiens; identical to SEQ ID NO: 460756
  chr16:12211189-12211280
  hypo
  head_and_neck vs. cervical

SEQ ID NO: 461589 - DNA, 170 bp, Homo sapiens; identical to SEQ ID NO: 454834
  chr16:21569179-21569349
  hypo
  head_and_neck vs. anorectal

SEQ ID NO: 461590 - DNA, 370 bp, Homo sapiens; identical to SEQ ID NO: 366878
  chr16:21569399-21569769
  hypo
  head_and_neck vs. anorectal

SEQ ID NO: 461591 - DNA, 10 bp, Homo sapiens
  chr16:23846783-23846793
  hypo
  head_and_neck vs. non_cancer,thyroid,melanoma, myeloid_neoplasm,cervical,bladder_and_urothelial, multiple_myeloma
cgctcctccc

SEQ ID NO: 461592 - DNA, 713 bp, Homo sapiens; identical to SEQ ID NO: 342529
  chr16:24837143-24837856
  hypo
  head_and_neck vs. liver_bileduct,uterine,colorectal, upper_gi,lymphoid_neoplasm

SEQ ID NO: 461593 - DNA, 136 bp, Homo sapiens
  chr16:30169940-30170076
  hypo
  head_and_neck vs. colorectal
cgtgaaacttctgtgattcaaagaacaccgtcaagaaagtgaaaaaacgcctgcctgcccgcctttctttctctctctctctctctttctttctttcaacagtctccctctgttgccgaggctggactatactgcc

SEQ ID NO: 461594 - DNA, 13 bp, Homo sapiens
  chr16:31446861-31446874
  hypo
  head_and_neck vs. lymphoid_neoplasm,liver_bileduct, melanoma
cggtctcttaaag

SEQ ID NO: 461595 - DNA, 61 bp, Homo sapiens; identical to SEQ ID NO: 355452
  chr16:31447348-31447409
  hypo
  head_and_neck vs. lymphoid_neoplasm,liver_bileduct, melanoma

SEQ ID NO: 461596 - DNA, 267 bp, Homo sapiens; identical to SEQ ID NO: 453703
  chr16:31500256-31500523
  hypo
  head_and_neck vs. lymphoid_neoplasm

SEQ ID NO: 461597 - DNA, 78 bp, Homo sapiens; identical to SEQ ID NO: 355454
  chr16:31500673-31500751
  hypo
  head_and_neck vs. lymphoid_neoplasm

SEQ ID NO: 461598 - DNA, 24 bp, Homo sapiens
  chr16:58120772-58120796
  hypo
  head_and_neck vs. cervical,anorectal
cgaaggttgctatgagagcaattg

SEQ ID NO: 461599 - DNA, 3 bp, Homo sapiens
  chr16:58120961-58120964
  hypo
  head_and_neck vs. cervical,anorectal
ctt

SEQ ID NO: 461600 - DNA, 94 bp, Homo sapiens; identical to SEQ ID NO: 453706
  chr16:67313759-67313853
  hypo
  head_and_neck vs. lymphoid_neoplasm,prostate,renal, pancreas_gallbladder,uterine,multiple_myeloma, bladder_and_urothelial,breast,non_cancer,thyroid,sarcoma, liver_bileduct

SEQ ID NO: 461601 - DNA, 115 bp, Homo sapiens; identical to SEQ ID NO: 348747
  chr16:67313958-67314073
  hypo
  head_and_neck vs. lymphoid_neoplasm,prostate,renal, pancreas_gallbladder,uterine,multiple_myeloma, bladder_and_urothelial,breast,non_cancer,thyroid,sarcoma, liver_bileduct

SEQ ID NO: 461602 - DNA, 61 bp, Homo sapiens; identical to SEQ ID NO: 453709
  chr16:75148493-75148554
  hypo
  head_and_neck vs. liver_bileduct,renal,colorectal, lymphoid_neoplasm,prostate,non_cancer,thyroid, pancreas_gallbladder

SEQ ID NO: 461603 - DNA, 136 bp, Homo sapiens; identical to SEQ ID NO: 348759
  chr16:75149151-75149287
  hypo
  head_and_neck vs. liver_bileduct,renal,colorectal, lymphoid_neoplasm,prostate,non_cancer,thyroid, pancreas_gallbladder

SEQ ID NO: 461604 - DNA, 49 bp, Homo sapiens; identical to SEQ ID NO: 452920
  chr16:77822069-77822118
  hypo
  head_and_neck vs. sarcoma

SEQ ID NO: 461605 - DNA, 261 bp, Homo sapiens; identical to SEQ ID NO: 453712
  chr16:81563939-81564200
  hypo
  head_and_neck vs. colorectal,lymphoid_neoplasm

SEQ ID NO: 461606 - DNA, 163 bp, Homo sapiens; identical to SEQ ID NO: 453713
  chr16:81564229-81564392
  hypo
  head_and_neck vs. colorectal,lymphoid_neoplasm

SEQ ID NO: 461607 - DNA, 240 bp, Homo sapiens; identical to SEQ ID NO: 355499
  chr16:81564541-81564781
  hypo
  head_and_neck vs. colorectal,lymphoid_neoplasm

SEQ ID NO: 461608 - DNA, 272 bp, Homo sapiens
  chr16:81626951-81627223
  hypo
  head_and_neck vs. upper_gi
cgagaggtggtgttgtgcctagcctggggggttggagggcggggggagtttctgctctgcagccctgtgatgcgcaggtgccatcgggtctctgaccccaggccatcaagagctgtgcgacctgcttgccatccatcatgtggagctggtcggtcaccccatgcaccaggccgactccaagccggagctttcctctccgctcttttcggagtaatccgtggatgatggaggagcttggcaagcatttcagcaaagctcttttttcttgttga

SEQ ID NO: 461609 - DNA, 130 bp, Homo sapiens
  chr16:81694554-81694684
  hypo
  head_and_neck vs. anorectal,melanoma
cgggattgctgagctggggctgtggctgcaggaagtaacctccctctgtgcgcataccagggattgggtttgcacagaaaggccaaaaacctgggccccaccgtcttgggtcacggtcccagacacaggc

SEQ ID NO: 461610 - DNA, 346 bp, Homo sapiens; identical to SEQ ID NO: 366996
  chr16:81694713-81695059
  hypo
  head_and_neck vs. anorectal,melanoma

SEQ ID NO: 461611 - DNA, 92 bp, Homo sapiens; identical to SEQ ID NO: 355506
  chr16:85033902-85033994
  hypo
  head_and_neck vs. lymphoid_neoplasm,multiple_myeloma, melanoma,uterine

SEQ ID NO: 461612 - DNA, 357 bp, Homo sapiens; identical to SEQ ID NO: 454853
  chr16:85673482-85673839
  hypo

SEQ ID NO: 461613 - DNA, 238 bp, Homo sapiens; identical to SEQ ID NO: 454854
  chr16:85673886-85674124
  hypo

SEQ ID NO: 461614 - DNA, 140 bp, Homo sapiens; identical to SEQ ID NO: 355517
  chr16:85674334-85674474
  hypo

SEQ ID NO: 461615 - DNA, 178 bp, Homo sapiens; identical to SEQ ID NO: 452923
  chr16:85932121-85932299
  hypo
  head_and_neck vs. colorectal,upper_gi,thyroid, lymphoid_neoplasm,non_cancer,pancreas_gallbladder,cervical, ovary,liver_bileduct,prostate,renal,multiple_myeloma

SEQ ID NO: 461616 - DNA, 184 bp, Homo sapiens; identical to SEQ ID NO: 367056
  chr16:88512691-88512875
  hypo
  head_and_neck vs. prostate

SEQ ID NO: 461617 - DNA, 32 bp, Homo sapiens; identical to SEQ ID NO: 458703
  chr16:88757496-88757528
  hypo
  head_and_neck vs. breast,pancreas_gallbladder,uterine, ovary

SEQ ID NO: 461618 - DNA, 31 bp, Homo sapiens; identical to SEQ ID NO: 355535
  chr16:88757686-88757717
  hypo
  head_and_neck vs. breast,pancreas_gallbladder,uterine, ovary

SEQ ID NO: 461619 - DNA, 279 bp, Homo sapiens; identical to SEQ ID NO: 348772
  chr16:88946079-88946358
  hypo
  head_and_neck vs. cervical,breast

SEQ ID NO: 461620 - DNA, 14 bp, Homo sapiens
  chr16:88966221-88966235
  hypo
  head_and_neck vs. lymphoid_neoplasm
cgtggtccgtcctg

SEQ ID NO: 461621 - DNA, 79 bp, Homo sapiens; identical to SEQ ID NO: 454865
  chr16:89254530-89254609
  hypo
  head_and_neck vs. cervical,renal,non_cancer

SEQ ID NO: 461622 - DNA, 144 bp, Homo sapiens; identical to SEQ ID NO: 355552
  chr16:89254764-89254908
  hypo
  head_and_neck vs. cervical,renal,non_cancer

SEQ ID NO: 461623 - DNA, 731 bp, Homo sapiens; identical to SEQ ID NO: 454871
  chr16:89900822-89901553
  hypo
  head_and_neck vs. melanoma,sarcoma

SEQ ID NO: 461624 - DNA, 81 bp, Homo sapiens; identical to SEQ ID NO: 348779
  chr16:89901590-89901671
  hypo
  head_and_neck vs. melanoma,sarcoma

SEQ ID NO: 461625 - DNA, 179 bp, Homo sapiens; identical to SEQ ID NO: 342809
  chr16:89947451-89947630
  hypo
  head_and_neck vs. liver_bileduct,colorectal, pancreas_gallbladder,upper_gi

SEQ ID NO: 461626 - DNA, 65 bp, Homo sapiens; identical to SEQ ID NO: 453722
  chr17:692558-692623
  hypo
  head_and_neck vs. upper_gi,colorectal,ovary, liver_bileduct,lymphoid_neoplasm,breast,prostate,melanoma, pancreas_gallbladder,lung,sarcoma

SEQ ID NO: 461627 - DNA, 306 bp, Homo sapiens; identical to SEQ ID NO: 355562
  chr17:692652-692958
  hypo
  head_and_neck vs. upper_gi,colorectal,ovary, liver_bileduct,lymphoid_neoplasm,breast,prostate,melanoma, pancreas_gallbladder,lung,sarcoma

SEQ ID NO: 461628 - DNA, 299 bp, Homo sapiens; identical to SEQ ID NO: 342824
  chr17:1454071-1454370
  hypo
  head_and_neck vs. liver_bileduct,melanoma,ovary, pancreas_gallbladder,breast,uterine,upper_gi,renal, lymphoid_neoplasm,lung,colorectal,multiple_myeloma

SEQ ID NO: 461629 - DNA, 115 bp, Homo sapiens; identical to SEQ ID NO: 342837
  chr17:2326357-2326472
  hypo
  head_and_neck vs. upper_gi,colorectal,liver_bileduct, lymphoid_neoplasm,pancreas_gallbladder,uterine

SEQ ID NO: 461630 - DNA, 74 bp, Homo sapiens
  chr17:4436345-4436419
  hypo
  head_and_neck vs. anorectal
cgctctacctgcaccgcgcccaagttgtgcagaagacagcagagacgtgcaacagcccgccctgtggggccaag

SEQ ID NO: 461631 - DNA, 164 bp, Homo sapiens; identical to SEQ ID NO: 355576
  chr17:4436450-4436614
  hypo
  head_and_neck vs. anorectal

SEQ ID NO: 461632 - DNA, 213 bp, Homo sapiens; identical to SEQ ID NO: 342859
  chr17:5269074-5269287
  hypo
  head_and_neck vs. liver_bileduct,colorectal, lymphoid_neoplasm,upper_gi,pancreas_gallbladder,melanoma

SEQ ID NO: 461633 - DNA, 73 bp, Homo sapiens; identical to SEQ ID NO: 342868
  chr17:7493149-7493222
  hypo
  head_and_neck vs. liver_bileduct

SEQ ID NO: 461634 - DNA, 239 bp, Homo sapiens; identical to SEQ ID NO: 342891
  chr17:12890262-12890501
  hypo
  head_and_neck vs. anorectal

SEQ ID NO: 461635 - DNA, 104 bp, Homo sapiens; identical to SEQ ID NO: 355601
  chr17:16282523-16282627
  hypo
  head_and_neck vs. melanoma

SEQ ID NO: 461636 - DNA, 11 bp, Homo sapiens
  chr17:16472788-16472799
  hypo
  head_and_neck vs. anorectal
gaaaactgggc

SEQ ID NO: 461637 - DNA, 430 bp, Homo sapiens; identical to SEQ ID NO: 342901
  chr17:17045715-17046145
  hypo
  head_and_neck vs. liver_bileduct

SEQ ID NO: 461638 - DNA, 301 bp, Homo sapiens
  chr17:17062274-17062575
  hypo
  head_and_neck vs. cervical,upper_gi,breast, bladder_and_urothelial,colorectal
cggctctccacacacgagctgacctctctgctcgagaaggaggtaatagcctgggaccagatccccaccctgctcccagcagcctttccagagcatcagctgtgcccagctgtggcctgaggggttcatctagacagtcctacccgcgagggacttgcagacccctaggggagacagacgcatagatgagtcctcatagttgaggcagacctgagagctgtgggagcgtgccagtgcatgcagggcagggaaaggggccttccaggcacagaggaattcttccgatggtgggggcccctgc

SEQ ID NO: 461639 - DNA, 282 bp, Homo sapiens; identical to SEQ ID NO: 355605
  chr17:17062763-17063045
  hypo
  head_and_neck vs. cervical,upper_gi,breast, bladder_and_urothelial,colorectal

SEQ ID NO: 461640 - DNA, 246 bp, Homo sapiens; identical to SEQ ID NO: 355609
  chr17:18024621-18024867
  hypo
  head_and_neck vs. anorectal,cervical,liver_bileduct,lung, bladder_and_urothelial

SEQ ID NO: 461641 - DNA, 125 bp, Homo sapiens; identical to SEQ ID NO: 342928
  chr17:25842444-25842569
  hypo
  head_and_neck vs. upper_gi,pancreas_gallbladder

SEQ ID NO: 461642 - DNA, 169 bp, Homo sapiens
  chr17:27085337-27085506
  hypo
  head_and_neck vs. upper_gi,lung,colorectal
cgggggctcggttgccaggggctcggtgggccttgctcagcatggccaggctctgttctcggaagcaggcctgttggaaatccccacttaggtaatccactgtttgcatcaagctgttctggcttgccactggaccgcccccggtccctgctcggtagtgggccccggg

SEQ ID NO: 461643 - DNA, 52 bp, Homo sapiens; identical to SEQ ID NO: 367209
  chr17:27085535-27085587
  hypo
  head_and_neck vs. upper_gi,lung,colorectal

SEQ ID NO: 461644 - DNA, 126 bp, Homo sapiens; identical to SEQ ID NO: 453730
  chr17:27909050-27909176
  hypo
  head_and_neck vs. liver_bileduct,upper_gi

SEQ ID NO: 461645 - DNA, 157 bp, Homo sapiens; identical to SEQ ID NO: 355624
  chr17:27909205-27909362
  hypo
  head_and_neck vs. liver_bileduct,upper_gi

SEQ ID NO: 461646 - DNA, 37 bp, Homo sapiens
  chr17:36875885-36875922
  hypo
  head_and_neck vs. liver_bileduct,lung
cgagggaggagggacggagagaccggcgtgggctgga

SEQ ID NO: 461647 - DNA, 406 bp, Homo sapiens; identical to SEQ ID NO: 355632
  chr17:36876379-36876785
  hypo
  head_and_neck vs. liver_bileduct,lung

SEQ ID NO: 461648 - DNA, 111 bp, Homo sapiens; identical to SEQ ID NO: 343000
  chr17:43121686-43121797
  hypo
  head_and_neck vs. upper_gi,ovary,lymphoid_neoplasm, colorectal,uterine

SEQ ID NO: 461649 - DNA, 182 bp, Homo sapiens; identical to SEQ ID NO: 455779
  chr17:46659093-46659275
  hypo
  head_and_neck vs. cervical,bladder_and_urothelial

SEQ ID NO: 461650 - DNA, 46 bp, Homo sapiens; identical to SEQ ID NO: 455780
  chr17:46659384-46659430
  hypo
  head_and_neck vs. cervical,bladder_and_urothelial

SEQ ID NO: 461651 - DNA, 64 bp, Homo sapiens; identical to SEQ ID NO: 460782
  chr17:46687527-46687591
  hypo
  head_and_neck vs. anorectal,cervical,ovary, bladder_and_urothelial,colorectal,uterine,upper_gi

SEQ ID NO: 461652 - DNA, 25 bp, Homo sapiens
  chr17:49229457-49229482
  hypo
  head_and_neck vs. lymphoid_neoplasm
cgcgggaagctgagtcacgagaatc

SEQ ID NO: 461653 - DNA, 216 bp, Homo sapiens; identical to SEQ ID NO: 460790
  chr17:50235416-50235632
  hypo
  head_and_neck vs. lung

SEQ ID NO: 461654 - DNA, 425 bp, Homo sapiens; identical to SEQ ID NO: 343072
  chr17:66440125-66440550
  hypo
  head_and_neck vs. lymphoid_neoplasm,colorectal,breast

SEQ ID NO: 461655 - DNA, 127 bp, Homo sapiens
  chr17:70657377-70657504
  hypo
  head_and_neck vs. lymphoid_neoplasm
cgccccctggagttgtgcagtgggacactcctgcttgagcgcagattgctgctcagcctggggtgtagttctggggttcgaggtgcacgctctcaggagaggtagtggagagagtcatgggtttctc

SEQ ID NO: 461656 - DNA, 382 bp, Homo sapiens; identical to SEQ ID NO: 381722
  chr17:70657541-70657923
  hypo
  head_and_neck vs. lymphoid_neoplasm

SEQ ID NO: 461657 - DNA, 65 bp, Homo sapiens; identical to SEQ ID NO: 347468
  chr17:73073967-73074032
  hypo
  head_and_neck vs. upper_gi,colorectal

SEQ ID NO: 461658 - DNA, 386 bp, Homo sapiens; identical to SEQ ID NO: 343124
  chr17:74086716-74087102
  hypo
  head_and_neck vs. upper_gi,colorectal

SEQ ID NO: 461659 - DNA, 148 bp, Homo sapiens; identical to SEQ ID NO: 343148
  chr17:76034983-76035131
  hypo
  head_and_neck vs. colorectal,breast

SEQ ID NO: 461660 - DNA, 478 bp, Homo sapiens; identical to SEQ ID NO: 343153
  chr17:76215753-76216231
  hypo
  head_and_neck vs. upper_gi,cervical,colorectal

SEQ ID NO: 461661 - DNA, 196 bp, Homo sapiens; identical to SEQ ID NO: 343217
  chr17:79060680-79060876
  hypo
  head_and_neck vs. melanoma

SEQ ID NO: 461662 - DNA, 256 bp, Homo sapiens
  chr17:79099929-79100185
  hypo
  head_and_neck vs. cervical
gtgtggggttggcgcggggctgcagggtgctggctgactgcctcggggacagagaacaggccagcttgacagtacgcatctcttcgtctaaacctgcaaagtgggtgtcaaaccattgtcttcccaatttttcaaaaacgtcataaaatccctctgcatagtggttgtctgatgctgcatgagatgaacctggccggtcctcgcaagccccctgaggcaggacccgccctatgcccttccttcaggggaggggcct

SEQ ID NO: 461663 - DNA, 79 bp, Homo sapiens; identical to SEQ ID NO: 367444
  chr17:79100259-79100338
  hypo
  head_and_neck vs. cervical

SEQ ID NO: 461664 - DNA, 846 bp, Homo sapiens
  chr17:79655135-79655981
  hypo
cggagcctgcttgcagcagcctctgatcgcacgccgtcctgcacgtcacaccgggacggcgtccccgagagggccgtagacgcgaggccaggctgcgctctaaccgggggagaggatggctgcagggggtctggagcccgctctgaatttggaggcatttctggagcggctgccccccgcgtctccccggctgtgactggaaggaggggcgtggccagagccccgcagtacccctgtgttctcagccccaacaccacgctgccaccgtcaggcctgccgggtcctgcctgttggaggctgacgggaaccggggatcctggggtgggcaggtcccgtggggaaagggagagacagatggtcaggggcacagagacgcggcgttgtttggctccagcaagtagaggcaggcgtgaggtttgaactcagggtctgggaacaggttggtgcatggcccccacgccccactcggggggccctccctggcctctgtgtcagccccatctgctcagaggctgaggtctgccagctgcttcctcacaccgaggcctctggcgcctggagtgtcctgcgaccctcacccccttctccctgcctgcagagacaagtggaggtaaacgtccgtaacaagatcctgtacctgatccaggcctgggcgcatgccttccggaacgagcccaagtacaaggtggtccaggacacctaccagatcatgaaggtggagggtgagtcaggactgaggttgggaccaggttgaggcttggaactgctgggcagtcaggctcaacgggcacagtggcgaggggcctgggaagatgggttgttccctgtgttgggagggaggagggc

SEQ ID NO: 461665 - DNA, 821 bp, Homo sapiens; identical to SEQ ID NO: 367451
  chr17:79655508-79656329
  hypo

SEQ ID NO: 461666 - DNA, 279 bp, Homo sapiens; identical to SEQ ID NO: 454915
  chr17:79913166-79913445
  hypo
  head_and_neck vs. melanoma

SEQ ID NO: 461667 - DNA, 4 bp, Homo sapiens
  chr17:80294440-80294444
  hypo
  head_and_neck vs. pancreas_gallbladder
cgtg

SEQ ID NO: 461668 - DNA, 520 bp, Homo sapiens; identical to SEQ ID NO: 367468
  chr17:80294473-80294993
  hypo
  head_and_neck vs. pancreas_gallbladder

SEQ ID NO: 461669 - DNA, 244 bp, Homo sapiens
  chr17:80571137-80571381
  hypo
cgcccccgactacagtggtgggagcgggaggtggccaggggttcacacaggcatcaacgccaaacacagggtgggtatgggtcagggctgcgttccacagggcacaagccgcctgtccccgcaagacatcccagggccacaggggagggaggacagaccagaaacgcagccggagtcatccatgcccacgcacctgtacgatcagacaggaaagctgctgagtaggcaccgtctgaggcagtca

SEQ ID NO: 461670 - DNA, 271 bp, Homo sapiens; identical to SEQ ID NO: 355778
  chr17:80571776-80572047
  hypo

SEQ ID NO: 461671 - DNA, 58 bp, Homo sapiens; identical to SEQ ID NO: 355781
  chr17:80747254-80747312
  hypo
  head_and_neck vs. liver_bileduct,melanoma

SEQ ID NO: 461672 - DNA, 52 bp, Homo sapiens; identical to SEQ ID NO: 343275
  chr17:80794418-80794470
  hypo
  head_and_neck vs. pancreas_gallbladder,colorectal, upper_gi,lymphoid_neoplasm,ovary

SEQ ID NO: 461673 - DNA, 33 bp, Homo sapiens; identical to SEQ ID NO: 453753
  chr17:80797632-80797665
  hypo
  head_and_neck vs. melanoma,colorectal,lymphoid_neoplasm, renal,sarcoma

SEQ ID NO: 461674 - DNA, 177 bp, Homo sapiens; identical to SEQ ID NO: 343278
  chr17:80859381-80859558
  hypo
  head_and_neck vs. anorectal,liver_bileduct,lung, colorectal,cervical,ovary

SEQ ID NO: 461675 - DNA, 178 bp, Homo sapiens; identical to SEQ ID NO: 343279
  chr17:80860241-80860419
  hypo
  head_and_neck vs. anorectal,liver_bileduct,cervical

SEQ ID NO: 461676 - DNA, 498 bp, Homo sapiens; identical to SEQ ID NO: 343336
  chr18:10725385-10725883
  hypo
  head_and_neck vs. pancreas_gallbladder

SEQ ID NO: 461677 - DNA, 33 bp, Homo sapiens
  chr18:13036746-13036779
  hypo
  head_and_neck vs. cervical,upper_gi,pancreas_gallbladder, sarcoma,colorectal,bladder_and_urothelial,lymphoid_neoplasm, prostate,breast,uterine
cggcagcagccttgagggcagacattaggggac

SEQ ID NO: 461678 - DNA, 25 bp, Homo sapiens
  chr18:13036813-13036838
  hypo
  head_and_neck vs. cervical,upper_gi,pancreas_gallbladder, sarcoma,colorectal,bladder_and_urothelial,lymphoid_neoplasm, prostate,breast,uterine
tggggggcaagcggtcctggggcac

SEQ ID NO: 461679 - DNA, 94 bp, Homo sapiens; identical to SEQ ID NO: 452939
  chr18:13823932-13824026
  hypo
  head_and_neck vs. lung,pancreas_gallbladder

SEQ ID NO: 461680 - DNA, 113 bp, Homo sapiens; identical to SEQ ID NO: 452940
  chr18:13824102-13824215
  hypo
  head_and_neck vs. lung,pancreas_gallbladder

SEQ ID NO: 461681 - DNA, 891 bp, Homo sapiens; identical to SEQ ID NO: 452951
  chr18:32556625-32557516
  hypo
  head_and_neck vs. lung,upper_gi,ovary,colorectal, pancreas_gallbladder,breast,uterine,renal

SEQ ID NO: 461682 - DNA, 769 bp, Homo sapiens; identical to SEQ ID NO: 452952
  chr18:32557064-32557833
  hypo
  head_and_neck vs. liver_bileduct,upper_gi,colorectal, lung,pancreas_gallbladder,breast,prostate,renal, myeloid_neoplasm,non_cancer,uterine,ovary,multiple_myeloma, sarcoma

SEQ ID NO: 461683 - DNA, 18 bp, Homo sapiens
  chr18:32557864-32557882
  hypo
  head_and_neck vs. liver_bileduct,upper_gi,colorectal, lung,pancreas_gallbladder,breast,prostate,renal, myeloid_neoplasm,non_cancer,uterine,ovary,multiple_myeloma, sarcoma
tctgaacctggggcgctc

SEQ ID NO: 461684 - DNA, 45 bp, Homo sapiens; identical to SEQ ID NO: 452954
  chr18:32557884-32557929
  hypo
  head_and_neck vs. liver_bileduct,upper_gi,colorectal, lung,pancreas_gallbladder,breast,prostate,renal, myeloid_neoplasm,non_cancer,uterine,ovary,multiple_myeloma, sarcoma

SEQ ID NO: 461685 - DNA, 291 bp, Homo sapiens; identical to SEQ ID NO: 452955
  chr18:32557542-32557833
  hypo
  head_and_neck vs. upper_gi,lung,pancreas_gallbladder, colorectal,renal,breast,liver_bileduct,non_cancer,prostate, ovary,myeloid_neoplasm,multiple_myeloma,thyroid,uterine

SEQ ID NO: 461686 - DNA, 18 bp, Homo sapiens
  chr18:32557864-32557882
  hypo
  head_and_neck vs. upper_gi,lung,pancreas_gallbladder, colorectal,renal,breast,liver_bileduct,non_cancer,prostate, ovary,myeloid_neoplasm,multiple_myeloma,thyroid,uterine
tctgaacctggggcgctc

SEQ ID NO: 461687 - DNA, 45 bp, Homo sapiens; identical to SEQ ID NO: 452954
  chr18:32557884-32557929
  hypo
  head_and_neck vs. upper_gi,lung,pancreas_gallbladder, colorectal,renal,breast,liver_bileduct,non_cancer,prostate, ovary,myeloid_neoplasm,multiple_myeloma,thyroid,uterine

SEQ ID NO: 461688 - DNA, 14 bp, Homo sapiens
  chr18:44337138-44337152
  hypo
  head_and_neck vs. myeloid_neoplasm,thyroid,sarcoma, non_cancer,breast,prostate,renal
caggggctgggcgc

SEQ ID NO: 461689 - DNA, 115 bp, Homo sapiens; identical to SEQ ID NO: 346183
  chr18:55850987-55851102
  hypo
  head_and_neck vs. liver_bileduct,melanoma

SEQ ID NO: 461690 - DNA, 68 bp, Homo sapiens; identical to SEQ ID NO: 382063
  chr18:60430701-60430769
  hypo
  head_and_neck vs. pancreas_gallbladder

SEQ ID NO: 461691 - DNA, 236 bp, Homo sapiens; identical to SEQ ID NO: 348899
  chr18:75999434-75999670
  hypo
  head_and_neck vs. anorectal,lymphoid_neoplasm,melanoma

SEQ ID NO: 461692 - DNA, 2 bp, Homo sapiens
  chr18:77286114-77286116
  hypo
  head_and_neck vs. anorectal
cc

SEQ ID NO: 461693 - DNA, 203 bp, Homo sapiens; identical to SEQ ID NO: 382148
  chr18:77336028-77336231
  hypo

SEQ ID NO: 461694 - DNA, 190 bp, Homo sapiens
  chr18:77512029-77512219
  hypo
  head_and_neck vs. lymphoid_neoplasm
cgcagtgggacgtcccagcacggcaccaggagggagggtgtctggcaggacatcaggtggttggaatttcagggctctggggatctcctgggtgtgccccgatcaagtcggctcacgtcacagaaaccaggtgcacctgcagcggctcctaaggaaaacctagtggcactggctggttatgcagaggctc

SEQ ID NO: 461695 - DNA, 190 bp, Homo sapiens
  chr18:77635961-77636151
  hypo
  head_and_neck vs. anorectal,lymphoid_neoplasm
cgatgtccggcacgcagtccccaggcgggcacactgcccagcagcccagtggcaggagctcagagctgacttgcttcttgcccaggtctggggttggtgcagcgcccgcagctcacgggccacagcagcggaaggtctgcggcattttggaccttgctgttgccggggcagtgggtgttggcgccacatc

SEQ ID NO: 461696 - DNA, 345 bp, Homo sapiens
  chr18:77636190-77636535
  hypo
  head_and_neck vs. anorectal,lymphoid_neoplasm
gaagctggactgaaacccacagacaggtccagccctgccgggcaggcgtgatcaggctgacactgcggaaaagccccactaggcaggtatgattgagctggcgtctccgaagggccccagccaggcagggatgatcgggctggcgctgtggaaagttgcaagcacactgtgtgggcacttggtggggctgggctgggtgcagagcacctaatggagaggagtcacctgcggcgtggccactgctgtgggctgcagttcccgggaaacagcagtggaaaccagcggcccagggacaggacaggggctgcaggtgctgagccgttgttcgacccagttgaattctaa

SEQ ID NO: 461697 - DNA, 145 bp, Homo sapiens
  chr18:77644520-77644665
  hypo
  head_and_neck vs. anorectal,liver_bileduct
cgatgcagtggaggagcagggctgggtctgggcctgggcctgggcgtggcagctccccaggcccacggggcaggaattctagattctgggattcctttcatcgttgctttttgtgttttctacctagagcggagaaatgtttgtg

SEQ ID NO: 461698 - DNA, 39 bp, Homo sapiens; identical to SEQ ID NO: 367695
  chr18:77644881-77644920
  hypo
  head_and_neck vs. anorectal,liver_bileduct

SEQ ID NO: 461699 - DNA, 278 bp, Homo sapiens
  chr18:77808879-77809157
  hypo
  head_and_neck vs. bladder_and_urothelial,cervical
cgtcggctcagtgcctcctagaaagtggagtgtgggcacgtttgcaggggatccaaccaggcgtctgctcagtgcctcctagaaagtggagtgtgggcacgtttgtaggggatcccaccaggcatcagctcagtgcctcctagaaagaggagtgtgggcacgtttcagagaaaactggcttaggcctccctgtttctggcgtggccttccctgggagcgagttagggacacggaagctcacccgcttctgaatgggtccactcctggggatttccgcg

SEQ ID NO: 461700 - DNA, 368 bp, Homo sapiens; identical to SEQ ID NO: 355907
  chr18:77809186-77809554
  hypo
  head_and_neck vs. bladder_and_urothelial,cervical

SEQ ID NO: 461701 - DNA, 53 bp, Homo sapiens; identical to SEQ ID NO: 355910
  chr19:407832-407885
  hypo
  head_and_neck vs. anorectal

SEQ ID NO: 461702 - DNA, 805 bp, Homo sapiens; identical to SEQ ID NO: 367702
  chr19:418255-419060
  hypo
  head_and_neck vs. anorectal

SEQ ID NO: 461703 - DNA, 70 bp, Homo sapiens; identical to SEQ ID NO: 367704
  chr19:530480-530550
  hypo
  head_and_neck vs. anorectal

SEQ ID NO: 461704 - DNA, 739 bp, Homo sapiens; identical to SEQ ID NO: 343528
  chr19:736036-736775
  hypo
  head_and_neck vs. pancreas_gallbladder,upper_gi,breast, colorectal,sarcoma,uterine,melanoma

SEQ ID NO: 461705 - DNA, 348 bp, Homo sapiens; identical to SEQ ID NO: 382199
  chr19:804907-805255
  hypo
  head_and_neck vs. anorectal

SEQ ID NO: 461706 - DNA, 24 bp, Homo sapiens
  chr19:814406-814430
  hypo
  head_and_neck vs. renal,multiple_myeloma
cgacccccatcagaacctgccact

SEQ ID NO: 461707 - DNA, 102 bp, Homo sapiens; identical to SEQ ID NO: 355922
  chr19:814741-814843
  hypo
  head_and_neck vs. renal,multiple_myeloma

SEQ ID NO: 461708 - DNA, 229 bp, Homo sapiens; identical to SEQ ID NO: 456692
  chr19:1004547-1004776
  hypo
  head_and_neck vs. renal,lymphoid_neoplasm,thyroid

SEQ ID NO: 461709 - DNA, 279 bp, Homo sapiens; identical to SEQ ID NO: 218770
  chr19:1005441-1005720
  hypo
  head_and_neck vs. renal,lymphoid_neoplasm

SEQ ID NO: 461710 - DNA, 985 bp, Homo sapiens; identical to SEQ ID NO: 343552
  chr19:1108654-1109639
  hypo

SEQ ID NO: 461711 - DNA, 84 bp, Homo sapiens
  chr19:1170985-1171069
  hypo
  head_and_neck vs. anorectal
cgaggacaggcacacaggcacgggcaacacacaaaatacagacacacataaccgactcatgaacatgggtacacacaggcacac

SEQ ID NO: 461712 - DNA, 428 bp, Homo sapiens; identical to SEQ ID NO: 367743
  chr19:1171422-1171850
  hypo
  head_and_neck vs. anorectal

SEQ ID NO: 461713 - DNA, 198 bp, Homo sapiens; identical to SEQ ID NO: 453779
  chr19:1226490-1226688
  hypo
  head_and_neck vs. lymphoid_neoplasm,renal,cervical, liver_bileduct,breast,multiple_myeloma

SEQ ID NO: 461714 - DNA, 317 bp, Homo sapiens; identical to SEQ ID NO: 355935
  chr19:1226828-1227145
  hypo
  head_and_neck vs. lymphoid_neoplasm,renal,cervical, liver_bileduct,breast,multiple_myeloma

SEQ ID NO: 461715 - DNA, 287 bp, Homo sapiens; identical to SEQ ID NO: 343561
  chr19:1288529-1288816
  hypo
  head_and_neck vs. anorectal

SEQ ID NO: 461716 - DNA, 197 bp, Homo sapiens; identical to SEQ ID NO: 343562
  chr19:1297611-1297808
  hypo
  head_and_neck vs. liver_bileduct

SEQ ID NO: 461717 - DNA, 55 bp, Homo sapiens; identical to SEQ ID NO: 382244
  chr19:1482826-1482881
  hypo
  head_and_neck vs. anorectal

SEQ ID NO: 461718 - DNA, 30 bp, Homo sapiens
  chr19:1673103-1673133
  hypo
  head_and_neck vs. cervical
agaggctgtgacatgttcgctcgttgccac

SEQ ID NO: 461719 - DNA, 306 bp, Homo sapiens; identical to SEQ ID NO: 453784
  chr19:1977026-1977332
  hypo
  head_and_neck vs. liver_bileduct

SEQ ID NO: 461720 - DNA, 233 bp, Homo sapiens; identical to SEQ ID NO: 453785
  chr19:1978023-1978256
  hypo
  head_and_neck vs. liver_bileduct,lymphoid_neoplasm, melanoma,renal

SEQ ID NO: 461721 - DNA, 116 bp, Homo sapiens; identical to SEQ ID NO: 345560
  chr19:1979018-1979134
  hypo
  head_and_neck vs. liver_bileduct,lymphoid_neoplasm, melanoma,renal

SEQ ID NO: 461722 - DNA, 89 bp, Homo sapiens; identical to SEQ ID NO: 343596
  chr19:2204172-2204261
  hypo
  head_and_neck vs. liver_bileduct

SEQ ID NO: 461723 - DNA, 95 bp, Homo sapiens; identical to SEQ ID NO: 343597
  chr19:2224728-2224823
  hypo
  head_and_neck vs. cervical

SEQ ID NO: 461724 - DNA, 219 bp, Homo sapiens; identical to SEQ ID NO: 457663
  chr19:2273763-2273982
  hypo
  head_and_neck vs. pancreas_gallbladder

SEQ ID NO: 461725 - DNA, 10 bp, Homo sapiens
  chr19:2274020-2274030
  hypo
  head_and_neck vs. pancreas_gallbladder
ccgtctgagc

SEQ ID NO: 461726 - DNA, 92 bp, Homo sapiens; identical to SEQ ID NO: 454973
  chr19:2524648-2524740
  hypo
  head_and_neck vs. colorectal,upper_gi,uterine

SEQ ID NO: 461727 - DNA, 73 bp, Homo sapiens; identical to SEQ ID NO: 452976
  chr19:2702445-2702518
  hypo
  head_and_neck vs. ovary,breast,lung,melanoma, bladder_and_urothelial

SEQ ID NO: 461728 - DNA, 453 bp, Homo sapiens; identical to SEQ ID NO: 347529
  chr19:2702553-2703006
  hypo
  head_and_neck vs. ovary,breast,lung,melanoma, bladder_and_urothelial

SEQ ID NO: 461729 - DNA, 13 bp, Homo sapiens
  chr19:3219527-3219540
  hypo
  head_and_neck vs. anorectal
cgccgcgccctgc

SEQ ID NO: 461730 - DNA, 72 bp, Homo sapiens; identical to SEQ ID NO: 355964
  chr19:3219654-3219726
  hypo
  head_and_neck vs. anorectal

SEQ ID NO: 461731 - DNA, 758 bp, Homo sapiens; identical to SEQ ID NO: 458784
  chr19:3490855-3491613
  hypo
  head_and_neck vs. lung,upper_gi

SEQ ID NO: 461732 - DNA, 751 bp, Homo sapiens; identical to SEQ ID NO: 453791
  chr19:3491120-3491871
  hypo
  head_and_neck vs. lung,upper_gi,colorectal, pancreas_gallbladder

SEQ ID NO: 461733 - DNA, 134 bp, Homo sapiens; identical to SEQ ID NO: 458786
  chr19:3571360-3571494
  hypo
  head_and_neck vs. anorectal

SEQ ID NO: 461734 - DNA, 314 bp, Homo sapiens
  chr19:3577811-3578125
  hypo
  head_and_neck vs. lung
cctgccccggcttaccttagcccaccctgcgccgctcctgcgctggcggtgtccggacctctgagcgcccgcgcgacccgccctgagtcaccccctaccgctgcccctggagcccccgccccgcgactccccggcaccctcgcctgaccttcccgcctgtcccccaggcacgggcgaaacgcccacgctgggcactctggacttctacatggcccggcttcacggagccatcgagcgcgaccccgcccagcacgagaagctcatcgtccgcatcaaggaaatcctggcccaggtcgccaggtgtgtgccgggcg

SEQ ID NO: 461735 - DNA, 276 bp, Homo sapiens; identical to SEQ ID NO: 382302
  chr19:3578223-3578499
  hypo
  head_and_neck vs. lung

SEQ ID NO: 461736 - DNA, 74 bp, Homo sapiens
  chr19:4290473-4290547
  hypo
  head_and_neck vs. sarcoma
cgcgcggacccgtgagaaccaggtggtgctgggccaacacagcgggcccttccccagcgtgcccgagctcgtcc

SEQ ID NO: 461737 - DNA, 62 bp, Homo sapiens
  chr19:4795062-4795124
  hypo
  head_and_neck vs. colorectal,upper_gi,multiple_myeloma, renal
cgataaatccactagctaagacgtcgagtgccaagaccagccttccagccgaggtttggaca

SEQ ID NO: 461738 - DNA, 199 bp, Homo sapiens; identical to SEQ ID NO: 367834
  chr19:4795324-4795523
  hypo
  head_and_neck vs. colorectal,upper_gi,multiple_myeloma, renal

SEQ ID NO: 461739 - DNA, 442 bp, Homo sapiens
  chr19:5789249-5789691
  hypo
  head_and_neck vs. renal,lymphoid_neoplasm, pancreas_gallbladder,colorectal,cervical,upper_gi,prostate, sarcoma,liver_bileduct
cgtcctcatccgtcaggggcccgcaggtccgcacggggctgctgggaggggtgctagtgcccggccctgcggggacctgctgggcaccacagttttcctgcctgggagcgccctcggctgccgtgccctcggggacagcggcagcgggtgtggggccctggctgaaccggcgcagggcctgctcagctcgctcgaagcggacctcgcgcttccgcagctgctgctgcagggctttgtccaggccgttgcggatggacgggggctgggtcccgcgggccgccaactcctcctgcaccaggttctgtccctcgggcctcaggtgggccccagcgaagcggcaggtcacgccgtaggggcaccggccgaaggtctcgaagagcacgcagcgggggcccaggtcggccggcttggtctccaggtagcgccccacgtcgtgcagaaa

SEQ ID NO: 461740 - DNA, 122 bp, Homo sapiens
  chr19:5789927-5790049
  hypo
  head_and_neck vs. renal,lymphoid_neoplasm, pancreas_gallbladder,colorectal,cervical,upper_gi,prostate, sarcoma,liver_bileduct
cggaatggcatcagagcaagctcactgctcgttgctgaaggcccaggagctttctaacaattacccgctgccaggaaacacaccctgctcctgcctgccccggcaggaatgctcacgtggcc

SEQ ID NO: 461741 - DNA, 133 bp, Homo sapiens; identical to SEQ ID NO: 458789
  chr19:5789558-5789691
  hypo
  head_and_neck vs. pancreas_gallbladder,lymphoid_neoplasm, thyroid,colorectal,sarcoma,renal,prostate,uterine, multiple_myeloma,liver_bileduct

SEQ ID NO: 461742 - DNA, 242 bp, Homo sapiens; identical to SEQ ID NO: 458790
  chr19:5789927-5790169
  hypo
  head_and_neck vs. pancreas_gallbladder,lymphoid_neoplasm, thyroid,colorectal,sarcoma,renal,prostate,uterine, multiple_myeloma,liver_bileduct

SEQ ID NO: 461743 - DNA, 138 bp, Homo sapiens; identical to SEQ ID NO: 355994
  chr19:5790213-5790351
  hypo
  head_and_neck vs. pancreas_gallbladder,lymphoid_neoplasm, thyroid,colorectal,sarcoma,renal,prostate,uterine, multiple_myeloma,liver_bileduct

SEQ ID NO: 461744 - DNA, 124 bp, Homo sapiens; identical to SEQ ID NO: 343672
  chr19:5797848-5797972
  hypo
  head_and_neck vs. anorectal

SEQ ID NO: 461745 - DNA, 125 bp, Homo sapiens; identical to SEQ ID NO: 343696
  chr19:6425753-6425878
  hypo
  head_and_neck vs. lung,breast

SEQ ID NO: 461746 - DNA, 337 bp, Homo sapiens; identical to SEQ ID NO: 343707
  chr19:7972050-7972387
  hypo
  head_and_neck vs. liver_bileduct,upper_gi

SEQ ID NO: 461747 - DNA, 77 bp, Homo sapiens; identical to SEQ ID NO: 343717
  chr19:8546631-8546708
  hypo
  head_and_neck vs. pancreas_gallbladder,colorectal, lymphoid_neoplasm,upper_gi,sarcoma

SEQ ID NO: 461748 - DNA, 252 bp, Homo sapiens; identical to SEQ ID NO: 343718
  chr19:8554998-8555250
  hypo
  head_and_neck vs. melanoma,colorectal,uterine,breast, sarcoma,upper_gi,lymphoid_neoplasm,liver_bileduct, pancreas_gallbladder,ovary,prostate,multiple_myeloma,lung

SEQ ID NO: 461749 - DNA, 764 bp, Homo sapiens
  chr19:8576026-8576790
  hypo
  head_and_neck vs. cervical,liver_bileduct, pancreas_gallbladder
cgggcgcctagttcagtttctcccgggtctgtctgcccctagagttgggggcacccaacttggcttctccgcgtcccctactatcatccccagattcactgttggggagaagcccgctccgaggtgaacggtgaaaggggcgcaaggtttatacgggaacgccggcgcagatgaaggcgcaggtgccagtcatttttaaggcaaaaatcctgtatttcgggacggtggcatttgtgccccctgggaaggggatgagcactgctgcctcctggtatccaccagaccccgcagggcgcaggaaagaaagcccctccacccctccctggtggtcacctgcacgcacctgagggcgcgtcggagccgccctggggtcttcgggggctgctgccagcacctgcggtaaaggggcgggtcaagttcagagtcagggcgagcccagccagccctcctggaggcccccgaccccacactcaccttggctctttttccagacggcggcgctggaagccggcggcccgggtgcagcggccaggaaggggcgcaggcgcggggggcttaggccaaagggcgcagggttcaagtagggcaggaacggtccggtgggggcaggggcgggggtcgtgaagggttccagcagcgggaacggcaggcccggcgctgatgcggggtcaacctccggggggcgctccggcgcgggcggctctcggtccagggccgggggtggcggcggggctgggctctgcgcatgctccgcgcaaacatgc

SEQ ID NO: 461750 - DNA, 61 bp, Homo sapiens
  chr19:10370250-10370311
  hypo
  head_and_neck vs. melanoma
cggcctgaccggccccccgccccgcccccaccccgcccccaggcctaaatgtgcacagcat

SEQ ID NO: 461751 - DNA, 88 bp, Homo sapiens; identical to SEQ ID NO: 348939
  chr19:10370575-10370663
  hypo
  head_and_neck vs. melanoma

SEQ ID NO: 461752 - DNA, 479 bp, Homo sapiens; identical to SEQ ID NO: 343727
  chr19:10395600-10396079
  hypo

SEQ ID NO: 461753 - DNA, 144 bp, Homo sapiens; identical to SEQ ID NO: 453795
  chr19:10665634-10665778
  hypo
  head_and_neck vs. lymphoid_neoplasm,renal,ovary, liver_bileduct,uterine,breast,multiple_myeloma

SEQ ID NO: 461754 - DNA, 143 bp, Homo sapiens; identical to SEQ ID NO: 356020
  chr19:10665807-10665950
  hypo
  head_and_neck vs. lymphoid_neoplasm,renal,ovary, liver_bileduct,uterine,breast,multiple_myeloma

SEQ ID NO: 461755 - DNA, 69 bp, Homo sapiens; identical to SEQ ID NO: 356023
  chr19:10817637-10817706
  hypo
  head_and_neck vs. liver_bileduct

SEQ ID NO: 461756 - DNA, 3 bp, Homo sapiens
  chr19:12266891-12266894
  hypo
  head_and_neck vs. bladder_and_urothelial,lung,sarcoma, breast
cga

SEQ ID NO: 461757 - DNA, 207 bp, Homo sapiens; identical to SEQ ID NO: 453799
  chr19:12977267-12977474
  hypo
  head_and_neck vs. liver_bileduct

SEQ ID NO: 461758 - DNA, 846 bp, Homo sapiens; identical to SEQ ID NO: 367979
  chr19:16232495-16233341
  hypo
  head_and_neck vs. pancreas_gallbladder,lymphoid_neoplasm, colorectal,liver_bileduct,upper_gi,ovary

SEQ ID NO: 461759 - DNA, 181 bp, Homo sapiens
  chr19:16766722-16766903
  hypo
  head_and_neck vs. cervical
cgacaggattagtcacgtgcagcacaacctgtatacagggctgatccagcacagactagaaacattaaatgcttggtctgtttccaggaagttttgagaggcgctgctcagcaagacccttcccctagcgaaggatcgtgaaaacaggacctcccaccatcaacagatgccaatcaaacgt

SEQ ID NO: 461760 - DNA, 3 bp, Homo sapiens
  chr19:18807947-18807950
  hypo
cga

SEQ ID NO: 461761 - DNA, 160 bp, Homo sapiens; identical to SEQ ID NO: 356079
  chr19:18808024-18808184
  hypo

SEQ ID NO: 461762 - DNA, 165 bp, Homo sapiens; identical to SEQ ID NO: 343859
  chr19:18963604-18963769
  hypo
  head_and_neck vs. cervical,upper_gi,colorectal,ovary

SEQ ID NO: 461763 - DNA, 714 bp, Homo sapiens; identical to SEQ ID NO: 343869
  chr19:19616896-19617610
  hypo
  head_and_neck vs. anorectal

SEQ ID NO: 461764 - DNA, 150 bp, Homo sapiens; identical to SEQ ID NO: 343876
  chr19:19769454-19769604
  hypo
  head_and_neck vs. pancreas_gallbladder,cervical,breast, anorectal,melanoma

SEQ ID NO: 461765 - DNA, 262 bp, Homo sapiens; identical to SEQ ID NO: 452993
  chr19:19843330-19843592
  hypo
  head_and_neck vs. breast,uterine,melanoma,lung, bladder_and_urothelial,ovary,sarcoma,prostate

SEQ ID NO: 461766 - DNA, 47 bp, Homo sapiens; identical to SEQ ID NO: 352250
  chr19:19844044-19844091
  hypo
  head_and_neck vs. breast,uterine,melanoma,lung, bladder_and_urothelial,ovary,sarcoma,prostate

SEQ ID NO: 461767 - DNA, 54 bp, Homo sapiens; identical to SEQ ID NO: 457704
  chr19:20162601-20162655
  hypo
  head_and_neck vs. breast,sarcoma,prostate, bladder_and_urothelial,ovary,renal,uterine,lung, myeloid_neoplasm,non_cancer

SEQ ID NO: 461768 - DNA, 61 bp, Homo sapiens; identical to SEQ ID NO: 455841
  chr19:30718934-30718995
  hypo
  head_and_neck vs. melanoma,sarcoma,prostate, bladder_and_urothelial,thyroid,non_cancer,myeloid_neoplasm, ovary,uterine,lung,renal

SEQ ID NO: 461769 - DNA, 61 bp, Homo sapiens; identical to SEQ ID NO: 455841
  chr19:30718934-30718995
  hypo
  head_and_neck vs. melanoma,sarcoma,prostate,uterine, bladder_and_urothelial,renal,thyroid,myeloid_neoplasm,ovary, non_cancer

SEQ ID NO: 461770 - DNA, 267 bp, Homo sapiens; identical to SEQ ID NO: 343903
  chr19:32845502-32845769
  hypo
  head_and_neck vs. pancreas_gallbladder,liver_bileduct

SEQ ID NO: 461771 - DNA, 52 bp, Homo sapiens; identical to SEQ ID NO: 343916
  chr19:34963061-34963113
  hypo
  head_and_neck vs. liver_bileduct

SEQ ID NO: 461772 - DNA, 74 bp, Homo sapiens; identical to SEQ ID NO: 382637
  chr19:35613702-35613776
  hypo
  head_and_neck vs. upper_gi

SEQ ID NO: 461773 - DNA, 58 bp, Homo sapiens; identical to SEQ ID NO: 356122
  chr19:36222534-36222592
  hypo
  head_and_neck vs. sarcoma

SEQ ID NO: 461774 - DNA, 101 bp, Homo sapiens; identical to SEQ ID NO: 382663
  chr19:39027005-39027106
  hypo
  head_and_neck vs. pancreas_gallbladder

SEQ ID NO: 461775 - DNA, 86 bp, Homo sapiens; identical to SEQ ID NO: 455009
  chr19:39289891-39289977
  hypo

SEQ ID NO: 461776 - DNA, 57 bp, Homo sapiens; identical to SEQ ID NO: 453811
  chr19:39329516-39329573
  hypo
  head_and_neck vs. lymphoid_neoplasm,multiple_myeloma

SEQ ID NO: 461777 - DNA, 32 bp, Homo sapiens; identical to SEQ ID NO: 455019
  chr19:47116867-47116899
  hypo
  head_and_neck vs. pancreas_gallbladder,lymphoid_neoplasm, renal

SEQ ID NO: 461778 - DNA, 168 bp, Homo sapiens; identical to SEQ ID NO: 344026
  chr19:47482472-47482640
  hypo
  head_and_neck vs. liver_bileduct

SEQ ID NO: 461779 - DNA, 457 bp, Homo sapiens; identical to SEQ ID NO: 453817
  chr19:49971410-49971867
  hypo
  head_and_neck vs. sarcoma,renal,liver_bileduct, lymphoid_neoplasm,melanoma,multiple_myeloma

SEQ ID NO: 461780 - DNA, 5 bp, Homo sapiens
  chr19:50292239-50292244
  hypo
  head_and_neck vs. renal,cervical,melanoma,breast,uterine, prostate,sarcoma,colorectal,pancreas_gallbladder, multiple_myeloma,upper_gi
cgcct

SEQ ID NO: 461781 - DNA, 219 bp, Homo sapiens; identical to SEQ ID NO: 453035
  chr19:50553779-50553998
  hypo
  head_and_neck vs. bladder_and_urothelial,uterine

SEQ ID NO: 461782 - DNA, 77 bp, Homo sapiens; identical to SEQ ID NO: 336229
  chr19:51111319-51111396
  hypo
  head_and_neck vs. sarcoma

SEQ ID NO: 461783 - DNA, 78 bp, Homo sapiens; identical to SEQ ID NO: 453036
  chr19:52531282-52531360
  hypo
  head_and_neck vs. bladder_and_urothelial

SEQ ID NO: 461784 - DNA, 208 bp, Homo sapiens; identical to SEQ ID NO: 345609
  chr19:52531884-52532092
  hypo
  head_and_neck vs. bladder_and_urothelial

SEQ ID NO: 461785 - DNA, 819 bp, Homo sapiens; identical to SEQ ID NO: 453045
  chr19:53237625-53238444
  hypo
  head_and_neck vs. lung

SEQ ID NO: 461786 - DNA, 352 bp, Homo sapiens; identical to SEQ ID NO: 453047
  chr19:53445359-53445711
  hypo
  head_and_neck vs. lung

SEQ ID NO: 461787 - DNA, 231 bp, Homo sapiens; identical to SEQ ID NO: 352399
  chr19:53445822-53446053
  hypo
  head_and_neck vs. lung

SEQ ID NO: 461788 - DNA, 2 bp, Homo sapiens
  chr19:54411124-54411126
  hypo
  head_and_neck vs. bladder_and_urothelial,ovary
cg

SEQ ID NO: 461789 - DNA, 20 bp, Homo sapiens
  chr19:54411897-54411917
  hypo
  head_and_neck vs. bladder_and_urothelial,ovary
actccgctctgcgcccgccc

SEQ ID NO: 461790 - DNA, 85 bp, Homo sapiens; identical to SEQ ID NO: 457790
  chr19:54412564-54412649
  hypo
  head_and_neck vs. sarcoma,multiple_myeloma

SEQ ID NO: 461791 - DNA, 134 bp, Homo sapiens; identical to SEQ ID NO: 336290
  chr19:56112791-56112925
  hypo
  head_and_neck vs. multiple_myeloma,lymphoid_neoplasm, renal,uterine,melanoma,ovary,myeloid_neoplasm,colorectal,breast

SEQ ID NO: 461792 - DNA, 171 bp, Homo sapiens; identical to SEQ ID NO: 344121
  chr19:56807013-56807184
  hypo
  head_and_neck vs. liver_bileduct,sarcoma,colorectal, uterine,breast,ovary,upper_gi,renal,lymphoid_neoplasm,melanoma, prostate,pancreas_gallbladder,myeloid_neoplasm

SEQ ID NO: 461793 - DNA, 18 bp, Homo sapiens
  chr19:56915935-56915953
  hypo
  head_and_neck vs. prostate,myeloid_neoplasm,uterine, thyroid,non_cancer,sarcoma,breast,ovary,bladder_and_urothelial, lung
gtttgacagtgtggaatc

SEQ ID NO: 461794 - DNA, 11 bp, Homo sapiens
  chr19:58039267-58039278
  hypo
  head_and_neck vs. sarcoma,melanoma,prostate, myeloid_neoplasm,thyroid,breast,bladder_and_urothelial,uterine, non_cancer
cctgagcaacc

SEQ ID NO: 461795 - DNA, 31 bp, Homo sapiens; identical to SEQ ID NO: 453076
  chr19:58125385-58125416
  hypo
  head_and_neck vs. bladder_and_urothelial

SEQ ID NO: 461796 - DNA, 788 bp, Homo sapiens; identical to SEQ ID NO: 344139
  chr19:58830548-58831336
  hypo
  head_and_neck vs. pancreas_gallbladder

SEQ ID NO: 461797 - DNA, 97 bp, Homo sapiens; identical to SEQ ID NO: 337452
  chr2:272137-272234
  hypo
  head_and_neck vs. upper_gi

SEQ ID NO: 461798 - DNA, 314 bp, Homo sapiens; identical to SEQ ID NO: 337496
  chr2:3582036-3582350
  hypo
  head_and_neck vs. lung,upper_gi

SEQ ID NO: 461799 - DNA, 46 bp, Homo sapiens; identical to SEQ ID NO: 337512
  chr2:8868792-8868838
  hypo
  head_and_neck vs. upper_gi,pancreas_gallbladder,breast, melanoma,colorectal

SEQ ID NO: 461800 - DNA, 4 bp, Homo sapiens
  chr2:10151899-10151903
  hypo
cgta

SEQ ID NO: 461801 - DNA, 2 bp, Homo sapiens
  chr2:10152022-10152024
  hypo
gc

SEQ ID NO: 461802 - DNA, 166 bp, Homo sapiens; identical to SEQ ID NO: 331200
  chr2:10152421-10152587
  hypo
  head_and_neck vs. liver_bileduct,anorectal,breast, lymphoid_neoplasm,uterine,prostate

SEQ ID NO: 461803 - DNA, 91 bp, Homo sapiens; identical to SEQ ID NO: 455044
  chr2:10152958-10153049
  hypo
  head_and_neck vs. lymphoid_neoplasm,breast,prostate, melanoma,renal

SEQ ID NO: 461804 - DNA, 20 bp, Homo sapiens
  chr2:10153468-10153488
  hypo
  head_and_neck vs. lymphoid_neoplasm,breast,prostate, melanoma,renal
atatgggtatgtgtatgggc

SEQ ID NO: 461805 - DNA, 327 bp, Homo sapiens; identical to SEQ ID NO: 455046
  chr2:10153562-10153889
  hypo
  head_and_neck vs. prostate,lymphoid_neoplasm

SEQ ID NO: 461806 - DNA, 19 bp, Homo sapiens
  chr2:10154188-10154207
  hypo
  head_and_neck vs. prostate,lymphoid_neoplasm
gacaggcgtgcatatgagc

SEQ ID NO: 461807 - DNA, 703 bp, Homo sapiens; identical to SEQ ID NO: 460930
  chr2:37899247-37899950
  hypo
  head_and_neck vs. anorectal,lung

SEQ ID NO: 461808 - DNA, 226 bp, Homo sapiens; identical to SEQ ID NO: 345742
  chr2:39186687-39186913
  hypo
  head_and_neck vs. lung,bladder_and_urothelial,colorectal, upper_gi

SEQ ID NO: 461809 - DNA, 125 bp, Homo sapiens; identical to SEQ ID NO: 458867
  chr2:60706396-60706521
  hypo
  head_and_neck vs. upper_gi,lymphoid_neoplasm

SEQ ID NO: 461810 - DNA, 208 bp, Homo sapiens; identical to SEQ ID NO: 458868
  chr2:60706550-60706758
  hypo
  head_and_neck vs. upper_gi,lymphoid_neoplasm

SEQ ID NO: 461811 - DNA, 77 bp, Homo sapiens; identical to SEQ ID NO: 346438
  chr2:60784505-60784582
  hypo
  head_and_neck vs. upper_gi,colorectal,uterine, bladder_and_urothelial,ovary,pancreas_gallbladder,cervical

SEQ ID NO: 461812 - DNA, 373 bp, Homo sapiens; identical to SEQ ID NO: 349503
  chr2:60784505-60784878
  hypo
  head_and_neck vs. upper_gi,colorectal, bladder_and_urothelial,uterine,cervical

SEQ ID NO: 461813 - DNA, 128 bp, Homo sapiens; identical to SEQ ID NO: 337625
  chr2:61074853-61074981
  hypo
  head_and_neck vs. cervical

SEQ ID NO: 461814 - DNA, 92 bp, Homo sapiens; identical to SEQ ID NO: 337630
  chr2:64538788-64538880
  hypo
  head_and_neck vs. colorectal,liver_bileduct,upper_gi, pancreas_gallbladder

SEQ ID NO: 461815 - DNA, 2 bp, Homo sapiens
  chr2:64836206-64836208
  hypo
  head_and_neck vs. pancreas_gallbladder,cervical, multiple_myeloma,ovary,uterine,non_cancer,myeloid_neoplasm, thyroid,upper_gi,breast,renal,liver_bileduct, bladder_and_urothelial,lymphoid_neoplasm
cg

SEQ ID NO: 461816 - DNA, 99 bp, Homo sapiens; identical to SEQ ID NO: 337633
  chr2:65251127-65251226
  hypo
  head_and_neck vs. upper_gi,cervical,lung, pancreas_gallbladder,liver_bileduct,ovary, bladder_and_urothelial,breast

SEQ ID NO: 461817 - DNA, 123 bp, Homo sapiens; identical to SEQ ID NO: 455068
  chr2:69928507-69928630
  hypo
  head_and_neck vs. upper_gi,melanoma,liver_bileduct

SEQ ID NO: 461818 - DNA, 318 bp, Homo sapiens; identical to SEQ ID NO: 454321
  chr2:70351179-70351497
  hypo
  head_and_neck vs. cervical

SEQ ID NO: 461819 - DNA, 236 bp, Homo sapiens; identical to SEQ ID NO: 453103
  chr2:74781700-74781936
  hypo
  head_and_neck vs. upper_gi,colorectal, pancreas_gallbladder,lymphoid_neoplasm,renal,uterine, multiple_myeloma,myeloid_neoplasm,ovary,thyroid,non_cancer, cervical,sarcoma

SEQ ID NO: 461820 - DNA, 6 bp, Homo sapiens
  chr2:85361628-85361634
  hypo
  head_and_neck vs. anorectal
gccccc

SEQ ID NO: 461821 - DNA, 144 bp, Homo sapiens; identical to SEQ ID NO: 345031
  chr2:105471069-105471213
  hypo
  head_and_neck vs. melanoma

SEQ ID NO: 461822 - DNA, 144 bp, Homo sapiens; identical to SEQ ID NO: 453845
  chr2:120005222-120005366
  hypo
  head_and_neck vs. liver_bileduct,melanoma, lymphoid_neoplasm,colorectal,upper_gi,breast,renal,sarcoma, uterine,prostate,pancreas_gallbladder,lung,non_cancer

SEQ ID NO: 461823 - DNA, 263 bp, Homo sapiens; identical to SEQ ID NO: 457880
  chr2:162930659-162930922
  hypo
  head_and_neck vs. colorectal,pancreas_gallbladder, upper_gi,uterine,lung,thyroid,renal

SEQ ID NO: 461824 - DNA, 24 bp, Homo sapiens
  chr2:206830607-206830631
  hypo
  head_and_neck vs. liver_bileduct
cggggccttgcaagtctcggcaga

SEQ ID NO: 461825 - DNA, 66 bp, Homo sapiens; identical to SEQ ID NO: 376520
  chr2:206830660-206830726
  hypo
  head_and_neck vs. liver_bileduct

SEQ ID NO: 461826 - DNA, 178 bp, Homo sapiens; identical to SEQ ID NO: 453863
  chr2:220150664-220150842
  hypo
  head_and_neck vs. colorectal,lymphoid_neoplasm

SEQ ID NO: 461827 - DNA, 336 bp, Homo sapiens; identical to SEQ ID NO: 363080
  chr2:220150871-220151207
  hypo
  head_and_neck vs. colorectal,lymphoid_neoplasm

SEQ ID NO: 461828 - DNA, 99 bp, Homo sapiens; identical to SEQ ID NO: 455094
  chr2:233198455-233198554
  hypo
  head_and_neck vs. melanoma,lymphoid_neoplasm,breast, colorectal,cervical

SEQ ID NO: 461829 - DNA, 129 bp, Homo sapiens; identical to SEQ ID NO: 353240
  chr2:233198583-233198712
  hypo
  head_and_neck vs. melanoma,lymphoid_neoplasm,breast, colorectal,cervical

SEQ ID NO: 461830 - DNA, 902 bp, Homo sapiens; identical to SEQ ID NO: 337947
  chr2:239969842-239970744
  hypo

SEQ ID NO: 461831 - DNA, 131 bp, Homo sapiens; identical to SEQ ID NO: 337989
  chr2:242277184-242277315
  hypo
  head_and_neck vs. liver_bileduct

SEQ ID NO: 461832 - DNA, 47 bp, Homo sapiens
  chr2:242554503-242554550
  hypo
  head_and_neck vs. liver_bileduct
cgcgaaaagaaagaagccagacaaaaacgtatatattctatgattcc

SEQ ID NO: 461833 - DNA, 54 bp, Homo sapiens; identical to SEQ ID NO: 347965
  chr2:242554624-242554678
  hypo
  head_and_neck vs. liver_bileduct

SEQ ID NO: 461834 - DNA, 131 bp, Homo sapiens; identical to SEQ ID NO: 456838
  chr2:242617764-242617895
  hypo
  head_and_neck vs. lung,cervical,upper_gi,colorectal, liver_bileduct,ovary

SEQ ID NO: 461835 - DNA, 531 bp, Homo sapiens; identical to SEQ ID NO: 347967
  chr2:242617924-242618455
  hypo
  head_and_neck vs. lung,cervical,upper_gi,colorectal, liver_bileduct,ovary

SEQ ID NO: 461836 - DNA, 114 bp, Homo sapiens
  chr2:242815156-242815270
  hypo
  head_and_neck vs. anorectal
cgcaagggcggtggccacgttgcctacggcccccagggcaatggctgcttctcccaaggctattaccagaagaggcagctgaggtccaggttccacaaggcccgctgtgggtgc

SEQ ID NO: 461837 - DNA, 93 bp, Homo sapiens; identical to SEQ ID NO: 356232
  chr20:400189-400282
  hypo
  head_and_neck vs. anorectal

SEQ ID NO: 461838 - DNA, 47 bp, Homo sapiens; identical to SEQ ID NO: 457908
  chr20:708554-708601
  hypo
  head_and_neck vs. ovary

SEQ ID NO: 461839 - DNA, 52 bp, Homo sapiens; identical to SEQ ID NO: 457909
  chr20:708851-708903
  hypo
  head_and_neck vs. ovary

SEQ ID NO: 461840 - DNA, 460 bp, Homo sapiens; identical to SEQ ID NO: 375005
  chr20:708944-709404
  hypo
  head_and_neck vs. ovary

SEQ ID NO: 461841 - DNA, 140 bp, Homo sapiens; identical to SEQ ID NO: 453869
  chr20:2820587-2820727
  hypo
  head_and_neck vs. lung,breast,renal,pancreas_gallbladder, uterine,prostate,liver_bileduct

SEQ ID NO: 461842 - DNA, 143 bp, Homo sapiens; identical to SEQ ID NO: 294514
  chr20:2820861-2821004
  hypo
  head_and_neck vs. lung,breast,renal,pancreas_gallbladder, uterine,prostate,liver_bileduct

SEQ ID NO: 461843 - DNA, 127 bp, Homo sapiens; identical to SEQ ID NO: 460980
  chr20:9048369-9048496
  hypo
  head_and_neck vs. bladder_and_urothelial

SEQ ID NO: 461844 - DNA, 632 bp, Homo sapiens; identical to SEQ ID NO: 460981
  chr20:9048532-9049164
  hypo
  head_and_neck vs. bladder_and_urothelial

SEQ ID NO: 461845 - DNA, 35 bp, Homo sapiens; identical to SEQ ID NO: 460982
  chr20:9049238-9049273
  hypo
  head_and_neck vs. bladder_and_urothelial

SEQ ID NO: 461846 - DNA, 339 bp, Homo sapiens; identical to SEQ ID NO: 460983
  chr20:9048825-9049164
  hypo
  head_and_neck vs. lung

SEQ ID NO: 461847 - DNA, 230 bp, Homo sapiens; identical to SEQ ID NO: 460984
  chr20:9049238-9049468
  hypo
  head_and_neck vs. lung

SEQ ID NO: 461848 - DNA, 226 bp, Homo sapiens; identical to SEQ ID NO: 453871
  chr20:20376606-20376832
  hypo
  head_and_neck vs. anorectal,breast,melanoma,colorectal, pancreas_gallbladder,renal,cervical,sarcoma,uterine,prostate, upper_gi,lymphoid_neoplasm,liver_bileduct,non_cancer,ovary

SEQ ID NO: 461849 - DNA, 219 bp, Homo sapiens; identical to SEQ ID NO: 453872
  chr20:20376973-20377192
  hypo
  head_and_neck vs. anorectal,breast,melanoma,colorectal, pancreas_gallbladder,renal,cervical,sarcoma,uterine,prostate, upper_gi,lymphoid_neoplasm,liver_bileduct,non_cancer,ovary

SEQ ID NO: 461850 - DNA, 201 bp, Homo sapiens; identical to SEQ ID NO: 460989
  chr20:22563363-22563564
  hypo
  head_and_neck vs. cervical

SEQ ID NO: 461851 - DNA, 35 bp, Homo sapiens; identical to SEQ ID NO: 460990
  chr20:22563602-22563637
  hypo
  head_and_neck vs. cervical

SEQ ID NO: 461852 - DNA, 102 bp, Homo sapiens; identical to SEQ ID NO: 460991
  chr20:22563663-22563765
  hypo
  head_and_neck vs. cervical

SEQ ID NO: 461853 - DNA, 361 bp, Homo sapiens; identical to SEQ ID NO: 460992
  chr20:22563794-22564155
  hypo
  head_and_neck vs. cervical

SEQ ID NO: 461854 - DNA, 165 bp, Homo sapiens; identical to SEQ ID NO: 455100
  chr20:33879796-33879961
  hypo
  head_and_neck vs. breast,lymphoid_neoplasm,melanoma

SEQ ID NO: 461855 - DNA, 131 bp, Homo sapiens; identical to SEQ ID NO: 368322
  chr20:33880280-33880411
  hypo
  head_and_neck vs. breast,lymphoid_neoplasm,melanoma

SEQ ID NO: 461856 - DNA, 234 bp, Homo sapiens
  chr20:40020340-40020574
  hypo
  head_and_neck vs. melanoma,liver_bileduct, pancreas_gallbladder,renal,colorectal
cggggcagagagagagagcgcgcctcaatggctttcaatagttcaagtgcattcacaccaggcgcattcctgcgcttgagattcctagcatcagccaggagcggcttagtgggagaaagagctgcgacggtgatgatagtgacattccaaagttttgtggcaacatgaaggaggaggtgtgtctgcgcttgcacagtgactgcagcccttgggcagatgtggagaatgtgtgag

SEQ ID NO: 461857 - DNA, 173 bp, Homo sapiens; identical to SEQ ID NO: 455106
  chr20:42088459-42088632
  hypo
  head_and_neck vs. lymphoid_neoplasm

SEQ ID NO: 461858 - DNA, 7 bp, Homo sapiens
  chr20:42088765-42088772
  hypo
  head_and_neck vs. lymphoid_neoplasm
atgaagc

SEQ ID NO: 461859 - DNA, 55 bp, Homo sapiens; identical to SEQ ID NO: 368349
  chr20:42833281-42833336
  hypo
  head_and_neck vs. lymphoid_neoplasm

SEQ ID NO: 461860 - DNA, 174 bp, Homo sapiens; identical to SEQ ID NO: 344302
  chr20:52374073-52374247
  hypo
  head_and_neck vs. liver_bileduct,pancreas_gallbladder, anorectal,melanoma,lymphoid_neoplasm

SEQ ID NO: 461861 - DNA, 91 bp, Homo sapiens; identical to SEQ ID NO: 356315
  chr20:56772299-56772390
  hypo
  head_and_neck vs. melanoma,sarcoma

SEQ ID NO: 461862 - DNA, 164 bp, Homo sapiens; identical to SEQ ID NO: 346239
  chr20:57268976-57269140
  hypo
  head_and_neck vs. liver_bileduct,pancreas_gallbladder, sarcoma,colorectal,lymphoid_neoplasm,uterine

SEQ ID NO: 461863 - DNA, 3 bp, Homo sapiens
  chr20:58507727-58507730
  hypo
  head_and_neck vs. bladder_and_urothelial,lung
cgg

SEQ ID NO: 461864 - DNA, 260 bp, Homo sapiens; identical to SEQ ID NO: 356329
  chr20:58508063-58508323
  hypo
  head_and_neck vs. bladder_and_urothelial,lung

SEQ ID NO: 461865 - DNA, 57 bp, Homo sapiens; identical to SEQ ID NO: 453879
  chr20:58514041-58514098
  hypo
  head_and_neck vs. colorectal,pancreas_gallbladder, lymphoid_neoplasm,renal,sarcoma,uterine,prostate

SEQ ID NO: 461866 - DNA, 115 bp, Homo sapiens; identical to SEQ ID NO: 345644
  chr20:58514400-58514515
  hypo
  head_and_neck vs. colorectal,pancreas_gallbladder, lymphoid_neoplasm,renal,sarcoma,uterine,prostate

SEQ ID NO: 461867 - DNA, 409 bp, Homo sapiens; identical to SEQ ID NO: 344359
  chr20:60725146-60725555
  hypo
  head_and_neck vs. liver_bileduct,melanoma

SEQ ID NO: 461868 - DNA, 83 bp, Homo sapiens
  chr20:60953036-60953119
  hypo
  head_and_neck vs. upper_gi,lymphoid_neoplasm,sarcoma
cgcagtggccggcccgggggtgcaaccccatcccctctctggggtccctttgcagggcagccttaggatccattcactgtggc

SEQ ID NO: 461869 - DNA, 71 bp, Homo sapiens; identical to SEQ ID NO: 368450
  chr20:60953645-60953716
  hypo
  head_and_neck vs. upper_gi,lymphoid_neoplasm,sarcoma

SEQ ID NO: 461870 - DNA, 237 bp, Homo sapiens; identical to SEQ ID NO: 455124
  chr20:61287746-61287983
  hypo
  head_and_neck vs. lymphoid_neoplasm,colorectal

SEQ ID NO: 461871 - DNA, 60 bp, Homo sapiens; identical to SEQ ID NO: 356344
  chr20:61288557-61288617
  hypo
  head_and_neck vs. lymphoid_neoplasm,colorectal

SEQ ID NO: 461872 - DNA, 166 bp, Homo sapiens; identical to SEQ ID NO: 344386
  chr20:61591490-61591656
  hypo
  head_and_neck vs. liver_bileduct,upper_gi,cervical,ovary, colorectal,pancreas_gallbladder

SEQ ID NO: 461873 - DNA, 79 bp, Homo sapiens
  chr20:61974565-61974644
  hypo
  head_and_neck vs. anorectal
cggcacacgtggtgacggtgcgttttattcattgaagtctgtgcacacactgggagcacattccagggcttggcagaca

SEQ ID NO: 461874 - DNA, 7 bp, Homo sapiens
  chr20:62046195-62046202
  hypo
  head_and_neck vs. anorectal
cgtggcc

SEQ ID NO: 461875 - DNA, 320 bp, Homo sapiens; identical to SEQ ID NO: 344523
  chr21:44840079-44840399
  hypo
  head_and_neck vs. upper_gi,colorectal

SEQ ID NO: 461876 - DNA, 932 bp, Homo sapiens; identical to SEQ ID NO: 344530
  chr21:45175388-45176320
  hypo
  head_and_neck vs. cervical,lung

SEQ ID NO: 461877 - DNA, 15 bp, Homo sapiens
  chr21:46036558-46036573
  hypo
  head_and_neck vs. colorectal
cgagaccctgccctg

SEQ ID NO: 461878 - DNA, 82 bp, Homo sapiens; identical to SEQ ID NO: 455153
  chr21:46812995-46813077
  hypo
  head_and_neck vs. cervical

SEQ ID NO: 461879 - DNA, 192 bp, Homo sapiens; identical to SEQ ID NO: 346258
  chr21:46813106-46813298
  hypo
  head_and_neck vs. cervical

SEQ ID NO: 461880 - DNA, 294 bp, Homo sapiens; identical to SEQ ID NO: 453887
  chr21:46912528-46912822
  hypo
  head_and_neck vs. cervical

SEQ ID NO: 461881 - DNA, 132 bp, Homo sapiens; identical to SEQ ID NO: 344625
  chr21:46958789-46958921
  hypo

SEQ ID NO: 461882 - DNA, 387 bp, Homo sapiens; identical to SEQ ID NO: 344629
  chr21:47285233-47285620
  hypo
  head_and_neck vs. anorectal

SEQ ID NO: 461883 - DNA, 11 bp, Homo sapiens
  chr21:47425511-47425522
  hypo
  head_and_neck vs. melanoma,cervical,breast,prostate, lymphoid_neoplasm
cggggtgcacg

SEQ ID NO: 461884 - DNA, 100 bp, Homo sapiens; identical to SEQ ID NO: 344647
  chr21:47797837-47797937
  hypo
  head_and_neck vs. liver_bileduct,anorectal

SEQ ID NO: 461885 - DNA, 731 bp, Homo sapiens; identical to SEQ ID NO: 344649
  chr21:47832850-47833581
  hypo
  head_and_neck vs. colorectal,upper_gi,melanoma,renal, breast,pancreas_gallbladder,sarcoma,prostate,ovary, bladder_and_urothelial,uterine,liver_bileduct,lung, lymphoid_neoplasm

SEQ ID NO: 461886 - DNA, 45 bp, Homo sapiens
  chr22:18328049-18328094
  hypo
  head_and_neck vs. melanoma
cgaaacttgggaaggaaaacatccaagaggcgtctgtttgacgtg

SEQ ID NO: 461887 - DNA, 176 bp, Homo sapiens
  chr22:19771495-19771671
  hypo
  head_and_neck vs. cervical
cgaggagaggcaggcctgggggaccgtgcagcagctgtgcccacctaggaccacagggctggtggggctggcagcttggtagagggcaggtgcacagcaaagttttcaccggtgccggcttgttgtcttccacgctgggatttcacatgaagttctagctaattgagtataagcat

SEQ ID NO: 461888 - DNA, 218 bp, Homo sapiens; identical to SEQ ID NO: 356483
  chr22:19771889-19772107
  hypo
  head_and_neck vs. cervical

SEQ ID NO: 461889 - DNA, 382 bp, Homo sapiens
  chr22:19839604-19839986
  hypo
cgttcgcacacacacggtgtccccacagcagggccgctcaatccagggatccacaaggggggtgtatgccaccccaggagacgccttgtccatctgctgccatggatgtgcgttggcataattggcggctgcccagatgggaatgcgagggccctgctgacggcaccggccacgaggcatgctgggagcacaggggagaagagaggagagccagcactggtgggtggtgggggtgtggacagatgtggcttgcacgacacaacaggacagggatggctgaacagggcgtggcagacccgcactggtccaggcaagtgctgaggatcagggagctgacagctgcagcctcaggagagctgagaagagctgagagactgtcagt

SEQ ID NO: 461890 - DNA, 353 bp, Homo sapiens; identical to SEQ ID NO: 344668
  chr22:19899693-19900046
  hypo
  head_and_neck vs. liver_bileduct

SEQ ID NO: 461891 - DNA, 10 bp, Homo sapiens
  chr22:21154023-21154033
  hypo
  head_and_neck vs. renal
tgggtccacc

SEQ ID NO: 461892 - DNA, 7 bp, Homo sapiens
  chr22:21982786-21982793
  hypo
  head_and_neck vs. liver_bileduct
cgtcgag

SEQ ID NO: 461893 - DNA, 46 bp, Homo sapiens; identical to SEQ ID NO: 356490
  chr22:21983041-21983087
  hypo
  head_and_neck vs. liver_bileduct

SEQ ID NO: 461894 - DNA, 192 bp, Homo sapiens; identical to SEQ ID NO: 344688
  chr22:22324565-22324757
  hypo
  head_and_neck vs. liver_bileduct

SEQ ID NO: 461895 - DNA, 137 bp, Homo sapiens; identical to SEQ ID NO: 453177
  chr22:22862472-22862609
  hypo
  head_and_neck vs. uterine,prostate,myeloid_neoplasm, multiple_myeloma,lymphoid_neoplasm,non_cancer,melanoma,ovary, colorectal

SEQ ID NO: 461896 - DNA, 8 bp, Homo sapiens
  chr22:29446643-29446651
  hypo
  head_and_neck vs. liver_bileduct,melanoma,sarcoma
gagccagc

SEQ ID NO: 461897 - DNA, 86 bp, Homo sapiens; identical to SEQ ID NO: 344714
  chr22:29587127-29587213
  hypo
  head_and_neck vs. ovary,colorectal,upper_gi,renal, pancreas_gallbladder,breast,prostate,uterine,lymphoid_neoplasm, myeloid_neoplasm,thyroid

SEQ ID NO: 461898 - DNA, 82 bp, Homo sapiens; identical to SEQ ID NO: 461010
  chr22:32571858-32571940
  hypo
  head_and_neck vs. sarcoma

SEQ ID NO: 461899 - DNA, 96 bp, Homo sapiens; identical to SEQ ID NO: 346280
  chr22:36902565-36902661
  hypo
  head_and_neck vs. pancreas_gallbladder,lymphoid_neoplasm, renal,lung,bladder_and_urothelial,uterine,prostate,non_cancer, thyroid,colorectal,sarcoma,multiple_myeloma

SEQ ID NO: 461900 - DNA, 112 bp, Homo sapiens; identical to SEQ ID NO: 368779
  chr22:36907702-36907814
  hypo
  head_and_neck vs. liver_bileduct

SEQ ID NO: 461901 - DNA, 3 bp, Homo sapiens
  chr22:38516841-38516844
  hypo
  head_and_neck vs. breast,melanoma,sarcoma,liver_bileduct, lung
cgt

SEQ ID NO: 461902 - DNA, 55 bp, Homo sapiens; identical to SEQ ID NO: 368789
  chr22:38516974-38517029
  hypo
  head_and_neck vs. breast,melanoma,sarcoma,liver_bileduct, lung

SEQ ID NO: 461903 - DNA, 60 bp, Homo sapiens
  chr22:38874156-38874216
  hypo
cgaggaaataactccaaataggagtacaaataggagtgctctaggccagtgtggtcctgc

SEQ ID NO: 461904 - DNA, 19 bp, Homo sapiens
  chr22:38874259-38874278
  hypo
aacttttaaggctgggctc

SEQ ID NO: 461905 - DNA, 106 bp, Homo sapiens; identical to SEQ ID NO: 349116
  chr22:41634855-41634961
  hypo
  head_and_neck vs. renal,melanoma,uterine

SEQ ID NO: 461906 - DNA, 143 bp, Homo sapiens; identical to SEQ ID NO: 344789
  chr22:41669366-41669509
  hypo

SEQ ID NO: 461907 - DNA, 208 bp, Homo sapiens; identical to SEQ ID NO: 453901
  chr22:42095795-42096003
  hypo
  head_and_neck vs. lung

SEQ ID NO: 461908 - DNA, 70 bp, Homo sapiens; identical to SEQ ID NO: 368818
  chr22:42096253-42096323
  hypo
  head_and_neck vs. lung

SEQ ID NO: 461909 - DNA, 33 bp, Homo sapiens; identical to SEQ ID NO: 453905
  chr22:42667137-42667170
  hypo
  head_and_neck vs. lymphoid_neoplasm,melanoma, multiple_myeloma,renal

SEQ ID NO: 461910 - DNA, 78 bp, Homo sapiens; identical to SEQ ID NO: 456932
  chr22:42995235-42995313
  hypo
  head_and_neck vs. liver_bileduct,pancreas_gallbladder, upper_gi

SEQ ID NO: 461911 - DNA, 16 bp, Homo sapiens
  chr22:42995331-42995347
  hypo
  head_and_neck vs. liver_bileduct,pancreas_gallbladder, upper_gi
gggcgcagtggcttac

SEQ ID NO: 461912 - DNA, 107 bp, Homo sapiens; identical to SEQ ID NO: 458979
  chr22:42995599-42995706
  hypo
  head_and_neck vs. liver_bileduct,pancreas_gallbladder, upper_gi

SEQ ID NO: 461913 - DNA, 39 bp, Homo sapiens; identical to SEQ ID NO: 368825
  chr22:43434578-43434617
  hypo
  head_and_neck vs. anorectal,pancreas_gallbladder,renal

SEQ ID NO: 461914 - DNA, 404 bp, Homo sapiens; identical to SEQ ID NO: 453908
  chr22:45593240-45593644
  hypo
  head_and_neck vs. liver_bileduct

SEQ ID NO: 461915 - DNA, 258 bp, Homo sapiens; identical to SEQ ID NO: 346288
  chr22:45593715-45593973
  hypo
  head_and_neck vs. liver_bileduct

SEQ ID NO: 461916 - DNA, 28 bp, Homo sapiens
  chr22:45603889-45603917
  hypo
  head_and_neck vs. melanoma
cgatcacacggctgttcggggcagcacc

SEQ ID NO: 461917 - DNA, 239 bp, Homo sapiens; identical to SEQ ID NO: 456942
  chr22:45603946-45604185
  hypo
  head_and_neck vs. melanoma

SEQ ID NO: 461918 - DNA, 55 bp, Homo sapiens; identical to SEQ ID NO: 356566
  chr22:45604387-45604442
  hypo
  head_and_neck vs. melanoma

SEQ ID NO: 461919 - DNA, 567 bp, Homo sapiens; identical to SEQ ID NO: 344821
  chr22:45808579-45809146
  hypo
  head_and_neck vs. bladder_and_urothelial,lung,prostate, sarcoma,pancreas_gallbladder,colorectal,uterine,renal,upper_gi

SEQ ID NO: 461920 - DNA, 127 bp, Homo sapiens; identical to SEQ ID NO: 344826
  chr22:46339131-46339258
  hypo
  head_and_neck vs. cervical

SEQ ID NO: 461921 - DNA, 359 bp, Homo sapiens; identical to SEQ ID NO: 356572
  chr22:46979972-46980331
  hypo
  head_and_neck vs. breast,upper_gi,pancreas_gallbladder, lymphoid_neoplasm,melanoma,ovary,liver_bileduct

SEQ ID NO: 461922 - DNA, 135 bp, Homo sapiens; identical to SEQ ID NO: 453912
  chr22:47022417-47022552
  hypo
  head_and_neck vs. liver_bileduct,lung

SEQ ID NO: 461923 - DNA, 413 bp, Homo sapiens; identical to SEQ ID NO: 453913
  chr22:47022632-47023045
  hypo
  head_and_neck vs. liver_bileduct,lung

SEQ ID NO: 461924 - DNA, 58 bp, Homo sapiens; identical to SEQ ID NO: 356575
  chr22:47023191-47023249
  hypo
  head_and_neck vs. liver_bileduct,lung

SEQ ID NO: 461925 - DNA, 263 bp, Homo sapiens; identical to SEQ ID NO: 344836
  chr22:47054031-47054294
  hypo
  head_and_neck vs. lung,colorectal

SEQ ID NO: 461926 - DNA, 350 bp, Homo sapiens; identical to SEQ ID NO: 344841
  chr22:47436589-47436939
  hypo
  head_and_neck vs. liver_bileduct

SEQ ID NO: 461927 - DNA, 59 bp, Homo sapiens; identical to SEQ ID NO: 453192
  chr22:50170525-50170584
  hypo
  head_and_neck vs. ovary,melanoma,liver_bileduct, multiple_myeloma

SEQ ID NO: 461928 - DNA, 160 bp, Homo sapiens; identical to SEQ ID NO: 356591
  chr22:50170790-50170950
  hypo
  head_and_neck vs. ovary,melanoma,liver_bileduct, multiple_myeloma

SEQ ID NO: 461929 - DNA, 110 bp, Homo sapiens; identical to SEQ ID NO: 453918
  chr22:50177139-50177249
  hypo
  head_and_neck vs. liver_bileduct

SEQ ID NO: 461930 - DNA, 50 bp, Homo sapiens; identical to SEQ ID NO: 368896
  chr22:50177299-50177349
  hypo
  head_and_neck vs. liver_bileduct

SEQ ID NO: 461931 - DNA, 249 bp, Homo sapiens
  chr22:50316625-50316874
  hypo
  head_and_neck vs. liver_bileduct,cervical,upper_gi
cgccatcctcatggggcgcctgccccggttggcactgagtgtctaaggacagggcctggccatcgcctcatcccctcccctgccgcgtggggcctccgaggatggcatttgagatgattcctcctcaggggctgccctcctccctgcccttccccagccggccctggccacgggctgtgtcaggccatgatcggtccttccccgctccctggccgggctgtcctgggccgctcacagctgtgccgctct

SEQ ID NO: 461932 - DNA, 72 bp, Homo sapiens; identical to SEQ ID NO: 356595
  chr22:50316938-50317010
  hypo
  head_and_neck vs. liver_bileduct,cervical,upper_gi

SEQ ID NO: 461933 - DNA, 153 bp, Homo sapiens; identical to SEQ ID NO: 356600
  chr22:50899708-50899861
  hypo
  head_and_neck vs. lymphoid_neoplasm

SEQ ID NO: 461934 - DNA, 379 bp, Homo sapiens; identical to SEQ ID NO: 453923
  chr22:50942715-50943094
  hypo
  head_and_neck vs. liver_bileduct,upper_gi,breast, colorectal,pancreas_gallbladder,renal,prostate,multiple_myeloma

SEQ ID NO: 461935 - DNA, 117 bp, Homo sapiens; identical to SEQ ID NO: 453924
  chr22:50942977-50943094
  hypo
  head_and_neck vs. liver_bileduct,upper_gi,colorectal, breast,pancreas_gallbladder,renal,prostate,multiple_myeloma

SEQ ID NO: 461936 - DNA, 308 bp, Homo sapiens; identical to SEQ ID NO: 356602
  chr22:50943412-50943720
  hypo
  head_and_neck vs. liver_bileduct,upper_gi,colorectal, breast,pancreas_gallbladder,renal,prostate,multiple_myeloma

SEQ ID NO: 461937 - DNA, 155 bp, Homo sapiens
  chr22:50954823-50954978
  hypo
  head_and_neck vs. liver_bileduct,cervical,upper_gi, bladder_and_urothelial,colorectal,lung,ovary, pancreas_gallbladder,uterine,renal,melanoma,prostate, lymphoid_neoplasm
cgagtgcagactgggccttggattccccctgtctttgtgttgtttcttgcagctggatcagatctgcatttcttttgacgaaggcaagaccacaatgaacttcattgaggcagcgttgttgatccagggctctgcctgcgtctacagtaagaagg

SEQ ID NO: 461938 - DNA, 59 bp, Homo sapiens; identical to SEQ ID NO: 455195
  chr3:5165842-5165901
  hypo

SEQ ID NO: 461939 - DNA, 559 bp, Homo sapiens; identical to SEQ ID NO: 453194
  chr3:32433054-32433613
  hypo
  head_and_neck vs. bladder_and_urothelial, pancreas_gallbladder,lung,ovary,upper_gi,liver_bileduct,uterine, colorectal,multiple_myeloma,renal

SEQ ID NO: 461940 - DNA, 180 bp, Homo sapiens; identical to SEQ ID NO: 453195
  chr3:32433665-32433845
  hypo
  head_and_neck vs. bladder_and_urothelial, pancreas_gallbladder,lung,ovary,upper_gi,liver_bileduct,uterine, colorectal,multiple_myeloma,renal

SEQ ID NO: 461941 - DNA, 247 bp, Homo sapiens; identical to SEQ ID NO: 453196
  chr3:32433366-32433613
  hypo
  head_and_neck vs. pancreas_gallbladder, bladder_and_urothelial,ovary,upper_gi,lung,uterine, liver_bileduct,colorectal,multiple_myeloma,renal

SEQ ID NO: 461942 - DNA, 201 bp, Homo sapiens; identical to SEQ ID NO: 453197
  chr3:32433665-32433866
  hypo
  head_and_neck vs. pancreas_gallbladder, bladder_and_urothelial,ovary,upper_gi,lung,uterine, liver_bileduct,colorectal,multiple_myeloma,renal

SEQ ID NO: 461943 - DNA, 81 bp, Homo sapiens; identical to SEQ ID NO: 345086
  chr3:32434068-32434149
  hypo
  head_and_neck vs. pancreas_gallbladder, bladder_and_urothelial,ovary,upper_gi,lung,uterine, liver_bileduct,colorectal,multiple_myeloma,renal

SEQ ID NO: 461944 - DNA, 38 bp, Homo sapiens; identical to SEQ ID NO: 453931
  chr3:49755498-49755536
  hypo
  head_and_neck vs. liver_bileduct

SEQ ID NO: 461945 - DNA, 233 bp, Homo sapiens; identical to SEQ ID NO: 363267
  chr3:49755593-49755826
  hypo
  head_and_neck vs. liver_bileduct

SEQ ID NO: 461946 - DNA, 232 bp, Homo sapiens; identical to SEQ ID NO: 338110
  chr3:52440854-52441086
  hypo
  head_and_neck vs. upper_gi,pancreas_gallbladder

SEQ ID NO: 461947 - DNA, 60 bp, Homo sapiens; identical to SEQ ID NO: 229708
  chr3:120627258-120627318
  hypo
  head_and_neck vs. anorectal

SEQ ID NO: 461948 - DNA, 185 bp, Homo sapiens; identical to SEQ ID NO: 338187
  chr3:128737561-128737746
  hypo
  head_and_neck vs. pancreas_gallbladder

SEQ ID NO: 461949 - DNA, 30 bp, Homo sapiens; identical to SEQ ID NO: 453214
  chr3:130064848-130064878
  hypo
  head_and_neck vs. sarcoma

SEQ ID NO: 461950 - DNA, 147 bp, Homo sapiens; identical to SEQ ID NO: 338213
  chr3:141622422-141622569
  hypo
  head_and_neck vs. melanoma,pancreas_gallbladder, lymphoid_neoplasm,upper_gi,breast,uterine,lung,sarcoma,renal, colorectal

SEQ ID NO: 461951 - DNA, 204 bp, Homo sapiens
  chr3:141656829-141657033
  hypo
  head_and_neck vs. melanoma,ovary,breast,uterine
cggtgcgggcccagcaggcaggtgacagccgcccttgcgggagtcatccttaaccaagcagtttcagaaatgtttcttgagaaactgtttccggaagtcccggagcctgtgttgcccattgacaagccttgtcggtctcagaagacagactccgggggtctacatccagagacccggctgaggactgaagcccggggtttccaa

SEQ ID NO: 461952 - DNA, 106 bp, Homo sapiens; identical to SEQ ID NO: 353382
  chr3:141657079-141657185
  hypo
  head_and_neck vs. melanoma,ovary,breast,uterine

SEQ ID NO: 461953 - DNA, 308 bp, Homo sapiens; identical to SEQ ID NO: 455229
  chr3:142895557-142895865
  hypo
  head_and_neck vs. renal

SEQ ID NO: 461954 - DNA, 54 bp, Homo sapiens; identical to SEQ ID NO: 345815
  chr3:169540679-169540733
  hypo
  head_and_neck vs. sarcoma

SEQ ID NO: 461955 - DNA, 207 bp, Homo sapiens; identical to SEQ ID NO: 453230
  chr3:180397104-180397311
  hypo
  head_and_neck vs. lung

SEQ ID NO: 461956 - DNA, 809 bp, Homo sapiens; identical to SEQ ID NO: 345120
  chr3:183165024-183165833
  hypo
  head_and_neck vs. liver_bileduct,bladder_and_urothelial, lung,ovary,melanoma,renal,uterine,prostate,multiple_myeloma, pancreas_gallbladder,lymphoid_neoplasm,colorectal,non_cancer, upper_gi

SEQ ID NO: 461957 - DNA, 140 bp, Homo sapiens; identical to SEQ ID NO: 338263
  chr3:183419820-183419960
  hypo
  head_and_neck vs. upper_gi,colorectal

SEQ ID NO: 461958 - DNA, 186 bp, Homo sapiens; identical to SEQ ID NO: 456984
  chr3:184784962-184785148
  hypo
  head_and_neck vs. lymphoid_neoplasm,renal

SEQ ID NO: 461959 - DNA, 393 bp, Homo sapiens; identical to SEQ ID NO: 338281
  chr3:185360808-185361201
  hypo
  head_and_neck vs. lymphoid_neoplasm

SEQ ID NO: 461960 - DNA, 73 bp, Homo sapiens
  chr3:185643252-185643325
  hypo
  head_and_neck vs. liver_bileduct
cgattcccaacatgacgcctgcgagtagacatgggagaatggctgtggctgtgccgtctacgataatctcgac

SEQ ID NO: 461961 - DNA, 133 bp, Homo sapiens; identical to SEQ ID NO: 453234
  chr3:186079331-186079464
  hypo
  head_and_neck vs. thyroid,non_cancer,sarcoma,prostate, lymphoid_neoplasm

SEQ ID NO: 461962 - DNA, 291 bp, Homo sapiens; identical to SEQ ID NO: 453235
  chr3:186079331-186079622
  hypo
  head_and_neck vs. myeloid_neoplasm,prostate,thyroid, lymphoid_neoplasm,non_cancer,multiple_myeloma,sarcoma,breast, ovary,uterine

SEQ ID NO: 461963 - DNA, 125 bp, Homo sapiens; identical to SEQ ID NO: 453236
  chr3:186079497-186079622
  hypo
  head_and_neck vs. ovary,prostate,non_cancer, myeloid_neoplasm,multiple_myeloma,uterine,thyroid, lymphoid_neoplasm,breast,lung,sarcoma,renal

SEQ ID NO: 461964 - DNA, 334 bp, Homo sapiens; identical to SEQ ID NO: 338292
  chr3:187443068-187443402
  hypo
  head_and_neck vs. liver_bileduct,cervical

SEQ ID NO: 461965 - DNA, 447 bp, Homo sapiens; identical to SEQ ID NO: 454389
  chr3:187456666-187457113
  hypo

SEQ ID NO: 461966 - DNA, 380 bp, Homo sapiens; identical to SEQ ID NO: 454390
  chr3:187456733-187457113
  hypo

SEQ ID NO: 461967 - DNA, 154 bp, Homo sapiens; identical to SEQ ID NO: 455246
  chr3:193922622-193922776
  hypo
  head_and_neck vs. renal

SEQ ID NO: 461968 - DNA, 23 bp, Homo sapiens
  chr3:194374282-194374305
  hypo
  head_and_neck vs. liver_bileduct,cervical
cgacggagatggaaaggtgaaca

SEQ ID NO: 461969 - DNA, 11 bp, Homo sapiens
  chr3:194374356-194374367
  hypo
  head_and_neck vs. liver_bileduct,cervical
tcgagggtggc

SEQ ID NO: 461970 - DNA, 63 bp, Homo sapiens; identical to SEQ ID NO: 459052
  chr3:195093160-195093223
  hypo
  head_and_neck vs. liver_bileduct

SEQ ID NO: 461971 - DNA, 97 bp, Homo sapiens; identical to SEQ ID NO: 338314
  chr3:195172966-195173063
  hypo
  head_and_neck vs. cervical

SEQ ID NO: 461972 - DNA, 340 bp, Homo sapiens
  chr3:195603923-195604263
  hypo
  head_and_neck vs. anorectal
gccaggtacttccaggggacccccccacccttaatcttcctatttccagaatgctccccggagcgccacgcttgcaatcccatccctggcccctcagctccaaacctgcagactgtttgcctcctgtccccaggcctctctttctagaaccttctgcattcttccccagcataacacccctaaccacaggccctgcagtctcagtatgtcattcctattcccagaccctgggcccaagggtgagggagccgggcctgggaaggctcggggtgtcggggccacagcggtgcaggtcacactccacacagccccccaggtctcctccacccacccccaagag

SEQ ID NO: 461973 - DNA, 159 bp, Homo sapiens; identical to SEQ ID NO: 363440
  chr3:195604388-195604547
  hypo
  head_and_neck vs. anorectal

SEQ ID NO: 461974 - DNA, 106 bp, Homo sapiens; identical to SEQ ID NO: 338328
  chr3:196263362-196263468
  hypo

SEQ ID NO: 461975 - DNA, 29 bp, Homo sapiens
  chr3:196387699-196387728
  hypo
  head_and_neck vs. cervical
gggctggccagctgcctgggcagcctgcg

SEQ ID NO: 461976 - DNA, 78 bp, Homo sapiens; identical to SEQ ID NO: 363446
  chr3:196387781-196387859
  hypo
  head_and_neck vs. cervical

SEQ ID NO: 461977 - DNA, 284 bp, Homo sapiens; identical to SEQ ID NO: 353430
  chr3:196728448-196728732
  hypo
  head_and_neck vs. colorectal,melanoma,breast,prostate, uterine,renal

SEQ ID NO: 461978 - DNA, 80 bp, Homo sapiens; identical to SEQ ID NO: 353431
  chr3:197330147-197330227
  hypo
  head_and_neck vs. liver_bileduct

SEQ ID NO: 461979 - DNA, 307 bp, Homo sapiens; identical to SEQ ID NO: 338336
  chr3:197582093-197582400
  hypo
  head_and_neck vs. anorectal

SEQ ID NO: 461980 - DNA, 410 bp, Homo sapiens
  chr4:512569-512979
  hypo
  head_and_neck vs. upper_gi,colorectal,breast, pancreas_gallbladder,melanoma,ovary
cggcccattgtctacaccgtcggggatcctttttcctaaaacaaaatggggtatgtgttctgacactgaaatacgttttagaacccacagccaggcccgtgcagtccctcggtggcgtccagtctgttggaggctttgtgcccacccggctctctcagtgtagtgggaccggctttttctcacctctggacttttgcacatgctgttcccatcagcttgatgctcttcctgcagttttttgcctggcgaattcctgggtaccgtttacatttcagcgtaaacatcagaccttcctggtccagcgcccactcccaatccaaaatcagttcctccccattaccaaaaatccctcattgataccctctacttttccttcctgggaaacttgtaattacagctgtaatgcagtc

SEQ ID NO: 461981 - DNA, 488 bp, Homo sapiens
  chr4:513008-513496
  hypo
  head_and_neck vs. upper_gi,colorectal,breast, pancreas_gallbladder,melanoma,ovary
gtgcgtgtctgtgagccctactggatccaagccccagcaggcaaggattgcacctgcttgctcgccatgctgtgtctcccctggcacagcgcctggcacagtgcctggcacgtcgtccacgctccatggatatttgtttcgatgcatgcacaggtgcacccccatagctttgtgactctctgataggcggtggggtgtggacacaggcgtccccccatccagggtggtaggtgtagcaatgaaggatgccagccctggaaccagactgcctgagtttcatttgcagcttttacccactggcactgtggcccaggtgcgtgactcaccctctgtgtctcagttgcctcctctggataacagttctgatgctcatccctgcctcatagggtcattagggaggtgaaacgagcgagccgcctagtgttgctggctactggcacttagtgcagagcacctggtgccggcagcagtggggtgggcctgcaggc

SEQ ID NO: 461982 - DNA, 635 bp, Homo sapiens; identical to SEQ ID NO: 453952
  chr4:513070-513705
  hypo
  head_and_neck vs. upper_gi,colorectal,breast, pancreas_gallbladder,uterine,liver_bileduct,lymphoid_neoplasm, melanoma,cervical,renal,lung,sarcoma,prostate

SEQ ID NO: 461983 - DNA, 221 bp, Homo sapiens; identical to SEQ ID NO: 353435
  chr4:513734-513955
  hypo
  head_and_neck vs. upper_gi,colorectal,breast, pancreas_gallbladder,uterine,liver_bileduct,lymphoid_neoplasm, melanoma,cervical,renal,lung,sarcoma,prostate

SEQ ID NO: 461984 - DNA, 308 bp, Homo sapiens; identical to SEQ ID NO: 453954
  chr4:955544-955852
  hypo
  head_and_neck vs. uterine,lymphoid_neoplasm, multiple_myeloma

SEQ ID NO: 461985 - DNA, 315 bp, Homo sapiens; identical to SEQ ID NO: 338357
  chr4:968846-969161
  hypo
  head_and_neck vs. pancreas_gallbladder,upper_gi

SEQ ID NO: 461986 - DNA, 464 bp, Homo sapiens; identical to SEQ ID NO: 338366
  chr4:1225310-1225774
  hypo
  head_and_neck vs. liver_bileduct,upper_gi,ovary, colorectal,breast,lymphoid_neoplasm,lung,pancreas_gallbladder

SEQ ID NO: 461987 - DNA, 29 bp, Homo sapiens
  chr4:1331705-1331734
  hypo
ttcatgtgacctgcctcaggcccagaggg

SEQ ID NO: 461988 - DNA, 373 bp, Homo sapiens; identical to SEQ ID NO: 453957
  chr4:1331896-1332269
  hypo

SEQ ID NO: 461989 - DNA, 41 bp, Homo sapiens; identical to SEQ ID NO: 453958
  chr4:1791229-1791270
  hypo
  head_and_neck vs. breast,lymphoid_neoplasm,colorectal

SEQ ID NO: 461990 - DNA, 107 bp, Homo sapiens; identical to SEQ ID NO: 363497
  chr4:1791344-1791451
  hypo
  head_and_neck vs. breast,lymphoid_neoplasm,colorectal

SEQ ID NO: 461991 - DNA, 390 bp, Homo sapiens; identical to SEQ ID NO: 338396
  chr4:1986329-1986719
  hypo
  head_and_neck vs. upper_gi,colorectal,cervical, pancreas_gallbladder,breast,liver_bileduct, bladder_and_urothelial,prostate,renal,uterine

SEQ ID NO: 461992 - DNA, 8 bp, Homo sapiens
  chr4:2066299-2066307
  hypo
  head_and_neck vs. melanoma
cgcatgcc

SEQ ID NO: 461993 - DNA, 50 bp, Homo sapiens; identical to SEQ ID NO: 338406
  chr4:2622600-2622650
  hypo
  head_and_neck vs. liver_bileduct

SEQ ID NO: 461994 - DNA, 148 bp, Homo sapiens; identical to SEQ ID NO: 338421
  chr4:3439566-3439714
  hypo
  head_and_neck vs. lymphoid_neoplasm,upper_gi

SEQ ID NO: 461995 - DNA, 222 bp, Homo sapiens; identical to SEQ ID NO: 455269
  chr4:3446222-3446444
  hypo
  head_and_neck vs. renal,prostate

SEQ ID NO: 461996 - DNA, 110 bp, Homo sapiens; identical to SEQ ID NO: 455270
  chr4:3446334-3446444
  hypo
  head_and_neck vs. prostate,renal

SEQ ID NO: 461997 - DNA, 68 bp, Homo sapiens; identical to SEQ ID NO: 353477
  chr4:3447170-3447238
  hypo
  head_and_neck vs. prostate,renal

SEQ ID NO: 461998 - DNA, 58 bp, Homo sapiens; identical to SEQ ID NO: 461060
  chr4:5052378-5052436
  hypo
  head_and_neck vs. anorectal

SEQ ID NO: 461999 - DNA, 290 bp, Homo sapiens; identical to SEQ ID NO: 461061
  chr4:5052556-5052846
  hypo
  head_and_neck vs. anorectal

SEQ ID NO: 462000 - DNA, 149 bp, Homo sapiens; identical to SEQ ID NO: 338439
  chr4:7004195-7004344
  hypo
  head_and_neck vs. melanoma,upper_gi,breast

SEQ ID NO: 462001 - DNA, 207 bp, Homo sapiens; identical to SEQ ID NO: 332046
  chr4:10090148-10090355
  hypo
  head_and_neck vs. cervical,ovary

SEQ ID NO: 462002 - DNA, 108 bp, Homo sapiens; identical to SEQ ID NO: 338503
  chr4:71857989-71858097
  hypo
  head_and_neck vs. liver_bileduct

SEQ ID NO: 462003 - DNA, 233 bp, Homo sapiens; identical to SEQ ID NO: 461074
  chr4:111543735-111543968
  hypo
  head_and_neck vs. cervical

SEQ ID NO: 462004 - DNA, 61 bp, Homo sapiens; identical to SEQ ID NO: 461075
  chr4:111543907-111543968
  hypo
  head_and_neck vs. cervical,colorectal

SEQ ID NO: 462005 - DNA, 7 bp, Homo sapiens
  chr4:184667623-184667630
  hypo
  head_and_neck vs. bladder_and_urothelial,colorectal,lung, cervical,sarcoma,lymphoid_neoplasm,melanoma
cgatagg

SEQ ID NO: 462006 - DNA, 125 bp, Homo sapiens; identical to SEQ ID NO: 353523
  chr4:184667665-184667790
  hypo
  head_and_neck vs. bladder_and_urothelial,colorectal,lung, cervical,sarcoma,lymphoid_neoplasm,melanoma

SEQ ID NO: 462007 - DNA, 15 bp, Homo sapiens
  chr5:192159-192174
  hypo
  head_and_neck vs. anorectal
cgaggcggtggtgca

SEQ ID NO: 462008 - DNA, 343 bp, Homo sapiens; identical to SEQ ID NO: 377243
  chr5:192307-192650
  hypo
  head_and_neck vs. anorectal

SEQ ID NO: 462009 - DNA, 331 bp, Homo sapiens; identical to SEQ ID NO: 338589
  chr5:453948-454279
  hypo
  head_and_neck vs. upper_gi,pancreas_gallbladder, colorectal,liver_bileduct,breast,melanoma,uterine

SEQ ID NO: 462010 - DNA, 368 bp, Homo sapiens; identical to SEQ ID NO: 338593
  chr5:476496-476864
  hypo
  head_and_neck vs. pancreas_gallbladder

SEQ ID NO: 462011 - DNA, 268 bp, Homo sapiens
  chr5:851421-851689
  hypo
  head_and_neck vs. renal,lymphoid_neoplasm
cgctgcggctgctcctggccagtcaggtggggagggcggcaggggtgggagggacgtggtgtcacagagcggcagtgaaagacactcaacggccgctacggggtggggggttgatcttgaggggctgggcggtctctacagaggagggttaggaagcttcgccacgttatgcctcgctcaaagtccttgttgtctctttgggaaaaaaccttcagaaaatgaagttgatattaaatgtatttctttgagaagagagacattgagaaat

SEQ ID NO: 462012 - DNA, 14 bp, Homo sapiens
  chr5:851894-851908
  hypo
  head_and_neck vs. renal,lymphoid_neoplasm
gcgcgggggctcac

SEQ ID NO: 462013 - DNA, 432 bp, Homo sapiens; identical to SEQ ID NO: 338606
  chr5:883821-884253
  hypo
  head_and_neck vs. liver_bileduct,upper_gi,cervical,lung, pancreas_gallbladder,breast,lymphoid_neoplasm,ovary,colorectal

SEQ ID NO: 462014 - DNA, 187 bp, Homo sapiens; identical to SEQ ID NO: 338607
  chr5:913200-913387
  hypo
  head_and_neck vs. lymphoid_neoplasm,melanoma,breast, colorectal,uterine,upper_gi,ovary,prostate

SEQ ID NO: 462015 - DNA, 319 bp, Homo sapiens; identical to SEQ ID NO: 459078
  chr5:1039295-1039614
  hypo
  head_and_neck vs. prostate,lymphoid_neoplasm,breast, colorectal,uterine

SEQ ID NO: 462016 - DNA, 132 bp, Homo sapiens; identical to SEQ ID NO: 353549
  chr5:1039683-1039815
  hypo
  head_and_neck vs. prostate,lymphoid_neoplasm,breast, colorectal,uterine

SEQ ID NO: 462017 - DNA, 12 bp, Homo sapiens
  chr5:1073469-1073481
  hypo
  head_and_neck vs. cervical,breast,liver_bileduct, prostate
cggctctggacg

SEQ ID NO: 462018 - DNA, 431 bp, Homo sapiens; identical to SEQ ID NO: 453970
  chr5:1074389-1074820
  hypo
  head_and_neck vs. cervical,liver_bileduct

SEQ ID NO: 462019 - DNA, 259 bp, Homo sapiens; identical to SEQ ID NO: 338654
  chr5:1331488-1331747
  hypo
  head_and_neck vs. liver_bileduct

SEQ ID NO: 462020 - DNA, 131 bp, Homo sapiens; identical to SEQ ID NO: 363712
  chr5:1641261-1641392
  hypo

SEQ ID NO: 462021 - DNA, 453 bp, Homo sapiens; identical to SEQ ID NO: 338705
  chr5:14328256-14328709
  hypo

SEQ ID NO: 462022 - DNA, 133 bp, Homo sapiens; identical to SEQ ID NO: 338731
  chr5:61681266-61681399
  hypo

SEQ ID NO: 462023 - DNA, 62 bp, Homo sapiens; identical to SEQ ID NO: 338743
  chr5:74753672-74753734
  hypo

SEQ ID NO: 462024 - DNA, 53 bp, Homo sapiens; identical to SEQ ID NO: 453291
  chr5:75698192-75698245
  hypo
  head_and_neck vs. cervical,pancreas_gallbladder

SEQ ID NO: 462025 - DNA, 916 bp, Homo sapiens; identical to SEQ ID NO: 453292
  chr5:75698274-75699190
  hypo
  head_and_neck vs. cervical,pancreas_gallbladder

SEQ ID NO: 462026 - DNA, 752 bp, Homo sapiens; identical to SEQ ID NO: 453293
  chr5:75698708-75699460
  hypo
  head_and_neck vs. cervical,upper_gi

SEQ ID NO: 462027 - DNA, 267 bp, Homo sapiens; identical to SEQ ID NO: 453294
  chr5:75699193-75699460
  hypo
  head_and_neck vs. upper_gi,pancreas_gallbladder,cervical

SEQ ID NO: 462028 - DNA, 19 bp, Homo sapiens
  chr5:75700173-75700192
  hypo
  head_and_neck vs. upper_gi,pancreas_gallbladder,cervical
ccagattaacaccaaccac

SEQ ID NO: 462029 - DNA, 735 bp, Homo sapiens; identical to SEQ ID NO: 345179
  chr5:87436769-87437504
  hypo
  head_and_neck vs. lung

SEQ ID NO: 462030 - DNA, 38 bp, Homo sapiens; identical to SEQ ID NO: 453332
  chr5:124084158-124084196
  hypo
  head_and_neck vs. pancreas_gallbladder,colorectal, upper_gi,liver_bileduct,lymphoid_neoplasm,lung, bladder_and_urothelial,uterine,renal,prostate,ovary, myeloid_neoplasm,non_cancer,breast

SEQ ID NO: 462031 - DNA, 60 bp, Homo sapiens; identical to SEQ ID NO: 346734
  chr5:124084302-124084362
  hypo
  head_and_neck vs. pancreas_gallbladder,colorectal, upper_gi,liver_bileduct,lymphoid_neoplasm,lung, bladder_and_urothelial,uterine,renal,prostate,ovary, myeloid_neoplasm,non_cancer,breast

SEQ ID NO: 462032 - DNA, 112 bp, Homo sapiens; identical to SEQ ID NO: 453334
  chr5:124084660-124084772
  hypo
  head_and_neck vs. liver_bileduct,pancreas_gallbladder, upper_gi,colorectal,lung,ovary,uterine,prostate, bladder_and_urothelial,renal,non_cancer,myeloid_neoplasm, thyroid,lymphoid_neoplasm,breast

SEQ ID NO: 462033 - DNA, 64 bp, Homo sapiens; identical to SEQ ID NO: 345193
  chr5:124084977-124085041
  hypo
  head_and_neck vs. liver_bileduct,pancreas_gallbladder, upper_gi,colorectal,lung,ovary,uterine,prostate, bladder_and_urothelial,renal,non_cancer,myeloid_neoplasm, thyroid,lymphoid_neoplasm,breast

SEQ ID NO: 462034 - DNA, 1 bp, Homo sapiens
  chr5:133820136-133820137
  hypo
  head_and_neck vs. pancreas_gallbladder,anorectal
c

SEQ ID NO: 462035 - DNA, 1 bp, Homo sapiens
  chr5:136835144-136835145
  hypo
  head_and_neck vs. anorectal,lung
c

SEQ ID NO: 462036 - DNA, 65 bp, Homo sapiens; identical to SEQ ID NO: 338812
  chr5:141355864-141355929
  hypo
  head_and_neck vs. ovary,upper_gi,liver_bileduct, lymphoid_neoplasm,breast,melanoma,colorectal,lung, pancreas_gallbladder

SEQ ID NO: 462037 - DNA, 14 bp, Homo sapiens
  chr5:149810914-149810928
  hypo
  head_and_neck vs. melanoma,breast
ccaatgatgctgac

SEQ ID NO: 462038 - DNA, 79 bp, Homo sapiens; identical to SEQ ID NO: 461183
  chr5:174220739-174220818
  hypo
  head_and_neck vs. anorectal

SEQ ID NO: 462039 - DNA, 30 bp, Homo sapiens; identical to SEQ ID NO: 461184
  chr5:174220942-174220972
  hypo
  head_and_neck vs. anorectal

SEQ ID NO: 462040 - DNA, 90 bp, Homo sapiens; identical to SEQ ID NO: 377546
  chr5:176698046-176698136
  hypo
  head_and_neck vs. anorectal

SEQ ID NO: 462041 - DNA, 77 bp, Homo sapiens; identical to SEQ ID NO: 453988
  chr5:176795049-176795126
  hypo
  head_and_neck vs. lung,breast,bladder_and_urothelial, uterine,melanoma,lymphoid_neoplasm

SEQ ID NO: 462042 - DNA, 238 bp, Homo sapiens; identical to SEQ ID NO: 348125
  chr5:176795288-176795526
  hypo
  head_and_neck vs. lung,breast,bladder_and_urothelial, uterine,melanoma,lymphoid_neoplasm

SEQ ID NO: 462043 - DNA, 365 bp, Homo sapiens; identical to SEQ ID NO: 358348
  chr5:180046947-180047312
  hypo
  head_and_neck vs. lymphoid_neoplasm

SEQ ID NO: 462044 - DNA, 55 bp, Homo sapiens; identical to SEQ ID NO: 346767
  chr6:393764-393819
  hypo
  head_and_neck vs. lymphoid_neoplasm

SEQ ID NO: 462045 - DNA, 182 bp, Homo sapiens; identical to SEQ ID NO: 353725
  chr6:3333155-3333337
  hypo
  head_and_neck vs. cervical,melanoma,anorectal,colorectal, upper_gi

SEQ ID NO: 462046 - DNA, 97 bp, Homo sapiens
  chr6:4874031-4874128
  hypo
  head_and_neck vs. liver_bileduct,colorectal,upper_gi, pancreas_gallbladder,renal,uterine
cgagagcctggtttgaaaccgccaagtaggaacatcgcacaggggacaccttcacatgcgccgcagctgtgcagatttcacctcctgccactgcttg

SEQ ID NO: 462047 - DNA, 465 bp, Homo sapiens; identical to SEQ ID NO: 332643
  chr6:4948996-4949461
  hypo
  head_and_neck vs. upper_gi,colorectal,melanoma,sarcoma, uterine,ovary

SEQ ID NO: 462048 - DNA, 184 bp, Homo sapiens; identical to SEQ ID NO: 353738
  chr6:7237796-7237980
  hypo
  head_and_neck vs. colorectal,liver_bileduct

SEQ ID NO: 462049 - DNA, 223 bp, Homo sapiens; identical to SEQ ID NO: 339024
  chr6:36198250-36198473
  hypo
  head_and_neck vs. breast,lymphoid_neoplasm,ovary, upper_gi,sarcoma

SEQ ID NO: 462050 - DNA, 314 bp, Homo sapiens; identical to SEQ ID NO: 455328
  chr6:37023826-37024140
  hypo
  head_and_neck vs. melanoma,sarcoma

SEQ ID NO: 462051 - DNA, 97 bp, Homo sapiens; identical to SEQ ID NO: 455331
  chr6:42762779-42762876
  hypo

SEQ ID NO: 462052 - DNA, 373 bp, Homo sapiens; identical to SEQ ID NO: 453380
  chr6:46097250-46097623
  hypo
  head_and_neck vs. pancreas_gallbladder,uterine,lung, renal,lymphoid_neoplasm,ovary

SEQ ID NO: 462053 - DNA, 521 bp, Homo sapiens; identical to SEQ ID NO: 345237
  chr6:46097694-46098215
  hypo
  head_and_neck vs. pancreas_gallbladder,uterine,lung, renal,lymphoid_neoplasm,ovary

SEQ ID NO: 462054 - DNA, 74 bp, Homo sapiens
  chr6:119510833-119510907
  hypo
cgattatatgattcatgacaagtacgggcaatttcagccccgagttcaaggtagtgttgggccatgccttcggg

SEQ ID NO: 462055 - DNA, 70 bp, Homo sapiens; identical to SEQ ID NO: 353822
  chr6:119510942-119511012
  hypo

SEQ ID NO: 462056 - DNA, 139 bp, Homo sapiens; identical to SEQ ID NO: 455346
  chr6:158093637-158093776
  hypo
  head_and_neck vs. melanoma

SEQ ID NO: 462057 - DNA, 172 bp, Homo sapiens; identical to SEQ ID NO: 348175
  chr6:158094082-158094254
  hypo
  head_and_neck vs. melanoma

SEQ ID NO: 462058 - DNA, 84 bp, Homo sapiens; identical to SEQ ID NO: 339176
  chr6:159205631-159205715
  hypo
  head_and_neck vs. anorectal

SEQ ID NO: 462059 - DNA, 365 bp, Homo sapiens; identical to SEQ ID NO: 339205
  chr6:168672446-168672811
  hypo
  head_and_neck vs. colorectal,upper_gi,cervical,breast, lymphoid_neoplasm,prostate,pancreas_gallbladder

SEQ ID NO: 462060 - DNA, 144 bp, Homo sapiens; identical to SEQ ID NO: 377919
  chr7:653114-653258
  hypo
  head_and_neck vs. upper_gi

SEQ ID NO: 462061 - DNA, 274 bp, Homo sapiens; identical to SEQ ID NO: 377920
  chr7:653522-653796
  hypo
  head_and_neck vs. upper_gi

SEQ ID NO: 462062 - DNA, 274 bp, Homo sapiens; identical to SEQ ID NO: 332994
  chr7:889360-889634
  hypo

SEQ ID NO: 462063 - DNA, 742 bp, Homo sapiens; identical to SEQ ID NO: 339267
  chr7:925633-926375
  hypo
  head_and_neck vs. colorectal,breast

SEQ ID NO: 462064 - DNA, 92 bp, Homo sapiens
  chr7:1029909-1030001
  hypo
  head_and_neck vs. multiple_myeloma,renal,liver_bileduct, lymphoid_neoplasm
cggcagtgtgacagtggcgcgtgtgctgggggtggtgtggtcggcagtgtgacagtggcgcgtgtgctgggggcggtgtggtcggcagtgtg

SEQ ID NO: 462065 - DNA, 125 bp, Homo sapiens
  chr7:1451120-1451245
  hypo
  head_and_neck vs. cervical
cgtatccggggtgttcgaacaattgtgcggcgccgacgatgcaagctgttgacctgcacagataaaccgtgcgtgcggaggaatcgggggcggcggacggggtggggggagtgtacatggctgtt

SEQ ID NO: 462066 - DNA, 336 bp, Homo sapiens; identical to SEQ ID NO: 339297
  chr7:1584054-1584390
  hypo

SEQ ID NO: 462067 - DNA, 421 bp, Homo sapiens; identical to SEQ ID NO: 353892
  chr7:1641978-1642399
  hypo
  head_and_neck vs. sarcoma

SEQ ID NO: 462068 - DNA, 327 bp, Homo sapiens; identical to SEQ ID NO: 454005
  chr7:2208344-2208671
  hypo
  head_and_neck vs. cervical,melanoma,liver_bileduct, pancreas_gallbladder,colorectal,upper_gi

SEQ ID NO: 462069 - DNA, 91 bp, Homo sapiens; identical to SEQ ID NO: 345892
  chr7:2208844-2208935
  hypo
  head_and_neck vs. cervical,melanoma,liver_bileduct, pancreas_gallbladder,colorectal,upper_gi

SEQ ID NO: 462070 - DNA, 242 bp, Homo sapiens; identical to SEQ ID NO: 339340
  chr7:2448743-2448985
  hypo
  head_and_neck vs. cervical,liver_bileduct, pancreas_gallbladder,upper_gi

SEQ ID NO: 462071 - DNA, 84 bp, Homo sapiens; identical to SEQ ID NO: 350505
  chr7:3083602-3083686
  hypo
  head_and_neck vs. pancreas_gallbladder,cervical, bladder_and_urothelial

SEQ ID NO: 462072 - DNA, 903 bp, Homo sapiens; identical to SEQ ID NO: 459124
  chr7:4801650-4802553
  hypo
  head_and_neck vs. liver_bileduct

SEQ ID NO: 462073 - DNA, 468 bp, Homo sapiens; identical to SEQ ID NO: 454008
  chr7:4802085-4802553
  hypo
  head_and_neck vs. liver_bileduct

SEQ ID NO: 462074 - DNA, 430 bp, Homo sapiens; identical to SEQ ID NO: 364288
  chr7:4802589-4803019
  hypo
  head_and_neck vs. liver_bileduct

SEQ ID NO: 462075 - DNA, 521 bp, Homo sapiens; identical to SEQ ID NO: 339388
  chr7:6207763-6208284
  hypo
  head_and_neck vs. anorectal,cervical,renal, pancreas_gallbladder

SEQ ID NO: 462076 - DNA, 108 bp, Homo sapiens; identical to SEQ ID NO: 455377
  chr7:6443719-6443827
  hypo
  head_and_neck vs. melanoma,lymphoid_neoplasm,ovary, sarcoma,multiple_myeloma,anorectal,colorectal,renal, myeloid_neoplasm,uterine,liver_bileduct

SEQ ID NO: 462077 - DNA, 101 bp, Homo sapiens; identical to SEQ ID NO: 455378
  chr7:6443856-6443957
  hypo
  head_and_neck vs. melanoma,lymphoid_neoplasm,ovary, sarcoma,multiple_myeloma,anorectal,colorectal,renal, myeloid_neoplasm,uterine,liver_bileduct

SEQ ID NO: 462078 - DNA, 61 bp, Homo sapiens; identical to SEQ ID NO: 455379
  chr7:6443990-6444051
  hypo
  head_and_neck vs. melanoma,lymphoid_neoplasm,ovary, sarcoma,multiple_myeloma,anorectal,colorectal,renal, myeloid_neoplasm,uterine,liver_bileduct

SEQ ID NO: 462079 - DNA, 177 bp, Homo sapiens; identical to SEQ ID NO: 339393
  chr7:6448767-6448944
  hypo
  head_and_neck vs. cervical

SEQ ID NO: 462080 - DNA, 3 bp, Homo sapiens
  chr7:6525091-6525094
  hypo
  head_and_neck vs. lymphoid_neoplasm
ttc

SEQ ID NO: 462081 - DNA, 57 bp, Homo sapiens; identical to SEQ ID NO: 459130
  chr7:7102882-7102939
  hypo

SEQ ID NO: 462082 - DNA, 37 bp, Homo sapiens; identical to SEQ ID NO: 364316
  chr7:7102968-7103005
  hypo

SEQ ID NO: 462083 - DNA, 28 bp, Homo sapiens
  chr7:25891919-25891947
  hypo
  head_and_neck vs. anorectal
cgttacagggtgggactgggtggagcag

SEQ ID NO: 462084 - DNA, 189 bp, Homo sapiens; identical to SEQ ID NO: 461248
  chr7:25892243-25892432
  hypo
  head_and_neck vs. anorectal

SEQ ID NO: 462085 - DNA, 7 bp, Homo sapiens
  chr7:37487365-37487372
  hypo
  head_and_neck vs. ovary,multiple_myeloma,uterine, lymphoid_neoplasm,non_cancer,thyroid,myeloid_neoplasm,sarcoma, breast,prostate,renal,melanoma,lung,bladder_and_urothelial, liver_bileduct
cgctcgc

SEQ ID NO: 462086 - DNA, 168 bp, Homo sapiens; identical to SEQ ID NO: 345273
  chr7:37960958-37961126
  hypo
  head_and_neck vs. lung,pancreas_gallbladder, liver_bileduct,renal,ovary,sarcoma,uterine,myeloid_neoplasm, thyroid,prostate,bladder_and_urothelial,non_cancer, multiple_myeloma,melanoma,breast

SEQ ID NO: 462087 - DNA, 95 bp, Homo sapiens; identical to SEQ ID NO: 353982
  chr7:50251628-50251723
  hypo
  head_and_neck vs. anorectal

SEQ ID NO: 462088 - DNA, 413 bp, Homo sapiens; identical to SEQ ID NO: 461268
  chr7:64349470-64349883
  hypo
  head_and_neck vs. melanoma,pancreas_gallbladder

SEQ ID NO: 462089 - DNA, 18 bp, Homo sapiens
  chr7:64349983-64350001
  hypo
  head_and_neck vs. melanoma,pancreas_gallbladder
cgctgttggaaagcagcg

SEQ ID NO: 462090 - DNA, 48 bp, Homo sapiens; identical to SEQ ID NO: 371572
  chr7:64350036-64350084
  hypo
  head_and_neck vs. melanoma,pancreas_gallbladder

SEQ ID NO: 462091 - DNA, 92 bp, Homo sapiens
  chr7:65553884-65553976
  hypo
  head_and_neck vs. cervical,liver_bileduct,anorectal
cgtgcagctctcagatgcctacaggtaagccctgaactgccacctccatctgccgctgccggcctctgtatcccccgccgcccgcggacgtg

SEQ ID NO: 462092 - DNA, 314 bp, Homo sapiens; identical to SEQ ID NO: 353997
  chr7:65554018-65554332
  hypo
  head_and_neck vs. cervical,liver_bileduct,anorectal

SEQ ID NO: 462093 - DNA, 90 bp, Homo sapiens; identical to SEQ ID NO: 354000
  chr7:66293278-66293368
  hypo
  head_and_neck vs. melanoma,breast

SEQ ID NO: 462094 - DNA, 122 bp, Homo sapiens
  chr7:76106210-76106332
  hypo
  head_and_neck vs. lung
cgtgccttcgtggaaagttttagctgatgtcctcgcctgtatttcccaggctgtttttgcagagttgtgagagttggttcatccgggccatgaggacatgttgggacataccccgtgtgccg

SEQ ID NO: 462095 - DNA, 102 bp, Homo sapiens; identical to SEQ ID NO: 364427
  chr7:76106380-76106482
  hypo
  head_and_neck vs. lung

SEQ ID NO: 462096 - DNA, 4 bp, Homo sapiens
  chr7:76631508-76631512
  hypo
  head_and_neck vs. anorectal
cgca

SEQ ID NO: 462097 - DNA, 75 bp, Homo sapiens; identical to SEQ ID NO: 364428
  chr7:76631604-76631679
  hypo
  head_and_neck vs. anorectal

SEQ ID NO: 462098 - DNA, 117 bp, Homo sapiens; identical to SEQ ID NO: 454016
  chr7:101475674-101475791
  hypo
  head_and_neck vs. melanoma,liver_bileduct,uterine, colorectal,lymphoid_neoplasm,breast,renal

SEQ ID NO: 462099 - DNA, 236 bp, Homo sapiens; identical to SEQ ID NO: 354028
  chr7:101475858-101476094
  hypo
  head_and_neck vs. melanoma,liver_bileduct,uterine, colorectal,lymphoid_neoplasm,breast,renal

SEQ ID NO: 462100 - DNA, 197 bp, Homo sapiens
  chr7:101603073-101603270
  hypo
  head_and_neck vs. pancreas_gallbladder,colorectal, upper_gi,renal,liver_bileduct,melanoma,lymphoid_neoplasm,lung, breast,prostate
cggaggatttcaccgcgtacatattctctgtttggacatggtacaacctgtggacccttttaaacatagttacatgtttgactctttatagggtaataactcgattaattttgcaaggctttttagaataccattgttctcttgaaaagaacaggtttgctgttttaacaagactttaatgccatcgagatgcctca

SEQ ID NO: 462101 - DNA, 242 bp, Homo sapiens; identical to SEQ ID NO: 345916
  chr7:101603308-101603550
  hypo
  head_and_neck vs. pancreas_gallbladder,colorectal, upper_gi,renal,liver_bileduct,melanoma,lymphoid_neoplasm,lung, breast,prostate

SEQ ID NO: 462102 - DNA, 312 bp, Homo sapiens; identical to SEQ ID NO: 457139
  chr7:101652279-101652591
  hypo
  head_and_neck vs. lymphoid_neoplasm,sarcoma,prostate, renal,uterine,ovary,multiple_myeloma,non_cancer, myeloid_neoplasm,thyroid,bladder_and_urothelial

SEQ ID NO: 462103 - DNA, 177 bp, Homo sapiens; identical to SEQ ID NO: 348251
  chr7:129483449-129483626
  hypo
  head_and_neck vs. cervical,upper_gi,liver_bileduct, sarcoma,pancreas_gallbladder,prostate

SEQ ID NO: 462104 - DNA, 151 bp, Homo sapiens; identical to SEQ ID NO: 339640
  chr7:137564632-137564783
  hypo
  head_and_neck vs. anorectal,pancreas_gallbladder

SEQ ID NO: 462105 - DNA, 503 bp, Homo sapiens; identical to SEQ ID NO: 339660
  chr7:148480954-148481457
  hypo
  head_and_neck vs. melanoma,renal,upper_gi,breast,ovary, liver_bileduct,colorectal,lymphoid_neoplasm, pancreas_gallbladder,uterine,prostate,cervical

SEQ ID NO: 462106 - DNA, 1 bp, Homo sapiens
  chr7:155581242-155581243
  hypo
  head_and_neck vs. lymphoid_neoplasm,prostate,non_cancer
c

SEQ ID NO: 462107 - DNA, 39 bp, Homo sapiens; identical to SEQ ID NO: 345928
  chr7:155581980-155582019
  hypo
  head_and_neck vs. lymphoid_neoplasm,prostate,non_cancer

SEQ ID NO: 462108 - DNA, 239 bp, Homo sapiens; identical to SEQ ID NO: 455413
  chr7:155581980-155582219
  hypo
  head_and_neck vs. melanoma,lymphoid_neoplasm,thyroid, uterine,non_cancer,prostate,sarcoma,renal

SEQ ID NO: 462109 - DNA, 650 bp, Homo sapiens; identical to SEQ ID NO: 348277
  chr7:157202474-157203124
  hypo
  head_and_neck vs. liver_bileduct,lymphoid_neoplasm

SEQ ID NO: 462110 - DNA, 788 bp, Homo sapiens
  chr7:158066162-158066950
  hypo
  head_and_neck vs. cervical,anorectal
cgcaggcacagggggagccgcaggcacagggggagccgcagacagacatgggaggagccgcagacacggggagccgcagacacagggggagccgcaggcacagggggagccgcagacagacatgggaggagccgcagacacggggagccgcaggcatgggggagccgcagacagacatgggaggagccgcagacacgggaggagccgcagacacagggagccgcagacacagggggagctgcagacacaggaggagacacacaaggagccgcagacacagggggagccacagacagacatgggaggagccgcagacacggggagccgcagacacagggggagccgcaggcatgggggagccgcagacacagggggagccgcagacacaggaggagacacacgaggagccgcagacgcaggaggagccgcagacagacgcgggaggagccgcagacacagggggagccgcagacacagggggagctgcagacagacatgggaggagccgcagacacagggagccgcagacacagggagccgcagacacagggggagccgcagacacaggaggagacacacgaggagccgcaggcacagggggagccgcagacacagggggagctgcagacagacatgggaggagccgcagacacggggagccgcagacacagggagccgcagacacagggggagccgcagacacaggaggagacacacgaggagccgcagacacagggggagccgcagacagacatgggaggagccacagacacgggagccgcagacac

SEQ ID NO: 462111 - DNA, 471 bp, Homo sapiens
  chr7:158066479-158066950
  hypo
  head_and_neck vs. cervical
cggggagccgcagacacagggggagccgcaggcatgggggagccgcagacacagggggagccgcagacacaggaggagacacacgaggagccgcagacgcaggaggagccgcagacagacgcgggaggagccgcagacacagggggagccgcagacacagggggagctgcagacagacatgggaggagccgcagacacagggagccgcagacacagggagccgcagacacagggggagccgcagacacaggaggagacacacgaggagccgcaggcacagggggagccgcagacacagggggagctgcagacagacatgggaggagccgcagacacggggagccgcagacacagggagccgcagacacagggggagccgcagacacaggaggagacacacgaggagccgcagacacagggggagccgcagacagacatgggaggagccacagacacgggagccgcagacac

SEQ ID NO: 462112 - DNA, 219 bp, Homo sapiens; identical to SEQ ID NO: 348289
  chr7:158067069-158067288
  hypo
  head_and_neck vs. cervical

SEQ ID NO: 462113 - DNA, 229 bp, Homo sapiens; identical to SEQ ID NO: 364682
  chr8:21959610-21959839
  hypo
  head_and_neck vs. upper_gi

SEQ ID NO: 462114 - DNA, 197 bp, Homo sapiens; identical to SEQ ID NO: 454027
  chr8:23423722-23423919
  hypo
  head_and_neck vs. melanoma,liver_bileduct, lymphoid_neoplasm,renal,multiple_myeloma

SEQ ID NO: 462115 - DNA, 106 bp, Homo sapiens; identical to SEQ ID NO: 339867
  chr8:26267649-26267755
  hypo
  head_and_neck vs. lymphoid_neoplasm

SEQ ID NO: 462116 - DNA, 982 bp, Homo sapiens; identical to SEQ ID NO: 461289
  chr8:29206374-29207356
  hypo
  head_and_neck vs. anorectal,lung,cervical

SEQ ID NO: 462117 - DNA, 962 bp, Homo sapiens; identical to SEQ ID NO: 461290
  chr8:29206909-29207871
  hypo
  head_and_neck vs. anorectal

SEQ ID NO: 462118 - DNA, 231 bp, Homo sapiens; identical to SEQ ID NO: 359092
  chr8:33372206-33372437
  hypo
  head_and_neck vs. pancreas_gallbladder,myeloid_neoplasm, uterine,colorectal,non_cancer,bladder_and_urothelial

SEQ ID NO: 462119 - DNA, 18 bp, Homo sapiens
  chr8:42147521-42147539
  hypo
  head_and_neck vs. colorectal,renal,sarcoma
cattgcggttggccaccc

SEQ ID NO: 462120 - DNA, 188 bp, Homo sapiens; identical to SEQ ID NO: 454029
  chr8:49571728-49571916
  hypo
  head_and_neck vs. colorectal,renal,lymphoid_neoplasm, pancreas_gallbladder,melanoma,prostate,uterine,thyroid

SEQ ID NO: 462121 - DNA, 21 bp, Homo sapiens
  chr8:49609208-49609229
  hypo
  head_and_neck vs. anorectal
tgcacatggctctcaggctcc

SEQ ID NO: 462122 - DNA, 212 bp, Homo sapiens; identical to SEQ ID NO: 345302
  chr8:61193765-61193977
  hypo
  head_and_neck vs. breast,ovary,sarcoma,upper_gi,uterine, prostate,lung,multiple_myeloma,bladder_and_urothelial, colorectal,myeloid_neoplasm,non_cancer,thyroid, pancreas_gallbladder

SEQ ID NO: 462123 - DNA, 293 bp, Homo sapiens; identical to SEQ ID NO: 453456
  chr8:61193765-61194058
  hypo
  head_and_neck vs. breast,ovary,melanoma,upper_gi,uterine, prostate,lung,colorectal,multiple_myeloma,myeloid_neoplasm, thyroid,non_cancer,pancreas_gallbladder,bladder_and_urothelial

SEQ ID NO: 462124 - DNA, 146 bp, Homo sapiens; identical to SEQ ID NO: 454043
  chr8:71447942-71448088
  hypo
  head_and_neck vs. sarcoma,uterine,melanoma,breast,renal, prostate,pancreas_gallbladder,lymphoid_neoplasm,colorectal

SEQ ID NO: 462125 - DNA, 50 bp, Homo sapiens; identical to SEQ ID NO: 354202
  chr8:71448124-71448174
  hypo
  head_and_neck vs. sarcoma,uterine,melanoma,breast,renal, prostate,pancreas_gallbladder,lymphoid_neoplasm,colorectal

SEQ ID NO: 462126 - DNA, 448 bp, Homo sapiens; identical to SEQ ID NO: 354219
  chr8:100796506-100796954
  hypo
  head_and_neck vs. pancreas_gallbladder,upper_gi, colorectal,lymphoid_neoplasm,bladder_and_urothelial, liver_bileduct

SEQ ID NO: 462127 - DNA, 57 bp, Homo sapiens; identical to SEQ ID NO: 340012
  chr8:124238881-124238938
  hypo

SEQ ID NO: 462128 - DNA, 308 bp, Homo sapiens; identical to SEQ ID NO: 340013
  chr8:124730010-124730318
  hypo
  head_and_neck vs. lymphoid_neoplasm,sarcoma

SEQ ID NO: 462129 - DNA, 73 bp, Homo sapiens; identical to SEQ ID NO: 340018
  chr8:125680364-125680437
  hypo
  head_and_neck vs. breast,colorectal,liver_bileduct

SEQ ID NO: 462130 - DNA, 44 bp, Homo sapiens; identical to SEQ ID NO: 454049
  chr8:126044399-126044443
  hypo
  head_and_neck vs. melanoma,prostate,lymphoid_neoplasm, colorectal,sarcoma,multiple_myeloma,uterine,non_cancer

SEQ ID NO: 462131 - DNA, 30 bp, Homo sapiens; identical to SEQ ID NO: 454050
  chr8:126044563-126044593
  hypo
  head_and_neck vs. melanoma,prostate,lymphoid_neoplasm, colorectal,sarcoma,multiple_myeloma,uterine,non_cancer

SEQ ID NO: 462132 - DNA, 631 bp, Homo sapiens; identical to SEQ ID NO: 455454
  chr8:128871653-128872284
  hypo
  head_and_neck vs. sarcoma,ovary,colorectal,uterine

SEQ ID NO: 462133 - DNA, 191 bp, Homo sapiens; identical to SEQ ID NO: 345946
  chr8:128872459-128872650
  hypo
  head_and_neck vs. sarcoma,ovary,colorectal,uterine

SEQ ID NO: 462134 - DNA, 62 bp, Homo sapiens; identical to SEQ ID NO: 457194
  chr8:128888848-128888910
  hypo
  head_and_neck vs. melanoma

SEQ ID NO: 462135 - DNA, 43 bp, Homo sapiens; identical to SEQ ID NO: 345948
  chr8:128889422-128889465
  hypo
  head_and_neck vs. melanoma

SEQ ID NO: 462136 - DNA, 171 bp, Homo sapiens; identical to SEQ ID NO: 340039
  chr8:134335659-134335830
  hypo
  head_and_neck vs. colorectal,sarcoma

SEQ ID NO: 462137 - DNA, 104 bp, Homo sapiens; identical to SEQ ID NO: 340070
  chr8:141634072-141634176
  hypo

SEQ ID NO: 462138 - DNA, 327 bp, Homo sapiens; identical to SEQ ID NO: 354261
  chr8:142227279-142227606
  hypo
  head_and_neck vs. upper_gi

SEQ ID NO: 462139 - DNA, 934 bp, Homo sapiens; identical to SEQ ID NO: 340073
  chr8:142235190-142236124
  hypo
  head_and_neck vs. pancreas_gallbladder,ovary,melanoma, colorectal,upper_gi,lymphoid_neoplasm,uterine,renal,prostate, lung,sarcoma,breast,bladder_and_urothelial,myeloid_neoplasm, thyroid,non_cancer,cervical

SEQ ID NO: 462140 - DNA, 641 bp, Homo sapiens
  chr8:143386158-143386799
  hypo
  head_and_neck vs. anorectal
cgctgtgagctacggggtagagacgttcctcccaggggggacatggccatacacgcccctggagagcggcatgacggttgagcacagcctcctcctgccagcggtgacaggccctacaacagccccactgactggggtcccgtggcctgggtaaagtcaaagcccccaggtaaacataacaaacttttgaggtaagaggtccccggggcagcccggctggtgtgcccgaggacggagatgtaggagcctgccctcggccctgacagcaaacagccacaggcgagggggctggaggaaatgtgctccctcccacgatgaaatcctccagggcagctaatgcgggcgagtgagatggccaggtggagaaggcaccacaggacgttctgtgcgatgttccctggacttgggggtttcagtgacagctccccaggagctgtgggcagagggtgccaggcacccatggagacctgcctcggatctgtgccttgggattgatgccacctcctgcatgtggagaaggggaagctcaggaggataggggagggcgcaggggtgggaggggggtgcaaacggggttccgtgtggacgcccaggaaagcggccaggctggggtgcgggctgtgtggacacccaggaaggca

SEQ ID NO: 462141 - DNA, 53 bp, Homo sapiens
  chr8:143386940-143386993
  hypo
  head_and_neck vs. anorectal
tgcaggacaaaagccaggggaggaagagatggcttagacgcccgggtccctcc

SEQ ID NO: 462142 - DNA, 66 bp, Homo sapiens; identical to SEQ ID NO: 455465
  chr8:144343416-144343482
  hypo
  head_and_neck vs. lymphoid_neoplasm

SEQ ID NO: 462143 - DNA, 228 bp, Homo sapiens; identical to SEQ ID NO: 455466
  chr8:144343992-144344220
  hypo
  head_and_neck vs. lymphoid_neoplasm

SEQ ID NO: 462144 - DNA, 231 bp, Homo sapiens; identical to SEQ ID NO: 340121
  chr8:144351704-144351935
  hypo
  head_and_neck vs. liver_bileduct

SEQ ID NO: 462145 - DNA, 207 bp, Homo sapiens; identical to SEQ ID NO: 348337
  chr8:144414283-144414490
  hypo
  head_and_neck vs. colorectal,breast,renal,melanoma, uterine,sarcoma,liver_bileduct,upper_gi,prostate

SEQ ID NO: 462146 - DNA, 139 bp, Homo sapiens; identical to SEQ ID NO: 378788
  chr8:144557088-144557227
  hypo

SEQ ID NO: 462147 - DNA, 48 bp, Homo sapiens; identical to SEQ ID NO: 459207
  chr8:144589930-144589978
  hypo
  head_and_neck vs. upper_gi,renal,liver_bileduct, lymphoid_neoplasm

SEQ ID NO: 462148 - DNA, 220 bp, Homo sapiens; identical to SEQ ID NO: 364903
  chr8:144590082-144590302
  hypo
  head_and_neck vs. upper_gi,renal,liver_bileduct, lymphoid_neoplasm

SEQ ID NO: 462149 - DNA, 121 bp, Homo sapiens; identical to SEQ ID NO: 454515
  chr8:144636569-144636690
  hypo
  head_and_neck vs. lymphoid_neoplasm,breast

SEQ ID NO: 462150 - DNA, 170 bp, Homo sapiens
  chr9:2177846-2178016
  hypo
cggccagaggtagatttcttaactagcatatcagccttcagcatgtctctaagcttaaaatataatcaaagctaaagctgacatttatgtaaagtttataatgtatgcagtcaccagtttagagtcatagtatagatgtggaattatacttttggtttgtggaggtaatg

SEQ ID NO: 462151 - DNA, 71 bp, Homo sapiens; identical to SEQ ID NO: 378819
  chr9:2178158-2178229
  hypo

SEQ ID NO: 462152 - DNA, 61 bp, Homo sapiens; identical to SEQ ID NO: 459212
  chr9:37118798-37118859
  hypo
  head_and_neck vs. pancreas_gallbladder,liver_bileduct, upper_gi

SEQ ID NO: 462153 - DNA, 163 bp, Homo sapiens; identical to SEQ ID NO: 333671
  chr9:74640002-74640165
  hypo
  head_and_neck vs. liver_bileduct,lymphoid_neoplasm, bladder_and_urothelial

SEQ ID NO: 462154 - DNA, 545 bp, Homo sapiens; identical to SEQ ID NO: 461329
  chr9:93955385-93955930
  hypo
  head_and_neck vs. cervical

SEQ ID NO: 462155 - DNA, 82 bp, Homo sapiens; identical to SEQ ID NO: 461330
  chr9:93956177-93956259
  hypo
  head_and_neck vs. cervical

SEQ ID NO: 462156 - DNA, 156 bp, Homo sapiens; identical to SEQ ID NO: 453504
  chr9:93955774-93955930
  hypo
  head_and_neck vs. cervical,pancreas_gallbladder

SEQ ID NO: 462157 - DNA, 268 bp, Homo sapiens; identical to SEQ ID NO: 453505
  chr9:93956177-93956445
  hypo
  head_and_neck vs. cervical,pancreas_gallbladder

SEQ ID NO: 462158 - DNA, 370 bp, Homo sapiens; identical to SEQ ID NO: 340241
  chr9:96069038-96069408
  hypo
  head_and_neck vs. anorectal

SEQ ID NO: 462159 - DNA, 26 bp, Homo sapiens
  chr9:97317672-97317698
  hypo
aggaggagaaggcgttgcaaaaagac

SEQ ID NO: 462160 - DNA, 182 bp, Homo sapiens; identical to SEQ ID NO: 348359
  chr9:97865087-97865269
  hypo
  head_and_neck vs. liver_bileduct,colorectal, lymphoid_neoplasm,sarcoma,upper_gi

SEQ ID NO: 462161 - DNA, 294 bp, Homo sapiens; identical to SEQ ID NO: 459218
  chr9:97867233-97867527
  hypo
  head_and_neck vs. upper_gi,colorectal,liver_bileduct, lymphoid_neoplasm,bladder_and_urothelial

SEQ ID NO: 462162 - DNA, 37 bp, Homo sapiens; identical to SEQ ID NO: 364994
  chr9:97867556-97867593
  hypo
  head_and_neck vs. upper_gi,colorectal,liver_bileduct, lymphoid_neoplasm,bladder_and_urothelial

SEQ ID NO: 462163 - DNA, 150 bp, Homo sapiens; identical to SEQ ID NO: 340263
  chr9:100849678-100849828
  hypo
  head_and_neck vs. liver_bileduct

SEQ ID NO: 462164 - DNA, 126 bp, Homo sapiens; identical to SEQ ID NO: 340300
  chr9:123176142-123176268
  hypo
  head_and_neck vs. upper_gi

SEQ ID NO: 462165 - DNA, 60 bp, Homo sapiens; identical to SEQ ID NO: 340309
  chr9:125986796-125986856
  hypo
  head_and_neck vs. pancreas_gallbladder,colorectal,renal

SEQ ID NO: 462166 - DNA, 36 bp, Homo sapiens
  chr9:132643756-132643792
  hypo
  head_and_neck vs. upper_gi
cggggcgtgggtggggaaggggctctgggaccagac

SEQ ID NO: 462167 - DNA, 193 bp, Homo sapiens; identical to SEQ ID NO: 365077
  chr9:132643821-132644014
  hypo
  head_and_neck vs. upper_gi

SEQ ID NO: 462168 - DNA, 203 bp, Homo sapiens; identical to SEQ ID NO: 340387
  chr9:135781263-135781466
  hypo
  head_and_neck vs. ovary,colorectal,upper_gi,breast, pancreas_gallbladder,lymphoid_neoplasm

SEQ ID NO: 462169 - DNA, 574 bp, Homo sapiens; identical to SEQ ID NO: 340397
  chr9:136385211-136385785
  hypo
  head_and_neck vs. liver_bileduct

SEQ ID NO: 462170 - DNA, 275 bp, Homo sapiens; identical to SEQ ID NO: 455485
  chr9:138660497-138660772
  hypo
  head_and_neck vs. renal

SEQ ID NO: 462171 - DNA, 3 bp, Homo sapiens
  chr9:138660769-138660772
  hypo
  head_and_neck vs. renal
cgt

SEQ ID NO: 462172 - DNA, 99 bp, Homo sapiens; identical to SEQ ID NO: 454065
  chr9:138743599-138743698
  hypo
  head_and_neck vs. sarcoma,breast,liver_bileduct,renal, lymphoid_neoplasm

SEQ ID NO: 462173 - DNA, 14 bp, Homo sapiens
  chr9:138780573-138780587
  hypo
  head_and_neck vs. sarcoma,liver_bileduct
cggaaataattcca

SEQ ID NO: 462174 - DNA, 166 bp, Homo sapiens; identical to SEQ ID NO: 379076
  chr9:138780870-138781036
  hypo
  head_and_neck vs. sarcoma,liver_bileduct

SEQ ID NO: 462175 - DNA, 216 bp, Homo sapiens; identical to SEQ ID NO: 340438
  chr9:139106812-139107028
  hypo
  head_and_neck vs. cervical,upper_gi

SEQ ID NO: 462176 - DNA, 265 bp, Homo sapiens; identical to SEQ ID NO: 454066
  chr9:139110897-139111162
  hypo
  head_and_neck vs. liver_bileduct,lymphoid_neoplasm,ovary, prostate,upper_gi,renal,uterine,pancreas_gallbladder, bladder_and_urothelial,non_cancer,multiple_myeloma

SEQ ID NO: 462177 - DNA, 81 bp, Homo sapiens; identical to SEQ ID NO: 345985
  chr9:139111384-139111465
  hypo
  head_and_neck vs. liver_bileduct,lymphoid_neoplasm,ovary, prostate,upper_gi,renal,uterine,pancreas_gallbladder, bladder_and_urothelial,non_cancer,multiple_myeloma

SEQ ID NO: 462178 - DNA, 174 bp, Homo sapiens; identical to SEQ ID NO: 340453
  chr9:139730175-139730349
  hypo
  head_and_neck vs. bladder_and_urothelial,cervical, pancreas_gallbladder,liver_bileduct,lung,lymphoid_neoplasm, upper_gi

SEQ ID NO: 462179 - DNA, 309 bp, Homo sapiens; identical to SEQ ID NO: 340455
  chr9:139803935-139804244
  hypo
  head_and_neck vs. anorectal,cervical,lung

SEQ ID NO: 462180 - DNA, 344 bp, Homo sapiens; identical to SEQ ID NO: 365162
  chr9:139804283-139804627
  hypo
  head_and_neck vs. anorectal,lung,cervical,upper_gi

SEQ ID NO: 462181 - DNA, 43 bp, Homo sapiens
  chr9:139809677-139809720
  hypo
  head_and_neck vs. cervical
cgaaaactacaaaaaaggtgcattctgagacgtcagagggaaa

SEQ ID NO: 462182 - DNA, 37 bp, Homo sapiens; identical to SEQ ID NO: 354440
  chr9:139818622-139818659
  hypo
  head_and_neck vs. anorectal

SEQ ID NO: 462183 - DNA, 798 bp, Homo sapiens
  chr9:139834961-139835759
  hypo
  head_and_neck vs. cervical,lung,bladder_and_urothelial, upper_gi,ovary
cgtgaccggccgctcccaagccccgggcgcacaaccacagccaggagcagcccctgccaccactgggccaccgtccagggccccacaggaccagccgaaggtgccccgggccgaggccagctgggtcaggtgtacccctagcctggggttgagtgaggagcggcacccccagtatcctgtgtaccccaagttgcccaggaggccgagggggccttgggctccatctgcactggccaccccgtgccaagcatcacagctgcgtgagcaggtttgtgtgtgagcgtgtggcggggcctggttgtccccttcctaaggcgtaactgctataagcatctccacctctcccgctcgggaaaaagccacagagcctggcgatgtcctcaaggggtcccggtggctccagtgcacccagcacacctcagcgcctctggctggcaagccaggagaagaaggtgcgaggccgtgggcgaggtgcctggaggacgcgcatggtgcgtggggagcgccaggctttgatggtggcgtcgtcgctggccgtgagcagcagctcctgctcctggggactgaagaccactgagttgaccacatcctcgtgccgcagcctggccagacagatgttgtagtggcggtcccagatgtagccgtgccggtcctccgccccgctgcagaacagcgcctgggtgagccggccgcccgcccgctgctgcccacacccgccctgcaccacgccgcgccctgcacctggccacgaagtccctgctgacgtccaggaagatgaagaagcactcgtcgttgggc

SEQ ID NO: 462184 - DNA, 970 bp, Homo sapiens; identical to SEQ ID NO: 345989
  chr9:139835276-139836246
  hypo
  head_and_neck vs. lung,cervical,bladder_and_urothelial, upper_gi,ovary,breast,liver_bileduct,uterine, pancreas_gallbladder,melanoma,sarcoma

SEQ ID NO: 462185 - DNA, 995 bp, Homo sapiens
  chr9:139835766-139836761
  hypo
  head_and_neck vs. cervical,lung,ovary,lymphoid_neoplasm, upper_gi
cgcggtgcgcacgcagagcccgcctcacctcccgcatggtcttgaggtcgaacaccagcaggtcaatctcctccgcgattggtggcggctgcatggggtcggccaccaccgcaccgttgggccaggcgcggctgttcacgtacaggtacctgggcgaggggcactgtgctaggtgtgggccgcctgcgggcaccccgcctgggacactggcaagaggcccacctgttgtcgggcgacaggcccatgccgatgatgtgtccgtgtatgtctatgacgtggtccagcgcgtcgaagaaggcatcggagccccggccctcacccagcacgggccctgccgtggtcatctggtgtggcaggatctgcttgatgcctgcagggagggctacggtgagggtccctgtccaatgccccaaggacatcactccagggcagcttcctacctcagtggtgtctctggggctgtgagcaccacagaggtccgtgggcactgcctgctccgggggccccagacctgaatcaggcccgtcggttgcttgctggccagcggccctgcctgcgtttgttttcactgctcatcccacaggccccaggtctgggcttgtgaccccaggggcgagtgaacgatcccagctttgcctgtggacttgcttgctgtctgcccctcaggacccctgcccggcctcccccaagctcctaggaccgaggcgggcagcatggcggcaggggtgtaccgatctggtgtggggagtaggtgaggcagccagtggtgaagatgaggtacttgctcttggcgcctgtggcactgcgctcgggtggcttggtgtggccctgggccagcagctcggccaccttggtctctagcatgcgctccgacagctgtggctgcgcccgcccctccagcacgcggtccagaaagtgccgcaagccctccttggcgtgggcgggggccgggccagccaccacctcctcgttgtcgctgcccaggtcaaagatgc

SEQ ID NO: 462186 - DNA, 500 bp, Homo sapiens
  chr9:139836263-139836763
  hypo
  head_and_neck vs. cervical,lung
cgggggccccagacctgaatcaggcccgtcggttgcttgctggccagcggccctgcctgcgtttgttttcactgctcatcccacaggccccaggtctgggcttgtgaccccaggggcgagtgaacgatcccagctttgcctgtggacttgcttgctgtctgcccctcaggacccctgcccggcctcccccaagctcctaggaccgaggcgggcagcatggcggcaggggtgtaccgatctggtgtggggagtaggtgaggcagccagtggtgaagatgaggtacttgctcttggcgcctgtggcactgcgctcgggtggcttggtgtggccctgggccagcagctcggccaccttggtctctagcatgcgctccgacagctgtggctgcgcccgcccctccagcacgcggtccagaaagtgccgcaagccctccttggcgtgggcgggggccgggccagccaccacctcctcgttgtcgctgcccaggtcaaagatgcgg

SEQ ID NO: 462187 - DNA, 293 bp, Homo sapiens
  chr9:139836968-139837261
  hypo
  head_and_neck vs. cervical,lung
gggcagccccgcccctagccccgcacgcacctggaaggcattgttgagccacagcaccgagcaggaggtgatatctccgatgcggtgcaggttccccgagatgaggctggtctcggtgagccaacagccaaacacgtcatagggcttgttccgcacgcgggacagcagcgcgaaggagtctgtggggaggccggggctggacaggctgtcggcgtggggcgggggcagggtcaacccgccgcccgtgctcacctaggctgatgacagcaatctcgccggatgaggagttgtgc

SEQ ID NO: 462188 - DNA, 594 bp, Homo sapiens; identical to SEQ ID NO: 354442
  chr9:139836968-139837562
  hypo
  head_and_neck vs. cervical,lung,ovary

SEQ ID NO: 462189 - DNA, 42 bp, Homo sapiens; identical to SEQ ID NO: 340475
  chr9:140166945-140166987
  hypo
  head_and_neck vs. liver_bileduct,upper_gi

SEQ ID NO: 462190 - DNA, 249 bp, Homo sapiens; identical to SEQ ID NO: 348404
  chr9:140582119-140582368
  hypo
  head_and_neck vs. cervical,liver_bileduct, pancreas_gallbladder

SEQ ID NO: 462191 - DNA, 134 bp, Homo sapiens
  chr9:140707377-140707511
  hypo
  head_and_neck vs. cervical,liver_bileduct
cggacattttataaatctcatctgtatcacattttcaagtcagctttaaatgttttgtggccttacattttcccttttagcctctttctttctcgggattcagatgtcaccttaaagaacaaggaaggagagac

SEQ ID NO: 462192 - DNA, 58 bp, Homo sapiens; identical to SEQ ID NO: 354465
  chr9:140707900-140707958
  hypo
  head_and_neck vs. cervical,liver_bileduct

SEQ ID NO: 462193 - DNA, 480 bp, Homo sapiens; identical to SEQ ID NO: 454075
  chr9:140708213-140708693
  hypo
  head_and_neck vs. lymphoid_neoplasm,upper_gi, pancreas_gallbladder,ovary,breast,melanoma,renal,liver_bileduct, colorectal,bladder_and_urothelial,prostate,multiple_myeloma, uterine,cervical,sarcoma

SEQ ID NO: 462194 - DNA, 216 bp, Homo sapiens; identical to SEQ ID NO: 454076
  chr9:140708771-140708987
  hypo
  head_and_neck vs. lymphoid_neoplasm,upper_gi, pancreas_gallbladder,ovary,breast,melanoma,renal,liver_bileduct, colorectal,bladder_and_urothelial,prostate,multiple_myeloma, uterine,cervical,sarcoma

SEQ ID NO: 462195 - DNA, 26 bp, Homo sapiens
  chr9:140727446-140727472
  hypo
  head_and_neck vs. bladder_and_urothelial,breast,melanoma, uterine,renal,ovary,lung,prostate,upper_gi,lymphoid_neoplasm, pancreas_gallbladder,cervical,multiple_myeloma
cgcgcctttggctttgggggctgtgg

SEQ ID NO: 462196 - DNA, 15 bp, Homo sapiens
  chr9:140727511-140727526
  hypo
  head_and_neck vs. bladder_and_urothelial,breast,melanoma, uterine,renal,ovary,lung,prostate,upper_gi,lymphoid_neoplasm, pancreas_gallbladder,cervical,multiple_myeloma
cttgtcactgcccgc

SEQ ID NO: 462197 - DNA, 13 bp, Homo sapiens
  chr9:140727930-140727943
  hypo
  head_and_neck vs. bladder_and_urothelial,breast,melanoma, uterine,renal,ovary,lung,prostate,upper_gi,lymphoid_neoplasm, pancreas_gallbladder,cervical,multiple_myeloma
ctagctgccggcc

SEQ ID NO: 462198 - DNA, 624 bp, Homo sapiens; identical to SEQ ID NO: 454529
  chrY:16636060-16636684
  hypo
  head_and_neck vs. anorectal,cervical,breast,ovary

SEQ ID NO: 462199 - DNA, 89 bp, Homo sapiens; identical to SEQ ID NO: 362193
  AC241851.2_88-34049:15853-15942
  hyper
  liver_bileduct vs. multiple_myeloma

SEQ ID NO: 462200 - DNA, 174 bp, Homo sapiens
  chr1:1534828-1535002
  hyper
  liver_bileduct vs. bladder_and_urothelial
cgccgtcatggccaccacgatgtcctgcatgccggccggctcggcggtgaactccacgcactcggccggctcgggggtctctggcgcggcggcggcgggcccagcgcgcagcggcagcggctgcaggcacaggcggtagaggacgctgtcgtgcacgtcgggcagcaggtagtc

SEQ ID NO: 462201 - DNA, 896 bp, Homo sapiens; identical to SEQ ID NO: 330665
  chr1:6052426-6053322
  hyper
  liver_bileduct vs. bladder_and_urothelial,lung

SEQ ID NO: 462202 - DNA, 224 bp, Homo sapiens
  chr1:6240708-6240932
  hyper
  liver_bileduct vs. bladder_and_urothelial,cervical
ccccaagggcgcggaggcagggtcttcagggcagcgcgcggcccgctcccccactcggttcacaggcgccgggacccaccccgctcccggctccggcctcggcacgttcctaaccccctctccaaagaggattagaagaaaaatgtgttccacacttggggaaaagacgctctggagactgtgggtctgatttacagcagaaaaatccgcgcaggcgggctccc

SEQ ID NO: 462203 - DNA, 280 bp, Homo sapiens; identical to SEQ ID NO: 356640
  chr1:6241264-6241544
  hyper
  liver_bileduct vs. bladder_and_urothelial,cervical

SEQ ID NO: 462204 - DNA, 220 bp, Homo sapiens; identical to SEQ ID NO: 455498
  chr1:6479997-6480217
  hyper
  liver_bileduct vs. upper_gi

SEQ ID NO: 462205 - DNA, 426 bp, Homo sapiens; identical to SEQ ID NO: 457245
  chr1:9711649-9712075
  hyper
  liver_bileduct vs. prostate,lymphoid_neoplasm,sarcoma, head_and_neck,non_cancer,myeloid_neoplasm,thyroid, multiple_myeloma,lung,breast,bladder_and_urothelial,uterine

SEQ ID NO: 462206 - DNA, 53 bp, Homo sapiens
  chr1:11538821-11538874
  hyper
  liver_bileduct vs. melanoma
tatcaggaaactcggaggcggggctggggggtggtgcctggcccggaccgtct

SEQ ID NO: 462207 - DNA, 3 bp, Homo sapiens
  chr1:14027196-14027199
  hyper
  liver_bileduct vs. breast,lymphoid_neoplasm, head_and_neck,lung,ovary,anorectal,multiple_myeloma,uterine, myeloid_neoplasm,colorectal,bladder_and_urothelial,thyroid
gcc

SEQ ID NO: 462208 - DNA, 321 bp, Homo sapiens
  chr1:25255291-25255612
  hyper
  liver_bileduct vs. lymphoid_neoplasm
cggcctcagcttccagccacctcgggcagcaccacccccagccgccggcccttcctgccctgcccttttctcacggcagctgtgagaggtttaggggaaaaccgaggcgttttcgtttcatctcgctgcccccttaaaaaaatgaaaatgaaacagtcgcctactccctggcataaagaaaaaggtcctctaaatggctgggggctgccagggttaggggtcccccaatctcaactcgccattcgggacgcataatatccccgagcaaacgtctggagagcagtgccccgatcccggcctagcgccgtccggtaaaatttc

SEQ ID NO: 462209 - DNA, 7 bp, Homo sapiens
  chr1:25255934-25255941
  hyper
  liver_bileduct vs. lymphoid_neoplasm
agccaga

SEQ ID NO: 462210 - DNA, 33 bp, Homo sapiens; identical to SEQ ID NO: 454089
  chr1:25255579-25255612
  hyper
  liver_bileduct vs. lymphoid_neoplasm,cervical, head_and_neck,multiple_myeloma,myeloid_neoplasm,non_cancer, breast,melanoma,prostate,uterine,ovary,thyroid

SEQ ID NO: 462211 - DNA, 7 bp, Homo sapiens
  chr1:25255934-25255941
  hyper
  liver_bileduct vs. lymphoid_neoplasm,cervical, head_and_neck,multiple_myeloma,myeloid_neoplasm,non_cancer, breast,melanoma,prostate,uterine,ovary,thyroid
agccaga

SEQ ID NO: 462212 - DNA, 130 bp, Homo sapiens; identical to SEQ ID NO: 454093
  chr1:32410105-32410235
  hyper
  liver_bileduct vs. upper_gi,colorectal

SEQ ID NO: 462213 - DNA, 300 bp, Homo sapiens
  chr1:32930159-32930459
  hyper
  liver_bileduct vs. bladder_and_urothelial,lung,ovary
agaaaccgcgggtatgcaataaaaacctgttgaatcgattaaaccatttcccttatttccagatttttgcggaaagcgccagtaggtgaaatatgtgcggactgatgagtcaaagctcttattccctggactgcattaatacccacgacgtgcttttcgctctccagacaaagagaccggtacttggcaggtccctcaagtgggactcaaaagaccgaaccgagctgcagcctttcgctagcactggtcctcgccccttttggcatcttggtacttgtagttttgtccactctatcttta

SEQ ID NO: 462214 - DNA, 62 bp, Homo sapiens
  chr1:32930558-32930620
  hyper
  liver_bileduct vs. bladder_and_urothelial,lung,ovary
tgctggccgaagggcccgccttcccgaggccaggcgctcccgcgattggccagccgccccgc

SEQ ID NO: 462215 - DNA, 179 bp, Homo sapiens; identical to SEQ ID NO: 459261
  chr1:33219389-33219568
  hyper
  liver_bileduct vs. lung

SEQ ID NO: 462216 - DNA, 307 bp, Homo sapiens; identical to SEQ ID NO: 344950
  chr1:33219596-33219903
  hyper
  liver_bileduct vs. lung

SEQ ID NO: 462217 - DNA, 384 bp, Homo sapiens
  chr1:39956953-39957337
  hyper
  liver_bileduct vs. cervical,uterine,ovary,head_and_neck
cgtgtcgggcccggtggcgaccacggcacaccacggcgaggcagccgggtggcaccactggcgggaccgggacggcgccgcggccttaggatctctgcgccgaggcccgcggcgggagccacgacggccctgaccacgctgacgcccaggctgcgggctcctcgcccggaccaaccgccagccacgccgaggtcgcacctcggggtcgccccacccgcaacacctgccgccgcccggggctcctagcgggcgcggcctccgcgcccaggccccgcccccgcgcccccattggtcagtcccgggggtgggcgggcggcacagacggctgagccggggcaaggactcgcgggaatcgcgccgcccgggtcgctgccggagctcgcc

SEQ ID NO: 462218 - DNA, 1 bp, Homo sapiens
  chr1:41284752-41284753
  hyper
  liver_bileduct vs. multiple_myeloma
c

SEQ ID NO: 462219 - DNA, 21 bp, Homo sapiens
  chr1:42128212-42128233
  hyper
  liver_bileduct vs. upper_gi
cgggatgccttcgcggccggg

SEQ ID NO: 462220 - DNA, 913 bp, Homo sapiens; identical to SEQ ID NO: 349225
  chr1:43389625-43390538
  hyper
  liver_bileduct vs. lung,pancreas_gallbladder, lymphoid_neoplasm,upper_gi,melanoma,renal

SEQ ID NO: 462221 - DNA, 2 bp, Homo sapiens
  chr1:46951168-46951170
  hyper
  liver_bileduct vs. multiple_myeloma
cg

SEQ ID NO: 462222 - DNA, 61 bp, Homo sapiens; identical to SEQ ID NO: 455531
  chr1:66999412-66999473
  hyper
  liver_bileduct vs. sarcoma,non_cancer,multiple_myeloma

SEQ ID NO: 462223 - DNA, 36 bp, Homo sapiens; identical to SEQ ID NO: 349259
  chr1:66999673-66999709
  hyper
  liver_bileduct vs. sarcoma,non_cancer,multiple_myeloma

SEQ ID NO: 462224 - DNA, 24 bp, Homo sapiens
  chr1:67773109-67773133
  hyper
  liver_bileduct vs. ovary,lung,bladder_and_urothelial, head_and_neck,pancreas_gallbladder,breast,melanoma,uterine, colorectal,upper_gi,anorectal,myeloid_neoplasm,thyroid,renal
cgtctctatggctgtgaacgctga

SEQ ID NO: 462225 - DNA, 47 bp, Homo sapiens; identical to SEQ ID NO: 349260
  chr1:67773780-67773827
  hyper
  liver_bileduct vs. ovary,lung,bladder_and_urothelial, head_and_neck,pancreas_gallbladder,breast,melanoma,uterine, colorectal,upper_gi,anorectal,myeloid_neoplasm,thyroid,renal

SEQ ID NO: 462226 - DNA, 757 bp, Homo sapiens
  chr1:85462482-85463239
  hyper
  liver_bileduct vs. breast,ovary
cggttaacctgaaaacacctgatcctctctccggaatccttgcctggggaaaacgataaggctgccgggccatgcctcctccttcaaaactttccagggctctcgggattcggaacaggaaacaccgttcacggccgactcatttcgccctcgccgtaacgcgtccgccgaagttggagccctgcaaagcggggttcccttctcttaccctttctgccggccgcgtggtgcgcgcagaccccggcccgagagcaggcgccgcagtcgtggagtgcggcgggcagttctcgggcggctgaaaggcggctctgtgtgcaccctgcaggatgcggcgcgtggccaggcgctcccgccccgcccccaaggggctgccccgccccgccccgccccgccgcctcctaccggggaccggagcttccccagttggggtcctaggggacttattccacgcttcagcggaccagcctccccgcgctcccggagaagggggtcggcgacgcggaggcggggtgggggccgtaggggatggaaccgaggcgcgcgcgagaagagccgaggaagtaagcagtcccaaaagggggcggcggtggggcccccagggaggcgtggggcacgccaagggcgccgtggggcactgacctgtggtgcggcccccaggacaggcccgaggcgcggttgcacaccggcaggtccagcacctccatgcctcgaggcatggcgcggccagggagcggcaggaggacacctagcgtgggac

SEQ ID NO: 462227 - DNA, 536 bp, Homo sapiens
  chr1:85462747-85463283
  hyper
  liver_bileduct vs. anorectal,uterine,breast, lymphoid_neoplasm,lung,ovary,cervical,bladder_and_urothelial, myeloid_neoplasm,thyroid,non_cancer,head_and_neck,prostate
cgtggagtgcggcgggcagttctcgggcggctgaaaggcggctctgtgtgcaccctgcaggatgcggcgcgtggccaggcgctcccgccccgcccccaaggggctgccccgccccgccccgccccgccgcctcctaccggggaccggagcttccccagttggggtcctaggggacttattccacgcttcagcggaccagcctccccgcgctcccggagaagggggtcggcgacgcggaggcggggtgggggccgtaggggatggaaccgaggcgcgcgcgagaagagccgaggaagtaagcagtcccaaaagggggcggcggtggggcccccagggaggcgtggggcacgccaagggcgccgtggggcactgacctgtggtgcggcccccaggacaggcccgaggcgcggttgcacaccggcaggtccagcacctccatgcctcgaggcatggcgcggccagggagcggcaggaggacacctagcgtgggacggctacacctgtctgggcgcaggcccgccgcccttgcactctcc

SEQ ID NO: 462228 - DNA, 826 bp, Homo sapiens
  chr1:90098160-90098986
  hyper
  liver_bileduct vs. lung,melanoma,head_and_neck,ovary
cggaggagttcccagaagggctatttttagtggtggctgctcccctctaacttacccaggggaggagctgcggtggctgagccgacgctgcgcgcacagccgcctgtggttttccgcgcattgtgagggatgaggggtggaggtggtattagacgcagccgaatcctccctcagagtccgccaggtgggcgtctcaggggtgggagtggccgcgtcgtgaagcggagagaggatttctctcctggtcctggagaaggcccccggcggccggcggcatccctcgctggcgagtcccgggagcgaggtggtctctgcaggggaggaagttcccgggcggcgcggcctgcgtcacagcggggctggcaccgcggagtcgactcggcgggcggtggcgaccccggggccgggcgctgggcggcgctggctgccgctagccgggctgcgtgcggggcggcgctggaggcggctccgtccgcggccggggaggcggaggggaggagggcttgcggggctggggcgttagctgcgtcccggctggaagcccgcgaagagaagtaggaggaaggcgccgccgtggccgcggccgcagtgctcgggcgcgacaagccatgagcagcgaccccgcgggcgacgccgccgtccctggcagccgctgagcccgacccccaggcagctcgccgctccctagcaccttctccagtcgacactctcgcgcccggaggtaagggcgggggatccgcggagggatggagaggggcagcccgcagagggccacccgctcggtccgctgtgcgcgccggaccgggactcgccccgcctcactcgc

SEQ ID NO: 462229 - DNA, 826 bp, Homo sapiens
  chr1:90098490-90099316
  hyper
  liver_bileduct vs. lung
cgggcggcgcggcctgcgtcacagcggggctggcaccgcggagtcgactcggcgggcggtggcgaccccggggccgggcgctgggcggcgctggctgccgctagccgggctgcgtgcggggcggcgctggaggcggctccgtccgcggccggggaggcggaggggaggagggcttgcggggctggggcgttagctgcgtcccggctggaagcccgcgaagagaagtaggaggaaggcgccgccgtggccgcggccgcagtgctcgggcgcgacaagccatgagcagcgaccccgcgggcgacgccgccgtccctggcagccgctgagcccgacccccaggcagctcgccgctccctagcaccttctccagtcgacactctcgcgcccggaggtaagggcgggggatccgcggagggatggagaggggcagcccgcagagggccacccgctcggtccgctgtgcgcgccggaccgggactcgccccgcctcactcgcgtccttgcttccccccggctctcagacaggcagaatgtggttgcccgcccggcgtgtggtgctgggaaccttccgctactgcggctcaggagcccgccaacccctaccccacccaatccgcgctagcccgagcggccgcgcgaggatctcagcctggcgcccaacgccgcgccgcagcggcaggtcctgcagactgggcgcgggggtgggggggcggtccgcgaggggaaatgcgtccgtggccggggcgatcgttgttctttcctacctcgaaaatctctgagaccccggggccagtcctttccggtctatcacccccctgccacctcc

SEQ ID NO: 462230 - DNA, 81 bp, Homo sapiens
  chr1:91869781-91869862
  hyper
  liver_bileduct vs. melanoma
cggctggggaccgaatcagcacctaaagcaaaataacagctctgtggatttcctaaggagaatatcctaaatccaaggcag

SEQ ID NO: 462231 - DNA, 74 bp, Homo sapiens; identical to SEQ ID NO: 369201
  chr1:91870376-91870450
  hyper
  liver_bileduct vs. melanoma

SEQ ID NO: 462232 - DNA, 285 bp, Homo sapiens
  chr1:92495420-92495705
  hyper
  liver_bileduct vs. lung,ovary,sarcoma
cggcctggcccgccgcaccccgcaggcccggctctcccctgcgcgctccgggctgggcgcggcgcgtgtgcggagccgccgcggtgacacggaacgccggccgccccgggccgggggaggcgcgcgtcgagaggcgacggcgggctggcctggcgcgctgcggcgctcgctcacccgctcccgaggaagggcagtgggccccgccgccgcctcccaatggcgaggctgcgggattgcctgccccgcctgatgctcacgctccggtccctgctcttctggtccctg

SEQ ID NO: 462233 - DNA, 64 bp, Homo sapiens; identical to SEQ ID NO: 349279
  chr1:92495832-92495896
  hyper
  liver_bileduct vs. lung,ovary,sarcoma

SEQ ID NO: 462234 - DNA, 171 bp, Homo sapiens; identical to SEQ ID NO: 455538
  chr1:92948154-92948325
  hyper
  liver_bileduct vs. multiple_myeloma,thyroid, bladder_and_urothelial,non_cancer

SEQ ID NO: 462235 - DNA, 142 bp, Homo sapiens; identical to SEQ ID NO: 344962
  chr1:92949466-92949608
  hyper
  liver_bileduct vs. bladder_and_urothelial, multiple_myeloma,thyroid,myeloid_neoplasm,non_cancer,colorectal, ovary,uterine,prostate

SEQ ID NO: 462236 - DNA, 226 bp, Homo sapiens; identical to SEQ ID NO: 452727
  chr1:92949466-92949692
  hyper
  liver_bileduct vs. colorectal,bladder_and_urothelial, multiple_myeloma,uterine,non_cancer,myeloid_neoplasm,prostate, thyroid

SEQ ID NO: 462237 - DNA, 27 bp, Homo sapiens
  chr1:92949665-92949692
  hyper
  liver_bileduct vs. colorectal,multiple_myeloma, bladder_and_urothelial
cggggggaggggggaacagaacacaag

SEQ ID NO: 462238 - DNA, 228 bp, Homo sapiens; identical to SEQ ID NO: 452729
  chr1:92950207-92950435
  hyper
  liver_bileduct vs. colorectal,multiple_myeloma, bladder_and_urothelial

SEQ ID NO: 462239 - DNA, 228 bp, Homo sapiens; identical to SEQ ID NO: 452729
  chr1:92950207-92950435
  hyper
  liver_bileduct vs. lymphoid_neoplasm,colorectal, multiple_myeloma,non_cancer,bladder_and_urothelial,prostate, uterine,myeloid_neoplasm,ovary,head_and_neck

SEQ ID NO: 462240 - DNA, 306 bp, Homo sapiens; identical to SEQ ID NO: 452735
  chr1:108506290-108506596
  hyper
  liver_bileduct vs. multiple_myeloma

SEQ ID NO: 462241 - DNA, 113 bp, Homo sapiens; identical to SEQ ID NO: 349296
  chr1:109204221-109204334
  hyper
  liver_bileduct vs. cervical,upper_gi

SEQ ID NO: 462242 - DNA, 122 bp, Homo sapiens
  chr1:109656099-109656221
  hyper
  liver_bileduct vs. breast
cggcgcttgggaaattgcggctaaggcaaactcctcgcttaaactcggatcaactacagtgtcagggcttctcttctagccggttgtaaaagcacggatggatttggcgggatgtaagatct

SEQ ID NO: 462243 - DNA, 204 bp, Homo sapiens
  chr1:109656291-109656495
  hyper
  liver_bileduct vs. breast
ctctccatcttctttctctcggttcacacgccacgtgtgcaacatcggagatgctcataaaataacccctggcccgaaagggcagtagaaaacggaaatttgttggctggcttggaggatgcttccactgtgttcttcacacgagccccgggcctgcctgttgggccggttgcgcaccccgggcgcgcgctctcccgcgcccac

SEQ ID NO: 462244 - DNA, 63 bp, Homo sapiens
  chr1:109656432-109656495
  hyper
  liver_bileduct vs. breast,prostate
cgagccccgggcctgcctgttgggccggttgcgcaccccgggcgcgcgctctcccgcgcccac

SEQ ID NO: 462245 - DNA, 116 bp, Homo sapiens; identical to SEQ ID NO: 344968
  chr1:109657070-109657186
  hyper
  liver_bileduct vs. breast,prostate

SEQ ID NO: 462246 - DNA, 365 bp, Homo sapiens; identical to SEQ ID NO: 459281
  chr1:110753530-110753895
  hyper
  liver_bileduct vs. multiple_myeloma,thyroid,ovary

SEQ ID NO: 462247 - DNA, 47 bp, Homo sapiens; identical to SEQ ID NO: 459282
  chr1:110753957-110754004
  hyper
  liver_bileduct vs. multiple_myeloma,thyroid,ovary

SEQ ID NO: 462248 - DNA, 16 bp, Homo sapiens
  chr1:110754101-110754117
  hyper
  liver_bileduct vs. multiple_myeloma,thyroid,ovary
ggagccccgcagcgct

SEQ ID NO: 462249 - DNA, 18 bp, Homo sapiens
  chr1:115631850-115631868
  hyper
  liver_bileduct vs. sarcoma,bladder_and_urothelial
cgcctccgcgtttgagca

SEQ ID NO: 462250 - DNA, 30 bp, Homo sapiens
  chr1:115631915-115631945
  hyper
  liver_bileduct vs. sarcoma,bladder_and_urothelial
ggggaccccggccccgcgcccgccacccgg

SEQ ID NO: 462251 - DNA, 4 bp, Homo sapiens
  chr1:115632637-115632641
  hyper
  liver_bileduct vs. sarcoma,bladder_and_urothelial
cctc

SEQ ID NO: 462252 - DNA, 35 bp, Homo sapiens; identical to SEQ ID NO: 349311
  chr1:115632692-115632727
  hyper
  liver_bileduct vs. sarcoma,bladder_and_urothelial

SEQ ID NO: 462253 - DNA, 142 bp, Homo sapiens
  chr1:151801432-151801574
  hyper
  liver_bileduct vs. cervical,melanoma,breast, head_and_neck,renal,uterine
cgacagtgtgagactctgtctcaaaaaaaaaaaaaaaaagcctggtgcaggctccctgtctcccttggcagcagcgctgagttcctgagttcctgaggccaccccgcctccgcacacccccctacctctatctccttccttc

SEQ ID NO: 462254 - DNA, 3 bp, Homo sapiens
  chr1:151801650-151801653
  hyper
  liver_bileduct vs. cervical,melanoma,breast, head_and_neck,renal,uterine
ggc

SEQ ID NO: 462255 - DNA, 2 bp, Homo sapiens
  chr1:153651442-153651444
  hyper
  liver_bileduct vs. anorectal
cg

SEQ ID NO: 462256 - DNA, 245 bp, Homo sapiens
  chr1:154474305-154474550
  hyper
  liver_bileduct vs. ovary,multiple_myeloma,head_and_neck, thyroid,prostate,cervical,uterine,non_cancer
cgcaatttgccgccgccgcccccgggcttggcccgctccgacacggtcttcaggttcagggggaactccttgaaccacttggccgccatgagggggccccggccggctcggcccaggagcgtcggggccgtggagcaggcgagcgaggaagcccagcccagacacgcagaggcgccaggggtcggggaccactgcattccccgtgactggggcgctggaggccgcggcgaggccccgcgacggct

SEQ ID NO: 462257 - DNA, 270 bp, Homo sapiens
  chr1:155164146-155164416
  hyper
  liver_bileduct vs. lung
cggacacagaactatcctttggggagcagagtggtattggggacaggtaggcacgtagcggggggcaaaagcacacgtgaggtgcgtaatgcgcgacagccaagaggtgtgtgcggcagcagtgcacgaggggaggaagctatcccaggccgcggcagcacgtggaacttgggtcccgcagtcgcaggctgcgctctaggccgacggaagcagttccgcctgtattcagaaaacagttctcagccccaaagacacaggttggaaagaaca

SEQ ID NO: 462258 - DNA, 594 bp, Homo sapiens; identical to SEQ ID NO: 356889
  chr1:155164455-155165049
  hyper
  liver_bileduct vs. lung

SEQ ID NO: 462259 - DNA, 43 bp, Homo sapiens; identical to SEQ ID NO: 455561
  chr1:156390054-156390097
  hyper
  liver_bileduct vs. thyroid,multiple_myeloma,non_cancer, lymphoid_neoplasm,prostate

SEQ ID NO: 462260 - DNA, 37 bp, Homo sapiens
  chr1:161582198-161582235
  hyper
  liver_bileduct vs. melanoma,ovary
cgggacatgaggagtgcgggggggaagagaagacggc

SEQ ID NO: 462261 - DNA, 12 bp, Homo sapiens
  chr1:161582647-161582659
  hyper
  liver_bileduct vs. melanoma,ovary
ttacgcctcaac

SEQ ID NO: 462262 - DNA, 109 bp, Homo sapiens
  chr1:161591364-161591473
  hyper
  liver_bileduct vs. sarcoma,myeloid_neoplasm, multiple_myeloma,lung
gtcactggtttcaaatcaacttcaaattttttggagacgtaagagtgctgagcattttttcttcagtgaagtgacttggcagcccaggtcgccaacgcccgtttctgta

SEQ ID NO: 462263 - DNA, 83 bp, Homo sapiens
  chr1:161591546-161591629
  hyper
  liver_bileduct vs. sarcoma,myeloid_neoplasm, multiple_myeloma,lung
acttttgtgaaccttgagtttttgaaactttcactgaaaaaaaccgcgtgcgatgctatccgccgggagcgctggagccttgg

SEQ ID NO: 462264 - DNA, 135 bp, Homo sapiens; identical to SEQ ID NO: 349354
  chr1:171811643-171811778
  hyper
  liver_bileduct vs. lung,sarcoma,ovary,uterine

SEQ ID NO: 462265 - DNA, 195 bp, Homo sapiens
  chr1:180123493-180123688
  hyper
  liver_bileduct vs. upper_gi,lung
cgatcctgtggggtcttggtggtcgcagaccaagcgtccctcttctcacatctaattcacaacgtctcatcgctccgcgggagcccaggaactgccctacaacagccgaaatccgggtcgtctattccaacggactcctcttccgttggatacgggggccgtgagaggccaaacaacctccgcgaggctaccccc

SEQ ID NO: 462266 - DNA, 587 bp, Homo sapiens; identical to SEQ ID NO: 356944
  chr1:180123700-180124287
  hyper
  liver_bileduct vs. upper_gi,lung

SEQ ID NO: 462267 - DNA, 793 bp, Homo sapiens
  chr1:180123790-180124583
  hyper
  liver_bileduct vs. upper_gi
cggaccgcgaaaggatggctcaccacccggccagggccagcccctgcaacaagctcagccccgcccgctcccgcgcccaggagcggccggcggggcggggtggctgggccggcctcgggggcgggggctcgggggcgggggctcaggggcggggccacgtggctcctccttgcgggcggaggcaggcggtgccgcggcgccgggacccgactcatccggtgcttgcgtgtggtggtgagcgcagcgccgaggatgaggaggtgcaacagcggctccgggccgccgccgtcgctgctgctgctgctgctgtggctgctcgcggttcccggcgctaacgcggccccgcggtcggcgctctattcgccttccgacccgctgacgctgctgcaggcggacacggtgcgcggcgcggtgctgggctcccgcagcgcctgggccgtggagttcttcgcctcctggtgcggccactgcatcgccttcgccccgacgtggaaggcgctggccgaagacgtcaaaggtgagaagcgggggcggcccgctcccccgtgccccgccgcccggacccctccacctgcccggtgggcagcctcctactccgggagcgcgtccctcttccagtcacctccgcccacctcttcctctccgcgcatcccacgcccaccaccttcatgtttctcagctccatttttgcctcccgctcccttgccttttcctcttggccctcatcccgagcttctttccctctccgcggcctgggcccccagacctgccctgctcgcccggttcgtccccc

SEQ ID NO: 462268 - DNA, 785 bp, Homo sapiens
  chr1:180199369-180200154
  hyper
  liver_bileduct vs. lung,head_and_neck,melanoma,breast, prostate
cgggcgggggagggaagaggaaaaaagccagagctgcagcaacagcgtctcaacctgggatgtgcaccaaccccggagagcgagatcaaagggactggaaacagactggggactggcggggggagggggccggccagcctgtggagtcctccctgagaagcggagggcccggcttccaccgtgactccagcggcctgcttggggttttaattattattttgaaatttctgaatcgagctagagcgagagagcgagagatctccgtagactgcgactcgctggctttcgctccgagatgatgcagagtgcgactgtccccgcggaaggggctgtcaaggggctcccggagatgctaggtgtgccgatgcaacgtaagacacccccctttctcgctgatttaattctaacaagacagctagcagcctcagccgctgcggggcgggccggacgccgctcaggggccgggaggggctggcggccggggcgcagaggcggtcacagggcaggggcaccagccagagtgcgtttgagggggccaggctcttggctgtttggggccgaatgtgaacgcctcctggatcatgcttgaggcgagccgagtaccgaaccccgcatctccagcccaaggcttttcttggaacgctggggagagtgctgtttggggacacccaggggtacgagctgtaggccaggcctgagggcgagggtggtccccacaaatcttctttcgccggcgtgacggtcagcgcttgcaggaccgctagtgcaacttcaccccagctggc

SEQ ID NO: 462269 - DNA, 987 bp, Homo sapiens
  chr1:180199660-180200647
  hyper
  liver_bileduct vs. renal,lung,melanoma,head_and_neck, breast,ovary,pancreas_gallbladder,prostate,anorectal, bladder_and_urothelial,upper_gi,uterine,sarcoma
cgagatgatgcagagtgcgactgtccccgcggaaggggctgtcaaggggctcccggagatgctaggtgtgccgatgcaacgtaagacacccccctttctcgctgatttaattctaacaagacagctagcagcctcagccgctgcggggcgggccggacgccgctcaggggccgggaggggctggcggccggggcgcagaggcggtcacagggcaggggcaccagccagagtgcgtttgagggggccaggctcttggctgtttggggccgaatgtgaacgcctcctggatcatgcttgaggcgagccgagtaccgaaccccgcatctccagcccaaggcttttcttggaacgctggggagagtgctgtttggggacacccaggggtacgagctgtaggccaggcctgagggcgagggtggtccccacaaatcttctttcgccggcgtgacggtcagcgcttgcaggaccgctagtgcaacttcaccccagctggcgggaagttggagagcgcgtctctcgcccctggggctggcggcggagaagccccggccacactcttagtccctgcggcccgcgccccgggcgtgcgtgccgggtgagtccccagccgctactgcccgcggcgcccgccgcgtgcgccgcgggaaactgactgctccttgtgagggaatctgctcgcgcattccagctagcctaggaatgcaggggagggagaagcgaccgcaagttgtgaattccgggttcagcctttgcgcacgcgagggcaggtgctcagggtggctcgggtttggaggggtagagacgggggtgtgtgggagctttgctagcctgcccgcccgctttcttcccgcgcccgaaattagcgagacagccggagctcgcggcgtgtttatccccaagtctctctctgtgtgtatgggtgtgcgcgcgcagagattttcccgaagggaatccgtctctgtgcttcactcctgagcgagagtcccc

SEQ ID NO: 462270 - DNA, 781 bp, Homo sapiens
  chr1:180200168-180200949
  hyper
  liver_bileduct vs. renal,upper_gi
cgcgtctctcgcccctggggctggcggcggagaagccccggccacactcttagtccctgcggcccgcgccccgggcgtgcgtgccgggtgagtccccagccgctactgcccgcggcgcccgccgcgtgcgccgcgggaaactgactgctccttgtgagggaatctgctcgcgcattccagctagcctaggaatgcaggggagggagaagcgaccgcaagttgtgaattccgggttcagcctttgcgcacgcgagggcaggtgctcagggtggctcgggtttggaggggtagagacgggggtgtgtgggagctttgctagcctgcccgcccgctttcttcccgcgcccgaaattagcgagacagccggagctcgcggcgtgtttatccccaagtctctctctgtgtgtatgggtgtgcgcgcgcagagattttcccgaagggaatccgtctctgtgcttcactcctgagcgagagtccccgagagggaatctgtgcagaggccagaacaggtgcccagtcgtcgcgcgcgcgcgcgcgcgcgcgcgacaagcgccgggagagtcctgcccctgtggcttgcacgctcagcagggcgccccgggcaccctggagagaccaaggagttcctcgctccgcttgccaaggggttgtacttccgcctgcgacttctttagtggtgcggtagctacatcttcggggtttactttaagtaagggccggctcatccagggatggtgactacctacaaactagggcgcacgagcgcgccctcctgcgcctc

SEQ ID NO: 462271 - DNA, 360 bp, Homo sapiens; identical to SEQ ID NO: 331055
  chr1:184943416-184943776
  hyper
  liver_bileduct vs. lung

SEQ ID NO: 462272 - DNA, 51 bp, Homo sapiens
  chr1:197882002-197882053
  hyper
  liver_bileduct vs. bladder_and_urothelial,cervical
cgcgctcctgaccctccggggagctgctgggggtgtctctttcttggaagg

SEQ ID NO: 462273 - DNA, 220 bp, Homo sapiens
  chr1:197882208-197882428
  hyper
  liver_bileduct vs. bladder_and_urothelial,cervical
tatttctgcagagctgagggcaggcggcgcaacaaatctcaggtaaaagagcatcagatttcagaagagctgtattctagacttggcgcaggcccctttggggagaagagcccaggggctatagagaacagaggtttgaaggaagcaaaagctggcgagaggttttttttttgtcgcgaagggtgagggtaggcagagaacgcgcgaaagggcagggcct

SEQ ID NO: 462274 - DNA, 261 bp, Homo sapiens; identical to SEQ ID NO: 279146
  chr1:197882611-197882872
  hyper
  liver_bileduct vs. bladder_and_urothelial,cervical

SEQ ID NO: 462275 - DNA, 61 bp, Homo sapiens
  chr1:205425836-205425897
  hyper
  liver_bileduct vs. lung,upper_gi
acacatatgcaggcatttgcacacacgcgcgcacacacatgcacgcacatgcacacacaca

SEQ ID NO: 462276 - DNA, 455 bp, Homo sapiens; identical to SEQ ID NO: 356989
  chr1:205425997-205426452
  hyper
  liver_bileduct vs. lung,upper_gi

SEQ ID NO: 462277 - DNA, 258 bp, Homo sapiens
  chr1:212873467-212873725
  hyper
  liver_bileduct vs. bladder_and_urothelial
cggagggaacgcgaagcccacccacgcgaggcgacgcccgggggggtggggaccaggggggcgccatgcagcctttggggtccttcggcggctgccggggaactcaggttgagaaacacagtgggtgttttggggtcggtgttttttcccggtcccatcgcggcatcttcctgcgcctcagccacgccctgcgtccgccccccggcgcgggggtcacagtcccgggggactttctccgcggcgatcagtcatccgggc

SEQ ID NO: 462278 - DNA, 225 bp, Homo sapiens
  chr1:212873750-212873975
  hyper
  liver_bileduct vs. bladder_and_urothelial
cgaagccgcggctctggggtgaagacgccggcttcaccgagtcccaccgcgcaccccgagccacgggcgccccagggactctgcagggagtgcctgcccttcccgtctcgggtccgccgggctgtgggagggaacgaggcggggcggccccgagggtgaattcccggagcggagggtgggcatggggaggatgtcccggacaaaaacggtgacgggcttccctga

SEQ ID NO: 462279 - DNA, 235 bp, Homo sapiens
  chr1:224803483-224803718
  hyper
  liver_bileduct vs. bladder_and_urothelial,ovary,breast
ttgcagggtctgggagcagagcagtaaacgcagccctaagcactgagtatgctacagtttggtaaaatccatccaagcagctttgggatccaaggcttgcactgtatccccaaccaacactaggcaacgccccaagtccccacacttcccactccgataggcgaaactgcaagaaccgggaggggcggctgcggcgtttaggcgcgaggcacacaccatacccttccgcagcttc

SEQ ID NO: 462280 - DNA, 917 bp, Homo sapiens
  chr1:226925659-226926576
  hyper
  liver_bileduct vs. pancreas_gallbladder,upper_gi, melanoma,breast,cervical,lung,ovary,sarcoma,multiple_myeloma, lymphoid_neoplasm,anorectal,prostate,bladder_and_urothelial
cgaggtccaagtccttggctcctaagtatgctgtgtgcggggcgcggctgactcagctctcccgggctgaggacaccccagccaccgtctccgggtctccccagcctgagcaaacattggctatccagggcaacccggcagccctcgccctgggcttcagggtctccctgctccaccctctcggggcatcagagaccgaccggctcggagggaacctaagcgggacctgccttgcccgagccgctgccagcgcccggatctgggagggcgcccgcgtgcccgccgtttaccttcctgaccctagccttggggctgtgtctctcggcctacgaaggcctgggcgggcagcggggccgcagccgaagcatttttcagggctagccttgtcgcctatccctagacaagtgttttgtgagtgtgggcgcaccgaggttctacacgttctctttaccggaaccagtacttgctgcccccctgccgtcgtcccctatgggggggtgtctgtgagtgtgtgtgtatacacgcgtgtgtgtatacgccgcacgcgcgcggagcgagtccgctctcagcgcgccctgttgccgaggacgcgactgcccctgcgggctcccggacccgcgcccactcggaggaacttaggggcgtgcatggctgcagccgggcagcagccctaggtgcacagagcctctagctctgcaaacctcccaggagccggcgctctaacaccccagggcagcgccgcggagcgcagggcttctccgcatcccgggcagcctcgcccggcgccagcagagccgccccgagaccccagcctggggactcctggagcgcgctgagggaggcggcgcggagtgagcggcccggaaggcgggtaggagaaatgcggagacctcgtctctccctattttctccccacc

SEQ ID NO: 462281 - DNA, 729 bp, Homo sapiens
  chr1:226926137-226926866
  hyper
  liver_bileduct vs. pancreas_gallbladder,breast,ovary, bladder_and_urothelial,head_and_neck,melanoma,colorectal, prostate,upper_gi,lymphoid_neoplasm,lung,uterine, multiple_myeloma,anorectal,sarcoma,cervical,non_cancer,
  CONT. FROM ABOVE: myeloid_neoplasm,renal
cgtcgtcccctatgggggggtgtctgtgagtgtgtgtgtatacacgcgtgtgtgtatacgccgcacgcgcgcggagcgagtccgctctcagcgcgccctgttgccgaggacgcgactgcccctgcgggctcccggacccgcgcccactcggaggaacttaggggcgtgcatggctgcagccgggcagcagccctaggtgcacagagcctctagctctgcaaacctcccaggagccggcgctctaacaccccagggcagcgccgcggagcgcagggcttctccgcatcccgggcagcctcgcccggcgccagcagagccgccccgagaccccagcctggggactcctggagcgcgctgagggaggcggcgcggagtgagcggcccggaaggcgggtaggagaaatgcggagacctcgtctctccctattttctccccaccgccactccatgtcaccctccaaaatcaaacccccttccctgcctccccagcccacccctttgccctgtttcggaaccaggaacgccgagattcgctccagagcagaaagtgagggaaaagagggttgttcagaggcgagagccattaaaaggccgccaaacttacctgcagtttctcagattctcaggtcctgtgtagactacatgcccagaggcgcaaacctcgtagggacgagatggctttaaaagtaaaaatgctcagaaattattttctcacaagctatggaagac

SEQ ID NO: 462282 - DNA, 49 bp, Homo sapiens; identical to SEQ ID NO: 344995
  chr1:226926951-226927000
  hyper
  liver_bileduct vs. pancreas_gallbladder,breast,ovary, bladder_and_urothelial,head_and_neck,melanoma,colorectal, prostate,upper_gi,lymphoid_neoplasm,lung,uterine, multiple_myeloma,anorectal,sarcoma,cervical,non_cancer,
  CONT. FROM ABOVE: myeloid_neoplasm,renal

SEQ ID NO: 462283 - DNA, 500 bp, Homo sapiens
  chr1:244013722-244014222
  hyper
  liver_bileduct vs. melanoma
cgctcgggcgggggccgggtcacgccggcggggcggcggctctgggccccggggcgcgcccggcgcggggaggggttctgcggcctcctcccgggctgcgcctcgctgaggggaccccccgccgcctccccgccccctccttcctcccgctcggggccgccgccgatcggttctcgccgtcgccgcggggcttgttgttgactttgaggaaaactcctgacgtcaggggctggctctcggcgactggcgggagcggcttccccgcgtccccggccctgcccgccgcctctgctcccctccctgcccggccctcgtcctcaggcttccccgcgcccccaaaccagcggtgccccgcgccccctctcctctcgcgagaacatccccctagccagccagagccgggagcgggggcagtcgctcccgggcgggaagttctgggtttccccctcgcccgcgtggcccttggcgggcacccgaggcccgggagcggaggctcctcg

SEQ ID NO: 462284 - DNA, 14 bp, Homo sapiens
  chr1:244014671-244014685
  hyper
  liver_bileduct vs. melanoma
actacgaagagacc

SEQ ID NO: 462285 - DNA, 193 bp, Homo sapiens
  chr10:3109168-3109361
  hyper
  liver_bileduct vs. lung
tccgcgcccccattccacccctccccgccatcggcgctccccgcaactgcggggtttccacccgccccggcgctcgcgcccactcacggtctccctcgcccccccgggagatgctcccggcgttctatcccgccccgccctggcgcgccccgcaaacgatgtgaccccggccccctgcggtctcccctcctcc

SEQ ID NO: 462286 - DNA, 412 bp, Homo sapiens
  chr10:3109459-3109871
  hyper
  liver_bileduct vs. lung
ggccccactagcagggacccgcccacctgtggcgctacccctgcctctgccgcctcccgcaccgctagcgcggcccccacctacgacgacccccgcgtagatgctcctgcccacacccgccccagccccggcccctgcccctagccgcgcccgcgccccctcccccgcagcccctcccatacgctcgggccccgcccgtcaccgcccattggcgctggggccgggcgggggcgcgggcggggcggcggttccgagtcaggcgcgcgcgggcagggtccccattgcctgctgcgcacccggacgtgcggctcccctcggcctcctcgccatggacgcggacgactcccgggcccccaagggctccttgcggaagttcctggagcacctctccggggccggcaaggccatcggc

SEQ ID NO: 462287 - DNA, 910 bp, Homo sapiens; identical to SEQ ID NO: 350976
  chr10:3109459-3110369
  hyper
  liver_bileduct vs. lung,pancreas_gallbladder

SEQ ID NO: 462288 - DNA, 996 bp, Homo sapiens
  chr10:3109882-3110878
  hyper
  liver_bileduct vs. lung
cggcggggatgctcaaggtgcgcgcccccctcccggcggcgagggagggacggacggacggagctggggagaaccgggcgaaggcgatggggtgaccggagagaagaggggggaagcgatgggggggacccggggaaaggtggcgaagcgatggggagaaccggggagaagagcggggaagcgatggggagaaccgggaagaagcccgcgcccggaagcggcaggggtacctgcggggcggcatgagccggcgaggcagccccggggtccttgcccggtggggcgggggaggaagggacatggcggtaggaacctccatccggaagatcagtgagttttccaccttcggttttgttttaaatggaacctggcagagggagtcgcctgaagcgccctcgggggtcgttctgcctctgagctgtaggacggggccgggcgtcccctccgaagcgtgggtacagcgcgatcacttcctaagtgcccccccgccccccaactccgccgcacgccaccccctagaatgtcgaggaagaaacggctgggtccccgcgcgcctcctgtcgcctcgtgccctgcgcggcgtgggcggggtcctggctgctgcaatgcgggacgcggcgggggtgcgcggggttcccgcctggcgtctccagggcggtccggcagcccctcgcgtttccgctgggagatttttaaaaagggtttcctgcgctcgcatgtgctgtcgccttccggctcgtgacaaaaacgaaaaccaaaatgggtcccaggccctccccgccagcctccgcagacgggaaggatcaggaagcggggactccgggatgtcagcggcgccgcggcgcgggctccgggcttccctgccctgcaatgtggaagctgctctctaggaggggcccgaggctgggcccacggacgcgggcgcgccgggaggatatttaacattgaagagcggaaggtggcggagactcggcgcgccccaggccccgggtgcac

SEQ ID NO: 462289 - DNA, 974 bp, Homo sapiens
  chr10:3110381-3111355
  hyper
  liver_bileduct vs. upper_gi,lung
cgccgcacgccaccccctagaatgtcgaggaagaaacggctgggtccccgcgcgcctcctgtcgcctcgtgccctgcgcggcgtgggcggggtcctggctgctgcaatgcgggacgcggcgggggtgcgcggggttcccgcctggcgtctccagggcggtccggcagcccctcgcgtttccgctgggagatttttaaaaagggtttcctgcgctcgcatgtgctgtcgccttccggctcgtgacaaaaacgaaaaccaaaatgggtcccaggccctccccgccagcctccgcagacgggaaggatcaggaagcggggactccgggatgtcagcggcgccgcggcgcgggctccgggcttccctgccctgcaatgtggaagctgctctctaggaggggcccgaggctgggcccacggacgcgggcgcgccgggaggatatttaacattgaagagcggaaggtggcggagactcggcgcgccccaggccccgggtgcacgtgggggcgccggtgcccggatgatggagtgtcccgatccgtgcaatccctggcgggtagatcggcgcttcccaggcgaacgcaacctgggagccttagcgatcgcgcaggctggagacgcggcgcgccccgagctgggttttgatttttgttttcccggttcctcctgccgcagatgcgtggaaaggcccggatggcggatttcctcccgtttcggggccgcgcactgcacagggttggagcggggatgcaccccctgcccactgcgcgggtgaccttcccttcgcccttgagcgcgcggggcgggcgcgggtgccgcaggttgaggcgctgtgggcgccgccccgcccgccacgagcgcctacgtgatgcccggcccgtcgtctccacgagccccggccccgacacccgtgcgccgcgcgctccccaggcccgcagcgcagcctccccaggcccagcgccccccgcgggagaccc

SEQ ID NO: 462290 - DNA, 52 bp, Homo sapiens
  chr10:8097537-8097589
  hyper
  liver_bileduct vs. breast
cccgacctcccaggcggaccgccctccctccccgcgcgcgggttccgggccc

SEQ ID NO: 462291 - DNA, 209 bp, Homo sapiens; identical to SEQ ID NO: 452758
  chr10:17270445-17270654
  hyper
  liver_bileduct vs. melanoma,sarcoma,uterine,renal, multiple_myeloma,lung,ovary

SEQ ID NO: 462292 - DNA, 209 bp, Homo sapiens; identical to SEQ ID NO: 452758
  chr10:17270445-17270654
  hyper
  liver_bileduct vs. melanoma,renal,uterine, multiple_myeloma,sarcoma,ovary,myeloid_neoplasm

SEQ ID NO: 462293 - DNA, 116 bp, Homo sapiens; identical to SEQ ID NO: 345346
  chr10:17272233-17272349
  hyper
  liver_bileduct vs. sarcoma,melanoma

SEQ ID NO: 462294 - DNA, 369 bp, Homo sapiens; identical to SEQ ID NO: 454113
  chr10:17272233-17272602
  hyper
  liver_bileduct vs. melanoma,sarcoma,lung

SEQ ID NO: 462295 - DNA, 260 bp, Homo sapiens
  chr10:17495133-17495393
  hyper
  liver_bileduct vs. melanoma,breast
cgcaaaacaaacctgaatcttaacaccggtgccctttaaagcatagaaaagaaaaagcaaaccaaccaaatccctccataaagacaggctgagctgcttctctccaaaggtggcggggtcgggggcgggggtgctttcaacacaccattgtcgagaggaaaactcagcacccgtttttcaaatgcagctgctggaggatcccccttgattcaaagaccattcacatccaggcttagagggttgagggagtgtgaagggtg

SEQ ID NO: 462296 - DNA, 299 bp, Homo sapiens
  chr10:17495680-17495979
  hyper
  liver_bileduct vs. melanoma,breast
agttgctacaccccgccgggagctgttggctgaaaggctgggagtcgcgctccttgcctggcagggagatctcgcactccccggctcccaggccaggtccccagccccagagttggaagagccttagggcgggaaggaagagacagcaaggaccagaatggggagcatgagatcctgatgcggaacccgacggcaggtcccgctccacagctgcctcgcccacagcgatgcgcgctagagcccccgcagccctgaccggtccctctgctccccagccgccgtccaccggtcggagggtc

SEQ ID NO: 462297 - DNA, 323 bp, Homo sapiens
  chr10:17495680-17496003
  hyper
  liver_bileduct vs. melanoma,breast,ovary,upper_gi, sarcoma
agttgctacaccccgccgggagctgttggctgaaaggctgggagtcgcgctccttgcctggcagggagatctcgcactccccggctcccaggccaggtccccagccccagagttggaagagccttagggcgggaaggaagagacagcaaggaccagaatggggagcatgagatcctgatgcggaacccgacggcaggtcccgctccacagctgcctcgcccacagcgatgcgcgctagagcccccgcagccctgaccggtccctctgctccccagccgccgtccaccggtcggagggtcgcctccctgcgaccccctccccca

SEQ ID NO: 462298 - DNA, 15 bp, Homo sapiens
  chr10:17495988-17496003
  hyper
  liver_bileduct vs. breast,cervical,sarcoma,upper_gi, ovary,melanoma,prostate,anorectal,colorectal,lung
cgaccccctccccca

SEQ ID NO: 462299 - DNA, 32 bp, Homo sapiens; identical to SEQ ID NO: 345349
  chr10:22626103-22626135
  hyper
  liver_bileduct vs. prostate,myeloid_neoplasm,non_cancer, uterine,sarcoma,multiple_myeloma,thyroid,renal

SEQ ID NO: 462300 - DNA, 252 bp, Homo sapiens
  chr10:43572998-43573250
  hyper
  liver_bileduct vs. bladder_and_urothelial
ctcgggcgggagcggagcgcgggccgggccgcgggggtcggtgctcagaaccctagccatagccgcaggtctcaatctggccgcgccctgcgccaaagccgcgtcctggagcaaacgggacagccgtttcggggccgacctggcggacgggtcagggagccccgaaagcccgcgattcgtgcggagagttctgtttcggcaggagacggctccgtcctggtttccttttcccgctcagcgtccgtgcgttcc

SEQ ID NO: 462301 - DNA, 94 bp, Homo sapiens; identical to SEQ ID NO: 351040
  chr10:50606762-50606856
  hyper
  liver_bileduct vs. melanoma

SEQ ID NO: 462302 - DNA, 73 bp, Homo sapiens; identical to SEQ ID NO: 347093
  chr10:64578688-64578761
  hyper
  liver_bileduct vs. anorectal,breast,cervical,thyroid

SEQ ID NO: 462303 - DNA, 857 bp, Homo sapiens
  chr10:71078140-71078997
  hyper
  liver_bileduct vs. lung,upper_gi,bladder_and_urothelial, colorectal,ovary,breast,pancreas_gallbladder
cgagccctcatttccgaggaatgggaccgccttcgtgcccccggggctgccagtccctagactagccctaggggcttctcgtcccggcggagccgggcggtgcctcctgcctgcgcctcgcacctccccgcctggcacggcccacccgggcacggcgccgccacgcgtgaaggcccgcatcggctccctacgtgggggacgtgcaggatgatgcggggtcgggggggatttcgctgcgtcgcccgccccctttccggcgcaggagggagcggccgccgcgtccccgctccccggccgggacgccaccgccgggcgttgcagaggcgcgccgcaaccaatgggcgtggaggaggtgggtcggctggcggctgtcaccctccaggggacgggagcgcggagaccgggagcgcgcgagctgtcgccgcgccccgggccgagggggaggagccgggggaggaggaggaggaggagccgccgagcagccgccggaggaccacggctcgccagggctgcggaggaccgaccgtccccacgcctgccgccccgcgaccccgaccgccagcatgatcgccgcgcagctcctggcctattacttcacggagctgaaggatgaccaggtcaaaaaggtgagcccccgcccgcgccgccgctggtcctggccgcagccttgcgttccggcatccgctcgccgcctccgctgcctccatcctccggcgcccggccttctccgggccagcatcgagttggactgcagggcgcaaggaaagccttcgccttcgattctaccggcattgtcagtgtctctgtgtgtgtgcgtttttgggaggggggcaatcgggcggaagacccccgagacc

SEQ ID NO: 462304 - DNA, 850 bp, Homo sapiens
  chr10:71078526-71079376
  hyper
  liver_bileduct vs. lung,upper_gi,pancreas_gallbladder, bladder_and_urothelial,colorectal,breast,ovary,head_and_neck, renal
cgggagcgcggagaccgggagcgcgcgagctgtcgccgcgccccgggccgagggggaggagccgggggaggaggaggaggaggagccgccgagcagccgccggaggaccacggctcgccagggctgcggaggaccgaccgtccccacgcctgccgccccgcgaccccgaccgccagcatgatcgccgcgcagctcctggcctattacttcacggagctgaaggatgaccaggtcaaaaaggtgagcccccgcccgcgccgccgctggtcctggccgcagccttgcgttccggcatccgctcgccgcctccgctgcctccatcctccggcgcccggccttctccgggccagcatcgagttggactgcagggcgcaaggaaagccttcgccttcgattctaccggcattgtcagtgtctctgtgtgtgtgcgtttttgggaggggggcaatcgggcggaagacccccgagaccgggctgcctgctgcagtgtccttgaaacgggccctggatgtcagataggcccccgggctgtgcggggaggtggccggtgggcccttccgcagggcctgttcgggagggtccgagcgccgtgggaggaggtgtgatcatggagatgctggggaggtgatcgagcagcaggcgggggtgctggctggaggccaggcctcccatatttggggttcctggcggagggtgtcgggtgccccggagaagctgtcgccgggctctcccagttgtttgagctgctcgttaatctgaggacgaggtgacccgcccggcttcccggaacggggaggggcggcgaggccaccggaaactttgctcataggcctcgtgtctggagcggcac

SEQ ID NO: 462305 - DNA, 324 bp, Homo sapiens
  chr10:72238261-72238585
  hyper
  liver_bileduct vs. uterine,anorectal
cgcactagcgacgagggaagaggaactggcttcccgggcagtctcccccgccccaaacttttcctcctcgcggagggtgggcgggcggagggaggaagcgcagccggggaacgtggcgcccgcgttcctcccgcccgggggctgcggctgggctgagtgtgtctttaaatctgagccccccgcccctcgcggtggggccgggactcgcggtccgggcgggggcgggcgcggtgattggcggccgggtcgggtccgcccctcggcgttgggtagcggggcgctggggagcagcgcggcgcgcacgggccggggcgcgcaggtccc

SEQ ID NO: 462306 - DNA, 29 bp, Homo sapiens
  chr10:72238858-72238887
  hyper
  liver_bileduct vs. uterine,anorectal
tctggaatcccccgggcaccccccagccc

SEQ ID NO: 462307 - DNA, 509 bp, Homo sapiens
  chr10:92617539-92618048
  hyper
  liver_bileduct vs. bladder_and_urothelial,ovary,lung, breast,sarcoma,uterine,myeloid_neoplasm
gcccgcgccgaccgctggggggcgcctggctctgtctcggagccccgcactccccggacccccggccgctgcgggtaacgcggcagcgcggcctcacggggactccctgcgggaggcgcttcggcccccgacggacgcctgggacgcgcggagtcgagggagctcgggctgggctccgctggcagctccacagttcgcagcagcagctcggctgcgccgagagcgcccgggcggcagcggcagaagttgcggagtgcgccccgcccctcgcgcccgccgccgccgccgccgccgccgccgctcccctgcggcagccgcgccgcgtccccgccgccgccgcctccggccgctgcccgctccctcgcgctcctgggacgggatacccgggctgggcaggcaccgccgcctctcccgcgcctccctactgtgagggggcggcgctgcacgcgcctcccgggatcccgggtcccctcgcccgggaagctgtccttgccgcatgatagatactt

SEQ ID NO: 462308 - DNA, 64 bp, Homo sapiens; identical to SEQ ID NO: 359627
  chr10:92618077-92618141
  hyper
  liver_bileduct vs. bladder_and_urothelial,ovary,lung, breast,sarcoma,uterine,myeloid_neoplasm

SEQ ID NO: 462309 - DNA, 57 bp, Homo sapiens; identical to SEQ ID NO: 345362
  chr10:93647662-93647719
  hyper
  liver_bileduct vs. ovary,anorectal,uterine,head_and_neck, non_cancer,bladder_and_urothelial

SEQ ID NO: 462310 - DNA, 231 bp, Homo sapiens; identical to SEQ ID NO: 455594
  chr10:98272415-98272646
  hyper
  liver_bileduct vs. pancreas_gallbladder,colorectal

SEQ ID NO: 462311 - DNA, 420 bp, Homo sapiens; identical to SEQ ID NO: 455595
  chr10:98272768-98273188
  hyper
  liver_bileduct vs. pancreas_gallbladder,colorectal

SEQ ID NO: 462312 - DNA, 715 bp, Homo sapiens; identical to SEQ ID NO: 351083
  chr10:98272768-98273483
  hyper
  liver_bileduct vs. pancreas_gallbladder

SEQ ID NO: 462313 - DNA, 115 bp, Homo sapiens
  chr10:99474279-99474394
  hyper
  liver_bileduct vs. lung
cgtttccactgtcgcccgcgcccgggaaccctgacgctcagctcccgcccgacggcagcgccgccgccgcccagaatcccagcccagaatcccgaccgccgcgccggacgcgccg

SEQ ID NO: 462314 - DNA, 62 bp, Homo sapiens; identical to SEQ ID NO: 359642
  chr10:99474467-99474529
  hyper
  liver_bileduct vs. lung

SEQ ID NO: 462315 - DNA, 109 bp, Homo sapiens; identical to SEQ ID NO: 202224
  chr10:102587493-102587602
  hyper
  liver_bileduct vs. melanoma

SEQ ID NO: 462316 - DNA, 212 bp, Homo sapiens; identical to SEQ ID NO: 459333
  chr10:103535916-103536128
  hyper
  liver_bileduct vs. sarcoma

SEQ ID NO: 462317 - DNA, 240 bp, Homo sapiens; identical to SEQ ID NO: 454122
  chr10:118891774-118892014
  hyper
  liver_bileduct vs. multiple_myeloma

SEQ ID NO: 462318 - DNA, 132 bp, Homo sapiens; identical to SEQ ID NO: 459335
  chr10:121301363-121301495
  hyper
  liver_bileduct vs. breast,cervical,prostate,uterine, head_and_neck,ovary,upper_gi,lymphoid_neoplasm,myeloid_neoplasm

SEQ ID NO: 462319 - DNA, 323 bp, Homo sapiens; identical to SEQ ID NO: 459336
  chr10:121301911-121302234
  hyper
  liver_bileduct vs. breast,cervical,prostate,uterine, head_and_neck,ovary,upper_gi,lymphoid_neoplasm,myeloid_neoplasm

SEQ ID NO: 462320 - DNA, 760 bp, Homo sapiens; identical to SEQ ID NO: 345370
  chr10:121301911-121302671
  hyper
  liver_bileduct vs. pancreas_gallbladder,upper_gi,lung, breast,renal,head_and_neck,ovary,bladder_and_urothelial, lymphoid_neoplasm,prostate,cervical,sarcoma,uterine,colorectal, anorectal,multiple_myeloma,melanoma

SEQ ID NO: 462321 - DNA, 833 bp, Homo sapiens; identical to SEQ ID NO: 454123
  chr10:126106668-126107501
  hyper
  liver_bileduct vs. upper_gi,lung,renal,breast,ovary, pancreas_gallbladder,head_and_neck

SEQ ID NO: 462322 - DNA, 846 bp, Homo sapiens; identical to SEQ ID NO: 454124
  chr10:126107015-126107861
  hyper
  liver_bileduct vs. pancreas_gallbladder,lung,upper_gi

SEQ ID NO: 462323 - DNA, 128 bp, Homo sapiens
  chr10:135090197-135090325
  hyper
  liver_bileduct vs. upper_gi,lung,head_and_neck
cggggtccgcgtcgcgtcctgcggggagagccaccctgccccgcgctgcgcccgggacggttccctggaaccactcaccaggcagcatcatcgcgcccagcagccagagcccgaggccgcgcatggcc

SEQ ID NO: 462324 - DNA, 99 bp, Homo sapiens; identical to SEQ ID NO: 351136
  chr10:135090391-135090490
  hyper
  liver_bileduct vs. upper_gi,lung,head_and_neck

SEQ ID NO: 462325 - DNA, 5 bp, Homo sapiens
  chr11:536867-536872
  hyper
  liver_bileduct vs. upper_gi,cervical,breast
cgtgc

SEQ ID NO: 462326 - DNA, 394 bp, Homo sapiens; identical to SEQ ID NO: 351140
  chr11:537174-537568
  hyper
  liver_bileduct vs. upper_gi,cervical,breast

SEQ ID NO: 462327 - DNA, 158 bp, Homo sapiens
  chr11:2466019-2466177
  hyper
  liver_bileduct vs. upper_gi
cggaggcagggccaggccggtccgtggggagagggcgggccaagccggtgggcgcgggcagggacgccctgtgcgcgccggaccggcgggggcggggcgtgcaggcgggggcggggcacgccgtcccatgggaccggccctcggccactgccccctcc

SEQ ID NO: 462328 - DNA, 251 bp, Homo sapiens
  chr11:2466191-2466442
  hyper
  liver_bileduct vs. upper_gi
cgcccgggctgggccggcagcggccccccgcggcggggctggcagcagtggctgcccgcactgcgcccgggcgctcgccttcgctgcagctcccggtgccgccgctcgggccggccccccggcaggccctcctcgttatggccgcggcctcctccccgcccagggccgagaggaagcgctggggttggggccgcctgccaggcgcccggcggggcagcgcgggcctggccaagaagtgccccttctcgctg

SEQ ID NO: 462329 - DNA, 16 bp, Homo sapiens
  chr11:2466831-2466847
  hyper
  liver_bileduct vs. upper_gi
aaggaagtggggaaac

SEQ ID NO: 462330 - DNA, 160 bp, Homo sapiens
  chr11:12030561-12030721
  hyper
  liver_bileduct vs. anorectal,head_and_neck,ovary
cctcaagcctctctcagcccctacctggggtggaccaagcacaggtcagccccctccccttggcgtcgggtcctactcgagcgccccgccccacatccaccaagagaggctgagctcagcagagtcgtcccctcccccgccgccgcccctcacccacccc

SEQ ID NO: 462331 - DNA, 333 bp, Homo sapiens
  chr11:13031624-13031957
  hyper
  liver_bileduct vs. upper_gi
atgacccaggagaaacagcggcgagtggtgcgcaaggcctttcgcaaactggccaagctcaaccggcggcgccagcagcagacaccgtcgtcctgttcgtccacttcgtcgtccactgcctcgtcctgctcttcgtcgccgcggacccacgagagcgcgtcggtggagcgcatggagacgctggtgcatctggtgctttcccaggaccacacaattcgccagcaggtgcagcggctccacgagctggaccgcgagatcgatcactacgaggccaaggtgcacctggaccgcatgcggcgtcacggggtcaactacgtgcaggacacttacttg

SEQ ID NO: 462332 - DNA, 658 bp, Homo sapiens
  chr11:13689464-13690122
  hyper
  liver_bileduct vs. lung,upper_gi
cgtgccccacccctcagaagtaaacgttattctaactcctatcactaccggtaagttttgtagggaattattttggaggaagtggaaggtggaatgaatgggcccacagtcccctgggactgggcgagacccgtggaggctccaggggtccgtagagctcttcgctctcaccgacccgggccacacccgccaagctggtagttctccgaacggatccctcacgcccagcaatggccggagggcccccgggccccaccataatagcgctaagcacgccacaatggcagccccgctgtctcccgcgcgggcctcgctgcgtgctcccaaccttgggagttggcgcccctcccgcgcgacggacagccgggcgtggccctgggcgcgacccgacaggacgccagcagccggcgggggcgctccaggactcgagatgtggggcgcgggcccattggctgagcattcccccgcgagcctcccggccgcagggcccacctcccggccctctctccgcgcccccattggccgttcgcgttccgcgggcgtccgctcccgccccactcccgcccggagggaaaccgggttgggggtgagaggctaaagcagggaggaggatgactggtcctgcggataagggtgtgcgcgagagccaatcaaaagc

SEQ ID NO: 462333 - DNA, 173 bp, Homo sapiens
  chr11:13690157-13690330
  hyper
  liver_bileduct vs. lung,upper_gi
gtcgcgaggtgcggtcggggccggctgacgcgactgcgggcctcagccaatgggcgtgccactgcccgtccgctcttcagcagccggtcgcgggcggtggaaaagcgagtgaagagagcgcgacggcggcggcggcggcggcgcagctattgctggacggccagtgggagagc

SEQ ID NO: 462334 - DNA, 278 bp, Homo sapiens
  chr11:13689844-13690122
  hyper
  liver_bileduct vs. upper_gi,lung
cgcgacccgacaggacgccagcagccggcgggggcgctccaggactcgagatgtggggcgcgggcccattggctgagcattcccccgcgagcctcccggccgcagggcccacctcccggccctctctccgcgcccccattggccgttcgcgttccgcgggcgtccgctcccgccccactcccgcccggagggaaaccgggttgggggtgagaggctaaagcagggaggaggatgactggtcctgcggataagggtgtgcgcgagagccaatcaaaagc

SEQ ID NO: 462335 - DNA, 555 bp, Homo sapiens; identical to SEQ ID NO: 359772
  chr11:13690157-13690712
  hyper
  liver_bileduct vs. upper_gi,lung

SEQ ID NO: 462336 - DNA, 203 bp, Homo sapiens
  chr11:35439896-35440099
  hyper
  liver_bileduct vs. breast,bladder_and_urothelial, anorectal
cgttttcccgcctcccgggaagcacccaaatctcttccacccttccttagagctagccagggagattccgccttccagggacaaggaccgatcggagcgggcccagcatctccatggcgactctgcaaacctggcgttcaaggccgcgcgcgctggtccttgccccgccccagggccctgtcttggctcattccttccgagcc

SEQ ID NO: 462337 - DNA, 239 bp, Homo sapiens
  chr11:35440137-35440376
  hyper
  liver_bileduct vs. breast,bladder_and_urothelial, anorectal
cgctccaggcgctgctaccccggtgtctgctcacactatgcccaatcccctattgttttgaaatcccaaaagtaacctcaagaggatttcttcctcacactctcaggcccccagcgcaccttaccctttttatcaaaataaaacaaccctccacctctcgcattttcaaaggattaagcagcaatctccaggaaagaaaatcaatcccctccccaccatcccatccccagccaagctac

SEQ ID NO: 462338 - DNA, 18 bp, Homo sapiens
  chr11:35440469-35440487
  hyper
  liver_bileduct vs. breast,bladder_and_urothelial, anorectal
cgcgggtacagataaaaa

SEQ ID NO: 462339 - DNA, 1 bp, Homo sapiens
  chr11:35440375-35440376
  hyper
  liver_bileduct vs. breast
c

SEQ ID NO: 462340 - DNA, 18 bp, Homo sapiens
  chr11:35440469-35440487
  hyper
  liver_bileduct vs. breast
cgcgggtacagataaaaa

SEQ ID NO: 462341 - DNA, 174 bp, Homo sapiens; identical to SEQ ID NO: 452792
  chr11:43600280-43600454
  hyper
  liver_bileduct vs. melanoma,sarcoma

SEQ ID NO: 462342 - DNA, 231 bp, Homo sapiens
  chr11:43964015-43964246
  hyper
  liver_bileduct vs. lung
gggggcgggcggcgccggggaaggggccgttactttcccagagcggcggggcgacgtcaggcggaagggcgcggggcgcgcacgctttaaatggcattcgctgtcatccgagctcagagccgtgtgggcagccgcgggctatataagccgcgagcctggccgccgcggggcagacggcgacagcagcggcggcgagcgcctcggagcgcggcggaacagcgccccccgagc

SEQ ID NO: 462343 - DNA, 118 bp, Homo sapiens; identical to SEQ ID NO: 457374
  chr11:44748073-44748191
  hyper
  liver_bileduct vs. multiple_myeloma

SEQ ID NO: 462344 - DNA, 257 bp, Homo sapiens; identical to SEQ ID NO: 457375
  chr11:44748419-44748676
  hyper
  liver_bileduct vs. multiple_myeloma

SEQ ID NO: 462345 - DNA, 16 bp, Homo sapiens
  chr11:44748871-44748887
  hyper
  liver_bileduct vs. multiple_myeloma
ccgccgccgcgccccc

SEQ ID NO: 462346 - DNA, 257 bp, Homo sapiens; identical to SEQ ID NO: 457375
  chr11:44748419-44748676
  hyper
  liver_bileduct vs. sarcoma

SEQ ID NO: 462347 - DNA, 314 bp, Homo sapiens; identical to SEQ ID NO: 457378
  chr11:44748871-44749185
  hyper
  liver_bileduct vs. sarcoma

SEQ ID NO: 462348 - DNA, 185 bp, Homo sapiens; identical to SEQ ID NO: 457379
  chr11:44749218-44749403
  hyper
  liver_bileduct vs. sarcoma

SEQ ID NO: 462349 - DNA, 2 bp, Homo sapiens
  chr11:46354343-46354345
  hyper
  liver_bileduct vs. ovary,cervical
cg

SEQ ID NO: 462350 - DNA, 20 bp, Homo sapiens
  chr11:60718609-60718629
  hyper
  liver_bileduct vs. multiple_myeloma,thyroid
cggcgacgcgggcatctctc

SEQ ID NO: 462351 - DNA, 316 bp, Homo sapiens
  chr11:61276101-61276417
  hyper
  liver_bileduct vs. breast,prostate,uterine
agggtggcgccttggccccgccccgccccgccctccctccgcctcattggcagccgcacgcgcgtcggggttgccagggcgacgggtcgctaagctgcgagtcagcgcgaaccctagccagtcggcctccggcggaggcaacgggggaggcccgagggcgggcggtggagcgcggcgcgcggcggcggtgccccaagtgggtgcctcctcccggccccgcacggcccccctcccggcgcgggggaaggccggggcggggggcccgggggccggcgcggctccggcaccgtcggggcggctggggggcggccggggc

SEQ ID NO: 462352 - DNA, 550 bp, Homo sapiens; identical to SEQ ID NO: 455613
  chr11:64512349-64512899
  hyper
  liver_bileduct vs. ovary

SEQ ID NO: 462353 - DNA, 61 bp, Homo sapiens; identical to SEQ ID NO: 345394
  chr11:64513748-64513809
  hyper
  liver_bileduct vs. multiple_myeloma

SEQ ID NO: 462354 - DNA, 58 bp, Homo sapiens; identical to SEQ ID NO: 455621
  chr11:69516911-69516969
  hyper
  liver_bileduct vs. cervical,colorectal,upper_gi

SEQ ID NO: 462355 - DNA, 201 bp, Homo sapiens; identical to SEQ ID NO: 455622
  chr11:69517461-69517662
  hyper
  liver_bileduct vs. cervical,colorectal,upper_gi

SEQ ID NO: 462356 - DNA, 259 bp, Homo sapiens
  chr11:69517461-69517720
  hyper
  liver_bileduct vs. multiple_myeloma
gcgcatctgcgtctaagccacaccgtgctcctggtagattaaaaattaattctaaaaaaaaaatctctcctatcccaaatgcactgttttctgccttgcttgacaattgatttgtttttaaaggaaagttatgggtagatcctcttttttctttcccattctttttttcttcttttatactggagggagggaaacggaggcgaggaccacacacgcgcaggcagaggctgaaaaggcccgaggtgggttttcctgttta

SEQ ID NO: 462357 - DNA, 845 bp, Homo sapiens
  chr11:73693765-73694610
  hyper
  liver_bileduct vs. upper_gi,breast,renal,lung, bladder_and_urothelial,cervical,head_and_neck,lymphoid_neoplasm, ovary,uterine,sarcoma,melanoma,anorectal,pancreas_gallbladder, colorectal
cgagccgcagggagaacacggcagtgcgtgcggctgtgtctgtcggctggcggagggcgcgtcggacgagccgggcgagcgtggacagtcaatcccaaggcgcgcgcagctgggcttcgcagtggggctccgcgcaggcggcggcgcggcttaagcctcgggggcggggcccggggtggggcctgcggggcggggccgggcctgccagctcctacttgggtgcggagaccctggagcagccgcctttccgcggggaccgccccgcctagggttctctccatgactttctccactcccgtttccgtgcgtcccatcaccgcgtttactccttcgttccccgagatggtcactcccttgccactccccgcctctgcctcacactctctcgggccgccaacctctgtgaggatggcaagactgaccgccagaaacaagtcttgtccagtcacacacctcttgccttcccagccaggacggtttctaacagcgtccagcggggccgtgtcttaagtgcacttcctcttttatgggcccagcccccctacgctgggcaaactacccaccctcctgcgagcgagcgcgcggctggctcctgcagggcgggactggggcctcgcgaccggcctcgctgtcgattggttacagccgccgcgttgtcgggggaaggaaccaatcagaactgcagcaacaggtggcccggcaaccgacaacagccgttgggctcggctggggttcgcgccttctcccccggtggagcggcctggcgtttagggaccaggacactaaaggccccggcggggcgggagcacccagcgtgacctcacgctcctacacacagacaagca

SEQ ID NO: 462358 - DNA, 325 bp, Homo sapiens
  chr11:74951799-74952124
  hyper
  liver_bileduct vs. melanoma
ggggaggcaaaccctgcccactcggctcggagcccggagcggccgcggaagccggaggccggcgcgcagggcgagggcaccgggggcggggggctccgctccccgtctgacccctcttgcccccggccagtcagccagtaagtgcggctcctcagactttcgagacagcgaacggaccgaccgggactgccagccgctccgggtcaaggactcgccccacccgtgccccccaccaggcgctcccaactcactggtgagcgcggcggcccgggcgctggatgcgggggcggccgcgatggccccgcgcgcgggacagccggggctc

SEQ ID NO: 462359 - DNA, 67 bp, Homo sapiens
  chr11:74952057-74952124
  hyper
  liver_bileduct vs. melanoma
cgcggcggcccgggcgctggatgcgggggcggccgcgatggccccgcgcgcgggacagccggggctc

SEQ ID NO: 462360 - DNA, 510 bp, Homo sapiens; identical to SEQ ID NO: 452797
  chr11:76381512-76382022
  hyper
  liver_bileduct vs. multiple_myeloma, bladder_and_urothelial

SEQ ID NO: 462361 - DNA, 30 bp, Homo sapiens; identical to SEQ ID NO: 452798
  chr11:76382264-76382294
  hyper
  liver_bileduct vs. multiple_myeloma, bladder_and_urothelial

SEQ ID NO: 462362 - DNA, 131 bp, Homo sapiens; identical to SEQ ID NO: 347179
  chr11:106889091-106889222
  hyper
  liver_bileduct vs. breast

SEQ ID NO: 462363 - DNA, 227 bp, Homo sapiens
  chr11:106889091-106889318
  hyper
  liver_bileduct vs. breast,melanoma
ccgtgcgccgcgctcccgctcacggggaggctccgagagtgtgtgaccgcggtcggcggggcggggagggctgcggcccaagcagaaggggaggcagaggcagaggcttctgccgcctgcgcgcctatctcgccccctttccctctctgctcccgcctctctccacttgctgccctgcctccctccttctccctttatccccccgcccccccccatgctctccctcc

SEQ ID NO: 462364 - DNA, 17 bp, Homo sapiens
  chr11:133938756-133938773
  hyper
  liver_bileduct vs. melanoma
cgccaagttcattgaaa

SEQ ID NO: 462365 - DNA, 161 bp, Homo sapiens; identical to SEQ ID NO: 345407
  chr11:133939437-133939598
  hyper
  liver_bileduct vs. melanoma

SEQ ID NO: 462366 - DNA, 235 bp, Homo sapiens; identical to SEQ ID NO: 351283
  chr12:1639655-1639890
  hyper
  liver_bileduct vs. anorectal,myeloid_neoplasm,sarcoma, multiple_myeloma,non_cancer,prostate

SEQ ID NO: 462367 - DNA, 86 bp, Homo sapiens; identical to SEQ ID NO: 452813
  chr12:4377809-4377895
  hyper
  liver_bileduct vs. lymphoid_neoplasm,colorectal,ovary, melanoma,non_cancer,myeloid_neoplasm,thyroid

SEQ ID NO: 462368 - DNA, 142 bp, Homo sapiens; identical to SEQ ID NO: 452814
  chr12:4378558-4378700
  hyper
  liver_bileduct vs. lymphoid_neoplasm,colorectal,ovary, melanoma,non_cancer,myeloid_neoplasm,thyroid

SEQ ID NO: 462369 - DNA, 245 bp, Homo sapiens; identical to SEQ ID NO: 452815
  chr12:4378558-4378803
  hyper
  liver_bileduct vs. colorectal,lymphoid_neoplasm,melanoma, myeloid_neoplasm,non_cancer,thyroid,ovary,multiple_myeloma

SEQ ID NO: 462370 - DNA, 88 bp, Homo sapiens; identical to SEQ ID NO: 454142
  chr12:4378715-4378803
  hyper
  liver_bileduct vs. melanoma,colorectal,non_cancer

SEQ ID NO: 462371 - DNA, 247 bp, Homo sapiens; identical to SEQ ID NO: 455641
  chr12:4379920-4380167
  hyper
  liver_bileduct vs. colorectal,melanoma

SEQ ID NO: 462372 - DNA, 401 bp, Homo sapiens; identical to SEQ ID NO: 455645
  chr12:4381033-4381434
  hyper
  liver_bileduct vs. colorectal

SEQ ID NO: 462373 - DNA, 202 bp, Homo sapiens; identical to SEQ ID NO: 454143
  chr12:4381232-4381434
  hyper
  liver_bileduct vs. colorectal,anorectal,myeloid_neoplasm, non_cancer,uterine,thyroid,head_and_neck,melanoma

SEQ ID NO: 462374 - DNA, 167 bp, Homo sapiens; identical to SEQ ID NO: 347205
  chr12:4382439-4382606
  hyper
  liver_bileduct vs. colorectal,anorectal,uterine, non_cancer,myeloid_neoplasm,thyroid,melanoma,multiple_myeloma

SEQ ID NO: 462375 - DNA, 51 bp, Homo sapiens; identical to SEQ ID NO: 454144
  chr12:4382915-4382966
  hyper
  liver_bileduct vs. colorectal,multiple_myeloma

SEQ ID NO: 462376 - DNA, 210 bp, Homo sapiens; identical to SEQ ID NO: 454145
  chr12:4382999-4383209
  hyper
  liver_bileduct vs. colorectal,multiple_myeloma

SEQ ID NO: 462377 - DNA, 155 bp, Homo sapiens; identical to SEQ ID NO: 345415
  chr12:4384059-4384214
  hyper
  liver_bileduct vs. colorectal,anorectal,multiple_myeloma

SEQ ID NO: 462378 - DNA, 255 bp, Homo sapiens; identical to SEQ ID NO: 455647
  chr12:4384059-4384314
  hyper
  liver_bileduct vs. multiple_myeloma,colorectal

SEQ ID NO: 462379 - DNA, 79 bp, Homo sapiens; identical to SEQ ID NO: 351309
  chr12:4384533-4384612
  hyper
  liver_bileduct vs. multiple_myeloma,colorectal

SEQ ID NO: 462380 - DNA, 557 bp, Homo sapiens; identical to SEQ ID NO: 334445
  chr12:4920230-4920787
  hyper
  liver_bileduct vs. pancreas_gallbladder, bladder_and_urothelial

SEQ ID NO: 462381 - DNA, 55 bp, Homo sapiens; identical to SEQ ID NO: 345416
  chr12:8123528-8123583
  hyper
  liver_bileduct vs. lung,breast,melanoma,prostate,sarcoma, ovary,renal,anorectal

SEQ ID NO: 462382 - DNA, 752 bp, Homo sapiens
  chr12:8849750-8850502
  hyper
  liver_bileduct vs. bladder_and_urothelial,lung,breast, cervical
cgtagcaactaacttgtccaaggtttacgccggtttctagggggcagagctggcgctatccaccccgcctgtatctccaaacccgcttcagccaggaaatttatcatgtggttttaaatttgcctctcaatatacagaggtactgtctttactccagtcccggataaagaccttctaggtatgaatgatctttgtctccatatctttgcctaccggagggaggaaccaccgtaagcggagactccgggcggcggccggcggaagggctgggcgggaggcgtcgggatgccggcaggaccctgcgcccgagggggtagggggctcgtgtcggggttccaggcgcagattgatggggcctaagcagggaatgtgagggcggggagggcgtacaacggaagggactaatctcgcggtttcgagttgggagcaaacctcgccccccaccccccccatccgtttccctttctcagtgaagacggtttgggggcgggtggggaggcgcgtcctcggagcgccctcgcgctcccttttcgctccccgcgcgcgatccatcgcctctcttcccccgaggccagcgatggctcgggtgcgggcgaggagctgggagggcggctctcgacgcaggtgtcagatccgctcggcagtgctcggcgcgctggcccggcccccagctcctccggccgccgccccccgcccgccgcgccgcggcgccaggagggcggggccggggcgcgcgccgctcctcagcaagc

SEQ ID NO: 462383 - DNA, 429 bp, Homo sapiens
  chr12:8850073-8850502
  hyper
  liver_bileduct vs. lung
cgtgtcggggttccaggcgcagattgatggggcctaagcagggaatgtgagggcggggagggcgtacaacggaagggactaatctcgcggtttcgagttgggagcaaacctcgccccccaccccccccatccgtttccctttctcagtgaagacggtttgggggcgggtggggaggcgcgtcctcggagcgccctcgcgctcccttttcgctccccgcgcgcgatccatcgcctctcttcccccgaggccagcgatggctcgggtgcgggcgaggagctgggagggcggctctcgacgcaggtgtcagatccgctcggcagtgctcggcgcgctggcccggcccccagctcctccggccgccgccccccgcccgccgcgccgcggcgccaggagggcggggccggggcgcgcgccgctcctcagcaagc

SEQ ID NO: 462384 - DNA, 311 bp, Homo sapiens
  chr12:8850744-8851055
  hyper
  liver_bileduct vs. lung
gcggaggagaaaggaggcggctcccggtatcccgaccccctccccctcctctccttcccccacttccagccgcccggcggcccgcgcttcctcgaaggccccagcccggctcagtcggccgagagcgagggaggagccccccgacccaggtgagcggtacgaccgctgttgccctcgggtgtagagcagtgaggcgaaggcgcgccctcccgagtgggcgagttcagcggaatggatcccccgattagcgggggctgggccggggaggggaccggcccgagcgcgcccggggtccggggctagttgaggcc

SEQ ID NO: 462385 - DNA, 311 bp, Homo sapiens; identical to SEQ ID NO: 462384
  chr12:8850744-8851055
  hyper
  liver_bileduct vs. lung

SEQ ID NO: 462386 - DNA, 113 bp, Homo sapiens; identical to SEQ ID NO: 347213
  chr12:8851275-8851388
  hyper
  liver_bileduct vs. lung

SEQ ID NO: 462387 - DNA, 6 bp, Homo sapiens
  chr12:22488262-22488268
  hyper
  liver_bileduct vs. sarcoma
gcgccc

SEQ ID NO: 462388 - DNA, 176 bp, Homo sapiens; identical to SEQ ID NO: 351342
  chr12:48398744-48398920
  hyper
  liver_bileduct vs. anorectal,lung,uterine,cervical, prostate,sarcoma,upper_gi

SEQ ID NO: 462389 - DNA, 494 bp, Homo sapiens; identical to SEQ ID NO: 457433
  chr12:48576976-48577470
  hyper
  liver_bileduct vs. bladder_and_urothelial,lung,sarcoma, anorectal,ovary,melanoma,prostate,head_and_neck,uterine,breast, non_cancer,myeloid_neoplasm,lymphoid_neoplasm

SEQ ID NO: 462390 - DNA, 409 bp, Homo sapiens; identical to SEQ ID NO: 457434
  chr12:48577061-48577470
  hyper
  liver_bileduct vs. anorectal,sarcoma,non_cancer,thyroid, melanoma,prostate,uterine

SEQ ID NO: 462391 - DNA, 939 bp, Homo sapiens; identical to SEQ ID NO: 334505
  chr12:48591606-48592545
  hyper
  liver_bileduct vs. pancreas_gallbladder

SEQ ID NO: 462392 - DNA, 381 bp, Homo sapiens; identical to SEQ ID NO: 334511
  chr12:49582713-49583094
  hyper
  liver_bileduct vs. lung

SEQ ID NO: 462393 - DNA, 3 bp, Homo sapiens
  chr12:52401537-52401540
  hyper
  liver_bileduct vs. melanoma,anorectal,thyroid, head_and_neck
tcc

SEQ ID NO: 462394 - DNA, 54 bp, Homo sapiens; identical to SEQ ID NO: 347231
  chr12:52401605-52401659
  hyper
  liver_bileduct vs. melanoma,anorectal,thyroid, head_and_neck

SEQ ID NO: 462395 - DNA, 58 bp, Homo sapiens; identical to SEQ ID NO: 455665
  chr12:54144782-54144840
  hyper
  liver_bileduct vs. ovary

SEQ ID NO: 462396 - DNA, 180 bp, Homo sapiens
  chr12:54378541-54378721
  hyper
  liver_bileduct vs. sarcoma
cgggttgcctcgctctctccctctctcccgcatttcccccctctccgcccccttctccccaggagttacaggctggttactggataaacaaaccccactcttcctagaacccccacccccacccccacccccctccacccctctacctcccctgccgcccggggggcgcttcctttgttc

SEQ ID NO: 462397 - DNA, 220 bp, Homo sapiens
  chr12:54447599-54447819
  hyper
  liver_bileduct vs. upper_gi
ggagtcacatggtgaaagtaactttacagggtcgctagctagtaggagggctttatggagcagaaaaacgacaaagcgagaaaaattattttccactccagaaattaatgatcatgagctcgtatttgatggactctaactacatcgatccgaaatttcctccatgcgaagaatattcgcaaaatagctacatccctgaacacagtccggaatattacgg

SEQ ID NO: 462398 - DNA, 261 bp, Homo sapiens; identical to SEQ ID NO: 360126
  chr12:54448041-54448302
  hyper
  liver_bileduct vs. upper_gi

SEQ ID NO: 462399 - DNA, 30 bp, Homo sapiens; identical to SEQ ID NO: 455672
  chr12:54521011-54521041
  hyper
  liver_bileduct vs. pancreas_gallbladder,cervical

SEQ ID NO: 462400 - DNA, 3 bp, Homo sapiens
  chr12:66582719-66582722
  hyper
cgc

SEQ ID NO: 462401 - DNA, 479 bp, Homo sapiens; identical to SEQ ID NO: 457449
  chr12:70760478-70760957
  hyper
  liver_bileduct vs. bladder_and_urothelial

SEQ ID NO: 462402 - DNA, 82 bp, Homo sapiens; identical to SEQ ID NO: 351391
  chr12:70761129-70761211
  hyper
  liver_bileduct vs. bladder_and_urothelial

SEQ ID NO: 462403 - DNA, 86 bp, Homo sapiens; identical to SEQ ID NO: 360161
  chr12:81102562-81102648
  hyper
  liver_bileduct vs. myeloid_neoplasm

SEQ ID NO: 462404 - DNA, 212 bp, Homo sapiens; identical to SEQ ID NO: 334635
  chr12:104443924-104444136
  hyper
  liver_bileduct vs. ovary

SEQ ID NO: 462405 - DNA, 349 bp, Homo sapiens; identical to SEQ ID NO: 459395
  chr12:104851545-104851894
  hyper
  liver_bileduct vs. melanoma

SEQ ID NO: 462406 - DNA, 161 bp, Homo sapiens; identical to SEQ ID NO: 360215
  chr12:117316504-117316665
  hyper
  liver_bileduct vs. upper_gi

SEQ ID NO: 462407 - DNA, 89 bp, Homo sapiens
  chr12:122667648-122667737
  hyper
  liver_bileduct vs. sarcoma,bladder_and_urothelial,ovary
cgcgcacgcgtcctagcggttgccgggcaacgcggcccgggccatggaggcgtcgtacgagtccgagtccgagtccgagtctgaggccg

SEQ ID NO: 462408 - DNA, 15 bp, Homo sapiens
  chr12:122667899-122667914
  hyper
  liver_bileduct vs. sarcoma,bladder_and_urothelial,ovary
ccgggcgagcggagc

SEQ ID NO: 462409 - DNA, 65 bp, Homo sapiens
  chr12:122688584-122688649
  hyper
  liver_bileduct vs. anorectal,cervical,myeloid_neoplasm
cgggcgcggtagaccccgccagcctgggccgcccgcgcccgacgcgcagcgctgctgccaacccc

SEQ ID NO: 462410 - DNA, 385 bp, Homo sapiens
  chr12:124246524-124246909
  hyper
  liver_bileduct vs. pancreas_gallbladder
cggtcggcgtggggtggggtcgcaccctcggctgcagcggcccgagggcggctcctggcggcgagggtcccgctccgcatccaggggcgtgcgcgctgccggggccagggagcaaccagcctacctcggcggcccgggggcctggtgcgcgcctccgagatcccggggccggggcgtgggctgcggctcgcgggttcgggatcgaggggccgggcgcggggcactgccgagcttgcagcccccagcgccggcgccgtcggcggggcgagctgcggccgtttccggggcgcccattgctagggccgccgttgccacggacgcccgccctgcgcccggctccctctgcactgcgcggcgccatggacgacctgcgggtgctgtggat

SEQ ID NO: 462411 - DNA, 54 bp, Homo sapiens; identical to SEQ ID NO: 373195
  chr12:124246937-124246991
  hyper
  liver_bileduct vs. pancreas_gallbladder

SEQ ID NO: 462412 - DNA, 108 bp, Homo sapiens
  chr12:132312451-132312559
  hyper
  liver_bileduct vs. lung,breast,sarcoma
cgcagggaccgcagagcctccgccgaggaccccagcccccccaacacccgccctcgccctccagtcccccgcgccccccaagccccaccctccctctcccgcggtccg

SEQ ID NO: 462413 - DNA, 246 bp, Homo sapiens; identical to SEQ ID NO: 351438
  chr12:132313659-132313905
  hyper
  liver_bileduct vs. lung,breast,ovary,sarcoma

SEQ ID NO: 462414 - DNA, 3 bp, Homo sapiens
  chr12:133484584-133484587
  hyper
  liver_bileduct vs. bladder_and_urothelial,breast, prostate,ovary,sarcoma,thyroid,non_cancer,uterine
cgc

SEQ ID NO: 462415 - DNA, 168 bp, Homo sapiens
  chr13:20735265-20735433
  hyper
  liver_bileduct vs. head_and_neck,uterine, bladder_and_urothelial,cervical,non_cancer,colorectal,anorectal, thyroid,ovary,myeloid_neoplasm,multiple_myeloma,upper_gi,breast
cgcgcgcttcccagcacgcacacctaccgcccccgcatccctaccctgtacgcgcagccacagcactcgcccgcgtccgcattccacaccctaccccgcgcgcacgtccatgcctagcgcctgcatccccatcccgcacctgcgcgggccctggggatgtggacgcgg

SEQ ID NO: 462416 - DNA, 14 bp, Homo sapiens
  chr13:22243231-22243245
  hyper
  liver_bileduct vs. uterine,myeloid_neoplasm,thyroid
cgcttttttcccca

SEQ ID NO: 462417 - DNA, 142 bp, Homo sapiens; identical to SEQ ID NO: 351449
  chr13:22243864-22244006
  hyper
  liver_bileduct vs. uterine,myeloid_neoplasm,thyroid

SEQ ID NO: 462418 - DNA, 58 bp, Homo sapiens; identical to SEQ ID NO: 457477
  chr13:28540416-28540474
  hyper
  liver_bileduct vs. colorectal

SEQ ID NO: 462419 - DNA, 112 bp, Homo sapiens; identical to SEQ ID NO: 360268
  chr13:28541283-28541395
  hyper
  liver_bileduct vs. colorectal

SEQ ID NO: 462420 - DNA, 108 bp, Homo sapiens
  chr13:45149906-45150014
  hyper
  liver_bileduct vs. lung,upper_gi
cgcctggcgcaagaggctgtgcctgcagctgagcctgcgaaaggaggttcaggctttgtggaggcggaggctgtggtcccgacgtagaagatgctgcagggggcggcg

SEQ ID NO: 462421 - DNA, 141 bp, Homo sapiens; identical to SEQ ID NO: 351474
  chr13:45150276-45150417
  hyper
  liver_bileduct vs. lung,upper_gi

SEQ ID NO: 462422 - DNA, 112 bp, Homo sapiens
  chr13:77459256-77459368
  hyper
  liver_bileduct vs. lung,pancreas_gallbladder
cgggcaggagaaggactgggcgctggagtggcgagggggtctggggagctcactccctgcagaagacgtactcggtgtagctggtccagatcttgtcctcgctctggtcggt

SEQ ID NO: 462423 - DNA, 420 bp, Homo sapiens
  chr13:77459628-77460048
  hyper
  liver_bileduct vs. lung,pancreas_gallbladder
tgtaggagccgcggtagccgatggtgatgtagcccgagcgccggctgccgtccagcgactgggacggcgtgagcagcgggcccgccgcgcccccggacggactgcggctagccagctccagcgtgggcgacggcgccccggcagaggcgccctcctgctgttcgggctccgagtagccaagcggcagcagctcgtcacccagcgagccctccttgtgcaccccgcgccgcgagggcggcggccccgggccgggctgctggggcgccccgaggcggcgcacgagctctggcagctcgaagtactcggcctcgcgctgcagccggctgcgctcggggaagtagtcgggcagcacgagctgcaagtcccgcaggtaatccaggatgtagcggaagaggaagccgtcccggtccagaaagaagc

SEQ ID NO: 462424 - DNA, 718 bp, Homo sapiens; identical to SEQ ID NO: 347268
  chr13:77459628-77460346
  hyper
  liver_bileduct vs. lung,pancreas_gallbladder,sarcoma, renal,ovary,head_and_neck

SEQ ID NO: 462425 - DNA, 3 bp, Homo sapiens
  chr13:107187160-107187163
  hyper
  liver_bileduct vs. lung,pancreas_gallbladder
gga

SEQ ID NO: 462426 - DNA, 241 bp, Homo sapiens
  chr13:107187426-107187667
  hyper
  liver_bileduct vs. lung,pancreas_gallbladder
ggcagctccgaggcgcgctgcgcagctccagcggtcgccgggccaggtgcgctcgctctccggggccctcagggcgcggggcgggagcgcacgcgcggggcgcggcggcgcggcggactcggggttccggggcgccgcgccggacgcagctcggacggccgactcccgtgcggctccagggtgccgggccggccgcggctggcgggtgggcgcggggcgggtgcgggctgggacacaaaga

SEQ ID NO: 462427 - DNA, 102 bp, Homo sapiens
  chr13:107187695-107187797
  hyper
  liver_bileduct vs. lung,pancreas_gallbladder
gcgggcgctgcgccccgagcggggccgcctgtgactatagatccagtgcagcgggcagcggcccgagcgcgcgggcgccgcgtcggcgcggttccatgtccc

SEQ ID NO: 462428 - DNA, 241 bp, Homo sapiens; identical to SEQ ID NO: 462426
  chr13:107187426-107187667
  hyper
  liver_bileduct vs. pancreas_gallbladder

SEQ ID NO: 462429 - DNA, 547 bp, Homo sapiens
  chr13:107187695-107188242
  hyper
  liver_bileduct vs. pancreas_gallbladder
gcgggcgctgcgccccgagcggggccgcctgtgactatagatccagtgcagcgggcagcggcccgagcgcgcgggcgccgcgtcggcgcggttccatgtcccggagcacggagcggagtagggcgcctccgggcgcgcaggagccttctcagtccgcgcggctcccggcccccagggcaggaaagagggagctcggtccccgccgcgggctccggacgcgcgcgggcctttgtgtgcggggagggcgccgggacccgctgcgtgcgcagctcctcgctccggccggcgccgcggtccccgccgaggagagtcagcgcggccgccgcgctgtcagagcgctataaacgcggggccccgccccgccgcgcgaagcccattggcccgcggctccgcggccgcgcgctggttggacggccggtccgtccgtccgccatcccctcccgacattgggtgccgcgaggcggggctcgggctgacaggtgagccccgcccctggctcccgcgggcggcgggagcggagcagaagccgggcaggagaagcgctcag

SEQ ID NO: 462430 - DNA, 439 bp, Homo sapiens
  chr13:107187803-107188242
  hyper
  liver_bileduct vs. upper_gi
cggagcggagtagggcgcctccgggcgcgcaggagccttctcagtccgcgcggctcccggcccccagggcaggaaagagggagctcggtccccgccgcgggctccggacgcgcgcgggcctttgtgtgcggggagggcgccgggacccgctgcgtgcgcagctcctcgctccggccggcgccgcggtccccgccgaggagagtcagcgcggccgccgcgctgtcagagcgctataaacgcggggccccgccccgccgcgcgaagcccattggcccgcggctccgcggccgcgcgctggttggacggccggtccgtccgtccgccatcccctcccgacattgggtgccgcgaggcggggctcgggctgacaggtgagccccgcccctggctcccgcgggcggcgggagcggagcagaagccgggcaggagaagcgctcag

SEQ ID NO: 462431 - DNA, 309 bp, Homo sapiens
  chr13:107188430-107188739
  hyper
  liver_bileduct vs. upper_gi
ctccgcagatgcggcgctgccccgcgtgcaagacttgcactccgcgcgcacccttagagctcccggcttctgcgcgcttctcccgacgcctctcggcgagggcttctcacttgattttggtaccaatcgcctacggctcagtttcagtcagtggggccgggaattgcaagacgattcctgcgacgcggcgccggaatttgcagctctaatcagggcctgagcatcgtcgcctcccgccttctctgcgggcgtctcccttccctcctggccccccgggaaggtggcgcccctggagctttccccgcgtgt

SEQ ID NO: 462432 - DNA, 309 bp, Homo sapiens; identical to SEQ ID NO: 462431
  chr13:107188430-107188739
  hyper
  liver_bileduct vs. lung

SEQ ID NO: 462433 - DNA, 280 bp, Homo sapiens
  chr13:107188808-107189088
  hyper
  liver_bileduct vs. lung
ccagagatttagagggtgtgagatggaaaagtcaaggcatgtgcttctcactcggcgtctgcaagaccccagagcagagctggcaggaactcctcgctactttcccggtcgagcgccggtgctgacgctcgtccgtgacttccacggagccacagcgcccactagcggccagctttgcttctccgcatctcgagcgctctgcggtccaccgacccggatccagcatactgcagcatctaatcaagtcacagttccaaggaaaatctttttatatgtccaa

SEQ ID NO: 462434 - DNA, 15 bp, Homo sapiens
  chr13:107189117-107189132
  hyper
  liver_bileduct vs. lung
acagtgcaaatgtac

SEQ ID NO: 462435 - DNA, 77 bp, Homo sapiens
  chr14:24808635-24808712
  hyper
  liver_bileduct vs. colorectal,upper_gi,cervical, pancreas_gallbladder
cggctggggtcaaccggggtcactcacgagtttacgatcttgaccgccacatcgtagccccacttcctatgttgcgc

SEQ ID NO: 462436 - DNA, 84 bp, Homo sapiens; identical to SEQ ID NO: 351525
  chr14:24808863-24808947
  hyper
  liver_bileduct vs. colorectal,upper_gi,cervical, pancreas_gallbladder

SEQ ID NO: 462437 - DNA, 439 bp, Homo sapiens
  chr14:36003004-36003443
  hyper
  liver_bileduct vs. prostate,sarcoma,head_and_neck, anorectal,melanoma,cervical,ovary,breast
gcggagggcgtcgtgaggtggccttttcgcccggctccccagtgggacgctccgcggaggcagccaaggcggggagtgtcgagctccctcacactctggaccttaccttctggcgtcttcgcccgggaggctgcagggggaggcggacccagccggccacaggggcaggttcgcggcgctgtgaggcggggctgggcgtgcgccgccgccgccgccagattcgtctactccagtgaatcggcacgggagaaagccccgcccccggcgcccgctcccactcctgattggccgggccagcccggggaggcccggcgggaccccggcccgcgtctcagctataaagatagccccggcatgacagccgcggcgaagctcttctagttcatctgctggccggctctcagtccccgtggcgccccctttcctcttgtcccagagc

SEQ ID NO: 462438 - DNA, 150 bp, Homo sapiens
  chr14:36003293-36003443
  hyper
  liver_bileduct vs. thyroid,prostate,melanoma,breast
cgggccagcccggggaggcccggcgggaccccggcccgcgtctcagctataaagatagccccggcatgacagccgcggcgaagctcttctagttcatctgctggccggctctcagtccccgtggcgccccctttcctcttgtcccagagc

SEQ ID NO: 462439 - DNA, 1 bp, Homo sapiens
  chr14:37050213-37050214
  hyper
  liver_bileduct vs. lung
c

SEQ ID NO: 462440 - DNA, 255 bp, Homo sapiens
  chr14:37050246-37050501
  hyper
  liver_bileduct vs. lung
ccgcggcggttcccacctcgccaccgccgccgccgccgcacggctgcccgtcgcgaacaagcaccggcaccaccacgcgacgcagcaggccgggcgcggcgtgcagctcggcggatgctgccaggtcaggcgactccgccgcccctggagcgcgagcgcgcttcagcttgtagcgatgattctggaaccagatcttgacctgcgtgggcgtgaggcgaagcaggctcgccagctgctcgcgctcgggcgcagaca

SEQ ID NO: 462441 - DNA, 214 bp, Homo sapiens
  chr14:37050539-37050753
  hyper
  liver_bileduct vs. lung
gtctgcgccttggagaatagcacccgccgcttcttccttttctcggcgtccgagcccggagacgcgggcctagcggacggccgctgcgacgagtctggcgggctggtctccaggctgctctcgtccgaggctagggacagcaaaggagacacgggtgggtgagacgccggaccctacgagggcctgctgcccttctggcgcgggcgtggaggca

SEQ ID NO: 462442 - DNA, 251 bp, Homo sapiens
  chr14:37050794-37051045
  hyper
  liver_bileduct vs. lung
gaggccatttcctgagtccacatctggacatccacctctccgaatgcggtgacctcattcataccacagcggtcatcagcgggcctgagatcgtgccccgaaaaaacccaccccggggccctcttaacatgtccgcaccggtagttgcgctggccgaccagtttatcacaagctgggtcaccagcgccggcctcctccaggtcgactgcactgcagtgtgccgaggtttgcggagccctgagtgggaacgg

SEQ ID NO: 462443 - DNA, 712 bp, Homo sapiens
  chr14:51027134-51027846
  hyper
  liver_bileduct vs. lung,pancreas_gallbladder
gacgggccgtagccgagccgctccctgtttgggcggaggaaccatggccgagcggtacccgcgtcaccgaatcgcgctgtcggggtgagggctgcagcttcgcgcaggccgggcctccagctccttcttccccacccccctcccgcctcctcccagcatttggacagcacccaccaggcgcctccggggacttgtgggttccgccttagcgatcggttgggaggaaggctatgggggtgggcagggggctgttgttactcggccccagaggggcgaggggtcggggatctagagcaggccaagccccaacccccctccccgggagccgccaactcgctggctctgcagggcgcgggctcccggcggcgggcggcgggcggcgcgctggaacaatgaggcggagcgcgccgggtcccggacggacggtagcagaccgagcaactgggagaagggccaccctcttgggaattcctgagcactgcagtactcctcttaatttgggggttgggtgggggaattggggaagaaggagagcaaagttgtggtttccagccttctgccccaccccgacgtggtaccccattcagaccagccccaagggtggctttgttctttgattttaccttttggagacattgggctcatgattcagcaccaggccgaggggaggggaaaggagaggcgagacccagtatgttcacaccgcgagtgg

SEQ ID NO: 462444 - DNA, 104 bp, Homo sapiens; identical to SEQ ID NO: 360427
  chr14:51027881-51027985
  hyper
  liver_bileduct vs. lung,pancreas_gallbladder

SEQ ID NO: 462445 - DNA, 85 bp, Homo sapiens
  chr14:54423285-54423370
  hyper
  liver_bileduct vs. lung,upper_gi
cgggctcgccagcagcagctcctggggacctctgaacggttgcagtgaacctgggcgagggccggggactgtggcgctgcaggct

SEQ ID NO: 462446 - DNA, 24 bp, Homo sapiens
  chr14:54423475-54423499
  hyper
  liver_bileduct vs. lung,upper_gi
cctagcttccgggccgggctccgc

SEQ ID NO: 462447 - DNA, 129 bp, Homo sapiens
  chr14:55595810-55595939
  hyper
  liver_bileduct vs. upper_gi,pancreas_gallbladder, head_and_neck
cgcccctgcggcggcggctcggggtgtctggccggcgcggggctcgcccagcctggtccggggagaggactggctgggcaggggcgccgccccgcctcgggagaggcgggccgggcggggctgggagta

SEQ ID NO: 462448 - DNA, 134 bp, Homo sapiens
  chr14:55595968-55596102
  hyper
  liver_bileduct vs. upper_gi,pancreas_gallbladder, head_and_neck
cgcccgcagcacctcctcgccagcagccgtccggagccagccaacgagcggtgagctgcgcggggcgcgggggacgcggctccggccgggcaggggagagggcgcccgggcgctgcttggggcgcggtccggag

SEQ ID NO: 462449 - DNA, 437 bp, Homo sapiens; identical to SEQ ID NO: 347298
  chr14:55596153-55596590
  hyper
  liver_bileduct vs. upper_gi,pancreas_gallbladder, head_and_neck

SEQ ID NO: 462450 - DNA, 62 bp, Homo sapiens; identical to SEQ ID NO: 455696
  chr14:60794412-60794474
  hyper
  liver_bileduct vs. bladder_and_urothelial

SEQ ID NO: 462451 - DNA, 134 bp, Homo sapiens; identical to SEQ ID NO: 351568
  chr14:60982999-60983133
  hyper
  liver_bileduct vs. non_cancer,bladder_and_urothelial

SEQ ID NO: 462452 - DNA, 167 bp, Homo sapiens; identical to SEQ ID NO: 345459
  chr14:61104864-61105031
  hyper
  liver_bileduct vs. myeloid_neoplasm,multiple_myeloma, non_cancer

SEQ ID NO: 462453 - DNA, 182 bp, Homo sapiens
  chr14:61113933-61114115
  hyper
  liver_bileduct vs. head_and_neck,lung, bladder_and_urothelial,prostate,anorectal,cervical,uterine, breast,non_cancer
cggccctcgggcctggcttataggacggccgttttgtaactaaaggctaactgcaaccatacaatccctgttcctgtgttacttgctaactcttcagcccctcgtgtccccctctcaaacttcctaccaacacccaccccaacccatcctttctgggcaggggaaacttcgccgccccgcac

SEQ ID NO: 462454 - DNA, 33 bp, Homo sapiens; identical to SEQ ID NO: 347303
  chr14:61114722-61114755
  hyper
  liver_bileduct vs. head_and_neck,lung, bladder_and_urothelial,prostate,anorectal,cervical,uterine, breast,non_cancer

SEQ ID NO: 462455 - DNA, 276 bp, Homo sapiens
  chr14:61114722-61114998
  hyper
  liver_bileduct vs. bladder_and_urothelial,anorectal, cervical,lung
tcttaatttggggcgccggggagtaaatgcagcgccaactctccccaaagctctctttttgttgtatctttaaaagtctcctccatttgtccagctagtgagaaatgaagcaggctacctctaaaccaaaagactatcaagagagagctgtggagaaccaggcgggagtgggggcagagccaatgtctcaggccagcttcacccctctggggagcaagaggagagaggttcgcgaacctcagctcccaccaaacccctttccttgcgacaccaatc

SEQ ID NO: 462456 - DNA, 167 bp, Homo sapiens; identical to SEQ ID NO: 334946
  chr14:64805585-64805752
  hyper
  liver_bileduct vs. upper_gi,lung,head_and_neck, pancreas_gallbladder

SEQ ID NO: 462457 - DNA, 9 bp, Homo sapiens
  chr14:70654358-70654367
  hyper
  liver_bileduct vs. multiple_myeloma
cgcgcgcgc

SEQ ID NO: 462458 - DNA, 50 bp, Homo sapiens
  chr14:74208160-74208210
  hyper
  liver_bileduct vs. renal,colorectal, bladder_and_urothelial,multiple_myeloma,pancreas_gallbladder
cgggcggctctgaagaggaaatctcaggccctagatgctacaggtcattg

SEQ ID NO: 462459 - DNA, 26 bp, Homo sapiens
  chr14:74208319-74208345
  hyper
  liver_bileduct vs. renal,colorectal, bladder_and_urothelial,multiple_myeloma,pancreas_gallbladder
accaggaatgcccctcccaggctatc

SEQ ID NO: 462460 - DNA, 67 bp, Homo sapiens
  chr14:77228490-77228557
  hyper
  liver_bileduct vs. anorectal,ovary
cgcaggcggggaatgtgcgcgtcggcgcgcgccccctccccgctcccggccagctgcgagtcttggc

SEQ ID NO: 462461 - DNA, 83 bp, Homo sapiens
  chr14:77965137-77965220
  hyper
  liver_bileduct vs. bladder_and_urothelial,ovary,prostate, head_and_neck,uterine
gtctcggttccgaggctgctctgcctgcacctctgcacgcggccgcgaacccagtcgcgccccgcctcgcctcctccgggggc

SEQ ID NO: 462462 - DNA, 181 bp, Homo sapiens
  chr14:77965244-77965425
  hyper
  liver_bileduct vs. bladder_and_urothelial,ovary,prostate, head_and_neck,uterine
cgcggggcacggggccgcgcggggcgggggcgcgcagctcgcacagcctctctggccccggctcctcgcgtgggcgcccgcacagctctagggtccgcgcacctggacgtcccccaccctcctccgaggggcccctcggcgctccccgacccgtcttgaccctgtgggcggctctctttga

SEQ ID NO: 462463 - DNA, 3 bp, Homo sapiens
  chr15:34728787-34728790
  hyper
  liver_bileduct vs. cervical,anorectal,head_and_neck, breast,sarcoma
cgc

SEQ ID NO: 462464 - DNA, 12 bp, Homo sapiens
  chr15:34728813-34728825
  hyper
  liver_bileduct vs. cervical,anorectal,head_and_neck, breast,sarcoma
cgcgtcggcccg

SEQ ID NO: 462465 - DNA, 25 bp, Homo sapiens
  chr15:34729636-34729661
  hyper
  liver_bileduct vs. cervical,anorectal,head_and_neck, breast,sarcoma
ctcgccgcgccgccgtcctcgccgc

SEQ ID NO: 462466 - DNA, 47 bp, Homo sapiens
  chr15:34729898-34729945
  hyper
  liver_bileduct vs. head_and_neck,cervical, bladder_and_urothelial,breast,uterine
cgccgccgtcctcgccgcgccgctgccgggtctctcccgggggctga

SEQ ID NO: 462467 - DNA, 72 bp, Homo sapiens; identical to SEQ ID NO: 351658
  chr15:34730043-34730115
  hyper
  liver_bileduct vs. head_and_neck,cervical, bladder_and_urothelial,breast,uterine

SEQ ID NO: 462468 - DNA, 162 bp, Homo sapiens
  chr15:40575352-40575514
  hyper
  liver_bileduct vs. anorectal,cervical
cggcgcgggagctgccgcccgcctagatacctgactttatagccttgggggtctccatggcaatggctgtcctgggagcggactgcgccgtcagggcagagacggacggggcgggggagaccgctcctgacccccaccccttcgtgggccacgaagtagggg

SEQ ID NO: 462469 - DNA, 6 bp, Homo sapiens
  chr15:41805862-41805868
  hyper
  liver_bileduct vs. sarcoma,head_and_neck, bladder_and_urothelial,multiple_myeloma,cervical,anorectal, myeloid_neoplasm
acccgc

SEQ ID NO: 462470 - DNA, 205 bp, Homo sapiens; identical to SEQ ID NO: 455707
  chr15:41805870-41806075
  hyper
  liver_bileduct vs. sarcoma,head_and_neck, bladder_and_urothelial,multiple_myeloma,cervical,anorectal, myeloid_neoplasm

SEQ ID NO: 462471 - DNA, 135 bp, Homo sapiens; identical to SEQ ID NO: 345469
  chr15:41953174-41953309
  hyper
  liver_bileduct vs. cervical,ovary,lung,thyroid,anorectal, prostate

SEQ ID NO: 462472 - DNA, 105 bp, Homo sapiens
  chr15:45421846-45421951
  hyper
  liver_bileduct vs. bladder_and_urothelial,anorectal
tggagcccagacccgacggtgtcgagaggatctgaggagagtctcccctccccataccctctccgcctcccaccctctccccagccccatgggacttgtgaaggc

SEQ ID NO: 462473 - DNA, 78 bp, Homo sapiens; identical to SEQ ID NO: 452897
  chr15:48936649-48936727
  hyper
  liver_bileduct vs. sarcoma

SEQ ID NO: 462474 - DNA, 5 bp, Homo sapiens
  chr15:55879808-55879813
  hyper
  liver_bileduct vs. lung,bladder_and_urothelial,breast, melanoma,ovary,sarcoma
cgaac

SEQ ID NO: 462475 - DNA, 1 bp, Homo sapiens
  chr15:59729552-59729553
  hyper
  liver_bileduct vs. ovary,sarcoma,uterine
c

SEQ ID NO: 462476 - DNA, 102 bp, Homo sapiens
  chr15:59729555-59729657
  hyper
  liver_bileduct vs. ovary,sarcoma,uterine
gtcccccgcaactccgctgaaatcctgcccaccgagaggaagcacaattatgagtgaatgggcttgtgcgtcctgatgagaatccaaaatcgagaggaaggt

SEQ ID NO: 462477 - DNA, 91 bp, Homo sapiens; identical to SEQ ID NO: 347343
  chr15:59729815-59729906
  hyper
  liver_bileduct vs. ovary,sarcoma,uterine

SEQ ID NO: 462478 - DNA, 30 bp, Homo sapiens; identical to SEQ ID NO: 455710
  chr15:68260709-68260739
  hyper
  liver_bileduct vs. sarcoma,multiple_myeloma

SEQ ID NO: 462479 - DNA, 27 bp, Homo sapiens
  chr15:72612514-72612541
  hyper
  liver_bileduct vs. lung,head_and_neck,breast,ovary, bladder_and_urothelial,upper_gi,multiple_myeloma
cgagccccagcccccgtgcttggtgac

SEQ ID NO: 462480 - DNA, 79 bp, Homo sapiens; identical to SEQ ID NO: 347351
  chr15:72612906-72612985
  hyper
  liver_bileduct vs. lung,head_and_neck,breast,ovary, bladder_and_urothelial,upper_gi,multiple_myeloma

SEQ ID NO: 462481 - DNA, 247 bp, Homo sapiens; identical to SEQ ID NO: 291013
  chr15:75248843-75249090
  hyper
  liver_bileduct vs. melanoma

SEQ ID NO: 462482 - DNA, 24 bp, Homo sapiens
  chr15:76627485-76627509
  hyper
  liver_bileduct vs. thyroid,myeloid_neoplasm,uterine, non_cancer
cggaccggtgagaagactagacct

SEQ ID NO: 462483 - DNA, 28 bp, Homo sapiens
  chr15:76628038-76628066
  hyper
  liver_bileduct vs. thyroid,myeloid_neoplasm,uterine, non_cancer
actgtaaattacccagcgccttacgttc

SEQ ID NO: 462484 - DNA, 25 bp, Homo sapiens
  chr15:76639451-76639476
  hyper
  liver_bileduct vs. bladder_and_urothelial, myeloid_neoplasm,non_cancer,prostate,cervical
cggccgacacttgcctccgtacccc

SEQ ID NO: 462485 - DNA, 12 bp, Homo sapiens
  chr15:76639743-76639755
  hyper
  liver_bileduct vs. bladder_and_urothelial, myeloid_neoplasm,non_cancer,prostate,cervical
ctggacacccgc

SEQ ID NO: 462486 - DNA, 195 bp, Homo sapiens
  chr15:82339684-82339879
  hyper
  liver_bileduct vs. ovary,anorectal,breast,uterine, myeloid_neoplasm,prostate,thyroid,head_and_neck
cgggccggggcggtgcgcgctggtcctctccgcgcgcatccccctccgccgcccactagggcggacgccccttcgggccccgcgcgctctgctgtcctttgttccgggagccgccgggctcgccgcgccctttgcgtcccgctgcggatcgttccgcagagcggctgggcccgcggttcatagagtcgcccaaga

SEQ ID NO: 462487 - DNA, 7 bp, Homo sapiens
  chr15:82340207-82340214
  hyper
  liver_bileduct vs. ovary,anorectal,breast,uterine, myeloid_neoplasm,prostate,thyroid,head_and_neck
cttcacc

SEQ ID NO: 462488 - DNA, 35 bp, Homo sapiens; identical to SEQ ID NO: 457571
  chr15:89942592-89942627
  hyper
  liver_bileduct vs. anorectal,breast,uterine

SEQ ID NO: 462489 - DNA, 110 bp, Homo sapiens
  chr15:91427360-91427470
  hyper
  liver_bileduct vs. pancreas_gallbladder,multiple_myeloma, bladder_and_urothelial
cgcggacaccctgggcttccctgggcccagcatctgcctggggcctcgccctgggctccccctcctgacccccaccttgcgccccttcccggtgttcccggggcgctgcc

SEQ ID NO: 462490 - DNA, 77 bp, Homo sapiens; identical to SEQ ID NO: 351744
  chr15:91427979-91428056
  hyper
  liver_bileduct vs. pancreas_gallbladder,multiple_myeloma, bladder_and_urothelial

SEQ ID NO: 462491 - DNA, 1 bp, Homo sapiens
  chr15:93631396-93631397
  hyper
  liver_bileduct vs. lung
c

SEQ ID NO: 462492 - DNA, 79 bp, Homo sapiens
  chr15:99192824-99192903
  hyper
  liver_bileduct vs. lung
cggaggagggtccccgacctcgctgtgggggctcctgtttctctccgccgcgctctcgctctggccgacgagtggagaa

SEQ ID NO: 462493 - DNA, 266 bp, Homo sapiens
  chr15:99192941-99193207
  hyper
  liver_bileduct vs. lung
cttttcctccgaggggctgcgccctgtttgcgaaacccgagttgccaccgtcgcagctgtcgggcccccgggctcgggagcggcggggtggggcgcagggcggctctgccgggagggaggctgcagcggacccgggacccgggctcgttcgtctggagccccgcgggccctggctccgcgcatccccgcgcgggaagggcttttctctttctccgtcctgacagcccagccgtgtttcccggctaggcgcgaggactcggtaggga

SEQ ID NO: 462494 - DNA, 20 bp, Homo sapiens
  chr15:99193667-99193687
  hyper
  liver_bileduct vs. lung
gcttgtctcttccggggagc

SEQ ID NO: 462495 - DNA, 518 bp, Homo sapiens; identical to SEQ ID NO: 455718
  chr15:101459489-101460007
  hyper
  liver_bileduct vs. pancreas_gallbladder, lymphoid_neoplasm,colorectal,bladder_and_urothelial,anorectal

SEQ ID NO: 462496 - DNA, 50 bp, Homo sapiens; identical to SEQ ID NO: 351759
  chr15:101460335-101460385
  hyper
  liver_bileduct vs. pancreas_gallbladder, lymphoid_neoplasm,colorectal,bladder_and_urothelial,anorectal

SEQ ID NO: 462497 - DNA, 48 bp, Homo sapiens; identical to SEQ ID NO: 345484
  chr16:2042503-2042551
  hyper
  liver_bileduct vs. thyroid,myeloid_neoplasm,non_cancer, melanoma,cervical,prostate,anorectal,head_and_neck

SEQ ID NO: 462498 - DNA, 97 bp, Homo sapiens
  chr16:2042503-2042600
  hyper
  liver_bileduct vs. cervical,non_cancer
cgggacctcgcgccacgcggcgagcccaggcgaggcgccccaagcctcgggcccaccgacctttcctcctccgggcgaggccgccgtgggccaccgc

SEQ ID NO: 462499 - DNA, 226 bp, Homo sapiens; identical to SEQ ID NO: 360772
  chr16:2042617-2042843
  hyper
  liver_bileduct vs. cervical,non_cancer

SEQ ID NO: 462500 - DNA, 275 bp, Homo sapiens; identical to SEQ ID NO: 455722
  chr16:2391769-2392044
  hyper
  liver_bileduct vs. anorectal

SEQ ID NO: 462501 - DNA, 18 bp, Homo sapiens
  chr16:3234164-3234182
  hyper
  liver_bileduct vs. multiple_myeloma,thyroid,non_cancer
cgcacccaaagcgagaat

SEQ ID NO: 462502 - DNA, 50 bp, Homo sapiens; identical to SEQ ID NO: 452914
  chr16:3238043-3238093
  hyper
  liver_bileduct vs. multiple_myeloma,thyroid,melanoma, non_cancer,uterine

SEQ ID NO: 462503 - DNA, 214 bp, Homo sapiens; identical to SEQ ID NO: 373858
  chr16:21531388-21531602
  hyper
  liver_bileduct vs. upper_gi

SEQ ID NO: 462504 - DNA, 184 bp, Homo sapiens; identical to SEQ ID NO: 360800
  chr16:23193716-23193900
  hyper
  liver_bileduct vs. lung

SEQ ID NO: 462505 - DNA, 10 bp, Homo sapiens
  chr16:23846783-23846793
  hyper
  liver_bileduct vs. thyroid,non_cancer,myeloid_neoplasm, melanoma,multiple_myeloma,bladder_and_urothelial,prostate
cgctcctccc

SEQ ID NO: 462506 - DNA, 20 bp, Homo sapiens
  chr16:28891021-28891041
  hyper
  liver_bileduct vs. ovary,prostate,anorectal, bladder_and_urothelial,sarcoma,head_and_neck,breast,melanoma, cervical,lung,thyroid
cggggcgggctggcgcgcag

SEQ ID NO: 462507 - DNA, 444 bp, Homo sapiens
  chr16:28891072-28891516
  hyper
  liver_bileduct vs. ovary,prostate,anorectal, bladder_and_urothelial,sarcoma,head_and_neck,breast,melanoma, cervical,lung,thyroid
tcccctgcaccccagaggcaggttttattttaagctttaagggtgttctcagccaaaacaccgaagctaagccaccctcgcggcttcaagagcttggagagctcgggttacccacccgaactccgggctccgggtcccgccgcgatgccggctgcggcgcggggggccactgccactcccggcatgcgccgggcggacggccgctccaccaatccccgcgcccgtcggcgcccctgccccgccctccccagcctcctgacgctgattggtcgaggggaggactcgctcctagtggcgggaaagcgcggcggtgtgatgatgactccaaggagcccggcgcccggtcagggagggcactggcatccctcattacccgcccagcctggccttagcccttccccgcgctccctaggcacccccacccccgcagggcatctccagggc

SEQ ID NO: 462508 - DNA, 228 bp, Homo sapiens
  chr16:28891288-28891516
  hyper
  liver_bileduct vs. ovary,prostate,head_and_neck,lung, breast,thyroid
cgcgcccgtcggcgcccctgccccgccctccccagcctcctgacgctgattggtcgaggggaggactcgctcctagtggcgggaaagcgcggcggtgtgatgatgactccaaggagcccggcgcccggtcagggagggcactggcatccctcattacccgcccagcctggccttagcccttccccgcgctccctaggcacccccacccccgcagggcatctccagggc

SEQ ID NO: 462509 - DNA, 533 bp, Homo sapiens; identical to SEQ ID NO: 347376
  chr16:29624651-29625184
  hyper
  liver_bileduct vs. upper_gi,melanoma, pancreas_gallbladder,head_and_neck

SEQ ID NO: 462510 - DNA, 305 bp, Homo sapiens
  chr16:47176468-47176773
  hyper
  liver_bileduct vs. lung,cervical,head_and_neck, bladder_and_urothelial,breast,uterine,ovary,renal,prostate, multiple_myeloma,sarcoma,non_cancer,lymphoid_neoplasm, colorectal
cgtaccctcgaaatttttaaaaaaagaacatgttacgacattacaaacacgtcagctttcaatttaaatcagcagggggaaaaagggaagtcctttactgagtggtggtgctgttttccctctggaaattgaaaagacgatttattcagtccgagtttcaggagcaactttgtatcccaatcctaattatctatgtatataaattttcatctaaattaccacctcctgggaaatgcaaagccggtggagtaggttttagagctctgtgctctggacaagccaactgttttaattcccagtacaac

SEQ ID NO: 462511 - DNA, 1 bp, Homo sapiens
  chr16:47177759-47177760
  hyper
  liver_bileduct vs. cervical,head_and_neck,lung, bladder_and_urothelial,breast,ovary,uterine,multiple_myeloma, renal,prostate,non_cancer,anorectal,myeloid_neoplasm,sarcoma, colorectal,thyroid,lymphoid_neoplasm
c

SEQ ID NO: 462512 - DNA, 18 bp, Homo sapiens
  chr16:47177802-47177820
  hyper
  liver_bileduct vs. breast,cervical, bladder_and_urothelial,head_and_neck,lung,anorectal,colorectal
cgcgggaccggcaggcag

SEQ ID NO: 462513 - DNA, 107 bp, Homo sapiens; identical to SEQ ID NO: 454210
  chr16:54966659-54966766
  hyper
  liver_bileduct vs. breast

SEQ ID NO: 462514 - DNA, 107 bp, Homo sapiens; identical to SEQ ID NO: 454210
  chr16:54966659-54966766
  hyper
  liver_bileduct vs. breast,anorectal,cervical

SEQ ID NO: 462515 - DNA, 8 bp, Homo sapiens
  chr16:54967414-54967422
  hyper
  liver_bileduct vs. breast,anorectal,cervical
cgtgtccc

SEQ ID NO: 462516 - DNA, 812 bp, Homo sapiens
  chr16:84650982-84651794
  hyper
  liver_bileduct vs. upper_gi,bladder_and_urothelial,lung, pancreas_gallbladder,ovary
cgccatgcgccaggggcaccccatgtggccaccggttcctcccgggttcgctctggccggggctccccgggtgcagacaacctcccaacgaccgcgcatccgcccggcaggcgcgcctccctacctgtgcactgctggatgaagtgctggtactccgctccctgctcgccggggacgatggtggagccgtcatatttaaaagtcaccctttgggttgggagaagaaaaaaacacacacacacatcagcgctggtggccgcgcgacgcggcgcttgcagaggacaatctaacagacgcgctggccacggagaagcccgcgggggcctggcacgccgtcccggaataaggcgaggaagacagcgcgggaggcccgaatccgtcccgcctggaggccggctcggtgcacgaggccccgcgcgagcccggggagcggggcgtggagacgaatgaaaagttcctaccagatgacggccgagccgtcgtcgcgcaccaggttgtacgccgcccggcaagcctctttgtcgatcttggtggccatcgccgcggagccgcagcgggacactgtccggggcggccgagcgcgcccctggccggcggcggggatgggagcgcggcgggtacgcgccgagggcgcacgggctggcggcggtggcgacggctacgcggcgcctgcaagctgcgagcgcggcggcggcttccactgcggacggagagcgcgcggggaccccaggccgtggcccgccccgcccccccgcgcccattggccgcccaggcggcggcccgcctcttcattggccgtcgggctgcggggg

SEQ ID NO: 462517 - DNA, 9 bp, Homo sapiens
  chr16:84651822-84651831
  hyper
  liver_bileduct vs. upper_gi,bladder_and_urothelial,lung, pancreas_gallbladder,ovary
tcccagacc

SEQ ID NO: 462518 - DNA, 26 bp, Homo sapiens
  chr16:86542182-86542208
  hyper
  liver_bileduct vs. ovary,anorectal
cgcccccctcttctcaactcggaacc

SEQ ID NO: 462519 - DNA, 270 bp, Homo sapiens; identical to SEQ ID NO: 360900
  chr16:86542673-86542943
  hyper
  liver_bileduct vs. ovary,anorectal

SEQ ID NO: 462520 - DNA, 353 bp, Homo sapiens
  chr16:86543822-86544175
  hyper
  liver_bileduct vs. melanoma
ctgccctcggcctcagctcggctcctttccttgtgggagggcgagaaagaaagagggaggagagaggtgggggaggcgggagttggagagagaggggctctgagccaaccgccggcggatccagcagctcctcggggagggcgggcgggagcgcgggggcgggcgcgccgcggctcgctcgggagaagtggccgccgatgacggcagaggtgcagccagccccgcgcgcgcagccccctccccttcgccctcctcccccccgtcgtcctcttcctcctcctcctcctcctcctcccggcccgtccgcggcgcagagcagcggcggcagcggcggcggcggcagcagccacccg

SEQ ID NO: 462521 - DNA, 60 bp, Homo sapiens
  chr16:87635912-87635972
  hyper
  liver_bileduct vs. melanoma
cggggagcgcggggctgggggcgcggagggcggggcgcccggggtccccgcccgcgcgcc

SEQ ID NO: 462522 - DNA, 190 bp, Homo sapiens
  chr16:87636008-87636198
  hyper
  liver_bileduct vs. melanoma
cgccgcgctccgggggcgggggcgggggcgggggcggggggcggggggcggggggcgggcgggggcgcgcgggcgggcggggtgcgggcgcgcgccgcgcggcccgagcgcgcgagccgggcccggagcgcacgccgccgccgccaccgccgccgccgccgcccgagccgccgcattgctgctgctgctg

SEQ ID NO: 462523 - DNA, 491 bp, Homo sapiens; identical to SEQ ID NO: 127736
  chr16:87902835-87903326
  hyper
  liver_bileduct vs. upper_gi

SEQ ID NO: 462524 - DNA, 400 bp, Homo sapiens
  chr16:89006909-89007309
  hyper
  liver_bileduct vs. breast,sarcoma,multiple_myeloma, anorectal,prostate,uterine,lung,melanoma,thyroid,non_cancer, lymphoid_neoplasm
ccgcggccgtcaggaccccagggaccgcatgccaggcagggtccaggacccccagcgcggaccacctttagcctgcggggcagcgccggggacccgggcaggagggagaggagcaggagggagctctggacccccctccccagaccggccgccgccacctctgcctctcccagggccgccctcggcctccccactcccgggtctccgtcacgcgggccgcggggcctttgttaggaaaaccgggcggccccaggggagcccgcgagactcccagcgcccgggcgcgtcgttcccctcgaagtttcgccgcagcccccgcaggtcaggctctgctcacggggggctgcgctcagcccggatgggtgggcgctgggcgggttggctccaccctgccgtgggc

SEQ ID NO: 462525 - DNA, 84 bp, Homo sapiens
  chr16:89007225-89007309
  hyper
  liver_bileduct vs. breast,sarcoma,prostate, multiple_myeloma,uterine,melanoma,thyroid,non_cancer, lymphoid_neoplasm
cgcaggtcaggctctgctcacggggggctgcgctcagcccggatgggtgggcgctgggcgggttggctccaccctgccgtgggc

SEQ ID NO: 462526 - DNA, 92 bp, Homo sapiens
  chr16:89007789-89007881
  hyper
  liver_bileduct vs. breast,sarcoma,prostate, multiple_myeloma,uterine,melanoma,thyroid,non_cancer, lymphoid_neoplasm
gcctccgcctcctgccccccgccgccgccgctgcgccacctgcctcccgcccggcgcccatggcgctcagctccgccccggggcgccggcct

SEQ ID NO: 462527 - DNA, 211 bp, Homo sapiens; identical to SEQ ID NO: 347401
  chr16:89007995-89008206
  hyper
  liver_bileduct vs. breast,sarcoma,prostate, multiple_myeloma,uterine,melanoma,thyroid,non_cancer, lymphoid_neoplasm

SEQ ID NO: 462528 - DNA, 92 bp, Homo sapiens; identical to SEQ ID NO: 462526
  chr16:89007789-89007881
  hyper
  liver_bileduct vs. melanoma,breast

SEQ ID NO: 462529 - DNA, 374 bp, Homo sapiens
  chr16:89007995-89008369
  hyper
  liver_bileduct vs. melanoma,breast
gggagaggggcgcggggagggggcgacgggcgcgccgcctcctgcggggggcggcgcggggaggcgcaggcgggggcgagcgaagaggttgaggggtgcgggcgccgtggagggggcgcggctctggggggcggcccccgcctgcgcccaccctctccccctccgcaggccgcgcacacccacctcgcagcagtcggcggccgcgggcctcgcagctttagaaccgcggcttctggcggccgcgcgggaggctgaacgggagttggggggtgtggggggggtggggaggtggggagttgggggggaggtcgctccttcggccgccgcccccgccccctgccccgcgctcgcccccagcgcggcgcctggcccgg

SEQ ID NO: 462530 - DNA, 7 bp, Homo sapiens
  chr16:89008592-89008599
  hyper
  liver_bileduct vs. melanoma,breast
cccgccc

SEQ ID NO: 462531 - DNA, 459 bp, Homo sapiens; identical to SEQ ID NO: 351870
  chr17:3867210-3867669
  hyper
  liver_bileduct vs. upper_gi,multiple_myeloma,colorectal, pancreas_gallbladder,myeloid_neoplasm

SEQ ID NO: 462532 - DNA, 201 bp, Homo sapiens; identical to SEQ ID NO: 335438
  chr17:3867893-3868094
  hyper
  liver_bileduct vs. pancreas_gallbladder

SEQ ID NO: 462533 - DNA, 71 bp, Homo sapiens; identical to SEQ ID NO: 454218
  chr17:3908060-3908131
  hyper
  liver_bileduct vs. pancreas_gallbladder,colorectal, upper_gi

SEQ ID NO: 462534 - DNA, 356 bp, Homo sapiens; identical to SEQ ID NO: 455755
  chr17:27038294-27038650
  hyper
  liver_bileduct vs. multiple_myeloma,cervical, myeloid_neoplasm,anorectal,non_cancer,lymphoid_neoplasm,uterine

SEQ ID NO: 462535 - DNA, 60 bp, Homo sapiens
  chr17:27332307-27332367
  hyper
  liver_bileduct vs. anorectal,sarcoma,ovary
cgaggtcccaaccccgggtccggccgccatccggccccgtctcccctcagtaagaacact

SEQ ID NO: 462536 - DNA, 122 bp, Homo sapiens; identical to SEQ ID NO: 351909
  chr17:27332733-27332855
  hyper
  liver_bileduct vs. anorectal,sarcoma,ovary

SEQ ID NO: 462537 - DNA, 4 bp, Homo sapiens
  chr17:27949429-27949433
  hyper
  liver_bileduct vs. ovary,sarcoma,uterine,non_cancer, myeloid_neoplasm,thyroid
cgtg

SEQ ID NO: 462538 - DNA, 74 bp, Homo sapiens; identical to SEQ ID NO: 459463
  chr17:28088056-28088130
  hyper
  liver_bileduct vs. upper_gi,breast,multiple_myeloma, ovary,uterine,sarcoma,cervical

SEQ ID NO: 462539 - DNA, 338 bp, Homo sapiens
  chr17:29248950-29249288
  hyper
  liver_bileduct vs. sarcoma,myeloid_neoplasm
cgccgcggccgggtccctctccacctgccgggcggagcgcacgggccatgggctgagccccgctgagcccgccgggccggccatgggcgatcgcgagcgcaacaagaagcggctgctggagctgctgcgggcgccggacacaggcaacgcgcactgcgccgactgcggggcggcaggtaagggcgcggcggcgcgggcagcgcgagacccccggccggaccccaggcccacccgactcctcccctcggccccaccgggtcccgccctcggccccctggacccagacgtggcacctgcgggccccgacccctcccacccacaccgtgaacctctcaccc

SEQ ID NO: 462540 - DNA, 256 bp, Homo sapiens
  chr17:29297825-29298081
  hyper
  liver_bileduct vs. pancreas_gallbladder,breast,renal, head_and_neck,colorectal,lung,ovary,melanoma,prostate,cervical, multiple_myeloma,upper_gi,sarcoma,bladder_and_urothelial, uterine,lymphoid_neoplasm,non_cancer,myeloid_neoplasm
cgggtttctagcagctcgcggcatgttggtttcccagggcaagaggccgccactgaaggtcagctctgtctttccagctgggcactggaggctctaagtctgttttcagcaggatcggaggaaggagacggggtggcgccaaggaaggaggagaaaaggcggccgagaaaaggaggagggcaaggggaagaggaagggcgagggaggagcctgaggagactcgcccggctcaaccccgacgtccgcgccccggccg

SEQ ID NO: 462541 - DNA, 24 bp, Homo sapiens
  chr17:29298581-29298605
  hyper
  liver_bileduct vs. pancreas_gallbladder,breast,renal, head_and_neck,colorectal,lung,ovary,melanoma,prostate,cervical, multiple_myeloma,upper_gi,sarcoma,bladder_and_urothelial, uterine,lymphoid_neoplasm,non_cancer,myeloid_neoplasm
tctaaaagtcgagttccgctcttc

SEQ ID NO: 462542 - DNA, 33 bp, Homo sapiens
  chr17:29718746-29718779
  hyper
  liver_bileduct vs. bladder_and_urothelial,sarcoma,ovary, prostate,breast,head_and_neck,uterine,renal
cgggcggaggctgcgcggcgcagacccagacgg

SEQ ID NO: 462543 - DNA, 1 bp, Homo sapiens
  chr17:29719289-29719290
  hyper
  liver_bileduct vs. bladder_and_urothelial,sarcoma,ovary, prostate,breast,head_and_neck,uterine,renal
c

SEQ ID NO: 462544 - DNA, 12 bp, Homo sapiens
  chr17:30846472-30846484
  hyper
  liver_bileduct vs. breast,lung,ovary,sarcoma,melanoma, uterine
cgccgggtgggc

SEQ ID NO: 462545 - DNA, 69 bp, Homo sapiens; identical to SEQ ID NO: 351915
  chr17:30846659-30846728
  hyper
  liver_bileduct vs. breast,lung,ovary,sarcoma,melanoma, uterine

SEQ ID NO: 462546 - DNA, 308 bp, Homo sapiens; identical to SEQ ID NO: 459466
  chr17:33700165-33700473
  hyper
  liver_bileduct vs. head_and_neck,uterine,cervical

SEQ ID NO: 462547 - DNA, 85 bp, Homo sapiens; identical to SEQ ID NO: 459467
  chr17:33701376-33701461
  hyper
  liver_bileduct vs. cervical,anorectal

SEQ ID NO: 462548 - DNA, 207 bp, Homo sapiens; identical to SEQ ID NO: 459468
  chr17:33701376-33701583
  hyper
  liver_bileduct vs. cervical

SEQ ID NO: 462549 - DNA, 168 bp, Homo sapiens; identical to SEQ ID NO: 345516
  chr17:33701612-33701780
  hyper
  liver_bileduct vs. cervical

SEQ ID NO: 462550 - DNA, 717 bp, Homo sapiens; identical to SEQ ID NO: 335510
  chr17:33814248-33814965
  hyper
  liver_bileduct vs. upper_gi,cervical

SEQ ID NO: 462551 - DNA, 122 bp, Homo sapiens; identical to SEQ ID NO: 351920
  chr17:35078956-35079078
  hyper
  liver_bileduct vs. lung,multiple_myeloma

SEQ ID NO: 462552 - DNA, 77 bp, Homo sapiens; identical to SEQ ID NO: 351926
  chr17:36729187-36729264
  hyper
  liver_bileduct vs. lung,upper_gi,ovary

SEQ ID NO: 462553 - DNA, 21 bp, Homo sapiens
  chr17:37761159-37761180
  hyper
  liver_bileduct vs. prostate,thyroid
cgcaaaacgcggagactggag

SEQ ID NO: 462554 - DNA, 130 bp, Homo sapiens
  chr17:38478466-38478596
  hyper
  liver_bileduct vs. lymphoid_neoplasm,multiple_myeloma, myeloid_neoplasm,breast,renal,thyroid
cgtctgggcgggcaccttggagcagtgagggggattcctcaagcacaaaaggcaggggagaagtggcagggaagaggtggcaggggagaggtggcaggggctaggcacagttgggaccttgcttgcctgg

SEQ ID NO: 462555 - DNA, 37 bp, Homo sapiens; identical to SEQ ID NO: 455770
  chr17:40332770-40332807
  hyper
  liver_bileduct vs. bladder_and_urothelial,anorectal, non_cancer,uterine,prostate

SEQ ID NO: 462556 - DNA, 322 bp, Homo sapiens; identical to SEQ ID NO: 335549
  chr17:41995104-41995426
  hyper
  liver_bileduct vs. cervical,multiple_myeloma

SEQ ID NO: 462557 - DNA, 122 bp, Homo sapiens
  chr17:42906461-42906583
  hyper
  liver_bileduct vs. sarcoma,melanoma
cgatttcacatcgtcttgatgctaacaaaattaagcatgagcataatgaaatcggtatcactgccagttctcaatgaacaaaaagaaaaccaaattcgcccatttcgcaaaggaaaagtact

SEQ ID NO: 462558 - DNA, 54 bp, Homo sapiens; identical to SEQ ID NO: 459477
  chr17:46620299-46620353
  hyper
  liver_bileduct vs. renal,cervical,breast,ovary,uterine

SEQ ID NO: 462559 - DNA, 64 bp, Homo sapiens; identical to SEQ ID NO: 460782
  chr17:46687527-46687591
  hyper
  liver_bileduct vs. colorectal,ovary, bladder_and_urothelial,uterine,anorectal,upper_gi,renal, multiple_myeloma,thyroid,non_cancer,cervical,sarcoma

SEQ ID NO: 462560 - DNA, 13 bp, Homo sapiens
  chr17:46688806-46688819
  hyper
  liver_bileduct vs. colorectal,ovary,anorectal,renal, uterine,upper_gi,bladder_and_urothelial,thyroid, multiple_myeloma,non_cancer
gggaagttggtcc

SEQ ID NO: 462561 - DNA, 321 bp, Homo sapiens; identical to SEQ ID NO: 351971
  chr17:46688806-46689127
  hyper
  liver_bileduct vs. colorectal

SEQ ID NO: 462562 - DNA, 149 bp, Homo sapiens; identical to SEQ ID NO: 347451
  chr17:46690905-46691054
  hyper
  liver_bileduct vs. cervical,anorectal,ovary

SEQ ID NO: 462563 - DNA, 66 bp, Homo sapiens
  chr17:47653244-47653310
  hyper
  liver_bileduct vs. lung,ovary,breast
cgagagcggcgccgctggagccgaggggggcgccgagcgcagatctggagcagcagagccacggcg

SEQ ID NO: 462564 - DNA, 715 bp, Homo sapiens; identical to SEQ ID NO: 351982
  chr17:47653373-47654088
  hyper
  liver_bileduct vs. lung,ovary,breast

SEQ ID NO: 462565 - DNA, 80 bp, Homo sapiens; identical to SEQ ID NO: 455791
  chr17:58498618-58498698
  hyper
  liver_bileduct vs. anorectal

SEQ ID NO: 462566 - DNA, 112 bp, Homo sapiens; identical to SEQ ID NO: 454237
  chr17:61777761-61777873
  hyper
  liver_bileduct vs. cervical,sarcoma,anorectal, multiple_myeloma,thyroid,non_cancer,head_and_neck, lymphoid_neoplasm,renal,prostate,myeloid_neoplasm, bladder_and_urothelial,melanoma

SEQ ID NO: 462567 - DNA, 76 bp, Homo sapiens; identical to SEQ ID NO: 345537
  chr17:61778423-61778499
  hyper
  liver_bileduct vs. cervical,sarcoma,anorectal, multiple_myeloma,thyroid,non_cancer,head_and_neck, lymphoid_neoplasm,renal,prostate,myeloid_neoplasm, bladder_and_urothelial,melanoma

SEQ ID NO: 462568 - DNA, 81 bp, Homo sapiens; identical to SEQ ID NO: 454240
  chr17:73584287-73584368
  hyper
  liver_bileduct vs. cervical,anorectal

SEQ ID NO: 462569 - DNA, 170 bp, Homo sapiens; identical to SEQ ID NO: 352021
  chr17:73584951-73585121
  hyper
  liver_bileduct vs. cervical,anorectal

SEQ ID NO: 462570 - DNA, 44 bp, Homo sapiens
  chr17:74864600-74864644
  hyper
  liver_bileduct vs. lung
cgggcgcgggttgccctcgtcgagagccatgggcgcggcgcggc

SEQ ID NO: 462571 - DNA, 164 bp, Homo sapiens; identical to SEQ ID NO: 374269
  chr17:74865294-74865458
  hyper
  liver_bileduct vs. lung

SEQ ID NO: 462572 - DNA, 28 bp, Homo sapiens
  chr17:75368688-75368716
  hyper
  liver_bileduct vs. ovary
cgtcgcccgtccctggcttctctgacag

SEQ ID NO: 462573 - DNA, 221 bp, Homo sapiens; identical to SEQ ID NO: 455803
  chr17:80186335-80186556
  hyper
  liver_bileduct vs. upper_gi,bladder_and_urothelial, colorectal

SEQ ID NO: 462574 - DNA, 517 bp, Homo sapiens; identical to SEQ ID NO: 347473
  chr17:80186618-80187135
  hyper
  liver_bileduct vs. upper_gi,bladder_and_urothelial, colorectal

SEQ ID NO: 462575 - DNA, 799 bp, Homo sapiens
  chr17:80186637-80187436
  hyper
  liver_bileduct vs. upper_gi,lung,colorectal
cgggggaggcgaggccgggaagacccagtcccgaggagcagagggggcgggccagctccgggccgggggcgccgacggggccggttccggttgggggggtccctgggcccggcggggttgcgggacgcgccgtcggggagctgcggcccgggagcccgtccggaggcggcgcggggtccgggcggggcgcgcaggggcggcgccaggcggtgacgtgcgcgggggacgtgccgcgccagcgacccgagcacttaaagtcgcccccggcgcggagcggaccggcagaggcgggcagaggcggcgagaggcggcgagaggcgggctgaggcggcccagcggcggcaggtaggcgcggccgcgatgctcgcgcgcgggccggggcccaggagctcccccgtgccgggcaagggggcgacctcggggtccgcgctctcacccccaccccgcccactttgtccatcaggtccgggggcgcccggggcatggactagccttctcgaccccgagcgggccccaccgagggctcccgagagccagccgcgcccctccgcgccctcgcatacctggctgcccagtctcgtctcccccggtccggcccggcgcccacccgtcgggctgccctcaggggctgggctcgggccaggagatggctgcgccggcggccaagcccggtccgggtataaatagctcggtccgcggtggcggggggcgcgggctatatttggtggggctgctgcagccctccctgtatgggtggcctccccgagggagtggggagcacttgcgctcgggccgtggc

SEQ ID NO: 462576 - DNA, 278 bp, Homo sapiens
  chr17:81038567-81038845
  hyper
  liver_bileduct vs. upper_gi,colorectal,lung, pancreas_gallbladder,bladder_and_urothelial
cgcgaagcccagggcgccgagggcaccgcggccgaacccgccctgcgcgagcctcgcagtcgccagttccggggttcgcagatgcgcggggacccgagtgacgcgcgcctcccggagagccgtggccgggctggcccgggcctgggtcccgcttcccctcggcgcggcccccgcccccgcccccgcccccgccgcgggccgagtcacgcggtgatgtcgagcgaagctgttttccgagaaggtcggggcagagccggtgcggggcgggtggtgtccgc

SEQ ID NO: 462577 - DNA, 508 bp, Homo sapiens; identical to SEQ ID NO: 352045
  chr17:81038865-81039373
  hyper
  liver_bileduct vs. upper_gi,colorectal,lung, pancreas_gallbladder,bladder_and_urothelial

SEQ ID NO: 462578 - DNA, 238 bp, Homo sapiens; identical to SEQ ID NO: 345538
  chr18:2848166-2848404
  hyper
  liver_bileduct vs. uterine,prostate,thyroid, myeloid_neoplasm,ovary,non_cancer

SEQ ID NO: 462579 - DNA, 369 bp, Homo sapiens; identical to SEQ ID NO: 361185
  chr18:2906430-2906799
  hyper
  liver_bileduct vs. upper_gi

SEQ ID NO: 462580 - DNA, 60 bp, Homo sapiens
  chr18:9707859-9707919
  hyper
  liver_bileduct vs. lung,ovary,pancreas_gallbladder, cervical,anorectal,breast,head_and_neck
cgtgggacccagaatgtcgcttgaggatgggacccccgcagacctccacgcgctgccacg

SEQ ID NO: 462581 - DNA, 276 bp, Homo sapiens
  chr18:9708063-9708339
  hyper
  liver_bileduct vs. lung,ovary,pancreas_gallbladder, cervical,anorectal,breast,head_and_neck
cggatgccggagggcgctgggggaggccgacccgcgcggggctggtccgagggcggaggcaatccgccggcgacgccgcaggtcccgggtggctgacgccgtccgggggcgttcctgggagctgggggccggcgaggctggacccgacgcgcccgggaggagccggccggcggccacgtgacccaccgcggcggggccggcggcccagaaatagcagcggcggcggttccgcccgcgggcggcgcgagcgaggggcagaggcgagagacgccggcg

SEQ ID NO: 462582 - DNA, 3 bp, Homo sapiens
  chr18:9708731-9708734
  hyper
  liver_bileduct vs. cervical,breast
cgg

SEQ ID NO: 462583 - DNA, 202 bp, Homo sapiens; identical to SEQ ID NO: 352061
  chr18:9709406-9709608
  hyper
  liver_bileduct vs. cervical,breast

SEQ ID NO: 462584 - DNA, 307 bp, Homo sapiens
  chr18:12407715-12408022
  hyper
  liver_bileduct vs. lung,melanoma,breast
cgagcgtcgcctcctacgcccgcggcatctgcagcaagcgcgcatcgcgcaccccagggtagcagcgcaggtctggggctgcgccacagccgcgcccgcagagctatttttagccgctgcagccagcctagccaccagacggggtgggcggcatccaagggcgccccgcccatcgaggccccgcccacgccgcgcccggagccgcgcggcccgaagcacccggcccggatcgcagagcccgcgccctgcgccggcggcaatgaagatctggagctcggagcacgtgtttgggtgaggccgggctgag

SEQ ID NO: 462585 - DNA, 207 bp, Homo sapiens
  chr18:12408117-12408324
  hyper
  liver_bileduct vs. lung,melanoma,breast
tccccgccccgcgccggccgttcccagaccgcaacttcggcgtcccggagagggcacgcgcgcttccccgggaccgcggtctgggcgaggctctgcgccgggtacggcctctcccccggcgtgcgcaggggcctggctgcaggcacagaggccccgctggtggtcgacagccagggcgggggcagccggagcgggggcggccggggc

SEQ ID NO: 462586 - DNA, 28 bp, Homo sapiens
  chr18:12408339-12408367
  hyper
  liver_bileduct vs. lung,melanoma,breast
cgggggggcggccgggggcctggcgctc

SEQ ID NO: 462587 - DNA, 804 bp, Homo sapiens
  chr18:23806188-23806992
  hyper
  liver_bileduct vs. upper_gi,lung,colorectal
cggatgccgcagttttccaagtgcagcttgcccctcccacgtgataggtttctggcatcgcccctccttgctggcgattctggggaagattttaacgctccctggagccgtccccagtgacgtcacgggcgcggctccgctccttggccaatcacgcggccggatcccggggaaacccggggcggtggcggcggcctgggcgcgtgcgcgaggtctccgcgtggctatataaacatggctggcgtggccgcgcggcggggccgtgccaatcgcgcgtagggggctgtgggcactcggggttcgtagttttgaaatttctggcgggggagcagctgcgcagttaggctcgaggtgtgagcgacgaccttccgggagccgcaagtccaggctcccccgcagcgggacccgagcctgaggcgcagggctgaggcagcgcacgtgtgagcgccgctgaggaagctgcgagaggtcgggcgggtgtcgctccgggggcagcccaggctcgcgcggacgagaggaaggtccgggacgcgcgtgtcctgccgtgcagcgggcgcccgtcactgacttcgctgctgcggcccccgcgcctctccccagcgatgctgtggaacccgaaccgcaccggagtcggctgccgcgcgccaagcctcccctcacctctgctcccggaaccgcagcgccaaagctgccgctgagcccctgggggatgcccgccggcctcaccgaacccgccggcgccgctcccccggctgctgtgagcgcctcggggaccgtgaccatggccccggccggggcgctgcc

SEQ ID NO: 462588 - DNA, 792 bp, Homo sapiens
  chr18:23806509-23807301
  hyper
  liver_bileduct vs. upper_gi,lung,colorectal
cgggggagcagctgcgcagttaggctcgaggtgtgagcgacgaccttccgggagccgcaagtccaggctcccccgcagcgggacccgagcctgaggcgcagggctgaggcagcgcacgtgtgagcgccgctgaggaagctgcgagaggtcgggcgggtgtcgctccgggggcagcccaggctcgcgcggacgagaggaaggtccgggacgcgcgtgtcctgccgtgcagcgggcgcccgtcactgacttcgctgctgcggcccccgcgcctctccccagcgatgctgtggaacccgaaccgcaccggagtcggctgccgcgcgccaagcctcccctcacctctgctcccggaaccgcagcgccaaagctgccgctgagcccctgggggatgcccgccggcctcaccgaacccgccggcgccgctcccccggctgctgtgagcgcctcggggaccgtgaccatggccccggccggggcgctgccggtgcgggtggagagcactccggtggccctgggcgccgtgactaaggctcctgtcagcgtctgcgtggagcccacggcgtcccagcccctgcggtcccccgtggggaccctggtgaccaaagtggctccggtcagcgcccctcctaaagtcagcagcggccctaggctgcctgctcctcagatagtcgccgtgaaagcccccaacaccacgacaatccagtttcctgctaatttgcagcttcctccaggtatgttgataaccctttccagccttgtctgtcggtccagctggcggcgacgggaaaattc

SEQ ID NO: 462589 - DNA, 122 bp, Homo sapiens
  chr18:24130266-24130388
  hyper
  liver_bileduct vs. anorectal,cervical,head_and_neck
cgcatcaattgaaacccatccatcaatttgcattttttttttttaagaaagaatgaaagaccaggtctcagggcagtgtgggcttctgagtgggagttgacgatgtctttttctgcagcgaa

SEQ ID NO: 462590 - DNA, 80 bp, Homo sapiens; identical to SEQ ID NO: 452959
  chr18:44335955-44336035
  hyper
  liver_bileduct vs. sarcoma,myeloid_neoplasm

SEQ ID NO: 462591 - DNA, 14 bp, Homo sapiens
  chr18:44337138-44337152
  hyper
  liver_bileduct vs. renal,thyroid,myeloid_neoplasm, prostate,non_cancer,sarcoma,breast,ovary,multiple_myeloma, bladder_and_urothelial,melanoma
caggggctgggcgc

SEQ ID NO: 462592 - DNA, 204 bp, Homo sapiens; identical to SEQ ID NO: 335816
  chr18:47813485-47813689
  hyper
  liver_bileduct vs. upper_gi

SEQ ID NO: 462593 - DNA, 34 bp, Homo sapiens; identical to SEQ ID NO: 347512
  chr18:54789287-54789321
  hyper
  liver_bileduct vs. melanoma,bladder_and_urothelial,renal, sarcoma

SEQ ID NO: 462594 - DNA, 584 bp, Homo sapiens
  chr18:77160022-77160606
  hyper
  liver_bileduct vs. multiple_myeloma,non_cancer,ovary, myeloid_neoplasm,thyroid
ctggtgccgctcgtggggtcccgacgcccctacccccgggtccggaggagcctgcgccgggccgggacccccagggcacaagaggccgggggacccctgcggtcgcgcgcgcgcgagggggcgggggcgggggggacacgagtttatttaaaaactcgtgtccggggagtttatttaaaactcggaagccggcggccgcgagccggttgtttatgtaaacccggaaacgccccggggggcgggggcggggcggggacggggggaggggcgggggtcacgttacgcggaggacgcgcgggcagcgccgggagaaccgaacccctggcggccgcgaccccggctcccgccccggccccggcccgacccgccatgacggggctggaggaccaggagttcgacttcgagttcctcttcgagtttaaccagcgcgacgagggcgccgccgcggccgccccaggtgggtcagtcccggagggcgcggggggcgcggggccaggtcggggtttgggggcgcccaggccccctccgcgtcctcgtcgctccccggggaccccaggagtccccggcgcgcccgggaccgaggg

SEQ ID NO: 462595 - DNA, 67 bp, Homo sapiens; identical to SEQ ID NO: 352120
  chr18:77160661-77160728
  hyper
  liver_bileduct vs. multiple_myeloma,non_cancer,ovary, myeloid_neoplasm,thyroid

SEQ ID NO: 462596 - DNA, 29 bp, Homo sapiens
  chr18:77557780-77557809
  hyper
  liver_bileduct vs. lung,uterine,prostate,renal, myeloid_neoplasm,ovary,upper_gi
cgtgctccctccgagtggacttggccccg

SEQ ID NO: 462597 - DNA, 3 bp, Homo sapiens
  chr19:267137-267140
  hyper
  liver_bileduct vs. melanoma
cgc

SEQ ID NO: 462598 - DNA, 331 bp, Homo sapiens
  chr19:267237-267568
  hyper
  liver_bileduct vs. melanoma
cgctgcgctgcgctgtcaggacgcgcagttcccgccccgctgaagggacaccgttttacaacacgccgcgtagaccgtgacagggaagtaaggcccacggcagcgctccctcctcagcactcgcggccgcggacaggacgccttttcctcctcctctcacctggtgaccgggtgtcccgaaccgcggccgctcccgggcgggtcctgaagagaccgtggctccgtcttcccggtcgacgccccggggcgacgagtgcggatccgccgcggttcccgcgcgtgctccaggttgggcgggagccgggcgccccctcgcggcagtcctggggag

SEQ ID NO: 462599 - DNA, 2 bp, Homo sapiens
  chr19:267657-267659
  hyper
  liver_bileduct vs. melanoma
ac

SEQ ID NO: 462600 - DNA, 47 bp, Homo sapiens; identical to SEQ ID NO: 459506
  chr19:3785511-3785558
  hyper
  liver_bileduct vs. myeloid_neoplasm,uterine,breast, prostate,thyroid,ovary,cervical,non_cancer, bladder_and_urothelial,sarcoma

SEQ ID NO: 462601 - DNA, 33 bp, Homo sapiens; identical to SEQ ID NO: 361387
  chr19:4304684-4304717
  hyper
  liver_bileduct vs. bladder_and_urothelial

SEQ ID NO: 462602 - DNA, 73 bp, Homo sapiens
  chr19:8115163-8115236
  hyper
  liver_bileduct vs. ovary,uterine
cgtgaaggctgccggcgggacaaacagtgaggggtgaggcagggagggagactcacgttggggacctccccca

SEQ ID NO: 462603 - DNA, 215 bp, Homo sapiens; identical to SEQ ID NO: 459511
  chr19:10400761-10400976
  hyper
  liver_bileduct vs. lung,head_and_neck,ovary

SEQ ID NO: 462604 - DNA, 215 bp, Homo sapiens; identical to SEQ ID NO: 459511
  chr19:10400761-10400976
  hyper
  liver_bileduct vs. lung

SEQ ID NO: 462605 - DNA, 279 bp, Homo sapiens
  chr19:10401208-10401487
  hyper
  liver_bileduct vs. lung
cctggcaaccgggtccctcagctgttcccgcggttccttccatgagcccagccttgcgtcccggctccgtgttcttcaccgggtgtagggtccttcctgatccttgacccagcctcgtctctcctttgcccttgccgcaaacgcactctcctcgtatcccggcattctgccaggaccctgagaactggttcatcccccatcccccatcccgggtccccttctctcagccttgctgtgttcatccaagaacccacctttcctctcctctacgccctcccc

SEQ ID NO: 462606 - DNA, 485 bp, Homo sapiens
  chr19:10529649-10530134
  hyper
  liver_bileduct vs. bladder_and_urothelial,sarcoma
cggtttttgctcggcgttcgcccacgccgggagccccctctggcggggagaaaagtggctgtgggggttgaagaccggcagtcttttttttttttttttttttttttcaaataaggagaagggcgcggggggagggcggtggcaaacggcatcgcgtgccctggggagcccgtgacagggggcgcacgggggcaggggtctggtccccgggtcccgcagcagagcagtttcgcgttcgagctcttatcggcgtggggggggggggcggtgggacacgcgggcgcgtgcactccccccgcccagcagccatccttgggggggttgagggggatgggggcgcactcggatcccgctcgctctctgcttgctcgctcggcgcggcgctgggggaggcgggagcgtgagtcacggcgactcccgatttaggtgccggaaggggggctctgctggcgggggccgcagggaggaggctcgcctgtttactc

SEQ ID NO: 462607 - DNA, 111 bp, Homo sapiens; identical to SEQ ID NO: 352184
  chr19:10530526-10530637
  hyper
  liver_bileduct vs. bladder_and_urothelial,sarcoma

SEQ ID NO: 462608 - DNA, 631 bp, Homo sapiens; identical to SEQ ID NO: 457670
  chr19:10530654-10531285
  hyper
  liver_bileduct vs. sarcoma,breast,melanoma,prostate, uterine

SEQ ID NO: 462609 - DNA, 139 bp, Homo sapiens; identical to SEQ ID NO: 457671
  chr19:10531146-10531285
  hyper
  liver_bileduct vs. sarcoma

SEQ ID NO: 462610 - DNA, 285 bp, Homo sapiens
  chr19:11532739-11533024
  hyper
  liver_bileduct vs. bladder_and_urothelial,head_and_neck, colorectal,upper_gi,anorectal,multiple_myeloma,cervical
cgagggaggccattgtgggatggcctcctgaagaaatggccctctgctgcgggcaggataggtcttctgtctcgggctgctccagaactgcagataggtctccgagcttttcggggacagggtgggacttctttcccttggaggcggagcttgagacgggacagggtctctgacgtcttgggcttccttggggagtgagagcttccccagggaggtggggcggggactctgaggaatggggtggggcttcccctgtgggcggggcctctgacgtccgggacagag

SEQ ID NO: 462611 - DNA, 10 bp, Homo sapiens
  chr19:11533632-11533642
  hyper
  liver_bileduct vs. bladder_and_urothelial,head_and_neck, colorectal,upper_gi,anorectal,multiple_myeloma,cervical
ctgagctggc

SEQ ID NO: 462612 - DNA, 68 bp, Homo sapiens
  chr19:11592604-11592672
  hyper
  liver_bileduct vs. uterine,myeloid_neoplasm,ovary, thyroid
cgtgattggtcctcctgactgtggagtcatgctcgctctctgctagggggaacctggcctctctctaa

SEQ ID NO: 462613 - DNA, 189 bp, Homo sapiens; identical to SEQ ID NO: 347537
  chr19:11593453-11593642
  hyper
  liver_bileduct vs. anorectal,melanoma,myeloid_neoplasm, prostate,bladder_and_urothelial,sarcoma,uterine,ovary, non_cancer,renal

SEQ ID NO: 462614 - DNA, 255 bp, Homo sapiens; identical to SEQ ID NO: 452987
  chr19:12075818-12076073
  hyper
  liver_bileduct vs. colorectal

SEQ ID NO: 462615 - DNA, 16 bp, Homo sapiens
  chr19:12203656-12203672
  hyper
  liver_bileduct vs. multiple_myeloma,breast,sarcoma
ctgaggtcaggagttc

SEQ ID NO: 462616 - DNA, 1 bp, Homo sapiens
  chr19:12995814-12995815
  hyper
  liver_bileduct vs. breast
c

SEQ ID NO: 462617 - DNA, 221 bp, Homo sapiens; identical to SEQ ID NO: 454280
  chr19:12995851-12996072
  hyper
  liver_bileduct vs. breast

SEQ ID NO: 462618 - DNA, 106 bp, Homo sapiens; identical to SEQ ID NO: 459516
  chr19:17392397-17392503
  hyper
  liver_bileduct vs. multiple_myeloma,anorectal, bladder_and_urothelial

SEQ ID NO: 462619 - DNA, 240 bp, Homo sapiens
  chr19:17716539-17716779
  hyper
  liver_bileduct vs. melanoma,uterine,myeloid_neoplasm, ovary,prostate,non_cancer,thyroid,cervical
gggatgtggcctcctccatagggacgaggtttcccccatcccagctcaaaatgccccctaggtgctgggggcgtggcctcaagttggggatgtggctccttccttcgtcgcgcccttgggcgtggcctcccgagagggcggggcatcctccattcctaattccccaaaagggaaagctgagtcaagggcgtaggcgcagcccacccttggcgtggagccccccgagccccgcccctgggg

SEQ ID NO: 462620 - DNA, 6 bp, Homo sapiens
  chr19:17717524-17717530
  hyper
  liver_bileduct vs. melanoma,uterine,myeloid_neoplasm, non_cancer,thyroid,prostate,ovary,cervical
ccgcac

SEQ ID NO: 462621 - DNA, 133 bp, Homo sapiens; identical to SEQ ID NO: 455836
  chr19:17958343-17958476
  hyper
  liver_bileduct vs. lymphoid_neoplasm,multiple_myeloma

SEQ ID NO: 462622 - DNA, 62 bp, Homo sapiens; identical to SEQ ID NO: 361493
  chr19:18899652-18899714
  hyper
  liver_bileduct vs. anorectal

SEQ ID NO: 462623 - DNA, 91 bp, Homo sapiens; identical to SEQ ID NO: 455837
  chr19:19729161-19729252
  hyper
  liver_bileduct vs. upper_gi,lung,ovary

SEQ ID NO: 462624 - DNA, 136 bp, Homo sapiens; identical to SEQ ID NO: 455838
  chr19:19729395-19729531
  hyper
  liver_bileduct vs. upper_gi,lung,ovary

SEQ ID NO: 462625 - DNA, 147 bp, Homo sapiens; identical to SEQ ID NO: 352245
  chr19:19729585-19729732
  hyper
  liver_bileduct vs. upper_gi,lung,ovary

SEQ ID NO: 462626 - DNA, 51 bp, Homo sapiens
  chr19:19738572-19738623
  hyper
  liver_bileduct vs. upper_gi,lung,pancreas_gallbladder, breast
cgagggggcggtgccgaggcgtggaggtgatcggagtggacagagaggcgg

SEQ ID NO: 462627 - DNA, 505 bp, Homo sapiens
  chr19:19738668-19739173
  hyper
  liver_bileduct vs. upper_gi,lung,pancreas_gallbladder, breast
cgggcggggcaataggctgttccgggtgggacggaggacactggcggtctccgggacaaagacagcggttggggaagggatggatggccgggcctccaggcgtctccagactggggaaggggtagggggttaagggatcagagggcggcgtcctggccccgcaggcacgtgccgcgcccttcccccgggcccaggcccgcacccgcccgcctcccgtccgtgcaggcctcacctgggcctccagtcacgccgcagacaaggcgggctcgcgggggttcggggcgggctcgaggcccatggcccggcgactgcggcgggagcggtagagcgtccgggtgcgccctgtgcgggttgctgagagggcgcgggaggcggggtctccccggcgccccgcccccaccacctgggggagccctgccccgccccgccacctgggggagccccgcctccacggccgcgtcgggggcggtgtcgcccggaaccgcagcccccctgtttcctcccc

SEQ ID NO: 462628 - DNA, 298 bp, Homo sapiens
  chr19:19738875-19739173
  hyper
  liver_bileduct vs. upper_gi,lung,pancreas_gallbladder, breast
cgcctcccgtccgtgcaggcctcacctgggcctccagtcacgccgcagacaaggcgggctcgcgggggttcggggcgggctcgaggcccatggcccggcgactgcggcgggagcggtagagcgtccgggtgcgccctgtgcgggttgctgagagggcgcgggaggcggggtctccccggcgccccgcccccaccacctgggggagccctgccccgccccgccacctgggggagccccgcctccacggccgcgtcgggggcggtgtcgcccggaaccgcagcccccctgtttcctcccc

SEQ ID NO: 462629 - DNA, 247 bp, Homo sapiens; identical to SEQ ID NO: 205295
  chr19:19739428-19739675
  hyper
  liver_bileduct vs. upper_gi,lung,pancreas_gallbladder, breast

SEQ ID NO: 462630 - DNA, 262 bp, Homo sapiens; identical to SEQ ID NO: 452993
  chr19:19843330-19843592
  hyper
  liver_bileduct vs. melanoma,breast

SEQ ID NO: 462631 - DNA, 47 bp, Homo sapiens; identical to SEQ ID NO: 352250
  chr19:19844044-19844091
  hyper
  liver_bileduct vs. melanoma,breast

SEQ ID NO: 462632 - DNA, 59 bp, Homo sapiens
  chr19:31839508-31839567
  hyper
  liver_bileduct vs. sarcoma
cgccagcatctaacatggacttgacagtcatctgacaatacccagaccctgtgcgctcc

SEQ ID NO: 462633 - DNA, 4 bp, Homo sapiens
  chr19:31842869-31842873
  hyper
  liver_bileduct vs. cervical
cccc

SEQ ID NO: 462634 - DNA, 21 bp, Homo sapiens
  chr19:36478129-36478150
  hyper
  liver_bileduct vs. ovary
cgttcgcgctgagctgcgcgc

SEQ ID NO: 462635 - DNA, 63 bp, Homo sapiens; identical to SEQ ID NO: 352285
  chr19:36478303-36478366
  hyper
  liver_bileduct vs. ovary

SEQ ID NO: 462636 - DNA, 1 bp, Homo sapiens
  chr19:38042137-38042138
  hyper
  liver_bileduct vs. prostate,myeloid_neoplasm
c

SEQ ID NO: 462637 - DNA, 10 bp, Homo sapiens
  chr19:38042356-38042366
  hyper
  liver_bileduct vs. prostate,myeloid_neoplasm
gctgggctat

SEQ ID NO: 462638 - DNA, 38 bp, Homo sapiens; identical to SEQ ID NO: 453024
  chr19:38182720-38182758
  hyper
  liver_bileduct vs. sarcoma,prostate,breast

SEQ ID NO: 462639 - DNA, 86 bp, Homo sapiens; identical to SEQ ID NO: 457749
  chr19:38719834-38719920
  hyper
  liver_bileduct vs. sarcoma,breast,bladder_and_urothelial, ovary,anorectal,prostate,head_and_neck,lung

SEQ ID NO: 462640 - DNA, 264 bp, Homo sapiens; identical to SEQ ID NO: 457750
  chr19:38719956-38720220
  hyper
  liver_bileduct vs. sarcoma,breast,bladder_and_urothelial, ovary,anorectal,prostate,head_and_neck,lung

SEQ ID NO: 462641 - DNA, 187 bp, Homo sapiens; identical to SEQ ID NO: 352306
  chr19:38720439-38720626
  hyper
  liver_bileduct vs. sarcoma,breast,bladder_and_urothelial, ovary,anorectal,prostate,head_and_neck,lung

SEQ ID NO: 462642 - DNA, 390 bp, Homo sapiens
  chr19:38754883-38755273
  hyper
  liver_bileduct vs. upper_gi
cgcgtgtctgccgccccctcctcccaccctgaggccagtcctagagcgaaggccctcctccgacgtcgtcaccaagcccaagggaagggtggcaggtgctcagcgggcagacgccccgccccgccccgccaggttctgttgggggcgaggcccgcgcaagccccgcctcttccccggcaccaggggcgggcccaggtgcgcccagggccggggagcggccgcgcaggtgcctgccctttgcgcctgcgcccagctcgccctgcctagccaggtgcgccccgccccctgcctgcccggccaccttcgggagccgcttccaataggcgttcgccattggctctggcgacctccgcgcgttgggaggtgtagcgcggctctgaacgcgctgag

SEQ ID NO: 462643 - DNA, 175 bp, Homo sapiens; identical to SEQ ID NO: 347598
  chr19:38755344-38755519
  hyper
  liver_bileduct vs. upper_gi

SEQ ID NO: 462644 - DNA, 182 bp, Homo sapiens
  chr19:38852786-38852968
  hyper
  liver_bileduct vs. breast
cgcttgcctggaggctctcgccccgctgcccaatcccttcacggtgccgggcgatccctgcagccgtacgcggacccggtgcacgaccccacctggcgctggtgggcgaacaacaaacaagaccaggtaggcggagcggattgggagccgggaaaggggcggcgcccggacacccctcaccg

SEQ ID NO: 462645 - DNA, 291 bp, Homo sapiens; identical to SEQ ID NO: 361584
  chr19:38853193-38853484
  hyper
  liver_bileduct vs. breast

SEQ ID NO: 462646 - DNA, 127 bp, Homo sapiens
  chr19:42927599-42927726
  hyper
  liver_bileduct vs. multiple_myeloma
cgaccgtggctccttgagccctctttggcattcttcgaggccggggccatagcggcctcggcgggctccgttcccccggccaactccatcaattccccgcggtcctcccgcgggggccaattccagc

SEQ ID NO: 462647 - DNA, 3 bp, Homo sapiens
  chr19:45655296-45655299
  hyper
  liver_bileduct vs. sarcoma
cgg

SEQ ID NO: 462648 - DNA, 118 bp, Homo sapiens; identical to SEQ ID NO: 454295
  chr19:45656461-45656579
  hyper
  liver_bileduct vs. cervical

SEQ ID NO: 462649 - DNA, 183 bp, Homo sapiens; identical to SEQ ID NO: 352334
  chr19:46002502-46002685
  hyper
  liver_bileduct vs. myeloid_neoplasm,ovary,thyroid

SEQ ID NO: 462650 - DNA, 89 bp, Homo sapiens; identical to SEQ ID NO: 454300
  chr19:46519167-46519256
  hyper
  liver_bileduct vs. ovary

SEQ ID NO: 462651 - DNA, 421 bp, Homo sapiens; identical to SEQ ID NO: 352340
  chr19:46519582-46520003
  hyper
  liver_bileduct vs. ovary

SEQ ID NO: 462652 - DNA, 203 bp, Homo sapiens; identical to SEQ ID NO: 336187
  chr19:47137324-47137527
  hyper
  liver_bileduct vs. upper_gi

SEQ ID NO: 462653 - DNA, 203 bp, Homo sapiens
  chr19:47776511-47776714
  hyper
  liver_bileduct vs. upper_gi,lung
cgaactggatgagagacgtggctagacgggggaggggtgctgggccgggggggaggtgggaagactgctcccctccgctgactcagccccttctctcctcagaggcaggccccgaaggccaggagacggcggagatcaccgacttccagagggtgcgtttctgcaaggtggtggcggcccctccgctgccgggggccgctcgc

SEQ ID NO: 462654 - DNA, 423 bp, Homo sapiens; identical to SEQ ID NO: 361656
  chr19:47776742-47777165
  hyper
  liver_bileduct vs. upper_gi,lung

SEQ ID NO: 462655 - DNA, 312 bp, Homo sapiens
  chr19:48901504-48901816
  hyper
  liver_bileduct vs. upper_gi,colorectal,thyroid, head_and_neck,cervical,prostate,uterine,non_cancer
cggcgcctgtccctcgctgcatctcctcctctgtgcgtctctttatctcgtctccctgtccctgcgtctcccgtctgtgcctccctctcctccccgtctctcccggcccgggcgctcagaggccgcccggcggggcccgcaggcgatgcgcggcgccggtggcccccgcggccctcggggccccgctaagatgctgctgctgctggcgctggcctgcgccagcccgttcccggaggaggcgccggggccgggcggggccggtgggcccggcggcggcctcggcggggcgcggccgctcaacgtggcgctcgt

SEQ ID NO: 462656 - DNA, 3 bp, Homo sapiens
  chr19:50393295-50393298
  hyper
  liver_bileduct vs. cervical,anorectal,thyroid, multiple_myeloma,prostate
cgc

SEQ ID NO: 462657 - DNA, 219 bp, Homo sapiens; identical to SEQ ID NO: 453035
  chr19:50553779-50553998
  hyper
  liver_bileduct vs. bladder_and_urothelial,prostate,ovary, uterine

SEQ ID NO: 462658 - DNA, 16 bp, Homo sapiens
  chr19:50833813-50833829
  hyper
  liver_bileduct vs. melanoma
cgaggcgagaacttct

SEQ ID NO: 462659 - DNA, 446 bp, Homo sapiens; identical to SEQ ID NO: 352368
  chr19:50833970-50834416
  hyper
  liver_bileduct vs. melanoma

SEQ ID NO: 462660 - DNA, 73 bp, Homo sapiens; identical to SEQ ID NO: 345605
  chr19:51228809-51228882
  hyper
  liver_bileduct vs. melanoma

SEQ ID NO: 462661 - DNA, 8 bp, Homo sapiens
  chr19:52839404-52839412
  hyper
  liver_bileduct vs. bladder_and_urothelial,prostate, sarcoma,ovary,breast
cggaaaac

SEQ ID NO: 462662 - DNA, 61 bp, Homo sapiens; identical to SEQ ID NO: 453044
  chr19:53141353-53141414
  hyper
  liver_bileduct vs. ovary,breast

SEQ ID NO: 462663 - DNA, 57 bp, Homo sapiens
  chr19:53193139-53193196
  hyper
  liver_bileduct vs. breast,lung,sarcoma,prostate,melanoma, renal,ovary,bladder_and_urothelial
cgggcacctccccaacgcgggctcaggagaagcggtgactgcggaggagagacctgg

SEQ ID NO: 462664 - DNA, 182 bp, Homo sapiens; identical to SEQ ID NO: 347636
  chr19:55691158-55691340
  hyper
  liver_bileduct vs. ovary

SEQ ID NO: 462665 - DNA, 11 bp, Homo sapiens
  chr19:58039267-58039278
  hyper
  liver_bileduct vs. bladder_and_urothelial
cctgagcaacc

SEQ ID NO: 462666 - DNA, 59 bp, Homo sapiens; identical to SEQ ID NO: 374993
  chr19:58545837-58545896
  hyper
  liver_bileduct vs. anorectal

SEQ ID NO: 462667 - DNA, 538 bp, Homo sapiens; identical to SEQ ID NO: 352438
  chr19:59049765-59050303
  hyper
  liver_bileduct vs. head_and_neck,cervical

SEQ ID NO: 462668 - DNA, 270 bp, Homo sapiens
  chr2:263894-264164
  hyper
  liver_bileduct vs. upper_gi
cgccggttttcccgtcctcctcctcccaccaccgcccagctcttgagaggggagggtgctgccggacaggtgggtccccgggtactcactgctgcccgcccggccgcggcgccccgtcccgaggctgcccaggaagaggaaggcgcgctgccccgccccgcggacaaggaggccccagcgagggcgtacctgcggcaggtgacgaaggaggcggcgcaaaacacccgccgtgtacgtttcgcgggacaaaaaccacgcgcccgccgggcc

SEQ ID NO: 462669 - DNA, 259 bp, Homo sapiens; identical to SEQ ID NO: 369479
  chr2:264204-264463
  hyper
  liver_bileduct vs. upper_gi

SEQ ID NO: 462670 - DNA, 211 bp, Homo sapiens; identical to SEQ ID NO: 369488
  chr2:9143655-9143866
  hyper
  liver_bileduct vs. lung,upper_gi

SEQ ID NO: 462671 - DNA, 206 bp, Homo sapiens; identical to SEQ ID NO: 349473
  chr2:25142479-25142685
  hyper
  liver_bileduct vs. lung,pancreas_gallbladder,upper_gi

SEQ ID NO: 462672 - DNA, 5 bp, Homo sapiens
  chr2:25391009-25391014
  hyper
  liver_bileduct vs. myeloid_neoplasm,ovary
cgaaa

SEQ ID NO: 462673 - DNA, 22 bp, Homo sapiens
  chr2:25391734-25391756
  hyper
  liver_bileduct vs. myeloid_neoplasm,ovary
gcacccccgtgtggggcaggcc

SEQ ID NO: 462674 - DNA, 59 bp, Homo sapiens; identical to SEQ ID NO: 455879
  chr2:27938267-27938326
  hyper
  liver_bileduct vs. ovary

SEQ ID NO: 462675 - DNA, 52 bp, Homo sapiens
  chr2:29033285-29033337
  hyper
  liver_bileduct vs. sarcoma
cgtattcacacgttgtgcttttctcagttcaagcggcctcttccttttgagt

SEQ ID NO: 462676 - DNA, 38 bp, Homo sapiens; identical to SEQ ID NO: 454314
  chr2:30453530-30453568
  hyper
  liver_bileduct vs. ovary,myeloid_neoplasm,thyroid, non_cancer,multiple_myeloma,uterine

SEQ ID NO: 462677 - DNA, 69 bp, Homo sapiens; identical to SEQ ID NO: 459569
  chr2:31361021-31361090
  hyper
  liver_bileduct vs. renal,breast,head_and_neck,ovary

SEQ ID NO: 462678 - DNA, 179 bp, Homo sapiens; identical to SEQ ID NO: 459570
  chr2:31361118-31361297
  hyper
  liver_bileduct vs. renal,breast,head_and_neck,ovary

SEQ ID NO: 462679 - DNA, 69 bp, Homo sapiens; identical to SEQ ID NO: 459569
  chr2:31361021-31361090
  hyper
  liver_bileduct vs. breast,ovary,head_and_neck,renal

SEQ ID NO: 462680 - DNA, 179 bp, Homo sapiens; identical to SEQ ID NO: 459570
  chr2:31361118-31361297
  hyper
  liver_bileduct vs. breast,ovary,head_and_neck,renal

SEQ ID NO: 462681 - DNA, 70 bp, Homo sapiens; identical to SEQ ID NO: 346429
  chr2:31361690-31361760
  hyper
  liver_bileduct vs. breast,ovary,head_and_neck,renal

SEQ ID NO: 462682 - DNA, 77 bp, Homo sapiens; identical to SEQ ID NO: 454316
  chr2:42720186-42720263
  hyper
  liver_bileduct vs. cervical

SEQ ID NO: 462683 - DNA, 281 bp, Homo sapiens; identical to SEQ ID NO: 357157
  chr2:42721246-42721527
  hyper
  liver_bileduct vs. cervical

SEQ ID NO: 462684 - DNA, 2 bp, Homo sapiens
  chr2:45237177-45237179
  hyper
  liver_bileduct vs. cervical
cg

SEQ ID NO: 462685 - DNA, 60 bp, Homo sapiens
  chr2:47747991-47748051
  hyper
  liver_bileduct vs. multiple_myeloma, bladder_and_urothelial
cgcccggcggccccgcggcctggagagggtccccggcgcgggcggacgggcggtctacct

SEQ ID NO: 462686 - DNA, 204 bp, Homo sapiens
  chr2:47748523-47748727
  hyper
  liver_bileduct vs. multiple_myeloma, bladder_and_urothelial
ttccggtaggcggcgtgctggctgctcaccaggtccccgaagccgatggtgctgaaggtgacgaagcagaagtagagcgagtccacgtagtcccagccctccacgctggtgtacatggccgaggcgcagcaggacagcagcacggcgaacaggcccaggatgagcagcacgtggtacaccgagggcttccagcccgccaggctg

SEQ ID NO: 462687 - DNA, 204 bp, Homo sapiens
  chr2:63278430-63278634
  hyper
  liver_bileduct vs. myeloid_neoplasm
cggccccggcagctgagggcaggtaaggagaaagccgcggggccaccccggactccgggagcgcgttggttacccttatctccccctcctcaaatggatcccggcttccccggtccccagcaggtggtcggggctgtgggagcggcctggctcccctcttggtgagccgaggaccccggggcgctgtcgcggcccgcagccccc

SEQ ID NO: 462688 - DNA, 282 bp, Homo sapiens; identical to SEQ ID NO: 349507
  chr2:63279141-63279423
  hyper
  liver_bileduct vs. myeloid_neoplasm

SEQ ID NO: 462689 - DNA, 99 bp, Homo sapiens
  chr2:63282552-63282651
  hyper
  liver_bileduct vs. myeloid_neoplasm,thyroid,non_cancer
cgggagttgggtccgcggggcggtggagcaacaagctcccctagctccctttgacccactctcccccatccggcccactgcaggtctggttcaagaacc

SEQ ID NO: 462690 - DNA, 79 bp, Homo sapiens; identical to SEQ ID NO: 346440
  chr2:68547270-68547349
  hyper
  liver_bileduct vs. renal,sarcoma,melanoma,anorectal,lung, prostate,breast,head_and_neck,ovary

SEQ ID NO: 462691 - DNA, 121 bp, Homo sapiens; identical to SEQ ID NO: 454323
  chr2:73147029-73147150
  hyper
  liver_bileduct vs. myeloid_neoplasm,thyroid

SEQ ID NO: 462692 - DNA, 16 bp, Homo sapiens
  chr2:73148243-73148259
  hyper
  liver_bileduct vs. thyroid,myeloid_neoplasm,non_cancer
ggaccccgggtgcttc

SEQ ID NO: 462693 - DNA, 276 bp, Homo sapiens
  chr2:74425444-74425720
  hyper
  liver_bileduct vs. upper_gi,colorectal,lymphoid_neoplasm, lung,pancreas_gallbladder,breast,bladder_and_urothelial, head_and_neck,ovary,cervical,sarcoma,uterine,multiple_myeloma, melanoma,anorectal,prostate
cggccttcggtgacactagcggcgtcaggcaggagtttgacttcctcagcctatcatggcacgttgccgaggcttcagcgccttacaggacctcgctccaggctcttctggctccaatcaaaagcagggctctttcggacttcgcttacgtttaataaagaaaaccggttggccccttcggctccacctggctcaacagacagccagtggcatgcggcagggaccaatgggtggcggagggaggcggggcctgccacgaggccgcagtataaccgc

SEQ ID NO: 462694 - DNA, 396 bp, Homo sapiens
  chr2:74425790-74426186
  hyper
  liver_bileduct vs. upper_gi,colorectal,lymphoid_neoplasm, lung,pancreas_gallbladder,breast,bladder_and_urothelial, head_and_neck,ovary,cervical,sarcoma,uterine,multiple_myeloma, melanoma,anorectal,prostate
ctgctttggctgcccggctgctgcagcccgcgcacagctgctcccttcgccttcgccctttccacctcgcggcagttcggtaagagggtcacagagctcggtcagcgcggaaagctgaggggaacggagggcgaggggcacgccgggcccccgagggacaccgagggaagtccttcccgaacatctccgccccggcggtggtggccgctgaggggtgtggcggggcgacgtggcaccgagcgccgccgcagctctcgactggggcgcttcctcggcgcggagggctggtacccgaagcccgcctttcggagggagccgctctcctgcgactcggggcgtcgccggggcccgtggccagtcggcgggcgggacgggggtggcgtgcggaacgcgaag

SEQ ID NO: 462695 - DNA, 228 bp, Homo sapiens; identical to SEQ ID NO: 345018
  chr2:74426214-74426442
  hyper
  liver_bileduct vs. upper_gi,colorectal,lymphoid_neoplasm, lung,pancreas_gallbladder,breast,bladder_and_urothelial, head_and_neck,ovary,cervical,sarcoma,uterine,multiple_myeloma, melanoma,anorectal,prostate

SEQ ID NO: 462696 - DNA, 937 bp, Homo sapiens
  chr2:75060920-75061857
  hyper
  liver_bileduct vs. pancreas_gallbladder,lung,upper_gi, bladder_and_urothelial,breast,melanoma,ovary,colorectal, cervical,uterine
cgccccacaccccgggtccgcgatcacgctccccccacccatagccgagcctgacgcggcggtggctcatgcgcctttccgtcccagcctttagccacggaccacacgtcccatctcaggcgccccgcccctcccccgccccccgcccccggcgcgcctccccaggctgccggctccggtgtctgagcggccgcgcccgcgagccgtgagcgatgattggctgcgccacggcggcgggcggtccgtgggcgcacacaccctccccgcgcagccaatgggcgtgcgcacgtcactgatccggaggcccgcgggccggcagcccctcaataagccacattgttgcatgaaactccggcgcaggagtcccgggctgccgctggcaacatcgtgtcacccagctaagaaaatccgcgggcccgagccacgcgcctgtgaatcggagaggtcccactgcccgagtggagccgggctgagattcttctcaagttgagcctcagtgatcctgtggccgaagttagcgccttgacgtgggacaaccggacacgtcgccaggagagaactgaggcgccttctagcagttgtgacgccaaaatcacgtctccggagacccgcgccctccgccagccgggcgcaccctcgccggtagccttctttgtgcgccgtccggactcccagctcccggcccggcagccgagccccagcacaaagcagtcggaccgcgccgcccgcctcccctctcgcgtctccgcctcggtttcccaactctgcgccgtcgggccgcggcaggatgattgcctcgcatctgcttgcctacttcttcacggagctcaaccatgaccaagtgcagaaggtaagtcagcgcgggcggggcggcaggctgggctctggcaaagtggtctggcctccatcagtctcttcctcgaccctgcggggaccc

SEQ ID NO: 462697 - DNA, 977 bp, Homo sapiens
  chr2:75061375-75062352
  hyper
  liver_bileduct vs. lung,breast,upper_gi,melanoma, colorectal,pancreas_gallbladder,head_and_neck,prostate,renal, cervical,sarcoma,ovary,uterine
cgagtggagccgggctgagattcttctcaagttgagcctcagtgatcctgtggccgaagttagcgccttgacgtgggacaaccggacacgtcgccaggagagaactgaggcgccttctagcagttgtgacgccaaaatcacgtctccggagacccgcgccctccgccagccgggcgcaccctcgccggtagccttctttgtgcgccgtccggactcccagctcccggcccggcagccgagccccagcacaaagcagtcggaccgcgccgcccgcctcccctctcgcgtctccgcctcggtttcccaactctgcgccgtcgggccgcggcaggatgattgcctcgcatctgcttgcctacttcttcacggagctcaaccatgaccaagtgcagaaggtaagtcagcgcgggcggggcggcaggctgggctctggcaaagtggtctggcctccatcagtctcttcctcgaccctgcggggacccgcttcctccctactccgggcctgggagcggaaaaagtttgggcagccgggacactcctgggcgccaggagccacgtccgctaagcacagccggcgagtgcgcgcgggcggggagccgaggtcgcgctccgccgggcgccctccctccctgagctccggcacgcgctcacgctctctcccccagtccctttttccctgttactggaggggcgggtcaccccgcaggtagtcagggattgctgcgcccacgtgggagggagcccccttctgcagcgcgagttccggcgagagcacgtggagagaatcgtggctgcgggaggctgctccgctgccgcgtggggccgccgggggccgtccgcgctcgcggaccgcgtgtaggagacgagcggttcccttctccttccccgcggccctgcgggggtgggctcgaggagaagctgacccgggaaggagtaggaaaggggcagaggaactccgcccgccgcgccccctcccc

SEQ ID NO: 462698 - DNA, 658 bp, Homo sapiens
  chr2:75061872-75062530
  hyper
  liver_bileduct vs. upper_gi,colorectal,lung
cgggcctgggagcggaaaaagtttgggcagccgggacactcctgggcgccaggagccacgtccgctaagcacagccggcgagtgcgcgcgggcggggagccgaggtcgcgctccgccgggcgccctccctccctgagctccggcacgcgctcacgctctctcccccagtccctttttccctgttactggaggggcgggtcaccccgcaggtagtcagggattgctgcgcccacgtgggagggagcccccttctgcagcgcgagttccggcgagagcacgtggagagaatcgtggctgcgggaggctgctccgctgccgcgtggggccgccgggggccgtccgcgctcgcggaccgcgtgtaggagacgagcggttcccttctccttccccgcggccctgcgggggtgggctcgaggagaagctgacccgggaaggagtaggaaaggggcagaggaactccgcccgccgcgccccctccccggaactgtggcgcccggaactgaggctcggcgaggggcgtcccccattaacccccgcccctccaaatcagcctcgggaccgcccagcctcgtgtcctcaggatctgcctctgagtaaggggaggactttggttgttactttctggtttgccctaaaagttactcggagaggccaacgc

SEQ ID NO: 462699 - DNA, 229 bp, Homo sapiens; identical to SEQ ID NO: 357225
  chr2:75062575-75062804
  hyper
  liver_bileduct vs. upper_gi,colorectal,lung

SEQ ID NO: 462700 - DNA, 163 bp, Homo sapiens; identical to SEQ ID NO: 349538
  chr2:87018396-87018559
  hyper
  liver_bileduct vs. uterine,myeloid_neoplasm, bladder_and_urothelial,ovary,thyroid,renal,non_cancer,melanoma

SEQ ID NO: 462701 - DNA, 144 bp, Homo sapiens; identical to SEQ ID NO: 349540
  chr2:88752878-88753022
  hyper
  liver_bileduct vs. uterine,ovary,thyroid,breast,lung

SEQ ID NO: 462702 - DNA, 59 bp, Homo sapiens; identical to SEQ ID NO: 345026
  chr2:96991316-96991375
  hyper
  liver_bileduct vs. multiple_myeloma

SEQ ID NO: 462703 - DNA, 43 bp, Homo sapiens
  chr2:97203334-97203377
  hyper
  liver_bileduct vs. cervical,sarcoma, bladder_and_urothelial
cggtctgcagaagggacggggtggcggctggggagcgtcaggg

SEQ ID NO: 462704 - DNA, 39 bp, Homo sapiens; identical to SEQ ID NO: 346465
  chr2:97203545-97203584
  hyper
  liver_bileduct vs. cervical,sarcoma, bladder_and_urothelial

SEQ ID NO: 462705 - DNA, 213 bp, Homo sapiens
  chr2:98703022-98703235
  hyper
  liver_bileduct vs. lung,upper_gi,pancreas_gallbladder, ovary,breast,bladder_and_urothelial,uterine,colorectal,cervical, head_and_neck,lymphoid_neoplasm,sarcoma,anorectal, multiple_myeloma,non_cancer,thyroid
cgcccacgtccagtggctgagctacaacgaactgccccacctcttttaaagcgtctttctctgaactgtgcaaggaagagagcatcgcctgacagtggtgaggtgaaaattaaaactacacaggggtcaatgctctgctgaaaagtatgaaaagaagttcgtttgtagcgtttcccgcagtctcctcgcctctcctcggcctctggcgccttc

SEQ ID NO: 462706 - DNA, 201 bp, Homo sapiens
  chr2:98703475-98703676
  hyper
  liver_bileduct vs. lung,upper_gi,pancreas_gallbladder, ovary,breast,bladder_and_urothelial,uterine,colorectal,cervical, head_and_neck,lymphoid_neoplasm,sarcoma,anorectal, multiple_myeloma,non_cancer,thyroid
ggcctcggcgccccgccctcttggccacggtccgcagccatcgccccagtgagggcgcggtctgtgggcggggccggctccaggagccgcgctgtgattggccgtgtccaggcaaccgcggagacgccgtcgtcaacagaccgcgctcggaaccagaggcgcgggtcacagagacctagaacagctggaatccttcgcccc

SEQ ID NO: 462707 - DNA, 77 bp, Homo sapiens; identical to SEQ ID NO: 345029
  chr2:98703736-98703813
  hyper
  liver_bileduct vs. lung,upper_gi,pancreas_gallbladder, ovary,breast,bladder_and_urothelial,uterine,colorectal,cervical, head_and_neck,lymphoid_neoplasm,sarcoma,anorectal, multiple_myeloma,non_cancer,thyroid

SEQ ID NO: 462708 - DNA, 97 bp, Homo sapiens; identical to SEQ ID NO: 453106
  chr2:105468467-105468564
  hyper
  liver_bileduct vs. melanoma

SEQ ID NO: 462709 - DNA, 144 bp, Homo sapiens; identical to SEQ ID NO: 345031
  chr2:105471069-105471213
  hyper
  liver_bileduct vs. melanoma,renal

SEQ ID NO: 462710 - DNA, 155 bp, Homo sapiens; identical to SEQ ID NO: 349558
  chr2:105473814-105473969
  hyper
  liver_bileduct vs. renal

SEQ ID NO: 462711 - DNA, 31 bp, Homo sapiens; identical to SEQ ID NO: 453113
  chr2:118981062-118981093
  hyper
  liver_bileduct vs. multiple_myeloma,thyroid,non_cancer, prostate,myeloid_neoplasm

SEQ ID NO: 462712 - DNA, 190 bp, Homo sapiens; identical to SEQ ID NO: 357276
  chr2:119068126-119068316
  hyper
  liver_bileduct vs. bladder_and_urothelial,prostate, thyroid

SEQ ID NO: 462713 - DNA, 287 bp, Homo sapiens
  chr2:122042359-122042646
  hyper
  liver_bileduct vs. upper_gi,lung,colorectal
ctgccgcctgggaggagccctcgcagacatagggctctgcgcgctcgcctccccagcgggcccccaactccgcacgtcgggtcccgccggcgtccatctgtcagtccctaggcgggacgctgggcgggtctctcagtccccagagggcggacagcggggaggccagggcccagcaggggcgccccctctccgcccctggacgtccaacggcgcccggcccgccggcccggcccgagacccgcggggaccgcgcgcggcccttaccgcaggtagctgccggagttgtg

SEQ ID NO: 462714 - DNA, 110 bp, Homo sapiens; identical to SEQ ID NO: 357292
  chr2:122042982-122043092
  hyper
  liver_bileduct vs. upper_gi,lung,colorectal

SEQ ID NO: 462715 - DNA, 129 bp, Homo sapiens; identical to SEQ ID NO: 457862
  chr2:136873862-136873991
  hyper
  liver_bileduct vs. breast,uterine,ovary, lymphoid_neoplasm,prostate,multiple_myeloma,head_and_neck,renal, non_cancer,myeloid_neoplasm,thyroid,lung,anorectal

SEQ ID NO: 462716 - DNA, 792 bp, Homo sapiens; identical to SEQ ID NO: 345040
  chr2:136874020-136874812
  hyper
  liver_bileduct vs. breast,uterine,ovary, lymphoid_neoplasm,prostate,multiple_myeloma,head_and_neck,renal, non_cancer,myeloid_neoplasm,thyroid,lung,anorectal

SEQ ID NO: 462717 - DNA, 588 bp, Homo sapiens; identical to SEQ ID NO: 457864
  chr2:136874345-136874933
  hyper
  liver_bileduct vs. breast,lymphoid_neoplasm,ovary, uterine,prostate,multiple_myeloma,renal,myeloid_neoplasm, non_cancer,thyroid

SEQ ID NO: 462718 - DNA, 94 bp, Homo sapiens; identical to SEQ ID NO: 457865
  chr2:136874839-136874933
  hyper
  liver_bileduct vs. lymphoid_neoplasm,breast, multiple_myeloma,ovary

SEQ ID NO: 462719 - DNA, 427 bp, Homo sapiens; identical to SEQ ID NO: 457866
  chr2:136875399-136875826
  hyper
  liver_bileduct vs. lymphoid_neoplasm,breast, multiple_myeloma,ovary

SEQ ID NO: 462720 - DNA, 483 bp, Homo sapiens; identical to SEQ ID NO: 453118
  chr2:136875399-136875882
  hyper
  liver_bileduct vs. multiple_myeloma,lymphoid_neoplasm, prostate

SEQ ID NO: 462721 - DNA, 85 bp, Homo sapiens; identical to SEQ ID NO: 453119
  chr2:136876145-136876230
  hyper
  liver_bileduct vs. multiple_myeloma,lymphoid_neoplasm, prostate

SEQ ID NO: 462722 - DNA, 44 bp, Homo sapiens; identical to SEQ ID NO: 453120
  chr2:136875838-136875882
  hyper
  liver_bileduct vs. multiple_myeloma

SEQ ID NO: 462723 - DNA, 218 bp, Homo sapiens; identical to SEQ ID NO: 453121
  chr2:136876145-136876363
  hyper
  liver_bileduct vs. multiple_myeloma

SEQ ID NO: 462724 - DNA, 1 bp, Homo sapiens
  chr2:145282267-145282268
  hyper
  liver_bileduct vs. melanoma,lymphoid_neoplasm,renal, myeloid_neoplasm,bladder_and_urothelial,non_cancer,uterine, sarcoma,ovary
c

SEQ ID NO: 462725 - DNA, 51 bp, Homo sapiens; identical to SEQ ID NO: 453124
  chr2:149632592-149632643
  hyper
  liver_bileduct vs. prostate,ovary,sarcoma,thyroid,breast, non_cancer,melanoma

SEQ ID NO: 462726 - DNA, 9 bp, Homo sapiens
  chr2:160760627-160760636
  hyper
  liver_bileduct vs. upper_gi,lymphoid_neoplasm,cervical, pancreas_gallbladder,anorectal,colorectal,ovary, myeloid_neoplasm,non_cancer,head_and_neck,breast, bladder_and_urothelial,uterine,multiple_myeloma
cgggaatcg

SEQ ID NO: 462727 - DNA, 124 bp, Homo sapiens
  chr2:161264043-161264167
  hyper
  liver_bileduct vs. lung
cgctgcgggcggcggcggcgggtgcgggcgcgggcgcgggcgcggggcagcctcgccgcgagggggagggcgcaaggaggtggccggccgggcccggggccgcggcagctctgggaactccctc

SEQ ID NO: 462728 - DNA, 16 bp, Homo sapiens
  chr2:161264340-161264356
  hyper
  liver_bileduct vs. lung
cgccgactctcccggc

SEQ ID NO: 462729 - DNA, 204 bp, Homo sapiens
  chr2:161264419-161264623
  hyper
  liver_bileduct vs. lung
cgcgccggccgggggcggggaggcggcagcgcaccgcctcgcgccgcgcccaggcccacccgcgcctccccgcccgcccgctgggcgcggcgcctgccgccccatcgcccgcccggcccccgcgctctccctcccgggatcggggccggagccggggccgggcggcccggggagcagccggcgcccccgctctggtgcaatggt

SEQ ID NO: 462730 - DNA, 76 bp, Homo sapiens; identical to SEQ ID NO: 346489
  chr2:172950233-172950309
  hyper
  liver_bileduct vs. head_and_neck,breast,uterine, myeloid_neoplasm,sarcoma,colorectal,renal,anorectal,prostate, ovary,non_cancer,melanoma

SEQ ID NO: 462731 - DNA, 231 bp, Homo sapiens; identical to SEQ ID NO: 457886
  chr2:172950233-172950464
  hyper
  liver_bileduct vs. breast,colorectal,upper_gi,uterine, head_and_neck,myeloid_neoplasm,ovary,thyroid

SEQ ID NO: 462732 - DNA, 233 bp, Homo sapiens; identical to SEQ ID NO: 349624
  chr2:172950493-172950726
  hyper
  liver_bileduct vs. breast,colorectal,upper_gi,uterine, head_and_neck,myeloid_neoplasm,ovary,thyroid

SEQ ID NO: 462733 - DNA, 163 bp, Homo sapiens; identical to SEQ ID NO: 346492
  chr2:172967062-172967225
  hyper
  liver_bileduct vs. uterine,ovary,myeloid_neoplasm, thyroid,renal,colorectal,prostate,anorectal,breast,non_cancer, upper_gi,sarcoma

SEQ ID NO: 462734 - DNA, 24 bp, Homo sapiens
  chr2:174219243-174219267
  hyper
  liver_bileduct vs. upper_gi,pancreas_gallbladder, colorectal,bladder_and_urothelial,lymphoid_neoplasm,cervical, head_and_neck,sarcoma,ovary,uterine,lung,prostate
ccccccagactccacttttcctcc

SEQ ID NO: 462735 - DNA, 689 bp, Homo sapiens
  chr2:174219326-174220015
  hyper
  liver_bileduct vs. upper_gi,pancreas_gallbladder, colorectal,bladder_and_urothelial,lymphoid_neoplasm,cervical, head_and_neck,sarcoma,ovary,uterine,lung,prostate
cgcgccactcgctcaggaccgcgcagctgcacaaggagagtggtccccgtagcccctaaagcccccctttctcaaaggggattttaggagtgcccaaggctatcctttgaggtcagaatatataggggggtcgtgttttttccagggggccacctagtcttgcgccatgtctggccgttaccacagcttgcaggacctgtgtcccaacgcgggaaagacagcccgagccccgcccctccgggcccgggtcggcgcgcccagcctgccagccgcgctgctgctgctcctcctgctgtgggaccgctgaccgcgcggctgctccgctctccccgctccaagcgccgatctgggcacccgccaccagcatggacgctcgccgcgtgccggtgagggctgggcgggcgaacccgaggggcgggcgcggtgggtgctggacgcaggcgggcgcgggccgaccctctccaactccgcagcctagcgctgccttaactggtggcctgcctaggcgttgcccgcttgggcaagcccctgattttgtgcacctgggataactgagggccatggggacgttcctgcgtggcgtgcgcacccgaagtgcgggcggcgtggagacttgagtcgtttgcaggatggctagcagcgctggaaagccctaggcacgtgcgtccgccaaaggccggacagcggcc

SEQ ID NO: 462736 - DNA, 834 bp, Homo sapiens
  chr2:174219533-174220367
  hyper
  liver_bileduct vs. lung,upper_gi,pancreas_gallbladder, bladder_and_urothelial,lymphoid_neoplasm,colorectal,ovary, head_and_neck,cervical,uterine,sarcoma,anorectal,prostate, breast
cgcgggaaagacagcccgagccccgcccctccgggcccgggtcggcgcgcccagcctgccagccgcgctgctgctgctcctcctgctgtgggaccgctgaccgcgcggctgctccgctctccccgctccaagcgccgatctgggcacccgccaccagcatggacgctcgccgcgtgccggtgagggctgggcgggcgaacccgaggggcgggcgcggtgggtgctggacgcaggcgggcgcgggccgaccctctccaactccgcagcctagcgctgccttaactggtggcctgcctaggcgttgcccgcttgggcaagcccctgattttgtgcacctgggataactgagggccatggggacgttcctgcgtggcgtgcgcacccgaagtgcgggcggcgtggagacttgagtcgtttgcaggatggctagcagcgctggaaagccctaggcacgtgcgtccgccaaaggccggacagcggccgggagcgctggccggtcccgattttgcctgccaggcagagccagcctgcctgccccctgggaggttgtcccgcagcggcccagccctttcccgcacacaactcggagccagtgcgtggctcgccgcgtctatacccgcgctcagtgggtggcccttgggcgcgcaccccgcccggcaagagacgcgtccgcttctaaccgctgagggccagcgcgtctgaggtttaaggtcttgcgaaccggtctcctagaacttgggctgcgcacgcagtgtgaagcgaccgtagtcccgggcggtggttaagtgcatttaaagggcttggtgggtcaaagcgttcgccgaccatttgctc

SEQ ID NO: 462737 - DNA, 42 bp, Homo sapiens; identical to SEQ ID NO: 454338
  chr2:175190730-175190772
  hyper
  liver_bileduct vs. myeloid_neoplasm,cervical

SEQ ID NO: 462738 - DNA, 518 bp, Homo sapiens
  chr2:175197265-175197783
  hyper
  liver_bileduct vs. multiple_myeloma
atggttggcttgaaaatgtcactagtgctaagtggcttttcggattgtcttatttattactttgtcaggtttccttaaggagagggtgtgttgggggtgggggaggaggtggactggggaaacctctgcgtttctcctcctcggctgcacagggtgagtaggaaacgcctcgctgccacttaacaatccctctattagtaaatctacgcggagactctatgggaagccgagaaccagtgtcttcttccagggcagaagtcacctgttgggaacggcccccgggtccccctgctgggctttccggctcttctaggcggcctgatttctcctcagccctccacccagcgtccctcagggacttttcacacctccccacccccatttccactacagtctcccagggcacagcacttcattgacagccacacgagccttctcgttctcttctcctctgttccttctctttctcttctcctctgttccttctctttctctgtcataatttccttggtgctttc

SEQ ID NO: 462739 - DNA, 21 bp, Homo sapiens
  chr2:175199348-175199369
  hyper
  liver_bileduct vs. thyroid
cggggtggtttgtgtgtgggg

SEQ ID NO: 462740 - DNA, 206 bp, Homo sapiens
  chr2:175199935-175200141
  hyper
  liver_bileduct vs. thyroid
tgctagactgcagcttcagcttctattagcactttccacatttctgggactgatttttccccaagtttttggaacccagaaagatgcctttgcaagaaaaggccttcttaatcaagtcctttttcatttggtttcaaaaaaaagctagaggtttcttttcttcccctcgtgatttataccccatcccccgcattgctttggggatt

SEQ ID NO: 462741 - DNA, 76 bp, Homo sapiens
  chr2:175204013-175204089
  hyper
  liver_bileduct vs. multiple_myeloma
cgttttaaaaagcccccaaactaagcacttgatttgataactaggctttttaatgttatggaagacaactgctcct

SEQ ID NO: 462742 - DNA, 61 bp, Homo sapiens; identical to SEQ ID NO: 349639
  chr2:176995668-176995729
  hyper
  liver_bileduct vs. sarcoma,colorectal,melanoma

SEQ ID NO: 462743 - DNA, 22 bp, Homo sapiens
  chr2:177001081-177001103
  hyper
  liver_bileduct vs. colorectal,anorectal,renal
cgggggagagagaaagcagaag

SEQ ID NO: 462744 - DNA, 41 bp, Homo sapiens
  chr2:177042492-177042533
  hyper
  liver_bileduct vs. ovary,bladder_and_urothelial
cgtggttggtgaggaggctgggagaaggcctttttgatggc

SEQ ID NO: 462745 - DNA, 5 bp, Homo sapiens
  chr2:182321353-182321358
  hyper
  liver_bileduct vs. myeloid_neoplasm,multiple_myeloma, non_cancer,lymphoid_neoplasm,sarcoma,thyroid,uterine
cgtgg

SEQ ID NO: 462746 - DNA, 34 bp, Homo sapiens; identical to SEQ ID NO: 345053
  chr2:182323095-182323129
  hyper
  liver_bileduct vs. thyroid,myeloid_neoplasm

SEQ ID NO: 462747 - DNA, 134 bp, Homo sapiens
  chr2:200326735-200326869
  hyper
  liver_bileduct vs. myeloid_neoplasm,thyroid,non_cancer, uterine
ggctctcgcctgggccatcccgggctctgagggcccggcatccatccccaaggtccatggctttcaagttcggtcacccaggcagagagaccctgccttttaaagagccctggaaagttgcgccgcgttttccc

SEQ ID NO: 462748 - DNA, 280 bp, Homo sapiens
  chr2:200326960-200327240
  hyper
  liver_bileduct vs. myeloid_neoplasm,thyroid,non_cancer, uterine
ccctggagcttgccctcctgggggcgggaggagggcgggagggaatcatttctttcaaatgaagcccacgccagctctgaagccaatttccgccgcggactgtccgtggagagttggcgaccaacactttctcggacggcataaccgcgaggggcttagactggaaatcagatgcgccaagaggacaagagccaggggccagaataccccagtgggggacgcgccttggaggacggttcgcccagggtgggcttcagccctttcccagagtgctccgggc

SEQ ID NO: 462749 - DNA, 148 bp, Homo sapiens
  chr2:200327092-200327240
  hyper
  liver_bileduct vs. thyroid,non_cancer,myeloid_neoplasm
cggacggcataaccgcgaggggcttagactggaaatcagatgcgccaagaggacaagagccaggggccagaataccccagtgggggacgcgccttggaggacggttcgcccagggtgggcttcagccctttcccagagtgctccgggc

SEQ ID NO: 462750 - DNA, 280 bp, Homo sapiens; identical to SEQ ID NO: 349666
  chr2:200327794-200328074
  hyper
  liver_bileduct vs. thyroid,non_cancer,myeloid_neoplasm

SEQ ID NO: 462751 - DNA, 11 bp, Homo sapiens
  chr2:207139040-207139051
  hyper
  liver_bileduct vs. melanoma,thyroid,prostate
cggaaacgact

SEQ ID NO: 462752 - DNA, 863 bp, Homo sapiens; identical to SEQ ID NO: 331634
  chr2:223183542-223184405
  hyper
  liver_bileduct vs. lung

SEQ ID NO: 462753 - DNA, 29 bp, Homo sapiens
  chr2:230579178-230579207
  hyper
  liver_bileduct vs. lung
gtgacggcggcggcggtggcagtggcgac

SEQ ID NO: 462754 - DNA, 206 bp, Homo sapiens; identical to SEQ ID NO: 455917
  chr2:241771771-241771977
  hyper
  liver_bileduct vs. ovary,uterine,thyroid,non_cancer

SEQ ID NO: 462755 - DNA, 2 bp, Homo sapiens
  chr2:241772136-241772138
  hyper
  liver_bileduct vs. ovary,uterine,thyroid,non_cancer
cc

SEQ ID NO: 462756 - DNA, 7 bp, Homo sapiens
  chr20:291046-291053
  hyper
  liver_bileduct vs. multiple_myeloma,sarcoma,ovary
cgccggc

SEQ ID NO: 462757 - DNA, 126 bp, Homo sapiens; identical to SEQ ID NO: 455922
  chr20:3229128-3229254
  hyper
  liver_bileduct vs. upper_gi,multiple_myeloma,colorectal, cervical

SEQ ID NO: 462758 - DNA, 155 bp, Homo sapiens; identical to SEQ ID NO: 455923
  chr20:3229326-3229481
  hyper
  liver_bileduct vs. upper_gi,multiple_myeloma,colorectal, cervical

SEQ ID NO: 462759 - DNA, 32 bp, Homo sapiens; identical to SEQ ID NO: 455924
  chr20:3229526-3229558
  hyper
  liver_bileduct vs. upper_gi,multiple_myeloma,colorectal, cervical

SEQ ID NO: 462760 - DNA, 144 bp, Homo sapiens; identical to SEQ ID NO: 352449
  chr20:3229659-3229803
  hyper
  liver_bileduct vs. upper_gi,multiple_myeloma,colorectal, cervical

SEQ ID NO: 462761 - DNA, 414 bp, Homo sapiens; identical to SEQ ID NO: 347652
  chr20:4804008-4804422
  hyper
  liver_bileduct vs. melanoma,lymphoid_neoplasm, multiple_myeloma

SEQ ID NO: 462762 - DNA, 154 bp, Homo sapiens
  chr20:19192506-19192660
  hyper
  liver_bileduct vs. breast
cgggaggcccgcgagaagaggcgaggccagaggctgggcgcgggcagccaagcgcactcgcggcgccccgactccaggtagcacgtagagaggaggctgaagagcccctcggttttccgaaagtttccagcgaatccttcttggtgaagatcgg

SEQ ID NO: 462763 - DNA, 268 bp, Homo sapiens
  chr20:19193616-19193884
  hyper
gagagcagaagggtgagtgcacgctgcctgccccgagtgggcgctgcggctccggcggctcggggctcccggggctgggcgcggggctccttcgggcggcccggccggagccccaggataagcgggctgggttggcggggggagtgggatgccaggcacgaggactccccctgccccacgcagaggcatggaggtggggaccctgagcgccagcagccagcaggcttaggcgtctggccgccctgggaacatttacctgtgcccgcct

SEQ ID NO: 462764 - DNA, 206 bp, Homo sapiens; identical to SEQ ID NO: 453161
  chr20:21080357-21080563
  hyper
  liver_bileduct vs. colorectal

SEQ ID NO: 462765 - DNA, 483 bp, Homo sapiens
  chr20:30555404-30555887
  hyper
  liver_bileduct vs. uterine,ovary,melanoma,non_cancer, anorectal,renal,bladder_and_urothelial,breast
cgaagacaataagaaaaggggacccctcaagatcaaaggaggggatggaacaatatgtgagcactcaggaaactggaaatgagcgttagcatggagtgactgctaaagggttactggggggcccgcccaagtcccccagctcctttcttccaagtcccccacccacccccccgtcagacccaggccactggaggtgaacacaggagaaaaacgaagtggagagaatgggaagggggaggcgataaacaaaaaagaaggaagtgcagtccgaggggagatgagagacagaaagcatggggttggagccccgcgcctccgaggaaggagggagagggtgacctggggtgcgccccgcctcccctgcttccgcattcccgggggctgcccccccttcggccgcagctcaggcgggtgggggcggggcggggcggcgccgaggagaatgaataattgaagtggaggggaggaggaagaagaggagaa

SEQ ID NO: 462766 - DNA, 108 bp, Homo sapiens
  chr20:30555779-30555887
  hyper
  liver_bileduct vs. ovary,uterine,renal,thyroid,prostate, melanoma,non_cancer
cgggggctgcccccccttcggccgcagctcaggcgggtgggggcggggcggggcggcgccgaggagaatgaataattgaagtggaggggaggaggaagaagaggagaa

SEQ ID NO: 462767 - DNA, 248 bp, Homo sapiens; identical to SEQ ID NO: 352477
  chr20:30556403-30556651
  hyper
  liver_bileduct vs. ovary,uterine,renal,thyroid,prostate, melanoma,non_cancer

SEQ ID NO: 462768 - DNA, 15 bp, Homo sapiens
  chr20:30778313-30778328
  hyper
  liver_bileduct vs. bladder_and_urothelial, pancreas_gallbladder
ttcgttggcgctggc

SEQ ID NO: 462769 - DNA, 60 bp, Homo sapiens; identical to SEQ ID NO: 454352
  chr20:34190072-34190132
  hyper
  liver_bileduct vs. anorectal

SEQ ID NO: 462770 - DNA, 1 bp, Homo sapiens
  chr20:34190145-34190146
  hyper
  liver_bileduct vs. anorectal
c

SEQ ID NO: 462771 - DNA, 390 bp, Homo sapiens; identical to SEQ ID NO: 455936
  chr20:37433723-37434113
  hyper
  liver_bileduct vs. ovary,multiple_myeloma

SEQ ID NO: 462772 - DNA, 27 bp, Homo sapiens
  chr20:37434086-37434113
  hyper
  liver_bileduct vs. multiple_myeloma,ovary,uterine
cggggtgggggttaggaaaactatttt

SEQ ID NO: 462773 - DNA, 125 bp, Homo sapiens
  chr20:43017186-43017311
  hyper
  liver_bileduct vs. lung
cgagctgtgattggtgatcgaaccgagcaggcctcctctggatttggagagacatagtgcgtctgggcctgtgattggcgggattgctgtgattggtgaagtccctaaggctatctaagtttctg

SEQ ID NO: 462774 - DNA, 110 bp, Homo sapiens; identical to SEQ ID NO: 361883
  chr20:43017399-43017509
  hyper
  liver_bileduct vs. lung

SEQ ID NO: 462775 - DNA, 66 bp, Homo sapiens; identical to SEQ ID NO: 352499
  chr20:44937643-44937709
  hyper
  liver_bileduct vs. cervical

SEQ ID NO: 462776 - DNA, 248 bp, Homo sapiens; identical to SEQ ID NO: 459641
  chr20:61810310-61810558
  hyper
  liver_bileduct vs. melanoma

SEQ ID NO: 462777 - DNA, 44 bp, Homo sapiens
  chr20:62461248-62461292
  hyper
  liver_bileduct vs. breast
cgatacaattaaaatgcccgtgagttctcggcgcacaggtgtct

SEQ ID NO: 462778 - DNA, 264 bp, Homo sapiens; identical to SEQ ID NO: 352532
  chr20:62461639-62461903
  hyper
  liver_bileduct vs. breast

SEQ ID NO: 462779 - DNA, 16 bp, Homo sapiens
  chr21:26934818-26934834
  hyper
  liver_bileduct vs. cervical,anorectal,sarcoma, multiple_myeloma,upper_gi,lymphoid_neoplasm,head_and_neck, myeloid_neoplasm,colorectal,thyroid
ggaaggaggggtgttc

SEQ ID NO: 462780 - DNA, 136 bp, Homo sapiens
  chr21:40032971-40033107
  hyper
cggaggagcagaggctgggacggccggaggagagagtccggccccagcaggaaaggaacccagcacgcgactactggaggggcgaggagcaagggaaggaccagaggggaggagagggggtcaggggagggaaagt

SEQ ID NO: 462781 - DNA, 76 bp, Homo sapiens
  chr21:40033358-40033434
  hyper
gccggatacagccgccgggacgcggggatgccgagggcaccgcggcctggtctgaccgacgcacgcggtgacagcc

SEQ ID NO: 462782 - DNA, 141 bp, Homo sapiens; identical to SEQ ID NO: 361993
  chr21:40033449-40033590
  hyper

SEQ ID NO: 462783 - DNA, 143 bp, Homo sapiens; identical to SEQ ID NO: 453174
  chr21:47063290-47063433
  hyper
  liver_bileduct vs. lung,melanoma,ovary,non_cancer, prostate

SEQ ID NO: 462784 - DNA, 68 bp, Homo sapiens; identical to SEQ ID NO: 457947
  chr22:21368234-21368302
  hyper
  liver_bileduct vs. ovary

SEQ ID NO: 462785 - DNA, 94 bp, Homo sapiens; identical to SEQ ID NO: 362020
  chr22:21368697-21368791
  hyper
  liver_bileduct vs. ovary

SEQ ID NO: 462786 - DNA, 328 bp, Homo sapiens; identical to SEQ ID NO: 352581
  chr22:22012017-22012345
  hyper
  liver_bileduct vs. lung,breast,colorectal

SEQ ID NO: 462787 - DNA, 137 bp, Homo sapiens; identical to SEQ ID NO: 453177
  chr22:22862472-22862609
  hyper
  liver_bileduct vs. uterine,prostate,myeloid_neoplasm, multiple_myeloma,non_cancer,lymphoid_neoplasm,melanoma

SEQ ID NO: 462788 - DNA, 97 bp, Homo sapiens; identical to SEQ ID NO: 455955
  chr22:27053098-27053195
  hyper
  liver_bileduct vs. anorectal

SEQ ID NO: 462789 - DNA, 268 bp, Homo sapiens; identical to SEQ ID NO: 455956
  chr22:27053250-27053518
  hyper
  liver_bileduct vs. anorectal

SEQ ID NO: 462790 - DNA, 81 bp, Homo sapiens
  chr22:27053437-27053518
  hyper
  liver_bileduct vs. multiple_myeloma
cgctgcagcagctacaaagacgacgccggctgcgctcgcgggaccagagggagggaggctgcggacgagtgcggggaggag

SEQ ID NO: 462791 - DNA, 230 bp, Homo sapiens; identical to SEQ ID NO: 352595
  chr22:27054028-27054258
  hyper
  liver_bileduct vs. multiple_myeloma

SEQ ID NO: 462792 - DNA, 14 bp, Homo sapiens
  chr22:42354024-42354038
  hyper
  liver_bileduct vs. multiple_myeloma,lymphoid_neoplasm, pancreas_gallbladder
gcctgggccctccc

SEQ ID NO: 462793 - DNA, 210 bp, Homo sapiens
  chr22:43115852-43116062
  hyper
  liver_bileduct vs. cervical
cgcggaacaatcactcgacgttggcggaggggaggaagccgcagagagggtgtcgtgagggaaaggtgggtgcaggggaaatggcgctttaacccactcagggccagaggctcagccgagactatccaggtgggaacttgtccctccggatgacaggtgatgaaactgagggaaggggactcgccctggcagtgaaacgggatgggcgct

SEQ ID NO: 462794 - DNA, 107 bp, Homo sapiens; identical to SEQ ID NO: 352619
  chr22:43116269-43116376
  hyper
  liver_bileduct vs. cervical

SEQ ID NO: 462795 - DNA, 198 bp, Homo sapiens
  chr22:45403714-45403912
  hyper
  liver_bileduct vs. melanoma
gtgctgaaaccccgagcgctgagctcagcgcaactaagtcacaatggacaacttttcctccccggagggggcccggaggggggggagcggtcgcgcctccgacgcgtgggagcttctcaggtgtccccaactacacctaacgcccggagcccaaagttggagcagaactggggagtcccgggggcgcgtttcttttgt

SEQ ID NO: 462796 - DNA, 177 bp, Homo sapiens
  chr22:45405768-45405945
  hyper
  liver_bileduct vs. melanoma,sarcoma
gccgcctcctcccgcgcgagcctcccgcgggcagggactatatttcctccggcgcgcgcgcctggatctcgttgggcctcggcaaagttgtgcctcggcacgatgctaattcggcagtgcccggatggagcgggccggggcggcggggggcggtgccgggaccctcagcccgccgcg

SEQ ID NO: 462797 - DNA, 177 bp, Homo sapiens; identical to SEQ ID NO: 462796
  chr22:45405768-45405945
  hyper
  liver_bileduct vs. melanoma

SEQ ID NO: 462798 - DNA, 178 bp, Homo sapiens; identical to SEQ ID NO: 362097
  chr22:45406385-45406563
  hyper
  liver_bileduct vs. melanoma

SEQ ID NO: 462799 - DNA, 121 bp, Homo sapiens
  chr22:46367867-46367988
  hyper
  liver_bileduct vs. melanoma
agcttaggctggcgaggcgacctaaagtcccccggctcccgcgcgcgacggtcacccggtgccccgcccaggggcctcgctgccgcgttccctgcccgcccggttccagcgctggaggccc

SEQ ID NO: 462800 - DNA, 79 bp, Homo sapiens
  chr22:51042182-51042261
  hyper
  liver_bileduct vs. multiple_myeloma
cgggggaggagggcagggaggatggactggctgctggaagaggcctgggtggtgcagagagggtgaccccacctccctg

SEQ ID NO: 462801 - DNA, 92 bp, Homo sapiens; identical to SEQ ID NO: 331702
  chr3:14443834-14443926
  hyper
  liver_bileduct vs. upper_gi,lung

SEQ ID NO: 462802 - DNA, 580 bp, Homo sapiens
  chr3:14443996-14444576
  hyper
  liver_bileduct vs. lung,upper_gi
cgcgcgtgtgtccgcacttggggcggggctggaagccccggccccgccccggccccgcccccggcccggccgagctggtatttttccacccagcaggatgggtgatgctgagagctgcctgctcagacaacagacacgcgaggtcaggaagaagccgcttataaattaccgcttccttcgcgccgccgccaacgccgagccccgaggaccgcaagcccagaggacaagctgcgccaagagggagtgctggagctgttcacccagcgggtcagagagcgagccgggcaggccagcccccggccggcggaaccctggcacagcctgagcagatgctgcgggcggcgccgcagccaccccaggtaccggagggaccgggagctgggcgcgcagccggcgctgcccgccgtctgcagcccctccccatccccgcgtcgccgcagtcccggcctcctcccctccgcgtgcgcccatccggcgcccctttcaccaccgcggaagggaccgagagtcgcctgctcagtcccgctggcggggctgttattgtttccccggcaaaagggctccggctcttggtgcgggc

SEQ ID NO: 462803 - DNA, 30 bp, Homo sapiens
  chr3:32860277-32860307
  hyper
  liver_bileduct vs. anorectal
cactacatcgagcgcggcccgccgggtccc

SEQ ID NO: 462804 - DNA, 11 bp, Homo sapiens
  chr3:37493509-37493520
  hyper
  liver_bileduct vs. sarcoma,lung,ovary,renal, myeloid_neoplasm,thyroid
cgcagggctca

SEQ ID NO: 462805 - DNA, 1 bp, Homo sapiens
  chr3:37494424-37494425
  hyper
  liver_bileduct vs. sarcoma,lung,ovary,renal, myeloid_neoplasm,thyroid
c

SEQ ID NO: 462806 - DNA, 234 bp, Homo sapiens; identical to SEQ ID NO: 453203
  chr3:49906737-49906971
  hyper
  liver_bileduct vs. prostate,multiple_myeloma,uterine, sarcoma,ovary,non_cancer,head_and_neck,lung,thyroid,breast

SEQ ID NO: 462807 - DNA, 49 bp, Homo sapiens; identical to SEQ ID NO: 349768
  chr3:49907379-49907428
  hyper
  liver_bileduct vs. prostate,multiple_myeloma,uterine, sarcoma,ovary,non_cancer,head_and_neck,lung,thyroid,breast

SEQ ID NO: 462808 - DNA, 82 bp, Homo sapiens; identical to SEQ ID NO: 454369
  chr3:50377892-50377974
  hyper
  liver_bileduct vs. anorectal,head_and_neck, multiple_myeloma,myeloid_neoplasm,upper_gi,non_cancer,cervical, sarcoma

SEQ ID NO: 462809 - DNA, 167 bp, Homo sapiens; identical to SEQ ID NO: 346566
  chr3:50378002-50378169
  hyper
  liver_bileduct vs. anorectal,head_and_neck, multiple_myeloma,myeloid_neoplasm,upper_gi,non_cancer,cervical, sarcoma

SEQ ID NO: 462810 - DNA, 12 bp, Homo sapiens
  chr3:101497830-101497842
  hyper
  liver_bileduct vs. lung,lymphoid_neoplasm, bladder_and_urothelial,melanoma
cgtccgaagttc

SEQ ID NO: 462811 - DNA, 299 bp, Homo sapiens; identical to SEQ ID NO: 349796
  chr3:101497996-101498295
  hyper
  liver_bileduct vs. lung,lymphoid_neoplasm, bladder_and_urothelial,melanoma

SEQ ID NO: 462812 - DNA, 98 bp, Homo sapiens; identical to SEQ ID NO: 349797
  chr3:101498512-101498610
  hyper
  liver_bileduct vs. lung

SEQ ID NO: 462813 - DNA, 335 bp, Homo sapiens
  chr3:112051807-112052142
  hyper
  liver_bileduct vs. melanoma
cggtcacctttgaaaagggaaaaatgtctgaaaatagacaaagctgaatataaacatcatttaattccccccacacagacagcctccgctcctgtgagggcgtggggaaaacggagtgggagaagggggctagcgaggaggaagaggcgggaggtgcggcaggggcacaggtgacgctcctcccgcctgcctagcagagctccaggcgcacatccgcagtcagccacctcgcgcgcgcctccaggagcaaggatggagaggctggtgagcggggccggggcttgggaaggagggcgcagggcaggcgatgttgagccggtggccctggggcgggc

SEQ ID NO: 462814 - DNA, 80 bp, Homo sapiens
  chr3:112052419-112052499
  hyper
  liver_bileduct vs. melanoma
agctcccaaaactggggaggcacagcctattttaaactgcccccaaaagggaaagagaaatgctgtattggttccatatt

SEQ ID NO: 462815 - DNA, 104 bp, Homo sapiens
  chr3:112930511-112930615
  hyper
ggaccctgagccccggcccgccggtgtcagccgccgcgcgcgcgcacagacacacacacagagacacacaaacacacacagaaaagacacacacgcgcacacac

SEQ ID NO: 462816 - DNA, 152 bp, Homo sapiens
  chr3:112930655-112930807
  hyper
cgcacgcgccctccctctccggcccgcaacttctcggtcctcggctcctttgttgctccagccgcggccgctcgcccgtgttgtgtgtccccggtgtcaccgagcgtgttgtgtgtccgtgcggcgcggcgctgtgtggctccctcgcgccc

SEQ ID NO: 462817 - DNA, 9 bp, Homo sapiens
  chr3:132756962-132756971
  hyper
  liver_bileduct vs. lung,sarcoma
cgaaaacag

SEQ ID NO: 462818 - DNA, 45 bp, Homo sapiens; identical to SEQ ID NO: 370212
  chr3:134370196-134370241
  hyper
  liver_bileduct vs. breast

SEQ ID NO: 462819 - DNA, 13 bp, Homo sapiens
  chr3:138679565-138679578
  hyper
  liver_bileduct vs. thyroid,multiple_myeloma
cgggcacagacgc

SEQ ID NO: 462820 - DNA, 995 bp, Homo sapiens
  chr3:140660238-140661233
  hyper
  liver_bileduct vs. upper_gi,lung
cgtgcacaaacctttttatgcattgtgcgagggttactctgagatagacaccaagggaactgctgggtcataaatccaattttttcaaagtaaatccgcttgcgaacccggaaccaagtcgatttttcccgccccgccagttccctgttcaggagagtgcagccgtgattggcgcgttcactcaggccaggggcgccccaggtctcaggtgctaggagcgcggtgacctaccaccctccgggcacgcgttctggccacgcctcgcggcccctttcattgaaagagcccgtagggatcacgtgaaagaacactgcagagtgcgtgacgtcacgacgctcacaccaatgggagcctctgtttatgtcgggagccatcaaatagtcatcttccccctaccatcccccgcccactctccgtcgcgctgcgctgcgtcgctttcagcctctggtgaagggcggcgcgcttaggcaggcggtggcgcggctggagtgccgcggggagggctgtgccggttgctttctgcagccgcatctcggccagctctcctcgccgtccccggggcgctgtgcgtctccagtccgggaccgaagccgcctgccgtagcgggcggccagatccgcgtcccgcctcagcggccggaggacatgcgggagagagaatgagccagagggacacgctggtgcatctgtttgccggagggtaaggtcctggcggggcgtgcgcactggggctgagggtgctggggccgaagacgcaggcgaggggggcgaggggggccgaggggggtgggggggtgggggggcgggagtgaggcctgggcggggagctgccacgggcctgcgggtgaggggagcgacccagcccgtgggtggtgaggggggctccggttcggggaagcaagggggtgaggcccgggcccgagggcgagagagtgaggcccgggcaaagagggttgaggcatgaaacccgggccgggagtgaggttttgggcccgc

SEQ ID NO: 462821 - DNA, 986 bp, Homo sapiens; identical to SEQ ID NO: 346597
  chr3:140660747-140661733
  hyper
  liver_bileduct vs. upper_gi,lung,pancreas_gallbladder, head_and_neck,breast,melanoma,ovary,colorectal, lymphoid_neoplasm,renal

SEQ ID NO: 462822 - DNA, 15 bp, Homo sapiens
  chr3:142837817-142837832
  hyper
  liver_bileduct vs. renal,ovary,multiple_myeloma, myeloid_neoplasm,uterine,lymphoid_neoplasm,non_cancer
cgggacaagtatttt

SEQ ID NO: 462823 - DNA, 86 bp, Homo sapiens; identical to SEQ ID NO: 458017
  chr3:150802802-150802888
  hyper
  liver_bileduct vs. breast,lung,prostate

SEQ ID NO: 462824 - DNA, 33 bp, Homo sapiens; identical to SEQ ID NO: 453221
  chr3:157824101-157824134
  hyper
  liver_bileduct vs. breast,melanoma,renal,uterine, cervical,prostate,colorectal,sarcoma,non_cancer, multiple_myeloma

SEQ ID NO: 462825 - DNA, 271 bp, Homo sapiens; identical to SEQ ID NO: 349862
  chr3:169379645-169379916
  hyper
  liver_bileduct vs. upper_gi,colorectal,renal, pancreas_gallbladder,uterine

SEQ ID NO: 462826 - DNA, 138 bp, Homo sapiens; identical to SEQ ID NO: 345119
  chr3:179169640-179169778
  hyper
  liver_bileduct vs. lung,ovary,breast,cervical,melanoma, head_and_neck,uterine,myeloid_neoplasm,sarcoma,thyroid,prostate, bladder_and_urothelial,non_cancer,anorectal

SEQ ID NO: 462827 - DNA, 37 bp, Homo sapiens
  chr3:181430331-181430368
  hyper
  liver_bileduct vs. lung
gagaaccccaagatgcacaactcggagatcagcaagc

SEQ ID NO: 462828 - DNA, 253 bp, Homo sapiens
  chr3:181430443-181430696
  hyper
  liver_bileduct vs. lung
cgctgcacatgaaggagcacccggattataaataccggccccggcggaaaaccaagacgctcatgaagaaggataagtacacgctgcccggcgggctgctggcccccggcggcaatagcatggcgagcggggtcggggtgggcgccggcctgggcgcgggcgtgaaccagcgcatggacagttacgcgcacatgaacggctggagcaacggcagctacagcatgatgcaggaccagctgggctacccgcagca

SEQ ID NO: 462829 - DNA, 314 bp, Homo sapiens
  chr3:183145618-183145932
  hyper
  liver_bileduct vs. myeloid_neoplasm
gccagatgaagcccagagaccatcctcacccgccattaataaaacgcaggaaaaattaaagcttcgtttaccgacatgagtgatcactgtggccagtcgccgggtgagctcctggggaggcatctcttcttttaagcaagacagcatttcactgaaaaaccattccgtataaataaagccaaacaaaactgtttctaccgctgcggtggatgattttttaaaggcatctccgcccaaggatgctctgccctcgccctcttcctggctctccaggcaagaaacgagagtccctcgcagcctaggccagctctccc

SEQ ID NO: 462830 - DNA, 319 bp, Homo sapiens; identical to SEQ ID NO: 357773
  chr3:183146025-183146344
  hyper
  liver_bileduct vs. myeloid_neoplasm

SEQ ID NO: 462831 - DNA, 571 bp, Homo sapiens
  chr3:183542795-183543366
  hyper
  liver_bileduct vs. lung,breast,cervical,colorectal, sarcoma,upper_gi,pancreas_gallbladder,head_and_neck,ovary
cgccggcagctccgaggtcgcgtgggatccgggctccaggcgcctccgctctgccgcccaccccatccctctggctccgggcctccgcgtcctcccaccacagggtggggactcgttgcggtccctacccagcccatacctgtacgacgtggtcactgctgcagccgcgtccgcgtcgccgatgggcagcacgtagaccccgcgggcgccgggcgcaggtggcgcggaggactgcgcggaggatttgcccctgcggccgcccgcccccggtccgcgccccggcggcggatccttgggcccggcgggcgtggtccacaagccgaagtcccgctggtactgagtgagcggcacgtcccggccggaatcccgggcgcccgcgggaggctggcccctgcgcgaggcggcgccgcccgtgcccggctcctcgctgtcgaggtccgagtagccgtgcagagtgagcggcaccgccacgtcggagcggtccagctggttccagcgccgcgccaggcagcacaggcggctgatacagggccacgccatgccagccccggcgcccgccgccccgctcccg

SEQ ID NO: 462832 - DNA, 19 bp, Homo sapiens
  chr3:183543503-183543522
  hyper
  liver_bileduct vs. lung,breast,cervical,colorectal, sarcoma,upper_gi,pancreas_gallbladder,head_and_neck,ovary
gccggggccggctgcgcac

SEQ ID NO: 462833 - DNA, 11 bp, Homo sapiens
  chr3:184870185-184870196
  hyper
  liver_bileduct vs. anorectal,sarcoma,breast
cgaggcgcccc

SEQ ID NO: 462834 - DNA, 302 bp, Homo sapiens
  chr3:184870307-184870609
  hyper
  liver_bileduct vs. anorectal,sarcoma,breast
ggcagagcccggagccccgcggccgcagagttccggcagcgaccccggacggcccggcgggcgtcccccggaccgcggcggaaggcgggaagacgcggctcgacttacagtgacaccatcctaggtgacagcaccagtgcagcttgaagcacttgccatggctgtgcgtggcacagatagacagcccgtcgcacggctggaagtcgggtctgcgggcggcgcaactccgcgccagggcctgagcctcatctagtttctcgctcttccaaccccgctccgacgccggcgaggccgccgcactc

SEQ ID NO: 462835 - DNA, 291 bp, Homo sapiens; identical to SEQ ID NO: 453235
  chr3:186079331-186079622
  hyper
  liver_bileduct vs. myeloid_neoplasm

SEQ ID NO: 462836 - DNA, 415 bp, Homo sapiens
  chr4:1395992-1396407
  hyper
  liver_bileduct vs. melanoma
cggggaaaacaggcaggcgcttcttcctccaggcagtagccgaagctgacaccgcccccaagctgacacgcctagcccggtgctcccttgcggggctgtggggcaggggagtgggaccggagcaggctgcaggggtggggagcaggaggcggaaaatgccgcggccccaccagctccatggctaagaggagaggcgaagaggaagcagctggtcactttccgagacctgtgatcttttttgggacggggagggggcggtcagggaggtgacgctgggacctgagcctcagccagcttggcgggtgagcccctgcgctcagcccctgcgcccacgacgacgggcaggcaccagcagagtggcctgaattccggccgggggacgccaggccggtgggaaaacgggctggagtcccgc

SEQ ID NO: 462837 - DNA, 561 bp, Homo sapiens
  chr4:2060916-2061477
  hyper
  liver_bileduct vs. breast
cgtctcccccacccccgcgatcacatggtgacccccggcagccaatgcagtggacgctaggaccctgcgggccgcgggcgccgcgactgcaccggcgccgccgcattataaatacttctccaaaatgcggcgcagctccctgcgcgcgccccggccgcccgccgcctccgccccgcgcccctgagctgccgccgccgccgccgccgctgccgccgccgccgccgccgccgcgggtccgagggcgccgcgcccttgccctgggcccggccgtgcccgccgccgcccggccgcgtccccgctgccgcgccgcccggccgggtgcatgcattgtgggcctcccgacatggtctgcgagacgaagatcgtggccgccgaggaccatgaggcgctgccgggggccaagaaggacgcgctgctcgccgccgccggcgccatgtggcccccgctgcccgccgcgcccgggccggccgccgcgccccccgcgcccccacctgccccggtggctcagcctcacggcggggcggggggcgcggggccgccgggggggcgcggcgtgtgcat

SEQ ID NO: 462838 - DNA, 198 bp, Homo sapiens
  chr4:2061279-2061477
  hyper
  liver_bileduct vs. uterine,thyroid
cgtggccgccgaggaccatgaggcgctgccgggggccaagaaggacgcgctgctcgccgccgccggcgccatgtggcccccgctgcccgccgcgcccgggccggccgccgcgccccccgcgcccccacctgccccggtggctcagcctcacggcggggcggggggcgcggggccgccgggggggcgcggcgtgtgcat

SEQ ID NO: 462839 - DNA, 44 bp, Homo sapiens; identical to SEQ ID NO: 459708
  chr4:10458329-10458373
  hyper
  liver_bileduct vs. anorectal,sarcoma,prostate

SEQ ID NO: 462840 - DNA, 25 bp, Homo sapiens
  chr4:10459327-10459352
  hyper
  liver_bileduct vs. sarcoma,anorectal,prostate
gggtcccgcggagggcggccttggc

SEQ ID NO: 462841 - DNA, 29 bp, Homo sapiens
  chr4:13549864-13549893
  hyper
  liver_bileduct vs. uterine,sarcoma,ovary,prostate, thyroid,myeloid_neoplasm,non_cancer
gcgatccaaaccgcctaagcatcccaagc

SEQ ID NO: 462842 - DNA, 142 bp, Homo sapiens
  chr4:41869059-41869201
  hyper
  liver_bileduct vs. multiple_myeloma
cgaattgaaatggatatttccctcctcggcccagctgaacgaggctcaatgcctcaaagatgcagagctgcctcggtggacatgctctgtggctgatattataattttcataatgcgcttttatgtcgcgccagactcctcc

SEQ ID NO: 462843 - DNA, 3 bp, Homo sapiens
  chr4:42155097-42155100
  hyper
  liver_bileduct vs. prostate,thyroid,non_cancer, myeloid_neoplasm,multiple_myeloma,uterine,ovary
gac

SEQ ID NO: 462844 - DNA, 25 bp, Homo sapiens
  chr4:42401057-42401082
  hyper
  liver_bileduct vs. uterine,prostate,myeloid_neoplasm, ovary,multiple_myeloma,non_cancer
ctgacttcagagcggaataaatcac

SEQ ID NO: 462845 - DNA, 1 bp, Homo sapiens
  chr4:53728037-53728038
  hyper
  liver_bileduct vs. sarcoma
c

SEQ ID NO: 462846 - DNA, 958 bp, Homo sapiens; identical to SEQ ID NO: 332106
  chr4:56914942-56915900
  hyper
  liver_bileduct vs. upper_gi

SEQ ID NO: 462847 - DNA, 6 bp, Homo sapiens
  chr4:57521376-57521382
  hyper
  liver_bileduct vs. sarcoma,multiple_myeloma, myeloid_neoplasm,non_cancer
cgggga

SEQ ID NO: 462848 - DNA, 94 bp, Homo sapiens; identical to SEQ ID NO: 458065
  chr4:57687545-57687639
  hyper
  liver_bileduct vs. lung,ovary,anorectal

SEQ ID NO: 462849 - DNA, 205 bp, Homo sapiens; identical to SEQ ID NO: 346643
  chr4:57687887-57688092
  hyper
  liver_bileduct vs. lung,ovary,anorectal

SEQ ID NO: 462850 - DNA, 133 bp, Homo sapiens; identical to SEQ ID NO: 199452
  chr4:76555905-76556038
  hyper
  liver_bileduct vs. lung

SEQ ID NO: 462851 - DNA, 44 bp, Homo sapiens
  chr4:81123012-81123056
  hyper
  liver_bileduct vs. lung
cgtgtgtgtgtgtgtgtgcgtgcgtgcgtgtgtgtggtgtttgc

SEQ ID NO: 462852 - DNA, 207 bp, Homo sapiens
  chr4:109088463-109088670
  hyper
  liver_bileduct vs. melanoma
gatccatttggaataagttaccctgcccctctacctcccatcctacacacacacacacacacacacacacacacacacacacacacactgcggaccgggggcccagctacgcacacaccccaaaacaaacgagggatctactcgggaccctcagccgggcggccgggcgccttcgttcccttcctccctctctgagtttcccaggga

SEQ ID NO: 462853 - DNA, 61 bp, Homo sapiens; identical to SEQ ID NO: 461075
  chr4:111543907-111543968
  hyper
  liver_bileduct vs. colorectal

SEQ ID NO: 462854 - DNA, 5 bp, Homo sapiens
  chr4:113435438-113435443
  hyper
  liver_bileduct vs. sarcoma,ovary,uterine,thyroid, non_cancer,breast,bladder_and_urothelial,prostate,head_and_neck, myeloid_neoplasm,cervical,renal,melanoma,anorectal
cgaac

SEQ ID NO: 462855 - DNA, 300 bp, Homo sapiens
  chr4:113435475-113435775
  hyper
  liver_bileduct vs. sarcoma,ovary,uterine,thyroid, non_cancer,breast,bladder_and_urothelial,prostate,head_and_neck, myeloid_neoplasm,cervical,renal,melanoma,anorectal
ggaggagcgtcagtccgctctgcaaactctttagatatgccaccatcatctcttcccagggtctttttcgtctcaagaagcgcccccaaaacgccacccttggctttgacaataagctccatcacaccttcagtaaatcagagcccgtctgaatgaaggatacccaaagccaagaaatgcaagaaacaaccgaggaatcagaaaggctacacctgccctgtgaagtgagatggtttccagggcgtggaaaggaggggcaggggaagggaggagggctcgactggggacaggaaagggaac

SEQ ID NO: 462856 - DNA, 243 bp, Homo sapiens
  chr4:113436585-113436828
  hyper
  liver_bileduct vs. sarcoma,ovary,thyroid, myeloid_neoplasm,uterine,non_cancer,breast,prostate, head_and_neck,bladder_and_urothelial,renal
cgtcctcttcctccttcaactccaaggtctcggatttgacgaacatcctaccgaagagagaaaggggaaaaaggcagtgaggtgtaaggaaagaaacagaggcgcgatcttcgtgtcacaggggcgtgctccggcgcgcacccgagaagaccagctccgaatggcgcggagcaggaaggcgaaggaagaaacccaggcagtgctaaccaaggtcaggagcgccgctagcgctcgctgtgaccc

SEQ ID NO: 462857 - DNA, 243 bp, Homo sapiens; identical to SEQ ID NO: 462856
  chr4:113436585-113436828
  hyper
  liver_bileduct vs. breast,renal,ovary,sarcoma,prostate, anorectal,head_and_neck,lung,uterine,myeloid_neoplasm, non_cancer

SEQ ID NO: 462858 - DNA, 25 bp, Homo sapiens
  chr4:113437315-113437340
  hyper
  liver_bileduct vs. breast,renal,ovary,sarcoma,prostate, anorectal,head_and_neck,lung,uterine,myeloid_neoplasm, non_cancer
ttcagtggctgcgtgtctggcacac

SEQ ID NO: 462859 - DNA, 113 bp, Homo sapiens
  chr4:113438278-113438391
  hyper
  liver_bileduct vs. bladder_and_urothelial,sarcoma, uterine
gaggtcggataggggagcagttgatgagcttttagaggatgtgagaatgaaatcactcacatgttagagctgaaaggatccccctcattttacatacaggaaactgaggctcc

SEQ ID NO: 462860 - DNA, 11 bp, Homo sapiens
  chr4:113443992-113444003
  hyper
  liver_bileduct vs. non_cancer,thyroid,multiple_myeloma
cgtgtctacag

SEQ ID NO: 462861 - DNA, 81 bp, Homo sapiens; identical to SEQ ID NO: 454404
  chr4:113444864-113444945
  hyper
  liver_bileduct vs. breast,cervical,uterine,anorectal, colorectal,ovary,head_and_neck,prostate

SEQ ID NO: 462862 - DNA, 115 bp, Homo sapiens; identical to SEQ ID NO: 349967
  chr4:113445444-113445559
  hyper
  liver_bileduct vs. breast,cervical,uterine,anorectal, colorectal,ovary,head_and_neck,prostate

SEQ ID NO: 462863 - DNA, 215 bp, Homo sapiens; identical to SEQ ID NO: 349969
  chr4:115520945-115521160
  hyper
  liver_bileduct vs. upper_gi

SEQ ID NO: 462864 - DNA, 995 bp, Homo sapiens; identical to SEQ ID NO: 357977
  chr4:146857459-146858454
  hyper
  liver_bileduct vs. pancreas_gallbladder

SEQ ID NO: 462865 - DNA, 411 bp, Homo sapiens
  chr4:150999731-151000142
  hyper
  liver_bileduct vs. lung
cgccccacccttccttccttcctcccctcggcgctcccgggagcgctcggcagacgcccgagctttgtgggcgcccgcgggcccagcgcgagcctcgggcggcccaactttgcctctcccggtcggctcccgagcgggacttgtgaggcgtggccgggtggaggaggcgcttgcgggggcgtggggctccccggcaggcgggaggcacggagcaagtcgcactggacaatgacctgggcagctcggcgctgcggacacttttagctgagggcgcgggcgggtcggctcctccgcggctcctcggccccacctgcgcggagagggcgggatgccagagccaggtgtcccggcgcgttaagggccctcgcagtcagacgtccctgcaccggcgctcgcacccttagtcggccc

SEQ ID NO: 462866 - DNA, 124 bp, Homo sapiens; identical to SEQ ID NO: 346661
  chr4:151000581-151000705
  hyper
  liver_bileduct vs. lung

SEQ ID NO: 462867 - DNA, 191 bp, Homo sapiens
  chr4:153600941-153601132
  hyper
  liver_bileduct vs. lung,upper_gi,sarcoma, bladder_and_urothelial,breast
cggcagagttctgtagcctcgggcaccctaccagcttttgcgatcctccttcccaggagtaggaagtggaggcggcttaccccggccgacgggaacgagcgcgatcaccagggcgaagactagggctgcgcggggagcctgcatgtccgctcgcctcggcagaggcgcgctcaggatgctgcgccgggctg

SEQ ID NO: 462868 - DNA, 261 bp, Homo sapiens; identical to SEQ ID NO: 349999
  chr4:153601161-153601422
  hyper
  liver_bileduct vs. lung,upper_gi,sarcoma, bladder_and_urothelial,breast

SEQ ID NO: 462869 - DNA, 841 bp, Homo sapiens
  chr4:174089737-174090578
  hyper
  liver_bileduct vs. lung
cggagctctgcggtggccgccagaggggagggggccacggggaggagcggagggaagagcccggggaaaggtgtagccgaggggagttccggatctggagctggaaagggcaggcagcggagagggcggcagccgtagcggtaggggtgggggaaagagggggaggagagccggaggagggggaaggagggaggggagagcggtggcggcggctgcgccgggctgtgagtctctcgccgccggaggaagatgaggctgaagattgggttcatcttacgcagtttgctggtggtgggaagcttcctggggctagtggtcctctggtcttccctgaccccgcggccggacgacccaagcccgctgagcaggatgagggtgagtgacccgcccggccccctccggcggcagcgaccggcaacttgttttgtttgcccgcgtgtggagggagcaggggcggcggggtcgcggcacggcgtgggcaccgcagctccgcaggtggtgctggcgcagcgcgggccgagggggtgccgagccccgcgcactccgacctccctggccgccgccggcccgccccctcgccgccccttcctccgctcttccccgccccgggctccgtcgccgacacccgcgctgccgcggcagcggctcgggcggccgctctccgcgccgggactgcgggcggagcgggcggagagccgggtccggggggctgcggccgcccggcgtcccgctctggggggccgggaccgcagcgctcacggcccggggacgcggggttggtccaggctgcggcctgtggcgcgtgcaggcctgaaggaggcgagatgccgatgccgccacc

SEQ ID NO: 462870 - DNA, 999 bp, Homo sapiens; identical to SEQ ID NO: 350012
  chr4:174090080-174091079
  hyper
  liver_bileduct vs. lung,upper_gi,pancreas_gallbladder

SEQ ID NO: 462871 - DNA, 837 bp, Homo sapiens
  chr4:174090585-174091422
  hyper
  liver_bileduct vs. lung
cggtggaccaggccccttggtccagcctcccctcccgcagccgcccgtctgggggtgttcgcagccccgggctcccccggcccgcccgccggggagtgggagggcgatggcgccccgcctccggctcttacggagagcgcgcctccccctcaactccggcggcggggagccggggtgcgatgcgcggccgaggcctcgcccggaccgccggtccccctcgcgtccctgggcgagggaggggcggttggccggagatggcggaggggcgtccccgccccgcctgcccgccgcccccagccctcagcgcctggggaagcccctgctgtggcagtgctcgggcgctatccgggggaagaggagcagttcctcttccttggctgcggcagggctgcttgggccggaaaactaacttgtgtcggcgcccggccgccccgcgccggctgccggctagctcaggccgacgccgaggggagcggcggcgcggagctcgcggcggctccgctgggacgcatttgtctgccgcccagggcgcgagtgttagcgctgacattccttggatttggagggtttagtcaggcgcctcggaacattagttacccggagccgcgccgcgcggggaagggaccgcgggcactgcggcttccctgacccggcagcgggcggcgcgcaccggcctcgcccccgaccctgacctgcttccccccggatgaaccgttgcaccacctgcttcctcctccccgctgggacagccaactgggccggctgccagtgggggtaggagagggtatgaggggctcacgaccgccgaggcggcggggctgcaggaggagtcgagtc

SEQ ID NO: 462872 - DNA, 303 bp, Homo sapiens
  chr5:17216361-17216664
  hyper
  liver_bileduct vs. bladder_and_urothelial,breast
cgcaggcgagcatgaaagcgatccaaacacagccagagggcgccaaaatgccgcaaataaaagttccaaaggcgtcaactggcttttgcgggaaggtaaaattggcttttgtgtaatcaaagagctaccgttgtcaacgatgtcacgttacgttatttttgtatgtccctcttgccaacaggtaagcaaagtgaacgcatcttcctaccccggtggctattctgtgtcccggtgctaaaccaagtgtccgcccccttagggcacccggacaagccgcggttggccctagctttgactcgagcg

SEQ ID NO: 462873 - DNA, 4 bp, Homo sapiens
  chr5:17217138-17217142
  hyper
  liver_bileduct vs. bladder_and_urothelial,breast
caac

SEQ ID NO: 462874 - DNA, 53 bp, Homo sapiens
  chr5:17217629-17217682
  hyper
  liver_bileduct vs. sarcoma,lymphoid_neoplasm
cgggaggagggaggctgggcgggcggacgcgcggggggagggcactgggcagg

SEQ ID NO: 462875 - DNA, 22 bp, Homo sapiens
  chr5:40680513-40680535
  hyper
  liver_bileduct vs. multiple_myeloma,upper_gi, pancreas_gallbladder,lymphoid_neoplasm,colorectal, bladder_and_urothelial
cgggtccaggacatctgagggc

SEQ ID NO: 462876 - DNA, 337 bp, Homo sapiens; identical to SEQ ID NO: 456017
  chr5:40680627-40680964
  hyper
  liver_bileduct vs. multiple_myeloma,upper_gi, pancreas_gallbladder,lymphoid_neoplasm,colorectal, bladder_and_urothelial

SEQ ID NO: 462877 - DNA, 89 bp, Homo sapiens; identical to SEQ ID NO: 456018
  chr5:40680875-40680964
  hyper
  liver_bileduct vs. pancreas_gallbladder,upper_gi, lymphoid_neoplasm,colorectal,multiple_myeloma,myeloid_neoplasm, non_cancer,cervical

SEQ ID NO: 462878 - DNA, 799 bp, Homo sapiens; identical to SEQ ID NO: 350063
  chr5:41870076-41870875
  hyper
  liver_bileduct vs. upper_gi,lung,head_and_neck

SEQ ID NO: 462879 - DNA, 99 bp, Homo sapiens; identical to SEQ ID NO: 453281
  chr5:42950747-42950846
  hyper
  liver_bileduct vs. sarcoma,multiple_myeloma,thyroid, myeloid_neoplasm,non_cancer,renal,prostate,lymphoid_neoplasm

SEQ ID NO: 462880 - DNA, 175 bp, Homo sapiens; identical to SEQ ID NO: 346682
  chr5:42995428-42995603
  hyper
  liver_bileduct vs. lymphoid_neoplasm,melanoma

SEQ ID NO: 462881 - DNA, 48 bp, Homo sapiens; identical to SEQ ID NO: 456023
  chr5:43007771-43007819
  hyper
  liver_bileduct vs. colorectal,multiple_myeloma

SEQ ID NO: 462882 - DNA, 2 bp, Homo sapiens
  chr5:43008736-43008738
  hyper
  liver_bileduct vs. colorectal,multiple_myeloma, lymphoid_neoplasm,bladder_and_urothelial,cervical
cg

SEQ ID NO: 462883 - DNA, 388 bp, Homo sapiens; identical to SEQ ID NO: 456025
  chr5:43017314-43017702
  hyper
  liver_bileduct vs. lymphoid_neoplasm,cervical,colorectal, prostate,uterine,anorectal,non_cancer,multiple_myeloma, myeloid_neoplasm,bladder_and_urothelial,thyroid,head_and_neck, melanoma,sarcoma,renal

SEQ ID NO: 462884 - DNA, 304 bp, Homo sapiens; identical to SEQ ID NO: 456026
  chr5:43019347-43019651
  hyper
  liver_bileduct vs. colorectal,cervical,multiple_myeloma, myeloid_neoplasm,lymphoid_neoplasm,uterine,thyroid,prostate, bladder_and_urothelial,non_cancer

SEQ ID NO: 462885 - DNA, 76 bp, Homo sapiens; identical to SEQ ID NO: 454408
  chr5:54518558-54518634
  hyper
  liver_bileduct vs. multiple_myeloma,myeloid_neoplasm, non_cancer,renal

SEQ ID NO: 462886 - DNA, 86 bp, Homo sapiens
  chr5:72742484-72742570
  hyper
  liver_bileduct vs. cervical,colorectal,sarcoma,ovary, upper_gi,uterine,renal
cgtcaagggagcctctagtgcctggacagggcggactcccttccccggcaccctcttcctccctaccccaggtcgggggttggggg

SEQ ID NO: 462887 - DNA, 217 bp, Homo sapiens
  chr5:72744481-72744698
  hyper
  liver_bileduct vs. colorectal
cccgtcagctgaggagggggtggcggggcccgggcgggcgaatcagaacgccaggcgcccaggaacgtgcgggacgggtgagagtctaagaacagagctcggcgaggccagggctgagtccaggagagggcggaccttcctcggcttatagcagaagggggcctgtcacatggtgtgcacgtcagagcgctgccgagggaaggaaagcaagcctagg

SEQ ID NO: 462888 - DNA, 177 bp, Homo sapiens; identical to SEQ ID NO: 358135
  chr5:72745196-72745373
  hyper
  liver_bileduct vs. colorectal

SEQ ID NO: 462889 - DNA, 345 bp, Homo sapiens; identical to SEQ ID NO: 345175
  chr5:76926856-76927201
  hyper
  liver_bileduct vs. ovary,renal,breast,sarcoma,uterine, prostate,non_cancer,multiple_myeloma,myeloid_neoplasm,thyroid, cervical,bladder_and_urothelial

SEQ ID NO: 462890 - DNA, 192 bp, Homo sapiens; identical to SEQ ID NO: 453297
  chr5:77148195-77148387
  hyper
  liver_bileduct vs. sarcoma

SEQ ID NO: 462891 - DNA, 38 bp, Homo sapiens; identical to SEQ ID NO: 456033
  chr5:77268330-77268368
  hyper
  liver_bileduct vs. thyroid,myeloid_neoplasm,ovary, non_cancer

SEQ ID NO: 462892 - DNA, 15 bp, Homo sapiens
  chr5:77269447-77269462
  hyper
  liver_bileduct vs. multiple_myeloma,thyroid, myeloid_neoplasm,non_cancer,ovary,uterine
ttccccgcggggctc

SEQ ID NO: 462893 - DNA, 42 bp, Homo sapiens
  chr5:79865662-79865704
  hyper
  liver_bileduct vs. uterine,ovary,sarcoma,prostate,lung
aaggcaggaggcgcgagggtgagctcgcgtggagcgcgcccc

SEQ ID NO: 462894 - DNA, 91 bp, Homo sapiens
  chr5:79865744-79865835
  hyper
  liver_bileduct vs. uterine,ovary,sarcoma,prostate,lung
cggcggccctcggctggccctgggtctctcatcctgctcggggcactgcaatgtcagggtgagcgggaggtgcgggcttcaggggcttgcg

SEQ ID NO: 462895 - DNA, 31 bp, Homo sapiens
  chr5:79865673-79865704
  hyper
  liver_bileduct vs. sarcoma,prostate,uterine,thyroid
cgcgagggtgagctcgcgtggagcgcgcccc

SEQ ID NO: 462896 - DNA, 91 bp, Homo sapiens; identical to SEQ ID NO: 462894
  chr5:79865744-79865835
  hyper
  liver_bileduct vs. sarcoma,prostate,uterine,thyroid

SEQ ID NO: 462897 - DNA, 80 bp, Homo sapiens; identical to SEQ ID NO: 345180
  chr5:87957200-87957280
  hyper
  liver_bileduct vs. melanoma,myeloid_neoplasm,uterine, prostate,non_cancer

SEQ ID NO: 462898 - DNA, 157 bp, Homo sapiens; identical to SEQ ID NO: 453301
  chr5:87969885-87970042
  hyper
  liver_bileduct vs. uterine

SEQ ID NO: 462899 - DNA, 600 bp, Homo sapiens; identical to SEQ ID NO: 453303
  chr5:87970918-87971518
  hyper
  liver_bileduct vs. uterine

SEQ ID NO: 462900 - DNA, 454 bp, Homo sapiens; identical to SEQ ID NO: 458130
  chr5:88178399-88178853
  hyper
  liver_bileduct vs. lung,renal,melanoma,lymphoid_neoplasm, breast,uterine,sarcoma,ovary,prostate,bladder_and_urothelial

SEQ ID NO: 462901 - DNA, 4 bp, Homo sapiens
  chr5:88179111-88179115
  hyper
  liver_bileduct vs. lung,renal,melanoma,lymphoid_neoplasm, breast,uterine,sarcoma,ovary,prostate,bladder_and_urothelial
gctc

SEQ ID NO: 462902 - DNA, 423 bp, Homo sapiens; identical to SEQ ID NO: 453309
  chr5:88179429-88179852
  hyper
  liver_bileduct vs. melanoma

SEQ ID NO: 462903 - DNA, 312 bp, Homo sapiens; identical to SEQ ID NO: 453310
  chr5:88179540-88179852
  hyper
  liver_bileduct vs. melanoma,renal,sarcoma,prostate

SEQ ID NO: 462904 - DNA, 42 bp, Homo sapiens; identical to SEQ ID NO: 345186
  chr5:88180346-88180388
  hyper
  liver_bileduct vs. melanoma,renal,sarcoma,prostate

SEQ ID NO: 462905 - DNA, 22 bp, Homo sapiens
  chr5:92906252-92906274
  hyper
  liver_bileduct vs. non_cancer,myeloid_neoplasm,thyroid, multiple_myeloma
cgccaactgcccgcgcggaacc

SEQ ID NO: 462906 - DNA, 115 bp, Homo sapiens; identical to SEQ ID NO: 453314
  chr5:100236036-100236151
  hyper
  liver_bileduct vs. lung

SEQ ID NO: 462907 - DNA, 214 bp, Homo sapiens
  chr5:114506308-114506522
  hyper
  liver_bileduct vs. upper_gi,breast,ovary,colorectal, uterine,prostate
cgagcagtcatatcccgctttctgcttctatacccccaagtcgcgatgtcaccgcacgttcttgcccagtagcgcggggaccgcctgcagggtggagattcctctcccggatgctggccagggactgaagttaaaaggccgcggcaagggagagaccccccgccacccgggcctacgctttccttcctgagggccaggacagagggtcctgagc

SEQ ID NO: 462908 - DNA, 25 bp, Homo sapiens
  chr5:114506551-114506576
  hyper
  liver_bileduct vs. upper_gi,breast,ovary,colorectal, uterine,prostate
agtgctgctgaacgttaaggcgcgc

SEQ ID NO: 462909 - DNA, 58 bp, Homo sapiens; identical to SEQ ID NO: 453320
  chr5:114515671-114515729
  hyper
  liver_bileduct vs. prostate,non_cancer

SEQ ID NO: 462910 - DNA, 68 bp, Homo sapiens; identical to SEQ ID NO: 454414
  chr5:114515769-114515837
  hyper
  liver_bileduct vs. prostate,non_cancer

SEQ ID NO: 462911 - DNA, 58 bp, Homo sapiens; identical to SEQ ID NO: 453320
  chr5:114515671-114515729
  hyper
  liver_bileduct vs. prostate

SEQ ID NO: 462912 - DNA, 132 bp, Homo sapiens; identical to SEQ ID NO: 453321
  chr5:114515769-114515901
  hyper
  liver_bileduct vs. prostate

SEQ ID NO: 462913 - DNA, 44 bp, Homo sapiens; identical to SEQ ID NO: 346728
  chr5:114516274-114516318
  hyper
  liver_bileduct vs. prostate

SEQ ID NO: 462914 - DNA, 218 bp, Homo sapiens; identical to SEQ ID NO: 454420
  chr5:132082800-132083018
  hyper
  liver_bileduct vs. colorectal,upper_gi

SEQ ID NO: 462915 - DNA, 186 bp, Homo sapiens
  chr5:134366533-134366719
  hyper
  liver_bileduct vs. head_and_neck,anorectal
cgaggcagccagacaggacctgcctttccctttcgttttcgggataaggccaacagctcccgaggtccccagcggcagggaatccactgcccagtctctggcccagggtatcctgctaacatctgagtgggtcctgggccccatagggcatgggggagtcccctgggggcacaggtctttgggctg

SEQ ID NO: 462916 - DNA, 124 bp, Homo sapiens; identical to SEQ ID NO: 200036
  chr5:134367305-134367429
  hyper
  liver_bileduct vs. head_and_neck,anorectal

SEQ ID NO: 462917 - DNA, 73 bp, Homo sapiens; identical to SEQ ID NO: 345194
  chr5:134880614-134880687
  hyper
  liver_bileduct vs. thyroid,myeloid_neoplasm,non_cancer, multiple_myeloma

SEQ ID NO: 462918 - DNA, 240 bp, Homo sapiens; identical to SEQ ID NO: 358255
  chr5:138923037-138923277
  hyper
  liver_bileduct vs. upper_gi

SEQ ID NO: 462919 - DNA, 202 bp, Homo sapiens
  chr5:139047738-139047940
  hyper
  liver_bileduct vs. head_and_neck,breast, lymphoid_neoplasm,anorectal,cervical
cgcctcccagacctctggggccatgaatcatttatgaggcaaaaatgaaaccaattaaggacaaactttgaaagcctctaattgctgcgcctggtggcaccgtggaatgaggggaggccagccttctcggtgcggaatctccttggcccaggccttcccaggctgcccgtcccgccgcggctcagggcgcctcccggctccc

SEQ ID NO: 462920 - DNA, 156 bp, Homo sapiens; identical to SEQ ID NO: 454425
  chr5:141931151-141931307
  hyper
  liver_bileduct vs. colorectal

SEQ ID NO: 462921 - DNA, 11 bp, Homo sapiens
  chr5:141931539-141931550
  hyper
  liver_bileduct vs. colorectal
ccctcccctcc

SEQ ID NO: 462922 - DNA, 98 bp, Homo sapiens; identical to SEQ ID NO: 350197
  chr5:151066500-151066598
  hyper
  liver_bileduct vs. melanoma

SEQ ID NO: 462923 - DNA, 240 bp, Homo sapiens
  chr5:157098032-157098272
  hyper
  liver_bileduct vs. multiple_myeloma
cggtgtcaagaccccgcaggagatggcggattcattcaggaagcagccgctccgggaagccttagccaagggtcttccggaaagacaccagtcttgatcctggagcctcaatccccgctgacccagcactttggtttccatagcaattgtctcgtcgcagaaaggaatcgcctgtgctgggtcttcagacctcagctccatgccgctgagcagccccaccctggctcaacccgttacccg

SEQ ID NO: 462924 - DNA, 13 bp, Homo sapiens
  chr5:169063996-169064009
  hyper
  liver_bileduct vs. multiple_myeloma,lymphoid_neoplasm, bladder_and_urothelial
cggcaatcaggaa

SEQ ID NO: 462925 - DNA, 34 bp, Homo sapiens; identical to SEQ ID NO: 370969
  chr5:175084709-175084743
  hyper
  liver_bileduct vs. bladder_and_urothelial

SEQ ID NO: 462926 - DNA, 75 bp, Homo sapiens
  chr5:175084745-175084820
  hyper
  liver_bileduct vs. bladder_and_urothelial
ggcggggagagggaaggagccagggagaaaagggagagaaagagggggcagtgtggcagaaaggaagaggaaggg

SEQ ID NO: 462927 - DNA, 117 bp, Homo sapiens; identical to SEQ ID NO: 459759
  chr5:178016455-178016572
  hyper
  liver_bileduct vs. anorectal,bladder_and_urothelial, ovary

SEQ ID NO: 462928 - DNA, 13 bp, Homo sapiens
  chr5:178017936-178017949
  hyper
  liver_bileduct vs. head_and_neck,ovary,breast,anorectal, cervical
cggacttcggtgc

SEQ ID NO: 462929 - DNA, 365 bp, Homo sapiens; identical to SEQ ID NO: 358348
  chr5:180046947-180047312
  hyper
  liver_bileduct vs. renal,lymphoid_neoplasm

SEQ ID NO: 462930 - DNA, 595 bp, Homo sapiens
  chr5:180479644-180480239
  hyper
  liver_bileduct vs. upper_gi,ovary,bladder_and_urothelial
cggcgctgcccccggccacgtcctgcctgcgggcgggtcctccctggggagccgggagggacgtgggagctgcgaggccgcgcgcacgtggttcggttctcacttcttccaaaagcgtggtaagaaccgagggagaagccggatgtttgcaaacaagcgaggagacgacttgcggaccagacggcgcgggtgcgagcaggagctccccggacatccgccgccagccaagcccctgggaccctcccgcctgcggacgcggggcgagggcgggaagacgcggggcgagggcggcgctgcggccgcagaagcctcgagccgggctggggcgcggttccctcccgcacgccccgcggcgcgcccccgccccctccgccgcgcgcgcccccgccccctccgccgcgcgcgctcccgctccacgcccgtttcccaggcggctgcggtggcgcccggagaaggtcccgcgggaggtttcccggcacgcggcgggcaggccggtctcgcctctcggtgctcagcggcgcctggaccgacacggcccccgcgggtgttttccagacgtgttcgtacccggagcctctgcgtggaagagcgcgtt

SEQ ID NO: 462931 - DNA, 332 bp, Homo sapiens
  chr5:180480302-180480634
  hyper
  liver_bileduct vs. upper_gi,ovary,bladder_and_urothelial
gcggagaagccgaggtaccggcgcgggcggcggggcggggaggggcaccggccggtgctgaaccccggggccgcggaggcgcctccccccaggacgcggcgcgggaaggcggcctggaaggggcgggggcgcgcactcagccctctccgctcccgtttcccttcagaaaagctgaggaagcaggcggagaagagacaaggtgagcggggacagggcgttctgcacgcacctgcccaagtgccaaaacccgccgtcatctaaaggctgtgggtcccgttacgagggtttattccagcgcgaggtgtcagggcggccaccggggaacggggatc

SEQ ID NO: 462932 - DNA, 97 bp, Homo sapiens
  chr5:180480142-180480239
  hyper
  liver_bileduct vs. upper_gi,ovary,bladder_and_urothelial, melanoma,head_and_neck,pancreas_gallbladder,anorectal, colorectal,cervical
cgcctctcggtgctcagcggcgcctggaccgacacggcccccgcgggtgttttccagacgtgttcgtacccggagcctctgcgtggaagagcgcgtt

SEQ ID NO: 462933 - DNA, 829 bp, Homo sapiens; identical to SEQ ID NO: 346765
  chr5:180480302-180481131
  hyper
  liver_bileduct vs. upper_gi,ovary,bladder_and_urothelial, melanoma,head_and_neck,pancreas_gallbladder,anorectal, colorectal,cervical

SEQ ID NO: 462934 - DNA, 608 bp, Homo sapiens
  chr5:180630981-180631589
  hyper
  liver_bileduct vs. upper_gi,pancreas_gallbladder
cgcccgagcctccccgccccgccctcacccctgcacacaccctcgctgaggctcagcgagaaaatagcaaagaaagggcccccagaatcgacagcgttggcacagtcagacggctctaggtgcgcggcttaacccgggagccccctccctggacatcttggcgaggtcctctcactcagttccacgaggtggggactttgagcagagcccgcttcggggaaagagataagagtgggggcagcggctgcgtggctgtgccggagacttcccgcgggcagagagctgcggagacgcagaccaggctagaggctccgaacagacaggaagaacatcgccaagtccgtgggggacgtcgcgcaggcggcccagtatctggcccagagggaaacgcagtgggggtggggtgggggtattggtgatgttgggggtgacagagaaccgcgctcagcccgggaaccagcgctgggcttcctggaatggagaaagaagggaggggctcacccgggcctcctgatcgacaggctgttctctgcaccccgtgcgcgggagcgcgggaccaagtcagggggtcccggggacccacggggtgggtgggggctgcgctcacc

SEQ ID NO: 462935 - DNA, 64 bp, Homo sapiens; identical to SEQ ID NO: 456056
  chr5:180632796-180632860
  hyper
  liver_bileduct vs. cervical,multiple_myeloma, myeloid_neoplasm

SEQ ID NO: 462936 - DNA, 244 bp, Homo sapiens; identical to SEQ ID NO: 358355
  chr5:180633225-180633469
  hyper
  liver_bileduct vs. cervical,multiple_myeloma, myeloid_neoplasm

SEQ ID NO: 462937 - DNA, 61 bp, Homo sapiens; identical to SEQ ID NO: 453345
  chr6:391113-391174
  hyper
  liver_bileduct vs. lymphoid_neoplasm,thyroid, multiple_myeloma,non_cancer,prostate,myeloid_neoplasm

SEQ ID NO: 462938 - DNA, 55 bp, Homo sapiens; identical to SEQ ID NO: 346767
  chr6:393764-393819
  hyper
  liver_bileduct vs. lymphoid_neoplasm

SEQ ID NO: 462939 - DNA, 166 bp, Homo sapiens
  chr6:1624812-1624978
  hyper
  liver_bileduct vs. renal,bladder_and_urothelial,thyroid, anorectal
cgtgggggtgggggcagcaggtcccgagccccgggaactcccaccgttccgctccctctgggcgcacaaggctccgggtttccctgctttcggtccctgctgtgcgcgttcagttgcggctctcggcgccgtaaatcactaggtcgcggttaagaatgtgctgtgc

SEQ ID NO: 462940 - DNA, 52 bp, Homo sapiens; identical to SEQ ID NO: 459763
  chr6:1625068-1625120
  hyper
  liver_bileduct vs. renal,bladder_and_urothelial,thyroid, anorectal

SEQ ID NO: 462941 - DNA, 52 bp, Homo sapiens; identical to SEQ ID NO: 459763
  chr6:1625068-1625120
  hyper
  liver_bileduct vs. renal,bladder_and_urothelial,thyroid, sarcoma

SEQ ID NO: 462942 - DNA, 10 bp, Homo sapiens
  chr6:5997274-5997284
  hyper
  liver_bileduct vs. uterine,ovary
aattcaatcc

SEQ ID NO: 462943 - DNA, 115 bp, Homo sapiens; identical to SEQ ID NO: 456068
  chr6:26233864-26233979
  hyper
  liver_bileduct vs. multiple_myeloma,upper_gi,cervical, renal,lymphoid_neoplasm,non_cancer,myeloid_neoplasm

SEQ ID NO: 462944 - DNA, 14 bp, Homo sapiens
  chr6:26249947-26249961
  hyper
  liver_bileduct vs. anorectal,upper_gi,lymphoid_neoplasm, uterine,head_and_neck,non_cancer,multiple_myeloma,cervical, thyroid,breast,sarcoma,ovary,myeloid_neoplasm,prostate
cgctgtcacccatg

SEQ ID NO: 462945 - DNA, 113 bp, Homo sapiens; identical to SEQ ID NO: 346790
  chr6:26250001-26250114
  hyper
  liver_bileduct vs. anorectal,upper_gi,lymphoid_neoplasm, uterine,head_and_neck,non_cancer,multiple_myeloma,cervical, thyroid,breast,sarcoma,ovary,myeloid_neoplasm,prostate

SEQ ID NO: 462946 - DNA, 1 bp, Homo sapiens
  chr6:26250181-26250182
  hyper
  liver_bileduct vs. uterine,non_cancer,anorectal, myeloid_neoplasm,thyroid,multiple_myeloma,head_and_neck,breast, prostate,cervical,upper_gi,renal,lymphoid_neoplasm, bladder_and_urothelial,ovary,colorectal,sarcoma
c

SEQ ID NO: 462947 - DNA, 26 bp, Homo sapiens
  chr6:26251515-26251541
  hyper
  liver_bileduct vs. anorectal,multiple_myeloma,cervical, sarcoma,upper_gi,head_and_neck,myeloid_neoplasm,non_cancer, bladder_and_urothelial,uterine,breast,thyroid
cggaagctgcaatttggtaggaaact

SEQ ID NO: 462948 - DNA, 130 bp, Homo sapiens; identical to SEQ ID NO: 454440
  chr6:26271217-26271347
  hyper
  liver_bileduct vs. myeloid_neoplasm,thyroid,anorectal, non_cancer,cervical,multiple_myeloma,lymphoid_neoplasm, colorectal,uterine,upper_gi

SEQ ID NO: 462949 - DNA, 327 bp, Homo sapiens; identical to SEQ ID NO: 454441
  chr6:26272105-26272432
  hyper
  liver_bileduct vs. anorectal,thyroid,cervical, myeloid_neoplasm,non_cancer,multiple_myeloma,uterine,colorectal, lymphoid_neoplasm,bladder_and_urothelial

SEQ ID NO: 462950 - DNA, 327 bp, Homo sapiens; identical to SEQ ID NO: 454441
  chr6:26272105-26272432
  hyper
  liver_bileduct vs. cervical,anorectal,multiple_myeloma

SEQ ID NO: 462951 - DNA, 62 bp, Homo sapiens
  chr6:26272853-26272915
  hyper
  liver_bileduct vs. cervical,anorectal,multiple_myeloma
cttataatctatattcggcaaagtagactgtgctatctcctgaacacagatttcagccaatc

SEQ ID NO: 462952 - DNA, 228 bp, Homo sapiens
  chr6:26272853-26273081
  hyper
  liver_bileduct vs. cervical,anorectal
cttataatctatattcggcaaagtagactgtgctatctcctgaacacagatttcagccaatcgaaaagcaggtgtttaaaaaaatttaaaaaaaaaaaaaaaaaaaaaaccacttctgacttacatacttatagttgaaaggtcaaattatgcaaggttgagcttctgggagagccgatgagatttaggagttcagaaatggcctatcatatattcagacactaaaag

SEQ ID NO: 462953 - DNA, 278 bp, Homo sapiens; identical to SEQ ID NO: 345223
  chr6:26522013-26522291
  hyper
  liver_bileduct vs. breast,pancreas_gallbladder,upper_gi, renal,cervical,uterine,lung,sarcoma,bladder_and_urothelial, anorectal,multiple_myeloma,melanoma,prostate,colorectal, lymphoid_neoplasm,non_cancer,thyroid

SEQ ID NO: 462954 - DNA, 248 bp, Homo sapiens; identical to SEQ ID NO: 453365
  chr6:26577475-26577723
  hyper
  liver_bileduct vs. multiple_myeloma

SEQ ID NO: 462955 - DNA, 2 bp, Homo sapiens
  chr6:27100290-27100292
  hyper
  liver_bileduct vs. head_and_neck,melanoma,colorectal, lymphoid_neoplasm,cervical,upper_gi,pancreas_gallbladder, bladder_and_urothelial,anorectal,multiple_myeloma,uterine, prostate,non_cancer,thyroid,myeloid_neoplasm,breast
cg

SEQ ID NO: 462956 - DNA, 61 bp, Homo sapiens
  chr6:27100389-27100450
  hyper
  liver_bileduct vs. head_and_neck,melanoma,colorectal, lymphoid_neoplasm,cervical,upper_gi,pancreas_gallbladder, bladder_and_urothelial,anorectal,multiple_myeloma,uterine, prostate,non_cancer,thyroid,myeloid_neoplasm,breast
ttcagaaccttgtacacatagatggaatagctctccttgcggctgcgcttgcgcttcttgc

SEQ ID NO: 462957 - DNA, 61 bp, Homo sapiens
  chr6:27101049-27101110
  hyper
  liver_bileduct vs. head_and_neck,melanoma,colorectal, lymphoid_neoplasm,bladder_and_urothelial,cervical, pancreas_gallbladder,anorectal,upper_gi,multiple_myeloma, prostate,uterine,non_cancer,thyroid,myeloid_neoplasm,breast
cgggcaacgcggcccgcgacaacaagaagacccgcatcatcccgcgtcatctccaactggc

SEQ ID NO: 462958 - DNA, 87 bp, Homo sapiens; identical to SEQ ID NO: 345226
  chr6:27101206-27101293
  hyper
  liver_bileduct vs. head_and_neck,melanoma,colorectal, lymphoid_neoplasm,bladder_and_urothelial,cervical, pancreas_gallbladder,anorectal,upper_gi,multiple_myeloma, prostate,uterine,non_cancer,thyroid,myeloid_neoplasm,breast

SEQ ID NO: 462959 - DNA, 2 bp, Homo sapiens
  chr6:27782420-27782422
  hyper
  liver_bileduct vs. colorectal,upper_gi,lymphoid_neoplasm, prostate,breast,myeloid_neoplasm,thyroid,multiple_myeloma, pancreas_gallbladder,non_cancer
cg

SEQ ID NO: 462960 - DNA, 71 bp, Homo sapiens; identical to SEQ ID NO: 350336
  chr6:27782642-27782713
  hyper
  liver_bileduct vs. colorectal,upper_gi,lymphoid_neoplasm, prostate,breast,myeloid_neoplasm,thyroid,multiple_myeloma, pancreas_gallbladder,non_cancer

SEQ ID NO: 462961 - DNA, 2 bp, Homo sapiens
  chr6:27858278-27858280
  hyper
  liver_bileduct vs. lymphoid_neoplasm,upper_gi, multiple_myeloma,thyroid,non_cancer,cervical
cg

SEQ ID NO: 462962 - DNA, 51 bp, Homo sapiens; identical to SEQ ID NO: 454452
  chr6:27858740-27858791
  hyper
  liver_bileduct vs. lymphoid_neoplasm,upper_gi, multiple_myeloma,thyroid,non_cancer,cervical

SEQ ID NO: 462963 - DNA, 441 bp, Homo sapiens; identical to SEQ ID NO: 358497
  chr6:35744202-35744643
  hyper
  liver_bileduct vs. lung,breast,cervical,ovary

SEQ ID NO: 462964 - DNA, 5 bp, Homo sapiens
  chr6:37663981-37663986
  hyper
  liver_bileduct vs. anorectal
cgcca

SEQ ID NO: 462965 - DNA, 321 bp, Homo sapiens
  chr6:45390544-45390865
  hyper
  liver_bileduct vs. anorectal
cggttgcggccgccccacgacaaccgcaccatggtggagatcatcgccgaccacccggccgaactcgtccgcaccgacagccccaacttcctgtgctcggtgctgccctcgcactggcgctgcaacaagaccctgcccgtggccttcaaggtaagaggctacaccgccccccgcccccggccgggagcggcggaacctgcccgccggtgtcttcctgcccacggggctgggccccggacgtcctccaagacctcctgccttggcggctctaaccccagaaacccccggccgggcctccctccggatgccctggcgggctcg

SEQ ID NO: 462966 - DNA, 58 bp, Homo sapiens
  chr6:45390807-45390865
  hyper
  liver_bileduct vs. renal,cervical
cggctctaaccccagaaacccccggccgggcctccctccggatgccctggcgggctcg

SEQ ID NO: 462967 - DNA, 3 bp, Homo sapiens
  chr6:45391547-45391550
  hyper
  liver_bileduct vs. renal,cervical
ggc

SEQ ID NO: 462968 - DNA, 14 bp, Homo sapiens
  chr6:50803791-50803805
  hyper
  liver_bileduct vs. myeloid_neoplasm
cggtgacttctcta

SEQ ID NO: 462969 - DNA, 637 bp, Homo sapiens; identical to SEQ ID NO: 456077
  chr6:52227115-52227752
  hyper
  liver_bileduct vs. upper_gi,pancreas_gallbladder, colorectal,melanoma

SEQ ID NO: 462970 - DNA, 133 bp, Homo sapiens; identical to SEQ ID NO: 456078
  chr6:52227876-52228009
  hyper
  liver_bileduct vs. upper_gi,pancreas_gallbladder, colorectal,melanoma

SEQ ID NO: 462971 - DNA, 249 bp, Homo sapiens; identical to SEQ ID NO: 456079
  chr6:56818408-56818657
  hyper
  liver_bileduct vs. renal,anorectal,cervical,thyroid, bladder_and_urothelial,non_cancer,myeloid_neoplasm, multiple_myeloma

SEQ ID NO: 462972 - DNA, 291 bp, Homo sapiens
  chr6:74405623-74405914
  hyper
  liver_bileduct vs. lung
gctctgttctccgcggccagctgggacgccgggccaggtggggccgcctgcgtttagcaactgctttctcaccccctggatttgcgatgtttgccacagcagcgagaagcgccattgtaatggggatgggaggggtggagcctccaagtcctgtctcaatttagatctctcactctgctgttaggcgcgcccatttcagattactaaactcgaattaagagggaaaaaaaatcagggaggaggtggcaagccacaccccacggtgcccgcgaacttccccggcagcggact

SEQ ID NO: 462973 - DNA, 174 bp, Homo sapiens; identical to SEQ ID NO: 358578
  chr6:74406015-74406189
  hyper
  liver_bileduct vs. lung

SEQ ID NO: 462974 - DNA, 83 bp, Homo sapiens; identical to SEQ ID NO: 350409
  chr6:80657600-80657683
  hyper
  liver_bileduct vs. melanoma

SEQ ID NO: 462975 - DNA, 42 bp, Homo sapiens; identical to SEQ ID NO: 459786
  chr6:91320244-91320286
  hyper
  liver_bileduct vs. bladder_and_urothelial

SEQ ID NO: 462976 - DNA, 127 bp, Homo sapiens
  chr6:105627242-105627369
  hyper
  liver_bileduct vs. lung,breast,bladder_and_urothelial
cggcgctggcatgacttccccaggactgacaagggcccctaggaacggcttttctcccttgcaaaactggcctgtttatttcggctccagggtgcctggggccagagtaggacctgcaggaaaagat

SEQ ID NO: 462977 - DNA, 134 bp, Homo sapiens; identical to SEQ ID NO: 358617
  chr6:105628083-105628217
  hyper
  liver_bileduct vs. lung,breast,bladder_and_urothelial

SEQ ID NO: 462978 - DNA, 353 bp, Homo sapiens
  chr6:106533693-106534046
  hyper
  liver_bileduct vs. pancreas_gallbladder,lung,upper_gi, head_and_neck,colorectal,bladder_and_urothelial,cervical,ovary, multiple_myeloma
cgttagcaggagaaacggaatgttacaacttttggggcggggggcggggaaacgtgcgttacatacacaacagcttgaggaccagacagctccactgtattacactagctgcaaaaacaatttaacttgctcttttgaagtaagatttgtgtcttttgtacctggggatttgagctgagaaatcagaaactgtgtaggtaaattttaagtttccttaatttaaggaacgtgcgccccctaattctgccgcgccaggaaggagggcgatctggagtgtttagaatacaatagagcccaagtaagcgttgaggttaagtgccttcaaagggaagtaagaagattccaagtcaatg

SEQ ID NO: 462979 - DNA, 388 bp, Homo sapiens; identical to SEQ ID NO: 346843
  chr6:106534075-106534463
  hyper
  liver_bileduct vs. pancreas_gallbladder,lung,upper_gi, head_and_neck,colorectal,bladder_and_urothelial,cervical,ovary, multiple_myeloma

SEQ ID NO: 462980 - DNA, 945 bp, Homo sapiens; identical to SEQ ID NO: 346853
  chr6:112193858-112194803
  hyper
  liver_bileduct vs. lung

SEQ ID NO: 462981 - DNA, 440 bp, Homo sapiens; identical to SEQ ID NO: 453397
  chr6:127836226-127836666
  hyper
  liver_bileduct vs. lung

SEQ ID NO: 462982 - DNA, 225 bp, Homo sapiens; identical to SEQ ID NO: 453398
  chr6:127836441-127836666
  hyper
  liver_bileduct vs. lung,sarcoma

SEQ ID NO: 462983 - DNA, 31 bp, Homo sapiens; identical to SEQ ID NO: 350458
  chr6:127837749-127837780
  hyper
  liver_bileduct vs. lung

SEQ ID NO: 462984 - DNA, 22 bp, Homo sapiens
  chr6:137241797-137241819
  hyper
  liver_bileduct vs. ovary
cggtaaatcacgacttcagcac

SEQ ID NO: 462985 - DNA, 49 bp, Homo sapiens
  chr6:137243410-137243459
  hyper
  liver_bileduct vs. lung,breast,upper_gi
gcctggccggagctgccctctgcagccgagccggcgccccctgcccttc

SEQ ID NO: 462986 - DNA, 49 bp, Homo sapiens; identical to SEQ ID NO: 462985
  chr6:137243410-137243459
  hyper
  liver_bileduct vs. bladder_and_urothelial,breast

SEQ ID NO: 462987 - DNA, 259 bp, Homo sapiens
  chr6:149068930-149069189
  hyper
  liver_bileduct vs. sarcoma,head_and_neck,lung,anorectal, prostate,cervical,bladder_and_urothelial
ctccaggtgctaagcccgtgagcatctgtgccgcggtcgggagcgccttcttcctcccgcgcgtccgactgtcctcaccgaggcgggggcgccgctgggttgcgctgccggcaggtaccccggggcgaggcaccgctcaccttccccccgccccacctccgccacccggatccggactggggcggagtggatgggtgtgtggggtgtgccggagtgtgtgtatcttcaggcctggcggcgcggggagtggcgaagggaa

SEQ ID NO: 462988 - DNA, 5 bp, Homo sapiens
  chr6:149069508-149069513
  hyper
  liver_bileduct vs. sarcoma,head_and_neck,lung,anorectal, prostate,cervical,bladder_and_urothelial
tgtgc

SEQ ID NO: 462989 - DNA, 139 bp, Homo sapiens
  chr6:149069050-149069189
  hyper
  liver_bileduct vs. bladder_and_urothelial,sarcoma, prostate
cggggcgaggcaccgctcaccttccccccgccccacctccgccacccggatccggactggggcggagtggatgggtgtgtggggtgtgccggagtgtgtgtatcttcaggcctggcggcgcggggagtggcgaagggaa

SEQ ID NO: 462990 - DNA, 224 bp, Homo sapiens
  chr6:149069508-149069732
  hyper
  liver_bileduct vs. bladder_and_urothelial,sarcoma, prostate
tgtgcgtctcaagctcaagtcaaaacttgtgtgtgtgtgtgtgtgtgtgtgtgtgtgtgtgtgtgtgtgtgtgtgtgtgtggtttattaggagagaggccgcctgtctttagcagaagtaaggaaggggtttgacgggagggaaagagccgctccagcgagaaggcgtgaccccgcagctccctcgtctcggctgcgggagccaggggtgccagggacaggcga

SEQ ID NO: 462991 - DNA, 59 bp, Homo sapiens; identical to SEQ ID NO: 350476
  chr6:149069769-149069828
  hyper
  liver_bileduct vs. bladder_and_urothelial,sarcoma, prostate

SEQ ID NO: 462992 - DNA, 40 bp, Homo sapiens
  chr6:158957708-158957748
  hyper
  liver_bileduct vs. upper_gi
cgcaggcggcgacacaaagggtggagcggcgggaccggga

SEQ ID NO: 462993 - DNA, 207 bp, Homo sapiens
  chr6:158957988-158958195
  hyper
  liver_bileduct vs. upper_gi
cccgccgacggccgcctccgccggccgggcgcggagcctacggatggggacggggtcggggcggggatctgggagggaccaggaaggggacggggagcagggatactggcagcggcgggcaggttcctggattcagggcagcccggcgcccccgggcgaagggccgatttccgttcagctgaaacccaagccgaggctcccgcctcc

SEQ ID NO: 462994 - DNA, 91 bp, Homo sapiens; identical to SEQ ID NO: 358721
  chr7:1276567-1276658
  hyper
  liver_bileduct vs. melanoma

SEQ ID NO: 462995 - DNA, 636 bp, Homo sapiens
  chr7:5632268-5632904
  hyper
  liver_bileduct vs. bladder_and_urothelial,sarcoma, cervical,ovary,head_and_neck,myeloid_neoplasm,renal,thyroid, uterine,lung,prostate,non_cancer
cggcgaggacaccggtggggtgagagcaccggcggggcagcagcgggggccgcagcgccgggtccctcggcccggggcccctcccgcgcggagccaggggcgggacaggggggcgtggcctggtggcgctgacgtcacctcgcctataaaatgtccggggcgccgctagctgggctttgtggagcgctgcggagggtgcgtgcgggccgcggcagccgaacaaaggagcaggggcgccgccgcagggacccgccacccacctcccggggccgcgcagcggcctctcgtctactgccaccatgaccgccaacggcacagccgaggcggtgcagatccagttcggcctcatcaactgcggcaacaagtacctgacggccgaggcgttcgggttcaaggtgaacgcgtccgccagcagcctgaagaagaagcagatctggacgctggagcagccccctgacgaggcgggcagcgcggccgtgtgcctgcgcagccacctgggccgctacctggcggcggacaaggacggcaacgtgacctgcgagcgcgaggtgcccggtcccgactgccgtttcctcatcgtggcgcacgacgacggtcgctggtcgctgcagtccgaggcgcaccggcgctacttcg

SEQ ID NO: 462996 - DNA, 198 bp, Homo sapiens
  chr7:5632706-5632904
  hyper
  liver_bileduct vs. sarcoma,cervical,head_and_neck,ovary, bladder_and_urothelial,myeloid_neoplasm,renal,uterine
cgctggagcagccccctgacgaggcgggcagcgcggccgtgtgcctgcgcagccacctgggccgctacctggcggcggacaaggacggcaacgtgacctgcgagcgcgaggtgcccggtcccgactgccgtttcctcatcgtggcgcacgacgacggtcgctggtcgctgcagtccgaggcgcaccggcgctacttcg

SEQ ID NO: 462997 - DNA, 123 bp, Homo sapiens; identical to SEQ ID NO: 350511
  chr7:5633472-5633595
  hyper
  liver_bileduct vs. sarcoma,cervical,head_and_neck,ovary, bladder_and_urothelial,myeloid_neoplasm,renal,uterine

SEQ ID NO: 462998 - DNA, 29 bp, Homo sapiens
  chr7:6543023-6543052
  hyper
  liver_bileduct vs. upper_gi
cggcccccgaaggcgcgcgggaccccagc

SEQ ID NO: 462999 - DNA, 237 bp, Homo sapiens; identical to SEQ ID NO: 358741
  chr7:6543240-6543477
  hyper
  liver_bileduct vs. upper_gi

SEQ ID NO: 463000 - DNA, 62 bp, Homo sapiens
  chr7:6570393-6570455
  hyper
  liver_bileduct vs. prostate,uterine,non_cancer
cgaccagcccaattgtaggaaggaaagtgggctttcaatcccagccttttatcccaacaccg

SEQ ID NO: 463001 - DNA, 105 bp, Homo sapiens
  chr7:18125868-18125973
  hyper
  liver_bileduct vs. lung,upper_gi
cgttccaggtaccgccccacaatgctacctcctctttaaaagaagtcgttcagctggggcgggctggcgctgcgtggcgcgcacctgagcggccggggctccccg

SEQ ID NO: 463002 - DNA, 219 bp, Homo sapiens
  chr7:18126225-18126444
  hyper
  liver_bileduct vs. lung,upper_gi
gcgtcggccgcgcgcccaggtgttcccgcgtccgtaatcccctccggcccgcgcctcccggcccgccctgcgggtctccagcgcctgggcccgcgctctcgccgcgggtccttcctcctatccccacccagccccgcccagcctccgcggcgctggggctcccggccgagcctctcctcccacctccgtcccctacttccctccccaagaagtgctatt

SEQ ID NO: 463003 - DNA, 219 bp, Homo sapiens; identical to SEQ ID NO: 463002
  chr7:18126225-18126444
  hyper
  liver_bileduct vs. lung,cervical,sarcoma,ovary

SEQ ID NO: 463004 - DNA, 60 bp, Homo sapiens; identical to SEQ ID NO: 454474
  chr7:19156644-19156704
  hyper
  liver_bileduct vs. melanoma

SEQ ID NO: 463005 - DNA, 107 bp, Homo sapiens; identical to SEQ ID NO: 346884
  chr7:23287654-23287761
  hyper
  liver_bileduct vs. melanoma

SEQ ID NO: 463006 - DNA, 196 bp, Homo sapiens; identical to SEQ ID NO: 456123
  chr7:25896938-25897134
  hyper
  liver_bileduct vs. colorectal,sarcoma,anorectal,prostate, renal,myeloid_neoplasm,thyroid,non_cancer

SEQ ID NO: 463007 - DNA, 109 bp, Homo sapiens; identical to SEQ ID NO: 345266
  chr7:25897246-25897355
  hyper
  liver_bileduct vs. colorectal,sarcoma,anorectal,prostate, renal,myeloid_neoplasm,thyroid,non_cancer

SEQ ID NO: 463008 - DNA, 296 bp, Homo sapiens; identical to SEQ ID NO: 458249
  chr7:25901811-25902107
  hyper
  liver_bileduct vs. colorectal,ovary,melanoma,uterine, prostate

SEQ ID NO: 463009 - DNA, 208 bp, Homo sapiens; identical to SEQ ID NO: 458250
  chr7:25902138-25902346
  hyper
  liver_bileduct vs. colorectal,ovary,melanoma,uterine, prostate

SEQ ID NO: 463010 - DNA, 225 bp, Homo sapiens; identical to SEQ ID NO: 456125
  chr7:26192423-26192648
  hyper
  liver_bileduct vs. upper_gi

SEQ ID NO: 463011 - DNA, 20 bp, Homo sapiens
  chr7:26192666-26192686
  hyper
  liver_bileduct vs. upper_gi
cgctggcggatgtgcgagcg

SEQ ID NO: 463012 - DNA, 112 bp, Homo sapiens; identical to SEQ ID NO: 456127
  chr7:26192748-26192860
  hyper
  liver_bileduct vs. upper_gi

SEQ ID NO: 463013 - DNA, 91 bp, Homo sapiens; identical to SEQ ID NO: 456128
  chr7:27135176-27135267
  hyper
  liver_bileduct vs. bladder_and_urothelial, lymphoid_neoplasm,renal,prostate,multiple_myeloma,head_and_neck, non_cancer,anorectal,myeloid_neoplasm,cervical,uterine

SEQ ID NO: 463014 - DNA, 142 bp, Homo sapiens; identical to SEQ ID NO: 345270
  chr7:27136790-27136932
  hyper
  liver_bileduct vs. bladder_and_urothelial,head_and_neck, renal,lymphoid_neoplasm,prostate,anorectal,sarcoma,melanoma, non_cancer,ovary,multiple_myeloma,myeloid_neoplasm,thyroid, uterine,cervical,colorectal

SEQ ID NO: 463015 - DNA, 3 bp, Homo sapiens
  chr7:27191273-27191276
  hyper
  liver_bileduct vs. colorectal
aac

SEQ ID NO: 463016 - DNA, 244 bp, Homo sapiens
  chr7:27223331-27223575
  hyper
  liver_bileduct vs. colorectal
cgaagctgcgggcaggctctacttgctccccctttaaaaaaaaaaaaaaaaaaaaaaaaaagacccacaagacaaaaaaaaaatcgcttttgacagattgaataacaattgtgaataacatgcagttgggcagaaggaggcacgtaattgccaccacgccagaggaaaatggcttcctttggacaaaaaggccaactttgggttaatttgttcttttaatatattgctagagctaagcgggcta

SEQ ID NO: 463017 - DNA, 158 bp, Homo sapiens
  chr7:27238984-27239142
  hyper
  liver_bileduct vs. melanoma,anorectal,sarcoma,colorectal, head_and_neck
cggctgcgtagccctggtggtagaaggcgaactccttagcgcgggagctgaactcctcggcagctgggccggcggtatccatgtacttgtccgcgaaggcggcggcggcggcggccgaggcgggctgcgcgcacgacttgatggcgttggggtgcggg

SEQ ID NO: 463018 - DNA, 71 bp, Homo sapiens; identical to SEQ ID NO: 350551
  chr7:27245310-27245381
  hyper
  liver_bileduct vs. colorectal

SEQ ID NO: 463019 - DNA, 78 bp, Homo sapiens; identical to SEQ ID NO: 456132
  chr7:27281871-27281949
  hyper
  liver_bileduct vs. multiple_myeloma

SEQ ID NO: 463020 - DNA, 1 bp, Homo sapiens
  chr7:45613422-45613423
  hyper
  liver_bileduct vs. bladder_and_urothelial,uterine, prostate,thyroid
c

SEQ ID NO: 463021 - DNA, 102 bp, Homo sapiens; identical to SEQ ID NO: 345274
  chr7:50344738-50344840
  hyper
  liver_bileduct vs. anorectal,multiple_myeloma

SEQ ID NO: 463022 - DNA, 352 bp, Homo sapiens
  chr7:82072703-82073055
  hyper
  liver_bileduct vs. upper_gi,lung,melanoma,breast
ctccgacgaggggccgatgagcaaagattggaaaagtgtcagagtcaaggccagcaggcagccagcagccatcttcgcgatcgaagatcaatgccccctccctgcccaagcgggggaaggagcggcgctggaaaccgcgggcggaggaagagcagcacacgccgccgggaccgcgggcgtctggagggctggctgcgcccggggcccgaggcgcggagccgcgcgggggacggcaagggcgggagcggacgccgaggaaggggcggtggcgggcggacccactagcgtgcgtcggctgctccgcgccgcggccgccttgcctccgccgccatcaagggcgactttggaaaca

SEQ ID NO: 463023 - DNA, 4 bp, Homo sapiens
  chr7:82073098-82073102
  hyper
  liver_bileduct vs. upper_gi,lung,melanoma,breast
tctc

SEQ ID NO: 463024 - DNA, 191 bp, Homo sapiens; identical to SEQ ID NO: 458269
  chr7:87563639-87563830
  hyper
  liver_bileduct vs. bladder_and_urothelial,sarcoma, anorectal

SEQ ID NO: 463025 - DNA, 440 bp, Homo sapiens; identical to SEQ ID NO: 458270
  chr7:87563890-87564330
  hyper
  liver_bileduct vs. bladder_and_urothelial,sarcoma, anorectal

SEQ ID NO: 463026 - DNA, 207 bp, Homo sapiens; identical to SEQ ID NO: 350608
  chr7:87564359-87564566
  hyper
  liver_bileduct vs. bladder_and_urothelial,sarcoma, anorectal

SEQ ID NO: 463027 - DNA, 320 bp, Homo sapiens
  chr7:96634326-96634646
  hyper
  liver_bileduct vs. melanoma
tctgatttttctttttctgtaccaccccccagtggggtggagcccaggtgtgagggttcgtcttccttctgtggtttcaataaaatacgtctagaaaaatccacggtgacaaggagctcccacaagagtgtagtaggaccagagtggcagggacgtcaagaaaggggggcctggatttaatgcgggggtggggtcactgcttctaagcacaggcaacctacaagggtgcaaagggattgaaagagagcagcccccagttggctgtttcaaggctgagatattggcaactggggctccgggatttggggcacgagctgcgg

SEQ ID NO: 463028 - DNA, 31 bp, Homo sapiens; identical to SEQ ID NO: 371623
  chr7:96636807-96636838
  hyper
  liver_bileduct vs. multiple_myeloma

SEQ ID NO: 463029 - DNA, 379 bp, Homo sapiens; identical to SEQ ID NO: 333199
  chr7:100224197-100224576
  hyper
  liver_bileduct vs. lung,melanoma,bladder_and_urothelial

SEQ ID NO: 463030 - DNA, 984 bp, Homo sapiens; identical to SEQ ID NO: 345281
  chr7:100806337-100807321
  hyper
  liver_bileduct vs. lung,pancreas_gallbladder, bladder_and_urothelial,breast,upper_gi,colorectal,ovary, head_and_neck,prostate,sarcoma,cervical

SEQ ID NO: 463031 - DNA, 568 bp, Homo sapiens
  chr7:100806827-100807395
  hyper
  liver_bileduct vs. lung,pancreas_gallbladder,colorectal, breast,upper_gi,bladder_and_urothelial
cggcctccttccgccggtggcccggcgtctcctcctgggagcgcttgtcctcggcgccggcttccccgtcctcctcctccgcgaacaggagcgcgttctgccgcgccctctccgcctcctccgcctctgcctccgcctcggccgcctcctcatcctcttcccccaccctctcctccccgccgcgtctctcctgctccgcctcctcctcctcccttgcactctctcgctcctccgccgcctcctgcagcccccgacccccgaggccgcgctgccgggccccgccctgcagcaaatactggagcagcaggtccgaggcgaggtcggccagccgctcttcctgcgccgcggcctgccgcgtggcctccgcctgccgccgcccggcctccacctgcgccagcccttgctggagaaggcgctcgcccgcctcggagccgcccaggagtgcgctctccggccggcgcgccttggggaacggggcggccacgccttggtacgccttggacaggggtgccaatgcctcgcctaggtgtgttttgggggaggacactccttccccgaacttgtgggt

SEQ ID NO: 463032 - DNA, 86 bp, Homo sapiens
  chr7:103085746-103085832
  hyper
  liver_bileduct vs. myeloid_neoplasm
cggggcccggcccaggtgcgcactagatgaggcagtcaaccaagtcaattggttcccgatcaactaaatctctcctaaaaataaac

SEQ ID NO: 463033 - DNA, 20 bp, Homo sapiens
  chr7:106684813-106684833
  hyper
  liver_bileduct vs. lung,melanoma,breast,renal, bladder_and_urothelial,ovary,prostate
cgggggttcaccatggcgaa

SEQ ID NO: 463034 - DNA, 252 bp, Homo sapiens
  chr7:106684920-106685172
  hyper
  liver_bileduct vs. lung,melanoma,breast,renal, bladder_and_urothelial,ovary,prostate
cgcctctcccggcccgggcgcgcagccctgcggtggtctgacaggcgggtgcgcggcgccagccagcggaggttgccatggtttccgggggtcacgtgggcgcgctctcctgcgccccctcccgcgcaccgcggcggggcgggggcggggcgcccgggcgggggagaggcgcggccgcggctggagcgggaggagcaggagatgctgccagccctcccggggccgcgctcgctcagccgccgccaccacacg

SEQ ID NO: 463035 - DNA, 221 bp, Homo sapiens; identical to SEQ ID NO: 346927
  chr7:106685920-106686141
  hyper
  liver_bileduct vs. bladder_and_urothelial,melanoma,lung

SEQ ID NO: 463036 - DNA, 24 bp, Homo sapiens
  chr7:108095249-108095273
  hyper
  liver_bileduct vs. ovary,renal
cgaggaagagcccagtctcttaga

SEQ ID NO: 463037 - DNA, 3 bp, Homo sapiens
  chr7:128430707-128430710
  hyper
  liver_bileduct vs. thyroid
cga

SEQ ID NO: 463038 - DNA, 92 bp, Homo sapiens
  chr7:137531067-137531159
  hyper
  liver_bileduct vs. sarcoma
cgggaggagagggggaaagggggaaggagaggcgtggaaacagagaggtgcccaactccgcggaagcgccccttgctgggtagaagagtggg

SEQ ID NO: 463039 - DNA, 269 bp, Homo sapiens; identical to SEQ ID NO: 350656
  chr7:139168725-139168994
  hyper
  liver_bileduct vs. lung

SEQ ID NO: 463040 - DNA, 198 bp, Homo sapiens
  chr7:139929854-139930052
  hyper
  liver_bileduct vs. colorectal,upper_gi,cervical,lung, multiple_myeloma,uterine,pancreas_gallbladder,anorectal,ovary, head_and_neck,bladder_and_urothelial,myeloid_neoplasm, non_cancer,thyroid
cggctgttttgactcctgggcttccgccctttagtttacacatttgatgattccgtttgaaaatcgcaacctgaaatactcctcttctaggctggaggcggggttgggggcgggggcggtgggtggcggaaggagggccctcaaacaaagatccgctttctcctgaacaggtgtcaggagaccaagctttgacctcca

SEQ ID NO: 463041 - DNA, 362 bp, Homo sapiens; identical to SEQ ID NO: 345285
  chr7:139930346-139930708
  hyper
  liver_bileduct vs. colorectal,upper_gi,cervical,lung, multiple_myeloma,uterine,pancreas_gallbladder,anorectal,ovary, head_and_neck,bladder_and_urothelial,myeloid_neoplasm, non_cancer,thyroid

SEQ ID NO: 463042 - DNA, 9 bp, Homo sapiens
  chr7:140340225-140340234
  hyper
ctcccccgc

SEQ ID NO: 463043 - DNA, 184 bp, Homo sapiens
  chr7:140340368-140340552
  hyper
cggctggcggcgcggctcgggggcgggcggcggcgggtgccggggacgccatggccctccgccctccgcccctttgtccgccgagcctcccccggccgcccgcaagcccctgggggtccccgccgcgcgcgctcccgtggggtccccgccgcccccggccccagcggcgcgcttccctcggccg

SEQ ID NO: 463044 - DNA, 242 bp, Homo sapiens; identical to SEQ ID NO: 333344
  chr7:157594777-157595019
  hyper
  liver_bileduct vs. pancreas_gallbladder

SEQ ID NO: 463045 - DNA, 21 bp, Homo sapiens
  chr7:158380259-158380280
  hyper
  liver_bileduct vs. lung,upper_gi,melanoma,colorectal
cgggagctgccggccgcgggg

SEQ ID NO: 463046 - DNA, 94 bp, Homo sapiens
  chr7:158380396-158380490
  hyper
  liver_bileduct vs. lung,upper_gi,melanoma,colorectal
cgcgcgggaggcggcgggaggcggccgagtccgggcccagggaggcgcgcgccgccggctcctcccgccgcgcctctcgcgctcttgcggcgac

SEQ ID NO: 463047 - DNA, 126 bp, Homo sapiens; identical to SEQ ID NO: 346954
  chr7:158380510-158380636
  hyper
  liver_bileduct vs. lung,upper_gi,melanoma,colorectal

SEQ ID NO: 463048 - DNA, 3 bp, Homo sapiens
  chr7:158380811-158380814
  hyper
  liver_bileduct vs. melanoma
cgc

SEQ ID NO: 463049 - DNA, 155 bp, Homo sapiens
  chr8:11554731-11554886
  hyper
  liver_bileduct vs. bladder_and_urothelial, multiple_myeloma,prostate
cggagagcccctgtccttctgtcaaacacacgcacaggactaacgagggggatgagtggaaaccagccgcaaagaaatggagtgggaggttcttctttaaaatccattccgttcagaacacagtgaacaccctttgacagaacaaggactatcta

SEQ ID NO: 463050 - DNA, 55 bp, Homo sapiens
  chr8:11554915-11554970
  hyper
  liver_bileduct vs. bladder_and_urothelial, multiple_myeloma,prostate
ttgagactgttgttacaagaaaccgatgatttctaacaataggaacctcccagct

SEQ ID NO: 463051 - DNA, 141 bp, Homo sapiens; identical to SEQ ID NO: 350713
  chr8:11555521-11555662
  hyper
  liver_bileduct vs. bladder_and_urothelial, multiple_myeloma,prostate

SEQ ID NO: 463052 - DNA, 283 bp, Homo sapiens; identical to SEQ ID NO: 461291
  chr8:29387050-29387333
  hyper
  liver_bileduct vs. multiple_myeloma

SEQ ID NO: 463053 - DNA, 270 bp, Homo sapiens; identical to SEQ ID NO: 461292
  chr8:29387367-29387637
  hyper
  liver_bileduct vs. multiple_myeloma

SEQ ID NO: 463054 - DNA, 1 bp, Homo sapiens
  chr8:41755217-41755218
  hyper
  liver_bileduct vs. thyroid
c

SEQ ID NO: 463055 - DNA, 152 bp, Homo sapiens
  chr8:55379013-55379165
  hyper
  liver_bileduct vs. melanoma,ovary,cervical,uterine
cgctagaggtcaccggagcgcgctcccctcgccagggacctacactcttcccgctgctacattaggccgcattaacaaggatctggattcactttaatttaaaaggtaaaagatcttaggtctgatgggggagtgcggcgaggagagctcgg

SEQ ID NO: 463056 - DNA, 11 bp, Homo sapiens
  chr8:57069543-57069554
  hyper
  liver_bileduct vs. myeloid_neoplasm
cgaaaagtaga

SEQ ID NO: 463057 - DNA, 120 bp, Homo sapiens
  chr8:61822259-61822379
  hyper
  liver_bileduct vs. ovary,colorectal,upper_gi
cgaaacagagtggaggctcctttaatcttgacagcccgaatgctacaggggtcacagcacatctgctccggaggaaagacaaagggcaaggtggggccacggtagcccgcgcggggctct

SEQ ID NO: 463058 - DNA, 144 bp, Homo sapiens; identical to SEQ ID NO: 201426
  chr8:61822883-61823027
  hyper
  liver_bileduct vs. ovary,colorectal,upper_gi

SEQ ID NO: 463059 - DNA, 85 bp, Homo sapiens; identical to SEQ ID NO: 461300
  chr8:65499649-65499734
  hyper
  liver_bileduct vs. myeloid_neoplasm,multiple_myeloma

SEQ ID NO: 463060 - DNA, 8 bp, Homo sapiens
  chr8:72755240-72755248
  hyper
  liver_bileduct vs. renal
gttctgtc

SEQ ID NO: 463061 - DNA, 181 bp, Homo sapiens; identical to SEQ ID NO: 459870
  chr8:73449197-73449378
  hyper
  liver_bileduct vs. head_and_neck,sarcoma,ovary

SEQ ID NO: 463062 - DNA, 208 bp, Homo sapiens; identical to SEQ ID NO: 459871
  chr8:73449432-73449640
  hyper
  liver_bileduct vs. head_and_neck,sarcoma,ovary

SEQ ID NO: 463063 - DNA, 19 bp, Homo sapiens
  chr8:73450162-73450181
  hyper
  liver_bileduct vs. head_and_neck,sarcoma,ovary
tttaagaatgaatcatcgc

SEQ ID NO: 463064 - DNA, 99 bp, Homo sapiens; identical to SEQ ID NO: 345308
  chr8:82193698-82193797
  hyper
  liver_bileduct vs. bladder_and_urothelial, pancreas_gallbladder,upper_gi,renal,colorectal, lymphoid_neoplasm,anorectal,ovary

SEQ ID NO: 463065 - DNA, 21 bp, Homo sapiens
  chr8:91803656-91803677
  hyper
  liver_bileduct vs. bladder_and_urothelial,melanoma
cgtccttaccttgcgctttgg

SEQ ID NO: 463066 - DNA, 30 bp, Homo sapiens
  chr8:91804253-91804283
  hyper
  liver_bileduct vs. bladder_and_urothelial,melanoma
acctttcttttccccgaaaggaaggggttc

SEQ ID NO: 463067 - DNA, 66 bp, Homo sapiens; identical to SEQ ID NO: 456178
  chr8:91996920-91996986
  hyper
  liver_bileduct vs. sarcoma

SEQ ID NO: 463068 - DNA, 827 bp, Homo sapiens
  chr8:99956460-99957287
  hyper
  liver_bileduct vs. upper_gi
cggctgcgtctctataacagggaaacctcgagcaaacctgtgcctttaagactcagttgctatccaaacagaagtaaacagagtggaccattagcagacgccgggcgcggaggcggagccagggcgctgagggccccgcgcggcggcgggacgcccgcccgaaggggaggcggggccgctactaaagcccaagactcccggcctggggcagcctggggagggacgcgggcggggacggagctcggcgtgcttgctgctggagggtgatggccctgcaaggctgtgggctccgacctcaccgggagtcgacagcgagaggttcgccgaagagcgaggttctgggcgagcgctgaacgccggccccaagcaccccgggtctttacacagtccgcgtccacagactctgacgaagacgtggatctgctctcgctttagctgctcgcggtcctccagatcatgtccgcgactcctgcgactccgcgcggaaaaaaaagtttgccaggcgtggactcaatgacctttccaagctgtgcgcctcgctgcctggaccgggtctgagcgcggctgcccaggttgacctttctgcgggaggtgagtgttcgctctgggaaggggctgtagctgccctttggaaggaagggtttgggggtgtaagaggcgttcagattctcggtctggtgtgccccaaattcagatgtgaaaatagatcatggggatgcaatcccagggcactgtatttctcacttccttgggtccctggcacgcgactcccagctaacacccaaccacacacatttctacatactgtttcttaattttgttttggg

SEQ ID NO: 463069 - DNA, 420 bp, Homo sapiens
  chr8:99956867-99957287
  hyper
  liver_bileduct vs. upper_gi,colorectal,head_and_neck, cervical,breast,uterine
cgaagacgtggatctgctctcgctttagctgctcgcggtcctccagatcatgtccgcgactcctgcgactccgcgcggaaaaaaaagtttgccaggcgtggactcaatgacctttccaagctgtgcgcctcgctgcctggaccgggtctgagcgcggctgcccaggttgacctttctgcgggaggtgagtgttcgctctgggaaggggctgtagctgccctttggaaggaagggtttgggggtgtaagaggcgttcagattctcggtctggtgtgccccaaattcagatgtgaaaatagatcatggggatgcaatcccagggcactgtatttctcacttccttgggtccctggcacgcgactcccagctaacacccaaccacacacatttctacatactgtttcttaattttgttttggg

SEQ ID NO: 463070 - DNA, 51 bp, Homo sapiens; identical to SEQ ID NO: 345310
  chr8:99957709-99957760
  hyper
  liver_bileduct vs. upper_gi,colorectal,head_and_neck, cervical,breast,uterine

SEQ ID NO: 463071 - DNA, 398 bp, Homo sapiens
  chr8:104511554-104511952
  hyper
  liver_bileduct vs. prostate,ovary,breast,uterine,lung, head_and_neck,non_cancer,bladder_and_urothelial
tgggcctccagctctctgcccctttcctggcccccatccctgacaccccagggacccttcctccctcctcacgttctccctccttccaggatcccgccccgacacttcggggccctcccgctacgcgcactctttctcctcaggtcctgacacctgggcgccccctccctgtcacccaccttcagctccagccctgactctcgggcgccttgccacccttacgctccccgccccgccccggtccctcgggcgcccccactcgccgcctctacctccctacctgctacacctggcacccctgcccccacccctgctcatactcttcccccgcccccgacacctcgggcgccccctcacacgctcctattctccacacttccgtccccgaaaactcgggc

SEQ ID NO: 463072 - DNA, 430 bp, Homo sapiens
  chr8:104511554-104511984
  hyper
  liver_bileduct vs. head_and_neck,bladder_and_urothelial, ovary,melanoma,breast,prostate,cervical,uterine,lung,thyroid, non_cancer,sarcoma,renal
tgggcctccagctctctgcccctttcctggcccccatccctgacaccccagggacccttcctccctcctcacgttctccctccttccaggatcccgccccgacacttcggggccctcccgctacgcgcactctttctcctcaggtcctgacacctgggcgccccctccctgtcacccaccttcagctccagccctgactctcgggcgccttgccacccttacgctccccgccccgccccggtccctcgggcgcccccactcgccgcctctacctccctacctgctacacctggcacccctgcccccacccctgctcatactcttcccccgcccccgacacctcgggcgccccctcacacgctcctattctccacacttccgtccccgaaaactcgggcgccctctcccttcacgctcagtctctcctccc

SEQ ID NO: 463073 - DNA, 18 bp, Homo sapiens
  chr8:104511966-104511984
  hyper
  liver_bileduct vs. melanoma,cervical,head_and_neck, sarcoma,anorectal,prostate,thyroid,lung,non_cancer,breast, uterine,bladder_and_urothelial,ovary,myeloid_neoplasm
cgctcagtctctcctccc

SEQ ID NO: 463074 - DNA, 12 bp, Homo sapiens
  chr8:133492249-133492261
  hyper
cgcgtgctgagg

SEQ ID NO: 463075 - DNA, 805 bp, Homo sapiens
  chr8:142138208-142139013
  hyper
  liver_bileduct vs. lung,pancreas_gallbladder, head_and_neck,breast
cggcagcgggcggcgcgtccggcctttgtccccccacgctctccagggtaggtccagggactgccagatcaggggaccctttgcgtcctggagccttgggggctggatgacgtcgccgggcacctgaggaccccgcccattcctccctcggttccccagggagcgggcggccggcggggctgggcggggccgaaggaaggggccgcttgctccgacgccgcgcacgcgccagggcccgcaggcgggttaggaaatgacgaccgcgcgcgggtctccagcagcacccgccctaggaccggccccgcccccaagtcccggtccctagggccgggcacgccactccaggccccgcccagaacctccccgcccagtcaagccccgcccccaaactctgtctccccgcggtatcctctggggctctccaggccccgcctcggctcgggccccgcccctccaggccccgcctccagccccgccccgcagacggcgctcgcagcgcccccggcccccaggcggcgcggctggtccccaggggtctgcgggcgactgcgcggctgaggcgcccgagtgcggtactggcggcgggcggcgggcagccatggcggaggccgcgtcgccgcacttgtcgctgccctcggggctgctggagctctgcgcgctgctgggcgccccccgggacagtctccgaagtctcgagcaggtgaggggcggggaaactgaggcggacgtgggccacgagtcggcagccgggacagcagtcggagagcgggcgcccgggtgccctgtgggttggcgcggactttcc

SEQ ID NO: 463076 - DNA, 973 bp, Homo sapiens
  chr8:142138536-142139509
  hyper
  liver_bileduct vs. lung,pancreas_gallbladder,ovary, head_and_neck,renal
cgggcacgccactccaggccccgcccagaacctccccgcccagtcaagccccgcccccaaactctgtctccccgcggtatcctctggggctctccaggccccgcctcggctcgggccccgcccctccaggccccgcctccagccccgccccgcagacggcgctcgcagcgcccccggcccccaggcggcgcggctggtccccaggggtctgcgggcgactgcgcggctgaggcgcccgagtgcggtactggcggcgggcggcgggcagccatggcggaggccgcgtcgccgcacttgtcgctgccctcggggctgctggagctctgcgcgctgctgggcgccccccgggacagtctccgaagtctcgagcaggtgaggggcggggaaactgaggcggacgtgggccacgagtcggcagccgggacagcagtcggagagcgggcgcccgggtgccctgtgggttggcgcggactttccgagggctgagtcccggtcccccggcggtgaccccgcgcgcctgtggccggggatcgcgcccgagctcaggcaggtgccctggagcagcgccctgctcccctcccctcttctctcctctccccgcccggggcccttggtgtgagacatgtcttttgagagctgcgaacttggtccgccggccgggaatctgggggtgccgcccctcggagagtctctggggcctctctcttcagtcgctcccatcttgggcaggtgcttctgaaggtggggtgcaccagacaacgggcggaagccgccggagcctcacggtctagcgggcccagccctcgctgctgaaatgatttcattctttatgctgggatgtgttgtcccctgagtagtgggttttgcaccaggcacagaataacgagagagcaatcttagagttagccgccggcctcgcgtattctgcatgaacccctttgcgatgaagcctatagctatttttctcccttgc

SEQ ID NO: 463077 - DNA, 450 bp, Homo sapiens
  chr8:142317706-142318156
  hyper
  liver_bileduct vs. lung,upper_gi,renal, pancreas_gallbladder,breast,ovary,head_and_neck,colorectal, cervical
cgcgagtggtgtatcgctggttgaattctcataagttagagatagcaggcaggggttagaaggacaagacagggtcaggaccaggagttagaggcgccaggctcctctctgggtagagaaaccgaggaactgggggcggggaggactgatgggtgcgaaagcgggccgggtccaaatgaaggcgcgcgccccggggtgggggccggggtggggggaatgagggaggctgcagggctggggaccagggcaggtgcaatccggaaagaggaggcgggaaggaattggggggccctgaggagccagcgcaagccgggtgggggcacgtcccctcccccggagaaggtgcggggctggggctgcggcgcggacccgacctggaggccgaggctgtgcgggaggtgggggtggggaggctgcaggtgcccggcgcccaggtgcgaggtgcagggg

SEQ ID NO: 463078 - DNA, 415 bp, Homo sapiens; identical to SEQ ID NO: 345317
  chr8:142318184-142318599
  hyper
  liver_bileduct vs. lung,upper_gi,renal, pancreas_gallbladder,breast,ovary,head_and_neck,colorectal, cervical

SEQ ID NO: 463079 - DNA, 220 bp, Homo sapiens
  chr8:144240980-144241200
  hyper
  liver_bileduct vs. sarcoma,bladder_and_urothelial
cgcgggccccctactcaccgggcgccgagcacagcaggacggccagcagcgccaggccgaggcccttcatggctgcaggcagcatgctccgggtgggcctgggggcggcgcgggggcttggggcgcgggtcctctggggcgcaagcctggaggggagaagcatcggtcaggagaccccaaagaccctctcctttcccagcctcaggatgcaaccttctcc

SEQ ID NO: 463080 - DNA, 56 bp, Homo sapiens
  chr8:144328118-144328174
  hyper
  liver_bileduct vs. melanoma,thyroid,non_cancer
cgcggggctctggcgggcctggcggctcagtgcgatctgggcaggcaggaagtgga

SEQ ID NO: 463081 - DNA, 37 bp, Homo sapiens; identical to SEQ ID NO: 350846
  chr9:118139-118176
  hyper
  liver_bileduct vs. thyroid,non_cancer,myeloid_neoplasm, prostate

SEQ ID NO: 463082 - DNA, 878 bp, Homo sapiens; identical to SEQ ID NO: 333605
  chr9:503936-504814
  hyper
  liver_bileduct vs. upper_gi,lung

SEQ ID NO: 463083 - DNA, 772 bp, Homo sapiens
  chr9:504833-505605
  hyper
  liver_bileduct vs. colorectal
cgggctggccccgcgcggagccgacttggcgcgcgccggggttgcgcggcggccgtggcggtggcggagggcagcccccgcgggctcccgctcgtgcgggtgaacccggcggcctcggggcggtcctgggggggggtccgagaggtggcgtcggccccgcggccgtcggagtttggcgcgctctgcagcggcggcgctcggccggtctggaggagggagaggcgcgccgggcacggagcagcgagaaagttcgggccgggccggccggcgggagggtgcgggcgcctggctaccccggcccggcgctctgtccctcggatgcctctgggcccttccctagcccggggcggaacgggggaccctctctgaagcggctctccgtggagttggatgttgcccttcgcgggagggagtggcggtcaagacccctttatcctcggccccagaggggcaggtggcctcgggtcgccctccgccaactccgaggtggcttcggccggggctggagggcggggaggcgggggaggggcgtgggcgctgcggcctctggggcggcccaacccggcgcgggcagcgtgggtttccgaggtcccgcggttccaggtcgagggaaggtgtaggggccctgaagcgggctggtccccgaatgttgcgttttctgtgccgctttgggcaacacgcagtggcgctcgcggcagccacggctccttgaccgttcatctccttcacccgggtcccgtggaactttcagaggcaactgttcttggtggct

SEQ ID NO: 463084 - DNA, 82 bp, Homo sapiens; identical to SEQ ID NO: 372044
  chr9:505639-505721
  hyper
  liver_bileduct vs. colorectal

SEQ ID NO: 463085 - DNA, 9 bp, Homo sapiens
  chr9:37028066-37028075
  hyper
  liver_bileduct vs. melanoma,lymphoid_neoplasm
agagcagtc

SEQ ID NO: 463086 - DNA, 63 bp, Homo sapiens; identical to SEQ ID NO: 456188
  chr9:37034135-37034198
  hyper
  liver_bileduct vs. lymphoid_neoplasm,uterine,prostate, thyroid,non_cancer,ovary,renal,myeloid_neoplasm,colorectal, anorectal,multiple_myeloma

SEQ ID NO: 463087 - DNA, 238 bp, Homo sapiens
  chr9:37035890-37036128
  hyper
  liver_bileduct vs. myeloid_neoplasm,uterine,thyroid, non_cancer,head_and_neck,ovary
cgggctgggggcggggggtgttggtgttttgttgttgttgttgtttccatttagagggcttgttttgtttttgtttgttttctgtgagttttcatttttccatgggatattcttttgtttcgggtgttttgcgtgttgttttttcgtgggattgattttagcgggttttgctctgtaagtcctggtctttggggtgagttttgattttgtgtaattttgtactttgtccttgtaggct

SEQ ID NO: 463088 - DNA, 3 bp, Homo sapiens
  chr9:66494093-66494096
  hyper
  liver_bileduct vs. breast,bladder_and_urothelial
cgc

SEQ ID NO: 463089 - DNA, 156 bp, Homo sapiens; identical to SEQ ID NO: 461333
  chr9:96720648-96720804
  hyper
  liver_bileduct vs. ovary

SEQ ID NO: 463090 - DNA, 94 bp, Homo sapiens; identical to SEQ ID NO: 454522
  chr9:100503340-100503434
  hyper
  liver_bileduct vs. anorectal,ovary,head_and_neck, myeloid_neoplasm

SEQ ID NO: 463091 - DNA, 28 bp, Homo sapiens
  chr9:100503960-100503988
  hyper
  liver_bileduct vs. anorectal,ovary,head_and_neck, myeloid_neoplasm
tgcctcccgggacaaggccagggtcatc

SEQ ID NO: 463092 - DNA, 703 bp, Homo sapiens; identical to SEQ ID NO: 333740
  chr9:101569830-101570533
  hyper
  liver_bileduct vs. lung,upper_gi,bladder_and_urothelial, colorectal,pancreas_gallbladder

SEQ ID NO: 463093 - DNA, 83 bp, Homo sapiens
  chr9:124990438-124990521
  hyper
  liver_bileduct vs. ovary,lung
cggattcaggcgcctttcgagggccagtcggagggaaacccggagcaaaaagagagcgagatcggggcgaaacgggaccaaaa

SEQ ID NO: 463094 - DNA, 142 bp, Homo sapiens; identical to SEQ ID NO: 345329
  chr9:124991012-124991154
  hyper
  liver_bileduct vs. ovary,lung

SEQ ID NO: 463095 - DNA, 168 bp, Homo sapiens; identical to SEQ ID NO: 459902
  chr9:129485513-129485681
  hyper
  liver_bileduct vs. prostate,renal,breast

SEQ ID NO: 463096 - DNA, 4 bp, Homo sapiens
  chr9:139739050-139739054
  hyper
  liver_bileduct vs. cervical,head_and_neck
cggc

SEQ ID NO: 463097 - DNA, 4 bp, Homo sapiens
  JH636052.4:5118715-5118719
  hyper
  liver_bileduct vs. multiple_myeloma
cgcc

SEQ ID NO: 463098 - DNA, 205 bp, Homo sapiens; identical to SEQ ID NO: 344920
  AEKP01149809.1_1-6354:1345-1550
  hypo
  liver_bileduct vs. colorectal,head_and_neck,renal, lymphoid_neoplasm

SEQ ID NO: 463099 - DNA, 89 bp, Homo sapiens
  chr1:2999275-2999364
  hypo
  liver_bileduct vs. upper_gi
cgcagcaaggagaggtggggtgcgcttcatctcagctgccccagggctgagctcagctttgcccgctttgtgcggagtccaccgagggg

SEQ ID NO: 463100 - DNA, 33 bp, Homo sapiens
  chr1:2999791-2999824
  hypo
  liver_bileduct vs. upper_gi
cgcaggggtcgggtctcctggctgcgccccacc

SEQ ID NO: 463101 - DNA, 83 bp, Homo sapiens; identical to SEQ ID NO: 352743
  chr1:2999864-2999947
  hypo
  liver_bileduct vs. upper_gi

SEQ ID NO: 463102 - DNA, 304 bp, Homo sapiens
  chr1:3052594-3052898
  hypo
  liver_bileduct vs. upper_gi
cgctttgtccgggagccacaggacaccaggctggggcggggctgggggcagaacgctcctccagcagcctaggagccacccctgggaagaaagggggtctcgggcagcctcgccatgggaccaccagctttgggccttcgttacaggggtgatgctgccccgctgatagggttgggggcctggggctgcagcgtagctgaagtggaacctgcccagcctgcacttcccagctggccagccccgcgcgatgctccggggtctcggcgaggcacgccaggcactgagtcctcagacccgctgtccg

SEQ ID NO: 463103 - DNA, 40 bp, Homo sapiens; identical to SEQ ID NO: 345690
  chr1:3052927-3052967
  hypo
  liver_bileduct vs. upper_gi

SEQ ID NO: 463104 - DNA, 120 bp, Homo sapiens; identical to SEQ ID NO: 454537
  chr1:3111118-3111238
  hypo
  liver_bileduct vs. upper_gi

SEQ ID NO: 463105 - DNA, 326 bp, Homo sapiens; identical to SEQ ID NO: 347777
  chr1:3111463-3111789
  hypo
  liver_bileduct vs. upper_gi

SEQ ID NO: 463106 - DNA, 164 bp, Homo sapiens; identical to SEQ ID NO: 336831
  chr1:3193780-3193944
  hypo
  liver_bileduct vs. upper_gi

SEQ ID NO: 463107 - DNA, 859 bp, Homo sapiens; identical to SEQ ID NO: 352751
  chr1:3321132-3321991
  hypo
  liver_bileduct vs. upper_gi

SEQ ID NO: 463108 - DNA, 238 bp, Homo sapiens; identical to SEQ ID NO: 362280
  chr1:3343487-3343725
  hypo
  liver_bileduct vs. upper_gi

SEQ ID NO: 463109 - DNA, 214 bp, Homo sapiens; identical to SEQ ID NO: 336865
  chr1:4037053-4037267
  hypo

SEQ ID NO: 463110 - DNA, 15 bp, Homo sapiens
  chr1:4659133-4659148
  hypo
  liver_bileduct vs. colorectal,uterine,prostate,renal, upper_gi,lymphoid_neoplasm
cggcagtcccacggg

SEQ ID NO: 463111 - DNA, 1 bp, Homo sapiens
  chr1:4659241-4659242
  hypo
  liver_bileduct vs. colorectal,uterine,prostate,renal, upper_gi,lymphoid_neoplasm
c

SEQ ID NO: 463112 - DNA, 339 bp, Homo sapiens; identical to SEQ ID NO: 336867
  chr1:4673912-4674251
  hypo
  liver_bileduct vs. anorectal,lymphoid_neoplasm,prostate, pancreas_gallbladder

SEQ ID NO: 463113 - DNA, 18 bp, Homo sapiens
  chr1:4726576-4726594
  hypo
  liver_bileduct vs. lymphoid_neoplasm,uterine,colorectal
cggagaggggcccgtgaa

SEQ ID NO: 463114 - DNA, 18 bp, Homo sapiens
  chr1:4726828-4726846
  hypo
  liver_bileduct vs. lymphoid_neoplasm,uterine,colorectal
ggatgcggagaggggccc

SEQ ID NO: 463115 - DNA, 896 bp, Homo sapiens; identical to SEQ ID NO: 330665
  chr1:6052426-6053322
  hypo
  liver_bileduct vs. bladder_and_urothelial,lung

SEQ ID NO: 463116 - DNA, 426 bp, Homo sapiens; identical to SEQ ID NO: 457245
  chr1:9711649-9712075
  hypo
  liver_bileduct vs. prostate,lymphoid_neoplasm,sarcoma, head_and_neck,non_cancer,myeloid_neoplasm,thyroid, multiple_myeloma,lung,breast,bladder_and_urothelial,uterine

SEQ ID NO: 463117 - DNA, 53 bp, Homo sapiens; identical to SEQ ID NO: 462206
  chr1:11538821-11538874
  hypo
  liver_bileduct vs. melanoma

SEQ ID NO: 463118 - DNA, 3 bp, Homo sapiens
  chr1:14027196-14027199
  hypo
  liver_bileduct vs. breast,lymphoid_neoplasm, head_and_neck,lung,ovary,anorectal,multiple_myeloma,uterine, myeloid_neoplasm,colorectal,bladder_and_urothelial,thyroid
gcc

SEQ ID NO: 463119 - DNA, 121 bp, Homo sapiens; identical to SEQ ID NO: 336939
  chr1:15102346-15102467
  hypo
  liver_bileduct vs. melanoma

SEQ ID NO: 463120 - DNA, 220 bp, Homo sapiens; identical to SEQ ID NO: 336942
  chr1:15283890-15284110
  hypo
  liver_bileduct vs. upper_gi,lung,pancreas_gallbladder

SEQ ID NO: 463121 - DNA, 383 bp, Homo sapiens; identical to SEQ ID NO: 336943
  chr1:15374975-15375358
  hypo
  liver_bileduct vs. bladder_and_urothelial,breast

SEQ ID NO: 463122 - DNA, 321 bp, Homo sapiens; identical to SEQ ID NO: 462208
  chr1:25255291-25255612
  hypo
  liver_bileduct vs. lymphoid_neoplasm

SEQ ID NO: 463123 - DNA, 7 bp, Homo sapiens
  chr1:25255934-25255941
  hypo
  liver_bileduct vs. lymphoid_neoplasm
agccaga

SEQ ID NO: 463124 - DNA, 33 bp, Homo sapiens; identical to SEQ ID NO: 454089
  chr1:25255579-25255612
  hypo
  liver_bileduct vs. lymphoid_neoplasm,cervical, head_and_neck,multiple_myeloma,myeloid_neoplasm,non_cancer, breast,melanoma,prostate,uterine,ovary,thyroid

SEQ ID NO: 463125 - DNA, 7 bp, Homo sapiens
  chr1:25255934-25255941
  hypo
  liver_bileduct vs. lymphoid_neoplasm,cervical, head_and_neck,multiple_myeloma,myeloid_neoplasm,non_cancer, breast,melanoma,prostate,uterine,ovary,thyroid
agccaga

SEQ ID NO: 463126 - DNA, 384 bp, Homo sapiens; identical to SEQ ID NO: 462217
  chr1:39956953-39957337
  hypo
  liver_bileduct vs. cervical,uterine,ovary,head_and_neck

SEQ ID NO: 463127 - DNA, 24 bp, Homo sapiens
  chr1:67773109-67773133
  hypo
  liver_bileduct vs. ovary,lung,bladder_and_urothelial, head_and_neck,pancreas_gallbladder,breast,melanoma,uterine, colorectal,upper_gi,anorectal,myeloid_neoplasm,thyroid,renal
cgtctctatggctgtgaacgctga

SEQ ID NO: 463128 - DNA, 47 bp, Homo sapiens; identical to SEQ ID NO: 349260
  chr1:67773780-67773827
  hypo
  liver_bileduct vs. ovary,lung,bladder_and_urothelial, head_and_neck,pancreas_gallbladder,breast,melanoma,uterine, colorectal,upper_gi,anorectal,myeloid_neoplasm,thyroid,renal

SEQ ID NO: 463129 - DNA, 757 bp, Homo sapiens; identical to SEQ ID NO: 462226
  chr1:85462482-85463239
  hypo
  liver_bileduct vs. breast,ovary

SEQ ID NO: 463130 - DNA, 536 bp, Homo sapiens; identical to SEQ ID NO: 462227
  chr1:85462747-85463283
  hypo
  liver_bileduct vs. anorectal,uterine,breast, lymphoid_neoplasm,lung,ovary,cervical,bladder_and_urothelial, myeloid_neoplasm,thyroid,non_cancer,head_and_neck,prostate

SEQ ID NO: 463131 - DNA, 826 bp, Homo sapiens; identical to SEQ ID NO: 462228
  chr1:90098160-90098986
  hypo
  liver_bileduct vs. lung,melanoma,head_and_neck,ovary

SEQ ID NO: 463132 - DNA, 826 bp, Homo sapiens; identical to SEQ ID NO: 462229
  chr1:90098490-90099316
  hypo
  liver_bileduct vs. lung

SEQ ID NO: 463133 - DNA, 113 bp, Homo sapiens; identical to SEQ ID NO: 349296
  chr1:109204221-109204334
  hypo
  liver_bileduct vs. cervical,upper_gi

SEQ ID NO: 463134 - DNA, 365 bp, Homo sapiens; identical to SEQ ID NO: 459281
  chr1:110753530-110753895
  hypo
  liver_bileduct vs. multiple_myeloma,thyroid,ovary

SEQ ID NO: 463135 - DNA, 47 bp, Homo sapiens; identical to SEQ ID NO: 459282
  chr1:110753957-110754004
  hypo
  liver_bileduct vs. multiple_myeloma,thyroid,ovary

SEQ ID NO: 463136 - DNA, 16 bp, Homo sapiens
  chr1:110754101-110754117
  hypo
  liver_bileduct vs. multiple_myeloma,thyroid,ovary
ggagccccgcagcgct

SEQ ID NO: 463137 - DNA, 298 bp, Homo sapiens; identical to SEQ ID NO: 337168
  chr1:152733117-152733415
  hypo
  liver_bileduct vs. head_and_neck,cervical, bladder_and_urothelial,colorectal,lymphoid_neoplasm,anorectal, upper_gi,pancreas_gallbladder,breast,renal,prostate

SEQ ID NO: 463138 - DNA, 2 bp, Homo sapiens
  chr1:153651442-153651444
  hypo
  liver_bileduct vs. anorectal
cg

SEQ ID NO: 463139 - DNA, 245 bp, Homo sapiens; identical to SEQ ID NO: 462256
  chr1:154474305-154474550
  hypo
  liver_bileduct vs. ovary,multiple_myeloma,head_and_neck, thyroid,prostate,cervical,uterine,non_cancer

SEQ ID NO: 463140 - DNA, 270 bp, Homo sapiens; identical to SEQ ID NO: 462257
  chr1:155164146-155164416
  hypo
  liver_bileduct vs. lung

SEQ ID NO: 463141 - DNA, 594 bp, Homo sapiens; identical to SEQ ID NO: 356889
  chr1:155164455-155165049
  hypo
  liver_bileduct vs. lung

SEQ ID NO: 463142 - DNA, 48 bp, Homo sapiens
  chr1:158669657-158669705
  hypo
  liver_bileduct vs. lymphoid_neoplasm
cgtaggtacatgagagtcacactgccaaagaagagcgaaaagacaatg

SEQ ID NO: 463143 - DNA, 58 bp, Homo sapiens; identical to SEQ ID NO: 362555
  chr1:158710986-158711044
  hypo
  liver_bileduct vs. lymphoid_neoplasm,cervical

SEQ ID NO: 463144 - DNA, 181 bp, Homo sapiens
  chr1:163392854-163393035
  hypo
  liver_bileduct vs. pancreas_gallbladder
cgccagtggtattgtggtattgccggcccccacctcccgcacagcggtgcttcacggaattcctgaggcgtactgggagcaccggcacagccgccgccatttcccggcaggggcacatgggagcgacagcgaggcgtcagggccggaagtgtccctgtctttgccctcgttggctactgcg

SEQ ID NO: 463145 - DNA, 35 bp, Homo sapiens; identical to SEQ ID NO: 362569
  chr1:163393064-163393099
  hypo
  liver_bileduct vs. pancreas_gallbladder

SEQ ID NO: 463146 - DNA, 238 bp, Homo sapiens; identical to SEQ ID NO: 337221
  chr1:167096217-167096455
  hypo
  liver_bileduct vs. colorectal,bladder_and_urothelial, upper_gi

SEQ ID NO: 463147 - DNA, 12 bp, Homo sapiens
  chr1:175365936-175365948
  hypo
  liver_bileduct vs. head_and_neck,lymphoid_neoplasm, cervical,colorectal,uterine,breast,anorectal,upper_gi,renal, thyroid,bladder_and_urothelial,non_cancer,pancreas_gallbladder, myeloid_neoplasm
ggggcaactacc

SEQ ID NO: 463148 - DNA, 181 bp, Homo sapiens; identical to SEQ ID NO: 454587
  chr1:175372314-175372495
  hypo
  liver_bileduct vs. anorectal,uterine,renal,non_cancer, lymphoid_neoplasm,thyroid,breast,cervical

SEQ ID NO: 463149 - DNA, 145 bp, Homo sapiens; identical to SEQ ID NO: 347841
  chr1:175372572-175372717
  hypo
  liver_bileduct vs. anorectal,uterine,renal,non_cancer, lymphoid_neoplasm,thyroid,breast,cervical

SEQ ID NO: 463150 - DNA, 153 bp, Homo sapiens; identical to SEQ ID NO: 454589
  chr1:175375048-175375201
  hypo
  liver_bileduct vs. cervical,lymphoid_neoplasm,anorectal

SEQ ID NO: 463151 - DNA, 195 bp, Homo sapiens; identical to SEQ ID NO: 462265
  chr1:180123493-180123688
  hypo
  liver_bileduct vs. upper_gi,lung

SEQ ID NO: 463152 - DNA, 587 bp, Homo sapiens; identical to SEQ ID NO: 356944
  chr1:180123700-180124287
  hypo
  liver_bileduct vs. upper_gi,lung

SEQ ID NO: 463153 - DNA, 793 bp, Homo sapiens; identical to SEQ ID NO: 462267
  chr1:180123790-180124583
  hypo
  liver_bileduct vs. upper_gi

SEQ ID NO: 463154 - DNA, 226 bp, Homo sapiens; identical to SEQ ID NO: 362609
  chr1:181382621-181382847
  hypo
  liver_bileduct vs. upper_gi

SEQ ID NO: 463155 - DNA, 203 bp, Homo sapiens
  chr1:181767556-181767759
  hypo
  liver_bileduct vs. renal,lymphoid_neoplasm
cgacacgcgggcagcatctctccacctgctgatggaagcgaggagggctccccgctgacctcccaagctctggagagcaacaatgcttgcctgaccgagtcttccaactctccgcacccccagcagagccaacatgcctccccacagcgctacatctccgagccctacttggccctgcacgaagactcccacgcctcagactg

SEQ ID NO: 463156 - DNA, 85 bp, Homo sapiens; identical to SEQ ID NO: 352948
  chr1:181767807-181767892
  hypo
  liver_bileduct vs. renal,lymphoid_neoplasm

SEQ ID NO: 463157 - DNA, 61 bp, Homo sapiens; identical to SEQ ID NO: 462275
  chr1:205425836-205425897
  hypo
  liver_bileduct vs. lung,upper_gi

SEQ ID NO: 463158 - DNA, 455 bp, Homo sapiens; identical to SEQ ID NO: 356989
  chr1:205425997-205426452
  hypo
  liver_bileduct vs. lung,upper_gi

SEQ ID NO: 463159 - DNA, 258 bp, Homo sapiens; identical to SEQ ID NO: 462277
  chr1:212873467-212873725
  hypo
  liver_bileduct vs. bladder_and_urothelial

SEQ ID NO: 463160 - DNA, 225 bp, Homo sapiens; identical to SEQ ID NO: 462278
  chr1:212873750-212873975
  hypo
  liver_bileduct vs. bladder_and_urothelial

SEQ ID NO: 463161 - DNA, 311 bp, Homo sapiens; identical to SEQ ID NO: 337339
  chr1:226827405-226827716
  hypo
  liver_bileduct vs. head_and_neck,bladder_and_urothelial, lung,melanoma,breast,ovary,upper_gi,cervical

SEQ ID NO: 463162 - DNA, 10 bp, Homo sapiens
  chr1:226829329-226829339
  hypo
  liver_bileduct vs. upper_gi,lung
cgcctggctt

SEQ ID NO: 463163 - DNA, 358 bp, Homo sapiens; identical to SEQ ID NO: 376059
  chr1:226829392-226829750
  hypo
  liver_bileduct vs. upper_gi,lung

SEQ ID NO: 463164 - DNA, 917 bp, Homo sapiens; identical to SEQ ID NO: 462280
  chr1:226925659-226926576
  hypo
  liver_bileduct vs. pancreas_gallbladder,upper_gi, melanoma,breast,cervical,lung,ovary,sarcoma,multiple_myeloma, lymphoid_neoplasm,anorectal,prostate,bladder_and_urothelial

SEQ ID NO: 463165 - DNA, 729 bp, Homo sapiens; identical to SEQ ID NO: 462281
  chr1:226926137-226926866
  hypo
  liver_bileduct vs. pancreas_gallbladder,breast,ovary, bladder_and_urothelial,head_and_neck,melanoma,colorectal, prostate,upper_gi,lymphoid_neoplasm,lung,uterine, multiple_myeloma,anorectal,sarcoma,cervical,non_cancer,
  CONT. FROM ABOVE: myeloid_neoplasm,renal

SEQ ID NO: 463166 - DNA, 49 bp, Homo sapiens; identical to SEQ ID NO: 344995
  chr1:226926951-226927000
  hypo
  liver_bileduct vs. pancreas_gallbladder,breast,ovary, bladder_and_urothelial,head_and_neck,melanoma,colorectal, prostate,upper_gi,lymphoid_neoplasm,lung,uterine, multiple_myeloma,anorectal,sarcoma,cervical,non_cancer,
  CONT. FROM ABOVE: myeloid_neoplasm,renal

SEQ ID NO: 463167 - DNA, 46 bp, Homo sapiens; identical to SEQ ID NO: 352980
  chr1:228083620-228083666
  hypo
  liver_bileduct vs. lymphoid_neoplasm,uterine,prostate

SEQ ID NO: 463168 - DNA, 162 bp, Homo sapiens; identical to SEQ ID NO: 337347
  chr1:228111872-228112034
  hypo
  liver_bileduct vs. upper_gi

SEQ ID NO: 463169 - DNA, 217 bp, Homo sapiens; identical to SEQ ID NO: 337352
  chr1:228459748-228459965
  hypo
  liver_bileduct vs. lung

SEQ ID NO: 463170 - DNA, 829 bp, Homo sapiens; identical to SEQ ID NO: 337353
  chr1:228461610-228462439
  hypo
  liver_bileduct vs. pancreas_gallbladder,lung

SEQ ID NO: 463171 - DNA, 200 bp, Homo sapiens
  chr1:228473703-228473903
  hypo
  liver_bileduct vs. lung,breast,pancreas_gallbladder
cgtctgtcctggggagcactgctggccaagcctgcccaggacggtggggcccctgagcagtctgtgcctttgcaggccggagagtgcacatcatcgaggacctggaggatgtggatgtgcaggagggctcctcggccaccttccgttgccggatctccccggccaactacgagcctgtgcactggttcctggacaagaca

SEQ ID NO: 463172 - DNA, 110 bp, Homo sapiens; identical to SEQ ID NO: 352982
  chr1:228473932-228474042
  hypo
  liver_bileduct vs. lung,breast,pancreas_gallbladder

SEQ ID NO: 463173 - DNA, 248 bp, Homo sapiens; identical to SEQ ID NO: 337443
  chr1:247614695-247614943
  hypo
  liver_bileduct vs. colorectal,head_and_neck,melanoma, lymphoid_neoplasm,sarcoma

SEQ ID NO: 463174 - DNA, 124 bp, Homo sapiens; identical to SEQ ID NO: 353025
  chr1:248074927-248075051
  hypo
  liver_bileduct vs. anorectal

SEQ ID NO: 463175 - DNA, 332 bp, Homo sapiens
  chr1:248099374-248099706
  hypo
  liver_bileduct vs. lymphoid_neoplasm
cggggtgcagaagagtctcagccagagtgatgtgctgggcagcgtccaattttaccaccctccgcatcaggtcaaacagctgcacgtgctccagagagtcttggagcatgtcactcttcagacgtttgcagttcttcacatatgggctgtcagagctgttctcatcccaaactaggccccatttgtagaaatatttctgcttcttggtacaggagatcacgcgtaatgggatgagccgtagggtcttcaacatcaccaggcgctcttggttttcacaggtctggaagagtgtgaaacctggtagtacttaaagagaaggtagcccatgccct

SEQ ID NO: 463176 - DNA, 399 bp, Homo sapiens; identical to SEQ ID NO: 337449
  chr1:248469372-248469771
  hypo
  liver_bileduct vs. sarcoma,lymphoid_neoplasm

SEQ ID NO: 463177 - DNA, 156 bp, Homo sapiens
  chr10:1443319-1443475
  hypo
  liver_bileduct vs. head_and_neck
cggcagccacaaacaccgtcaggcccagcgtcaccctccccacctcccggatgagaaggagcctccggagcagctgagggacccactgtggaggcagccgggtgggggacggcccggtgtgtgtggtctggtcgtgactttcccacaaggcatcac

SEQ ID NO: 463178 - DNA, 311 bp, Homo sapiens; identical to SEQ ID NO: 354480
  chr10:1443566-1443877
  hypo
  liver_bileduct vs. head_and_neck

SEQ ID NO: 463179 - DNA, 97 bp, Homo sapiens
  chr10:1708231-1708328
  hypo
  liver_bileduct vs. head_and_neck,pancreas_gallbladder, lymphoid_neoplasm
cgggcatggaggctccaggctgagaccagcattggatagggtgggtgggcagggattacttaggtgccaataacccaggagtagaggagatggcacc

SEQ ID NO: 463180 - DNA, 174 bp, Homo sapiens
  chr10:1708478-1708652
  hypo
  liver_bileduct vs. head_and_neck,pancreas_gallbladder, lymphoid_neoplasm
ggccacctgccctgcctgccccgccagggcgagcatctgaatccacattctcctgggccgcagctcatctgcgagtcggagcctccgaaggggggccagtagcacatgtcccagcctctctcgcccaggtgatcctcatgaccagacgcggctttgctacaagacagctcagac

SEQ ID NO: 463181 - DNA, 130 bp, Homo sapiens; identical to SEQ ID NO: 365240
  chr10:1708689-1708819
  hypo
  liver_bileduct vs. head_and_neck,pancreas_gallbladder, lymphoid_neoplasm

SEQ ID NO: 463182 - DNA, 52 bp, Homo sapiens; identical to SEQ ID NO: 379191
  chr10:1767929-1767981
  hypo
  liver_bileduct vs. prostate,lymphoid_neoplasm

SEQ ID NO: 463183 - DNA, 46 bp, Homo sapiens
  chr10:1789180-1789226
  hypo
  liver_bileduct vs. pancreas_gallbladder,upper_gi, head_and_neck,lung,breast
cgcgtgacgtgtatgcgagtgtcacatgaatcgcctgatgtgtacg

SEQ ID NO: 463184 - DNA, 139 bp, Homo sapiens; identical to SEQ ID NO: 354483
  chr10:1789266-1789405
  hypo
  liver_bileduct vs. pancreas_gallbladder,upper_gi, head_and_neck,lung,breast

SEQ ID NO: 463185 - DNA, 264 bp, Homo sapiens; identical to SEQ ID NO: 340524
  chr10:1994498-1994762
  hypo
  liver_bileduct vs. pancreas_gallbladder,head_and_neck

SEQ ID NO: 463186 - DNA, 166 bp, Homo sapiens; identical to SEQ ID NO: 340525
  chr10:2006696-2006862
  hypo
  liver_bileduct vs. colorectal,head_and_neck

SEQ ID NO: 463187 - DNA, 416 bp, Homo sapiens; identical to SEQ ID NO: 340526
  chr10:2932075-2932491
  hypo
  liver_bileduct vs. pancreas_gallbladder

SEQ ID NO: 463188 - DNA, 193 bp, Homo sapiens; identical to SEQ ID NO: 462285
  chr10:3109168-3109361
  hypo
  liver_bileduct vs. lung

SEQ ID NO: 463189 - DNA, 412 bp, Homo sapiens; identical to SEQ ID NO: 462286
  chr10:3109459-3109871
  hypo
  liver_bileduct vs. lung

SEQ ID NO: 463190 - DNA, 910 bp, Homo sapiens; identical to SEQ ID NO: 350976
  chr10:3109459-3110369
  hypo
  liver_bileduct vs. lung,pancreas_gallbladder

SEQ ID NO: 463191 - DNA, 996 bp, Homo sapiens; identical to SEQ ID NO: 462288
  chr10:3109882-3110878
  hypo
  liver_bileduct vs. lung

SEQ ID NO: 463192 - DNA, 974 bp, Homo sapiens; identical to SEQ ID NO: 462289
  chr10:3110381-3111355
  hypo
  liver_bileduct vs. upper_gi,lung

SEQ ID NO: 463193 - DNA, 71 bp, Homo sapiens
  chr10:7202899-7202970
  hypo
cggagagatggcacagagacaactttcatggcgacgccaggctgcgccctcctgtgcagtggtcccagcca

SEQ ID NO: 463194 - DNA, 18 bp, Homo sapiens
  chr10:7203127-7203145
  hypo
ccttcctgagctcctggc

SEQ ID NO: 463195 - DNA, 35 bp, Homo sapiens
  chr10:7212711-7212746
  hypo
  liver_bileduct vs. breast,lymphoid_neoplasm,anorectal
cgtccctgccaggcagctctcagcaggggccttgg

SEQ ID NO: 463196 - DNA, 122 bp, Homo sapiens; identical to SEQ ID NO: 365273
  chr10:7214457-7214579
  hypo
  liver_bileduct vs. breast,pancreas_gallbladder, lymphoid_neoplasm,prostate

SEQ ID NO: 463197 - DNA, 36 bp, Homo sapiens
  chr10:7409523-7409559
  hypo
  liver_bileduct vs. pancreas_gallbladder,breast
cgcaaggttctctctgctccttgcaaaattacaggc

SEQ ID NO: 463198 - DNA, 151 bp, Homo sapiens; identical to SEQ ID NO: 354507
  chr10:7409632-7409783
  hypo
  liver_bileduct vs. pancreas_gallbladder,breast

SEQ ID NO: 463199 - DNA, 52 bp, Homo sapiens; identical to SEQ ID NO: 462290
  chr10:8097537-8097589
  hypo
  liver_bileduct vs. breast

SEQ ID NO: 463200 - DNA, 198 bp, Homo sapiens; identical to SEQ ID NO: 365285
  chr10:10965181-10965379
  hypo
  liver_bileduct vs. melanoma

SEQ ID NO: 463201 - DNA, 90 bp, Homo sapiens; identical to SEQ ID NO: 340587
  chr10:17157485-17157575
  hypo
  liver_bileduct vs. melanoma

SEQ ID NO: 463202 - DNA, 209 bp, Homo sapiens; identical to SEQ ID NO: 452758
  chr10:17270445-17270654
  hypo
  liver_bileduct vs. melanoma,sarcoma,uterine,renal, multiple_myeloma,lung,ovary

SEQ ID NO: 463203 - DNA, 209 bp, Homo sapiens; identical to SEQ ID NO: 452758
  chr10:17270445-17270654
  hypo
  liver_bileduct vs. melanoma,renal,uterine, multiple_myeloma,sarcoma,ovary,myeloid_neoplasm

SEQ ID NO: 463204 - DNA, 54 bp, Homo sapiens
  chr10:17347083-17347137
  hypo
  liver_bileduct vs. pancreas_gallbladder
cggtcgtaatattcagagggagatagggtgatagtacccctaatgtcgcagggg

SEQ ID NO: 463205 - DNA, 262 bp, Homo sapiens; identical to SEQ ID NO: 379267
  chr10:17347174-17347436
  hypo
  liver_bileduct vs. pancreas_gallbladder

SEQ ID NO: 463206 - DNA, 260 bp, Homo sapiens; identical to SEQ ID NO: 462295
  chr10:17495133-17495393
  hypo
  liver_bileduct vs. melanoma,breast

SEQ ID NO: 463207 - DNA, 299 bp, Homo sapiens; identical to SEQ ID NO: 462296
  chr10:17495680-17495979
  hypo
  liver_bileduct vs. melanoma,breast

SEQ ID NO: 463208 - DNA, 323 bp, Homo sapiens; identical to SEQ ID NO: 462297
  chr10:17495680-17496003
  hypo
  liver_bileduct vs. melanoma,breast,ovary,upper_gi, sarcoma

SEQ ID NO: 463209 - DNA, 15 bp, Homo sapiens
  chr10:17495988-17496003
  hypo
  liver_bileduct vs. breast,cervical,sarcoma,upper_gi, ovary,melanoma,prostate,anorectal,colorectal,lung
cgaccccctccccca

SEQ ID NO: 463210 - DNA, 94 bp, Homo sapiens; identical to SEQ ID NO: 351040
  chr10:50606762-50606856
  hypo
  liver_bileduct vs. melanoma

SEQ ID NO: 463211 - DNA, 857 bp, Homo sapiens; identical to SEQ ID NO: 462303
  chr10:71078140-71078997
  hypo
  liver_bileduct vs. lung,upper_gi,bladder_and_urothelial, colorectal,ovary,breast,pancreas_gallbladder

SEQ ID NO: 463212 - DNA, 850 bp, Homo sapiens; identical to SEQ ID NO: 462304
  chr10:71078526-71079376
  hypo
  liver_bileduct vs. lung,upper_gi,pancreas_gallbladder, bladder_and_urothelial,colorectal,breast,ovary,head_and_neck, renal

SEQ ID NO: 463213 - DNA, 204 bp, Homo sapiens; identical to SEQ ID NO: 365346
  chr10:71158354-71158558
  hypo
  liver_bileduct vs. lung,upper_gi,breast

SEQ ID NO: 463214 - DNA, 324 bp, Homo sapiens; identical to SEQ ID NO: 462305
  chr10:72238261-72238585
  hypo
  liver_bileduct vs. uterine,anorectal

SEQ ID NO: 463215 - DNA, 29 bp, Homo sapiens
  chr10:72238858-72238887
  hypo
  liver_bileduct vs. uterine,anorectal
tctggaatcccccgggcaccccccagccc

SEQ ID NO: 463216 - DNA, 217 bp, Homo sapiens; identical to SEQ ID NO: 340656
  chr10:72765340-72765557
  hypo
  liver_bileduct vs. breast,sarcoma

SEQ ID NO: 463217 - DNA, 186 bp, Homo sapiens; identical to SEQ ID NO: 340694
  chr10:88200334-88200520
  hypo
  liver_bileduct vs. lung

SEQ ID NO: 463218 - DNA, 509 bp, Homo sapiens; identical to SEQ ID NO: 462307
  chr10:92617539-92618048
  hypo
  liver_bileduct vs. bladder_and_urothelial,ovary,lung, breast,sarcoma,uterine,myeloid_neoplasm

SEQ ID NO: 463219 - DNA, 64 bp, Homo sapiens; identical to SEQ ID NO: 359627
  chr10:92618077-92618141
  hypo
  liver_bileduct vs. bladder_and_urothelial,ovary,lung, breast,sarcoma,uterine,myeloid_neoplasm

SEQ ID NO: 463220 - DNA, 57 bp, Homo sapiens; identical to SEQ ID NO: 345362
  chr10:93647662-93647719
  hypo
  liver_bileduct vs. ovary,anorectal,uterine,head_and_neck, non_cancer,bladder_and_urothelial

SEQ ID NO: 463221 - DNA, 115 bp, Homo sapiens; identical to SEQ ID NO: 462313
  chr10:99474279-99474394
  hypo
  liver_bileduct vs. lung

SEQ ID NO: 463222 - DNA, 62 bp, Homo sapiens; identical to SEQ ID NO: 359642
  chr10:99474467-99474529
  hypo
  liver_bileduct vs. lung

SEQ ID NO: 463223 - DNA, 212 bp, Homo sapiens; identical to SEQ ID NO: 459333
  chr10:103535916-103536128
  hypo
  liver_bileduct vs. sarcoma

SEQ ID NO: 463224 - DNA, 239 bp, Homo sapiens; identical to SEQ ID NO: 354595
  chr10:121265805-121266044
  hypo
  liver_bileduct vs. pancreas_gallbladder,upper_gi,lung, melanoma,head_and_neck,breast

SEQ ID NO: 463225 - DNA, 132 bp, Homo sapiens; identical to SEQ ID NO: 459335
  chr10:121301363-121301495
  hypo
  liver_bileduct vs. breast,cervical,prostate,uterine, head_and_neck,ovary,upper_gi,lymphoid_neoplasm,myeloid_neoplasm

SEQ ID NO: 463226 - DNA, 323 bp, Homo sapiens; identical to SEQ ID NO: 459336
  chr10:121301911-121302234
  hypo
  liver_bileduct vs. breast,cervical,prostate,uterine, head_and_neck,ovary,upper_gi,lymphoid_neoplasm,myeloid_neoplasm

SEQ ID NO: 463227 - DNA, 760 bp, Homo sapiens; identical to SEQ ID NO: 345370
  chr10:121301911-121302671
  hypo
  liver_bileduct vs. pancreas_gallbladder,upper_gi,lung, breast,renal,head_and_neck,ovary,bladder_and_urothelial, lymphoid_neoplasm,prostate,cervical,sarcoma,uterine,colorectal, anorectal,multiple_myeloma,melanoma

SEQ ID NO: 463228 - DNA, 833 bp, Homo sapiens; identical to SEQ ID NO: 454123
  chr10:126106668-126107501
  hypo
  liver_bileduct vs. upper_gi,lung,renal,breast,ovary, pancreas_gallbladder,head_and_neck

SEQ ID NO: 463229 - DNA, 846 bp, Homo sapiens; identical to SEQ ID NO: 454124
  chr10:126107015-126107861
  hypo
  liver_bileduct vs. pancreas_gallbladder,lung,upper_gi

SEQ ID NO: 463230 - DNA, 392 bp, Homo sapiens; identical to SEQ ID NO: 340780
  chr10:126819324-126819716
  hypo
  liver_bileduct vs. lung

SEQ ID NO: 463231 - DNA, 379 bp, Homo sapiens; identical to SEQ ID NO: 340782
  chr10:126830153-126830532
  hypo
  liver_bileduct vs. lung,upper_gi

SEQ ID NO: 463232 - DNA, 25 bp, Homo sapiens
  chr10:130203310-130203335
  hypo
  liver_bileduct vs. colorectal,bladder_and_urothelial, lymphoid_neoplasm,uterine
cgcacagcggtgtgatgtgtaagct

SEQ ID NO: 463233 - DNA, 175 bp, Homo sapiens; identical to SEQ ID NO: 340794
  chr10:130300191-130300366
  hypo
  liver_bileduct vs. colorectal,upper_gi

SEQ ID NO: 463234 - DNA, 98 bp, Homo sapiens; identical to SEQ ID NO: 340805
  chr10:132869762-132869860
  hypo
  liver_bileduct vs. colorectal

SEQ ID NO: 463235 - DNA, 51 bp, Homo sapiens; identical to SEQ ID NO: 379486
  chr10:134659606-134659657
  hypo
  liver_bileduct vs. pancreas_gallbladder,upper_gi

SEQ ID NO: 463236 - DNA, 118 bp, Homo sapiens; identical to SEQ ID NO: 365494
  chr10:134680051-134680169
  hypo

SEQ ID NO: 463237 - DNA, 387 bp, Homo sapiens
  chr10:134830248-134830635
  hypo
cgctgggcgagcaggccagggctgcccgtctccacctttgtgctggaccatttacaatcaaagcgcagcatcgagatacccaggaaagagccaggaacaggccaggaagctgctgccccaccactgaccccaccgctctccttccctccttccttcccgctgggctgggcacaggtggagctcaccgtcgtcccccttcatcccttggcccctccaaggctcaaggactggaggccgactgggcagcagacatgtcaccatcaccatgctccccgtcaccacgctccctgtcgccatggtcactgtcaccatgctccctgtcgccatgctccccctcgccacgctccctctcgccacgctccccgtcgccacggtccccgtcgccac

SEQ ID NO: 463238 - DNA, 79 bp, Homo sapiens; identical to SEQ ID NO: 354635
  chr10:134830671-134830750
  hypo

SEQ ID NO: 463239 - DNA, 121 bp, Homo sapiens
  chr10:134875690-134875811
  hypo
  liver_bileduct vs. lymphoid_neoplasm
cgcatgaaaatagccagttccgggggctccgcacccgcgtagggggcgcgtcggtcctttccattttagctgcgtgggggagggtgttggcggcaccattgtgctttcattccacgtttcc

SEQ ID NO: 463240 - DNA, 39 bp, Homo sapiens
  chr11:2108016-2108055
  hypo
  liver_bileduct vs. pancreas_gallbladder
cgaggaatgcacgtcagaaccagtaggacagctgccatc

SEQ ID NO: 463241 - DNA, 64 bp, Homo sapiens; identical to SEQ ID NO: 379597
  chr11:2108109-2108173
  hypo
  liver_bileduct vs. pancreas_gallbladder

SEQ ID NO: 463242 - DNA, 154 bp, Homo sapiens; identical to SEQ ID NO: 340954
  chr11:2782417-2782571
  hypo
  liver_bileduct vs. colorectal

SEQ ID NO: 463243 - DNA, 140 bp, Homo sapiens; identical to SEQ ID NO: 340958
  chr11:3128538-3128678
  hypo
  liver_bileduct vs. pancreas_gallbladder

SEQ ID NO: 463244 - DNA, 94 bp, Homo sapiens; identical to SEQ ID NO: 458545
  chr11:3164459-3164553
  hypo
  liver_bileduct vs. breast,melanoma,renal

SEQ ID NO: 463245 - DNA, 716 bp, Homo sapiens; identical to SEQ ID NO: 340964
  chr11:3243313-3244029
  hypo
  liver_bileduct vs. breast

SEQ ID NO: 463246 - DNA, 160 bp, Homo sapiens; identical to SEQ ID NO: 462330
  chr11:12030561-12030721
  hypo
  liver_bileduct vs. anorectal,head_and_neck,ovary

SEQ ID NO: 463247 - DNA, 658 bp, Homo sapiens; identical to SEQ ID NO: 462332
  chr11:13689464-13690122
  hypo
  liver_bileduct vs. lung,upper_gi

SEQ ID NO: 463248 - DNA, 173 bp, Homo sapiens; identical to SEQ ID NO: 462333
  chr11:13690157-13690330
  hypo
  liver_bileduct vs. lung,upper_gi

SEQ ID NO: 463249 - DNA, 278 bp, Homo sapiens; identical to SEQ ID NO: 462334
  chr11:13689844-13690122
  hypo
  liver_bileduct vs. upper_gi,lung

SEQ ID NO: 463250 - DNA, 555 bp, Homo sapiens; identical to SEQ ID NO: 359772
  chr11:13690157-13690712
  hypo
  liver_bileduct vs. upper_gi,lung

SEQ ID NO: 463251 - DNA, 203 bp, Homo sapiens; identical to SEQ ID NO: 462336
  chr11:35439896-35440099
  hypo
  liver_bileduct vs. breast,bladder_and_urothelial, anorectal

SEQ ID NO: 463252 - DNA, 239 bp, Homo sapiens; identical to SEQ ID NO: 462337
  chr11:35440137-35440376
  hypo
  liver_bileduct vs. breast,bladder_and_urothelial, anorectal

SEQ ID NO: 463253 - DNA, 18 bp, Homo sapiens
  chr11:35440469-35440487
  hypo
  liver_bileduct vs. breast,bladder_and_urothelial, anorectal
cgcgggtacagataaaaa

SEQ ID NO: 463254 - DNA, 1 bp, Homo sapiens
  chr11:35440375-35440376
  hypo
  liver_bileduct vs. breast
c

SEQ ID NO: 463255 - DNA, 18 bp, Homo sapiens
  chr11:35440469-35440487
  hypo
  liver_bileduct vs. breast
cgcgggtacagataaaaa

SEQ ID NO: 463256 - DNA, 16 bp, Homo sapiens
  chr11:44748871-44748887
  hypo
  liver_bileduct vs. multiple_myeloma
ccgccgccgcgccccc

SEQ ID NO: 463257 - DNA, 314 bp, Homo sapiens; identical to SEQ ID NO: 457378
  chr11:44748871-44749185
  hypo
  liver_bileduct vs. sarcoma

SEQ ID NO: 463258 - DNA, 138 bp, Homo sapiens
  chr11:60282711-60282849
  hypo
  liver_bileduct vs. pancreas_gallbladder,melanoma
cgttcctagaggcaccaaaacgtagttaaccgggtgtctgaccacatggctgccaggagcctagtgagtctgcgcacacgcactacctccgccccggcagttcctgagtgggtgcgcaggcgcaagaggagcacaccg

SEQ ID NO: 463259 - DNA, 166 bp, Homo sapiens; identical to SEQ ID NO: 379709
  chr11:60282878-60283044
  hypo
  liver_bileduct vs. pancreas_gallbladder,melanoma

SEQ ID NO: 463260 - DNA, 316 bp, Homo sapiens; identical to SEQ ID NO: 462351
  chr11:61276101-61276417
  hypo
  liver_bileduct vs. breast,prostate,uterine

SEQ ID NO: 463261 - DNA, 550 bp, Homo sapiens; identical to SEQ ID NO: 455613
  chr11:64512349-64512899
  hypo
  liver_bileduct vs. ovary

SEQ ID NO: 463262 - DNA, 510 bp, Homo sapiens; identical to SEQ ID NO: 452797
  chr11:76381512-76382022
  hypo
  liver_bileduct vs. multiple_myeloma, bladder_and_urothelial

SEQ ID NO: 463263 - DNA, 30 bp, Homo sapiens; identical to SEQ ID NO: 452798
  chr11:76382264-76382294
  hypo
  liver_bileduct vs. multiple_myeloma, bladder_and_urothelial

SEQ ID NO: 463264 - DNA, 174 bp, Homo sapiens; identical to SEQ ID NO: 341217
  chr11:97588960-97589134
  hypo
  liver_bileduct vs. pancreas_gallbladder,colorectal,renal, lung,head_and_neck,breast,upper_gi,cervical,sarcoma

SEQ ID NO: 463265 - DNA, 131 bp, Homo sapiens; identical to SEQ ID NO: 347179
  chr11:106889091-106889222
  hypo
  liver_bileduct vs. breast

SEQ ID NO: 463266 - DNA, 227 bp, Homo sapiens; identical to SEQ ID NO: 462363
  chr11:106889091-106889318
  hypo
  liver_bileduct vs. breast,melanoma

SEQ ID NO: 463267 - DNA, 902 bp, Homo sapiens; identical to SEQ ID NO: 354840
  chr11:133734500-133735402
  hypo
  liver_bileduct vs. pancreas_gallbladder,upper_gi, head_and_neck,lymphoid_neoplasm

SEQ ID NO: 463268 - DNA, 17 bp, Homo sapiens
  chr11:133938756-133938773
  hypo
  liver_bileduct vs. melanoma
cgccaagttcattgaaa

SEQ ID NO: 463269 - DNA, 161 bp, Homo sapiens; identical to SEQ ID NO: 345407
  chr11:133939437-133939598
  hypo
  liver_bileduct vs. melanoma

SEQ ID NO: 463270 - DNA, 235 bp, Homo sapiens; identical to SEQ ID NO: 351283
  chr12:1639655-1639890
  hypo
  liver_bileduct vs. anorectal,myeloid_neoplasm,sarcoma, multiple_myeloma,non_cancer,prostate

SEQ ID NO: 463271 - DNA, 454 bp, Homo sapiens; identical to SEQ ID NO: 341312
  chr12:1943616-1944070
  hypo
  liver_bileduct vs. breast,anorectal,prostate,uterine

SEQ ID NO: 463272 - DNA, 155 bp, Homo sapiens; identical to SEQ ID NO: 341313
  chr12:1992067-1992222
  hypo
  liver_bileduct vs. breast,uterine,prostate,renal, colorectal

SEQ ID NO: 463273 - DNA, 209 bp, Homo sapiens; identical to SEQ ID NO: 341320
  chr12:2602388-2602597
  hypo
  liver_bileduct vs. sarcoma

SEQ ID NO: 463274 - DNA, 116 bp, Homo sapiens; identical to SEQ ID NO: 341321
  chr12:2613903-2614019
  hypo
  liver_bileduct vs. sarcoma

SEQ ID NO: 463275 - DNA, 249 bp, Homo sapiens
  chr12:2788614-2788863
  hypo
  liver_bileduct vs. bladder_and_urothelial, pancreas_gallbladder,lymphoid_neoplasm,colorectal,breast, prostate,renal,head_and_neck,upper_gi,cervical,uterine, non_cancer,sarcoma,lung
cggtggcctgttcggcaaccacgtcagctactaccaaagcgacggccggagcgccttcccccagaccttcaccactcagcgcccgctgcacatcaacaaggcgggcagcagccagggcgacactgagtcgccatcccacgagaagctggtggactccaccttcaccccgagcagctactcgtccaccggctccaacgccaacatcaacaacgccaacaacaccgccctgggtcgcctccctcgccccgc

SEQ ID NO: 463276 - DNA, 27 bp, Homo sapiens
  chr12:2788914-2788941
  hypo
  liver_bileduct vs. bladder_and_urothelial, pancreas_gallbladder,lymphoid_neoplasm,colorectal,breast, prostate,renal,head_and_neck,upper_gi,cervical,uterine, non_cancer,sarcoma,lung
ccctgccatccgggtgcaggaggtggc

SEQ ID NO: 463277 - DNA, 86 bp, Homo sapiens; identical to SEQ ID NO: 452813
  chr12:4377809-4377895
  hypo
  liver_bileduct vs. lymphoid_neoplasm,colorectal,ovary, melanoma,non_cancer,myeloid_neoplasm,thyroid

SEQ ID NO: 463278 - DNA, 142 bp, Homo sapiens; identical to SEQ ID NO: 452814
  chr12:4378558-4378700
  hypo
  liver_bileduct vs. lymphoid_neoplasm,colorectal,ovary, melanoma,non_cancer,myeloid_neoplasm,thyroid

SEQ ID NO: 463279 - DNA, 245 bp, Homo sapiens; identical to SEQ ID NO: 452815
  chr12:4378558-4378803
  hypo
  liver_bileduct vs. colorectal,lymphoid_neoplasm,melanoma, myeloid_neoplasm,non_cancer,thyroid,ovary,multiple_myeloma

SEQ ID NO: 463280 - DNA, 88 bp, Homo sapiens; identical to SEQ ID NO: 454142
  chr12:4378715-4378803
  hypo
  liver_bileduct vs. melanoma,colorectal,non_cancer

SEQ ID NO: 463281 - DNA, 441 bp, Homo sapiens
  chr12:4554361-4554802
  hypo
  liver_bileduct vs. cervical
cgtcccgactggctgcagctggcactcactgtaggggttctcctcgtgggtcccgctgatccggccgtcggggagcacctggaggtgaaagccgatgcccacgttgcagtagagcctccgctgccgcttgatccccaccaaatagccactttcccagttcaccccggcaatctctccagctagcccggcgcgagacctggacagcagggtgccccagcccctcgagtccagcagcgtgttgttggcacgggtgcctgcaggcgagggcaccaccatgcccactaggatgcctaggaagacgagagcccacagcgtgccctgcagacgtcctgctccccgggacatagtgatgaacagtttctgtcccagggccatccaccttgcctctcaggcacgtggtcagaattaatggccctaaaaataccgcccttcttgtttttc

SEQ ID NO: 463282 - DNA, 89 bp, Homo sapiens; identical to SEQ ID NO: 365900
  chr12:4554937-4555026
  hypo
  liver_bileduct vs. cervical

SEQ ID NO: 463283 - DNA, 557 bp, Homo sapiens; identical to SEQ ID NO: 334445
  chr12:4920230-4920787
  hypo
  liver_bileduct vs. pancreas_gallbladder, bladder_and_urothelial

SEQ ID NO: 463284 - DNA, 56 bp, Homo sapiens
  chr12:5252231-5252287
  hypo
  liver_bileduct vs. upper_gi,bladder_and_urothelial
cgagaaatccacatcatccgtaatccaatcacctccacatcatccgtaatccgatc

SEQ ID NO: 463285 - DNA, 265 bp, Homo sapiens; identical to SEQ ID NO: 379990
  chr12:5252323-5252588
  hypo
  liver_bileduct vs. upper_gi,bladder_and_urothelial

SEQ ID NO: 463286 - DNA, 466 bp, Homo sapiens; identical to SEQ ID NO: 341346
  chr12:5603587-5604053
  hypo
  liver_bileduct vs. upper_gi,colorectal,cervical

SEQ ID NO: 463287 - DNA, 55 bp, Homo sapiens; identical to SEQ ID NO: 345416
  chr12:8123528-8123583
  hypo
  liver_bileduct vs. lung,breast,melanoma,prostate,sarcoma, ovary,renal,anorectal

SEQ ID NO: 463288 - DNA, 232 bp, Homo sapiens
  chr12:8757695-8757927
  hypo
  liver_bileduct vs. breast,head_and_neck,cervical,uterine, sarcoma,lung
accagaatccccgcccacttcttcccctcgagcttccccactaactcattcattccgcatcgcaatcccgaatgcgggctgctgcactgcgcctgcgcggaaggccctttcgcacctttgaaggtcatgatggctatttgcaccccggcgcggtgcagccgccgcagcccctcgggctcagccttgcggtcctcacagaagtagaggcgcgcggtgaagatcctcagactga

SEQ ID NO: 463289 - DNA, 162 bp, Homo sapiens; identical to SEQ ID NO: 354870
  chr12:8757966-8758128
  hypo
  liver_bileduct vs. breast,head_and_neck,cervical,uterine, sarcoma,lung

SEQ ID NO: 463290 - DNA, 72 bp, Homo sapiens; identical to SEQ ID NO: 341358
  chr12:8906544-8906616
  hypo
  liver_bileduct vs. head_and_neck,lung

SEQ ID NO: 463291 - DNA, 6 bp, Homo sapiens
  chr12:22488262-22488268
  hypo
  liver_bileduct vs. sarcoma
gcgccc

SEQ ID NO: 463292 - DNA, 95 bp, Homo sapiens
  chr12:38595387-38595482
  hypo
  liver_bileduct vs. head_and_neck,bladder_and_urothelial
cgcagaccgggcagtgcgggaaccagatcggcgccaaggttggcagccagggctctgagggcccagctcgggcctgccgggtggccagggaagat

SEQ ID NO: 463293 - DNA, 37 bp, Homo sapiens; identical to SEQ ID NO: 365943
  chr12:38595561-38595598
  hypo
  liver_bileduct vs. head_and_neck,bladder_and_urothelial

SEQ ID NO: 463294 - DNA, 494 bp, Homo sapiens; identical to SEQ ID NO: 457433
  chr12:48576976-48577470
  hypo
  liver_bileduct vs. bladder_and_urothelial,lung,sarcoma, anorectal,ovary,melanoma,prostate,head_and_neck,uterine,breast, non_cancer,myeloid_neoplasm,lymphoid_neoplasm

SEQ ID NO: 463295 - DNA, 409 bp, Homo sapiens; identical to SEQ ID NO: 457434
  chr12:48577061-48577470
  hypo
  liver_bileduct vs. anorectal,sarcoma,non_cancer,thyroid, melanoma,prostate,uterine

SEQ ID NO: 463296 - DNA, 3 bp, Homo sapiens
  chr12:52401537-52401540
  hypo
  liver_bileduct vs. melanoma,anorectal,thyroid, head_and_neck
tcc

SEQ ID NO: 463297 - DNA, 144 bp, Homo sapiens; identical to SEQ ID NO: 341417
  chr12:53007462-53007606
  hypo
  liver_bileduct vs. cervical,breast,head_and_neck

SEQ ID NO: 463298 - DNA, 249 bp, Homo sapiens; identical to SEQ ID NO: 341418
  chr12:53045577-53045826
  hypo
  liver_bileduct vs. head_and_neck

SEQ ID NO: 463299 - DNA, 58 bp, Homo sapiens; identical to SEQ ID NO: 455665
  chr12:54144782-54144840
  hypo
  liver_bileduct vs. ovary

SEQ ID NO: 463300 - DNA, 349 bp, Homo sapiens; identical to SEQ ID NO: 459395
  chr12:104851545-104851894
  hypo
  liver_bileduct vs. melanoma

SEQ ID NO: 463301 - DNA, 65 bp, Homo sapiens; identical to SEQ ID NO: 462409
  chr12:122688584-122688649
  hypo
  liver_bileduct vs. anorectal,cervical,myeloid_neoplasm

SEQ ID NO: 463302 - DNA, 29 bp, Homo sapiens
  chr12:128899673-128899702
  hypo
  liver_bileduct vs. anorectal,cervical
cggcgccggggagaagctgccatgcctga

SEQ ID NO: 463303 - DNA, 150 bp, Homo sapiens; identical to SEQ ID NO: 354993
  chr12:128899867-128900017
  hypo
  liver_bileduct vs. anorectal,cervical

SEQ ID NO: 463304 - DNA, 230 bp, Homo sapiens
  chr12:129189650-129189880
  hypo
  liver_bileduct vs. lymphoid_neoplasm,colorectal, pancreas_gallbladder
cgtggctgcagttcagtgatggctctgtgacgcccctggacatctacgacaccaaggacttctccctggcagccacctcccaggacgaggctgtcgtgtcagtcccccagccccgctctcccaggtggcccgttgtggtggccgaaggggaaggccagggcccactgatccgagtggacatgacgatcgccgaggcctgccagaaatctaaacgcaagagcatcctggct

SEQ ID NO: 463305 - DNA, 206 bp, Homo sapiens
  chr12:129189909-129190115
  hypo
  liver_bileduct vs. lymphoid_neoplasm,colorectal, pancreas_gallbladder
cggacagaacgatgctgactccagccccggcggggactatgaggaagatgagatcaagaaccacgccagcgaccgccggcagaagggccagcaccatgagcgcacaggccaagatgggcacctctatggcagctctcccgtggagcgtgaggaaggggctctccgaagagccactaccacggccaggtccctgctggacaacaaag

SEQ ID NO: 463306 - DNA, 63 bp, Homo sapiens; identical to SEQ ID NO: 366142
  chr12:129190144-129190207
  hypo
  liver_bileduct vs. lymphoid_neoplasm,colorectal, pancreas_gallbladder

SEQ ID NO: 463307 - DNA, 153 bp, Homo sapiens
  chr12:130037501-130037654
  hypo
  liver_bileduct vs. prostate,renal,anorectal,colorectal, cervical,non_cancer
cggtccagatccaacaactacaacatggatgccccaagtccgagtctctggggacaagaaaggtcacgccaccatccgagccccagccttgctggtctgacagcatccaccggagcagcttcggttactcaacctttcaaggccaggctcttc

SEQ ID NO: 463308 - DNA, 484 bp, Homo sapiens; identical to SEQ ID NO: 454701
  chr12:130184247-130184731
  hypo
  liver_bileduct vs. head_and_neck

SEQ ID NO: 463309 - DNA, 91 bp, Homo sapiens; identical to SEQ ID NO: 354996
  chr12:130184760-130184851
  hypo
  liver_bileduct vs. head_and_neck

SEQ ID NO: 463310 - DNA, 160 bp, Homo sapiens; identical to SEQ ID NO: 341626
  chr12:130892190-130892350
  hypo
  liver_bileduct vs. colorectal

SEQ ID NO: 463311 - DNA, 573 bp, Homo sapiens; identical to SEQ ID NO: 341628
  chr12:130933888-130934461
  hypo
  liver_bileduct vs. lymphoid_neoplasm,uterine

SEQ ID NO: 463312 - DNA, 41 bp, Homo sapiens
  chr12:131077283-131077324
  hypo
  liver_bileduct vs. colorectal
cgggggaccttggccgtggcgggccaatcagcctgcatttg

SEQ ID NO: 463313 - DNA, 95 bp, Homo sapiens; identical to SEQ ID NO: 380282
  chr12:131077362-131077457
  hypo
  liver_bileduct vs. colorectal

SEQ ID NO: 463314 - DNA, 429 bp, Homo sapiens; identical to SEQ ID NO: 341630
  chr12:131095743-131096172
  hypo
  liver_bileduct vs. head_and_neck,colorectal,upper_gi, pancreas_gallbladder,anorectal

SEQ ID NO: 463315 - DNA, 229 bp, Homo sapiens; identical to SEQ ID NO: 341631
  chr12:131110936-131111165
  hypo
  liver_bileduct vs. colorectal,bladder_and_urothelial, lymphoid_neoplasm,head_and_neck

SEQ ID NO: 463316 - DNA, 79 bp, Homo sapiens
  chr12:131159367-131159446
  hypo
  liver_bileduct vs. pancreas_gallbladder,head_and_neck, colorectal,lymphoid_neoplasm,upper_gi,anorectal,uterine
cgcctgctcgggacgggtcgtatacgtgggatcctgtaacacgtggccttccgggtccggcctcttccacacagcgtgt

SEQ ID NO: 463317 - DNA, 261 bp, Homo sapiens
  chr12:131159530-131159791
  hypo
  liver_bileduct vs. pancreas_gallbladder,head_and_neck, colorectal,lymphoid_neoplasm,upper_gi,anorectal,uterine
cattcacgtttcgtttatctgctcatctgtagaggggcgtgcagtgagctttttacagatgttcccacccattcgtgtcaaagagagcatccttgatccaaagacacaaactacaaaagggcacagccgggactaggaccccagttgtcccgaaggacctgttggccgccagatagtggttgaaggaagggacgcaagccctggttgacggagccgcggcctctgctgagacaggcgggtttgtccgcaggccttcgggaa

SEQ ID NO: 463318 - DNA, 174 bp, Homo sapiens; identical to SEQ ID NO: 341633
  chr12:131193281-131193455
  hypo

SEQ ID NO: 463319 - DNA, 108 bp, Homo sapiens; identical to SEQ ID NO: 462412
  chr12:132312451-132312559
  hypo
  liver_bileduct vs. lung,breast,sarcoma

SEQ ID NO: 463320 - DNA, 168 bp, Homo sapiens; identical to SEQ ID NO: 462415
  chr13:20735265-20735433
  hypo
  liver_bileduct vs. head_and_neck,uterine, bladder_and_urothelial,cervical,non_cancer,colorectal,anorectal, thyroid,ovary,myeloid_neoplasm,multiple_myeloma,upper_gi,breast

SEQ ID NO: 463321 - DNA, 142 bp, Homo sapiens; identical to SEQ ID NO: 351449
  chr13:22243864-22244006
  hypo
  liver_bileduct vs. uterine,myeloid_neoplasm,thyroid

SEQ ID NO: 463322 - DNA, 258 bp, Homo sapiens
  chr13:36788459-36788717
  hypo
  liver_bileduct vs. bladder_and_urothelial,melanoma, breast
cgcgtcctggaaggggcccttcctgctattcgctccccacagttccccgacaatgagagctccccaggccgggctttgagggccgaggggaccaccgacctagggcccgcccgcgaggttataaacgcagctgcctccccttccacagcctcttacctggcccgagatctggcagtgctcctggcagataattgaggaagccatggccgctgcgcacgtgctgggtcctggggcagcctcccagcaggaggagctcca

SEQ ID NO: 463323 - DNA, 291 bp, Homo sapiens; identical to SEQ ID NO: 380370
  chr13:36788746-36789037
  hypo
  liver_bileduct vs. bladder_and_urothelial,melanoma, breast

SEQ ID NO: 463324 - DNA, 347 bp, Homo sapiens; identical to SEQ ID NO: 341723
  chr13:37679456-37679803
  hypo
  liver_bileduct vs. lung

SEQ ID NO: 463325 - DNA, 300 bp, Homo sapiens
  chr13:68343652-68343952
  hypo
  liver_bileduct vs. renal,head_and_neck
cgctgaccgaccagggttgctctcctcgctcggccctgcaggctgcactcgactcgtgccaccaacccagatcctgtgcctgctgtggctctgcactcagcccacgggctggaccaggcgtgccgccagcggcttccaccttgggcacccgcatctagatgagcggaagttggtggtgcctgaaaacagggatgccagcaaccgtgaagcctggggagtcctgagagctgagcccctaagaaatgttatggctgctgtagttcagcgagcagcagggaatggcgcccagtggctttttct

SEQ ID NO: 463326 - DNA, 43 bp, Homo sapiens; identical to SEQ ID NO: 380392
  chr13:68344002-68344045
  hypo
  liver_bileduct vs. renal,head_and_neck

SEQ ID NO: 463327 - DNA, 112 bp, Homo sapiens; identical to SEQ ID NO: 462422
  chr13:77459256-77459368
  hypo
  liver_bileduct vs. lung,pancreas_gallbladder

SEQ ID NO: 463328 - DNA, 420 bp, Homo sapiens; identical to SEQ ID NO: 462423
  chr13:77459628-77460048
  hypo
  liver_bileduct vs. lung,pancreas_gallbladder

SEQ ID NO: 463329 - DNA, 718 bp, Homo sapiens; identical to SEQ ID NO: 347268
  chr13:77459628-77460346
  hypo
  liver_bileduct vs. lung,pancreas_gallbladder,sarcoma, renal,ovary,head_and_neck

SEQ ID NO: 463330 - DNA, 617 bp, Homo sapiens; identical to SEQ ID NO: 341781
  chr13:106912373-106912990
  hypo
  liver_bileduct vs. pancreas_gallbladder

SEQ ID NO: 463331 - DNA, 3 bp, Homo sapiens
  chr13:107187160-107187163
  hypo
  liver_bileduct vs. lung,pancreas_gallbladder
gga

SEQ ID NO: 463332 - DNA, 241 bp, Homo sapiens; identical to SEQ ID NO: 462426
  chr13:107187426-107187667
  hypo
  liver_bileduct vs. lung,pancreas_gallbladder

SEQ ID NO: 463333 - DNA, 102 bp, Homo sapiens; identical to SEQ ID NO: 462427
  chr13:107187695-107187797
  hypo
  liver_bileduct vs. lung,pancreas_gallbladder

SEQ ID NO: 463334 - DNA, 241 bp, Homo sapiens; identical to SEQ ID NO: 462426
  chr13:107187426-107187667
  hypo
  liver_bileduct vs. pancreas_gallbladder

SEQ ID NO: 463335 - DNA, 547 bp, Homo sapiens; identical to SEQ ID NO: 462429
  chr13:107187695-107188242
  hypo
  liver_bileduct vs. pancreas_gallbladder

SEQ ID NO: 463336 - DNA, 439 bp, Homo sapiens; identical to SEQ ID NO: 462430
  chr13:107187803-107188242
  hypo
  liver_bileduct vs. upper_gi

SEQ ID NO: 463337 - DNA, 309 bp, Homo sapiens; identical to SEQ ID NO: 462431
  chr13:107188430-107188739
  hypo
  liver_bileduct vs. upper_gi

SEQ ID NO: 463338 - DNA, 309 bp, Homo sapiens; identical to SEQ ID NO: 462431
  chr13:107188430-107188739
  hypo
  liver_bileduct vs. lung

SEQ ID NO: 463339 - DNA, 280 bp, Homo sapiens; identical to SEQ ID NO: 462433
  chr13:107188808-107189088
  hypo
  liver_bileduct vs. lung

SEQ ID NO: 463340 - DNA, 15 bp, Homo sapiens
  chr13:107189117-107189132
  hypo
  liver_bileduct vs. lung
acagtgcaaatgtac

SEQ ID NO: 463341 - DNA, 54 bp, Homo sapiens
  chr13:112690683-112690737
  hypo
  liver_bileduct vs. lymphoid_neoplasm, pancreas_gallbladder,head_and_neck,anorectal,colorectal
cgtgacggctccgcaccgacgcacccttctcagggcaagatcgacacagagtgc

SEQ ID NO: 463342 - DNA, 150 bp, Homo sapiens; identical to SEQ ID NO: 355106
  chr13:114616940-114617090
  hypo
  liver_bileduct vs. renal,breast

SEQ ID NO: 463343 - DNA, 148 bp, Homo sapiens; identical to SEQ ID NO: 341862
  chr13:114617363-114617511
  hypo
  liver_bileduct vs. melanoma,breast,renal

SEQ ID NO: 463344 - DNA, 87 bp, Homo sapiens
  chr13:114769900-114769987
  hypo
  liver_bileduct vs. renal,melanoma
cgtttttcagaagacaaatggccaacaagcatacgatataaagcccagcgtggctcatcacctgaggaatgagagccagagctgcct

SEQ ID NO: 463345 - DNA, 2 bp, Homo sapiens
  chr13:114770192-114770194
  hypo
  liver_bileduct vs. renal,melanoma
ac

SEQ ID NO: 463346 - DNA, 439 bp, Homo sapiens; identical to SEQ ID NO: 462437
  chr14:36003004-36003443
  hypo
  liver_bileduct vs. prostate,sarcoma,head_and_neck, anorectal,melanoma,cervical,ovary,breast

SEQ ID NO: 463347 - DNA, 150 bp, Homo sapiens; identical to SEQ ID NO: 462438
  chr14:36003293-36003443
  hypo
  liver_bileduct vs. thyroid,prostate,melanoma,breast

SEQ ID NO: 463348 - DNA, 712 bp, Homo sapiens; identical to SEQ ID NO: 462443
  chr14:51027134-51027846
  hypo
  liver_bileduct vs. lung,pancreas_gallbladder

SEQ ID NO: 463349 - DNA, 104 bp, Homo sapiens; identical to SEQ ID NO: 360427
  chr14:51027881-51027985
  hypo
  liver_bileduct vs. lung,pancreas_gallbladder

SEQ ID NO: 463350 - DNA, 9 bp, Homo sapiens
  chr14:70654358-70654367
  hypo
  liver_bileduct vs. multiple_myeloma
cgcgcgcgc

SEQ ID NO: 463351 - DNA, 83 bp, Homo sapiens; identical to SEQ ID NO: 462461
  chr14:77965137-77965220
  hypo
  liver_bileduct vs. bladder_and_urothelial,ovary,prostate, head_and_neck,uterine

SEQ ID NO: 463352 - DNA, 181 bp, Homo sapiens; identical to SEQ ID NO: 462462
  chr14:77965244-77965425
  hypo
  liver_bileduct vs. bladder_and_urothelial,ovary,prostate, head_and_neck,uterine

SEQ ID NO: 463353 - DNA, 329 bp, Homo sapiens; identical to SEQ ID NO: 342007
  chr14:94209931-94210260
  hypo
  liver_bileduct vs. head_and_neck

SEQ ID NO: 463354 - DNA, 420 bp, Homo sapiens
  chr14:101349283-101349703
  hypo
  liver_bileduct vs. pancreas_gallbladder
cgcggtggagggacactcgtaaaaggtctcgctgtgatcactgtctccagcctgctgaagctcagagggctctgattcagaaagatcatcggatccgtctgagcttggctggtcggaagtctcatcatctgcttccttcgggttaaacacgtcggccaggtctgagtatgggtgtggcagtccgggtagcaggctcatgccgtgcctctctagggcaatgcatggcgggggcgggcggaagcagttcttcaggcagtagggagagtggaaggtgcagcggcctttgatccagtcgacttcgggggcgtggactcggagccagcggatgcctaggaccacagagaagttcggtgaaggtacgatgtcaaattcgatggactcctggtggttctggtggatacacaccaggggctccgtgta

SEQ ID NO: 463355 - DNA, 246 bp, Homo sapiens; identical to SEQ ID NO: 366467
  chr14:101349750-101349996
  hypo
  liver_bileduct vs. pancreas_gallbladder

SEQ ID NO: 463356 - DNA, 415 bp, Homo sapiens; identical to SEQ ID NO: 342036
  chr14:101489771-101490186
  hypo
  liver_bileduct vs. pancreas_gallbladder

SEQ ID NO: 463357 - DNA, 100 bp, Homo sapiens; identical to SEQ ID NO: 348642
  chr14:104623761-104623861
  hypo

SEQ ID NO: 463358 - DNA, 138 bp, Homo sapiens; identical to SEQ ID NO: 454788
  chr14:104640046-104640184
  hypo
  liver_bileduct vs. lymphoid_neoplasm,colorectal, anorectal,breast

SEQ ID NO: 463359 - DNA, 101 bp, Homo sapiens; identical to SEQ ID NO: 355209
  chr14:104640582-104640683
  hypo
  liver_bileduct vs. lymphoid_neoplasm,colorectal, anorectal,breast

SEQ ID NO: 463360 - DNA, 140 bp, Homo sapiens; identical to SEQ ID NO: 454790
  chr14:104641166-104641306
  hypo

SEQ ID NO: 463361 - DNA, 1 bp, Homo sapiens
  chr14:104897850-104897851
  hypo
  liver_bileduct vs. pancreas_gallbladder
c

SEQ ID NO: 463362 - DNA, 203 bp, Homo sapiens; identical to SEQ ID NO: 342119
  chr15:26026151-26026354
  hypo
  liver_bileduct vs. pancreas_gallbladder

SEQ ID NO: 463363 - DNA, 144 bp, Homo sapiens; identical to SEQ ID NO: 355226
  chr15:26234718-26234862
  hypo
  liver_bileduct vs. pancreas_gallbladder,renal, head_and_neck,lymphoid_neoplasm,sarcoma,lung,colorectal, anorectal,breast

SEQ ID NO: 463364 - DNA, 103 bp, Homo sapiens
  chr15:31188921-31189024
  hypo
  liver_bileduct vs. lung
cgcgctctgtcgtccaaagtcctgggatcacaagcctgagcctccatgccaggccgatctattcctttctgattaataaattacgccgggcgcggtggctcac

SEQ ID NO: 463365 - DNA, 2 bp, Homo sapiens
  chr15:33954396-33954398
  hypo
  liver_bileduct vs. cervical
cg

SEQ ID NO: 463366 - DNA, 3 bp, Homo sapiens
  chr15:34728787-34728790
  hypo
  liver_bileduct vs. cervical,anorectal,head_and_neck, breast,sarcoma
cgc

SEQ ID NO: 463367 - DNA, 12 bp, Homo sapiens
  chr15:34728813-34728825
  hypo
  liver_bileduct vs. cervical,anorectal,head_and_neck, breast,sarcoma
cgcgtcggcccg

SEQ ID NO: 463368 - DNA, 25 bp, Homo sapiens
  chr15:34729636-34729661
  hypo
  liver_bileduct vs. cervical,anorectal,head_and_neck, breast,sarcoma
ctcgccgcgccgccgtcctcgccgc

SEQ ID NO: 463369 - DNA, 47 bp, Homo sapiens; identical to SEQ ID NO: 462466
  chr15:34729898-34729945
  hypo
  liver_bileduct vs. head_and_neck,cervical, bladder_and_urothelial,breast,uterine

SEQ ID NO: 463370 - DNA, 162 bp, Homo sapiens; identical to SEQ ID NO: 462468
  chr15:40575352-40575514
  hypo
  liver_bileduct vs. anorectal,cervical

SEQ ID NO: 463371 - DNA, 78 bp, Homo sapiens; identical to SEQ ID NO: 452897
  chr15:48936649-48936727
  hypo
  liver_bileduct vs. sarcoma

SEQ ID NO: 463372 - DNA, 247 bp, Homo sapiens; identical to SEQ ID NO: 291013
  chr15:75248843-75249090
  hypo
  liver_bileduct vs. melanoma

SEQ ID NO: 463373 - DNA, 195 bp, Homo sapiens; identical to SEQ ID NO: 462486
  chr15:82339684-82339879
  hypo
  liver_bileduct vs. ovary,anorectal,breast,uterine, myeloid_neoplasm,prostate,thyroid,head_and_neck

SEQ ID NO: 463374 - DNA, 110 bp, Homo sapiens; identical to SEQ ID NO: 462489
  chr15:91427360-91427470
  hypo
  liver_bileduct vs. pancreas_gallbladder,multiple_myeloma, bladder_and_urothelial

SEQ ID NO: 463375 - DNA, 77 bp, Homo sapiens; identical to SEQ ID NO: 351744
  chr15:91427979-91428056
  hypo
  liver_bileduct vs. pancreas_gallbladder,multiple_myeloma, bladder_and_urothelial

SEQ ID NO: 463376 - DNA, 230 bp, Homo sapiens
  chr15:93595181-93595411
  hypo
aagggcagggctgtgccctacagccgccccctcccccttaccttgctggtggcagtggccgctgagccgggcagcacaggcgtgttggtgacctgcacgttcaggtaattattgtcgatgagcggccaggcgccctgcaccttgcaggtctggaagcggtcggtgaaagtcctgaggtgtgggtccccgaagaggccacagtgcgtgtagttgggggtggccgagtgctt

SEQ ID NO: 463377 - DNA, 121 bp, Homo sapiens; identical to SEQ ID NO: 355299
  chr15:93595508-93595629
  hypo

SEQ ID NO: 463378 - DNA, 351 bp, Homo sapiens; identical to SEQ ID NO: 342291
  chr15:94048797-94049148
  hypo
  liver_bileduct vs. head_and_neck,pancreas_gallbladder, lung

SEQ ID NO: 463379 - DNA, 79 bp, Homo sapiens; identical to SEQ ID NO: 462492
  chr15:99192824-99192903
  hypo
  liver_bileduct vs. lung

SEQ ID NO: 463380 - DNA, 266 bp, Homo sapiens; identical to SEQ ID NO: 462493
  chr15:99192941-99193207
  hypo
  liver_bileduct vs. lung

SEQ ID NO: 463381 - DNA, 91 bp, Homo sapiens
  chr15:99254469-99254560
  hypo
  liver_bileduct vs. pancreas_gallbladder,melanoma
cgaaaacattaagcacagaagaatcccattcaggtaatcttctgttggctggctgtagaactacggagaacatctggagaaacacgtcaag

SEQ ID NO: 463382 - DNA, 13 bp, Homo sapiens
  chr15:99254686-99254699
  hypo
  liver_bileduct vs. pancreas_gallbladder,melanoma
tccctctatggac

SEQ ID NO: 463383 - DNA, 225 bp, Homo sapiens
  chr15:99256133-99256358
  hypo
  liver_bileduct vs. upper_gi,bladder_and_urothelial, pancreas_gallbladder
cggccatctagtgtgcactttggactgatgagctcccctacctgaaatcctgtagcaagtccctataggataggcatgtggtacagtgtgaagctcctgagtggtcaacagctaccccgtgacaacatgccacactccatgtgccactccctcccgcctgcctgctgtgtccttggccccagtggtgctctcccgtgctgaccagccggcacggctcacctggcc

SEQ ID NO: 463384 - DNA, 182 bp, Homo sapiens; identical to SEQ ID NO: 342299
  chr15:99276224-99276406
  hypo
  liver_bileduct vs. lung,melanoma,upper_gi

SEQ ID NO: 463385 - DNA, 191 bp, Homo sapiens; identical to SEQ ID NO: 342301
  chr15:99451886-99452077
  hypo
  liver_bileduct vs. upper_gi

SEQ ID NO: 463386 - DNA, 59 bp, Homo sapiens
  chr15:99454579-99454638
  hypo
  liver_bileduct vs. pancreas_gallbladder,lung,upper_gi, melanoma
cgtcgaagaatcgcatcatcataacctggcaccggtaccggccccctgactacagggat

SEQ ID NO: 463387 - DNA, 322 bp, Homo sapiens
  chr15:99459893-99460215
  hypo
  liver_bileduct vs. colorectal,upper_gi,lung,melanoma, pancreas_gallbladder
cgagaagacaaaatccccatcaggaagtatgccgacggcaccatcgacattgaggaggtcacagagaaccccaagactgaggtgtgtggtggggagaaagggccttgctgcgcctgccccaaaactgaagccgagaagcaggccgagaaggaggaggctgaataccgcaaagtctttgagaatttcctgcacaactccatcttcgtgcccaggtacccagctcatgtgaaatttcagttggcaaaacccactgctcaggccggttctgttgcctttctccccaccaggtagtgtgtaagtcagcagctggggggtacaatac

SEQ ID NO: 463388 - DNA, 4 bp, Homo sapiens
  chr15:99460268-99460272
  hypo
  liver_bileduct vs. colorectal,upper_gi,lung,melanoma, pancreas_gallbladder
ctgc

SEQ ID NO: 463389 - DNA, 209 bp, Homo sapiens; identical to SEQ ID NO: 342305
  chr15:99465447-99465656
  hypo
  liver_bileduct vs. lung,pancreas_gallbladder,upper_gi, bladder_and_urothelial

SEQ ID NO: 463390 - DNA, 226 bp, Homo sapiens; identical to SEQ ID NO: 355304
  chr15:99497132-99497358
  hypo
  liver_bileduct vs. upper_gi,pancreas_gallbladder,lung

SEQ ID NO: 463391 - DNA, 254 bp, Homo sapiens; identical to SEQ ID NO: 366680
  chr15:99504104-99504358
  hypo
  liver_bileduct vs. renal,bladder_and_urothelial, pancreas_gallbladder,lung,breast,colorectal,upper_gi,melanoma, head_and_neck

SEQ ID NO: 463392 - DNA, 130 bp, Homo sapiens; identical to SEQ ID NO: 342309
  chr15:99505061-99505191
  hypo
  liver_bileduct vs. lung,upper_gi,pancreas_gallbladder, melanoma,head_and_neck,ovary,breast

SEQ ID NO: 463393 - DNA, 86 bp, Homo sapiens
  chr15:99506062-99506148
  hypo
  liver_bileduct vs. lung,pancreas_gallbladder
cggagttaaggcgaattgttcaagaacacaaactacatcgcactcgtcagttgtcagttctggggcatgactttagcgttttgttt

SEQ ID NO: 463394 - DNA, 21 bp, Homo sapiens
  chr15:99506177-99506198
  hypo
  liver_bileduct vs. lung,pancreas_gallbladder
atgtcccacgtgtgtgtgtcc

SEQ ID NO: 463395 - DNA, 518 bp, Homo sapiens; identical to SEQ ID NO: 455718
  chr15:101459489-101460007
  hypo
  liver_bileduct vs. pancreas_gallbladder, lymphoid_neoplasm,colorectal,bladder_and_urothelial,anorectal

SEQ ID NO: 463396 - DNA, 48 bp, Homo sapiens; identical to SEQ ID NO: 345484
  chr16:2042503-2042551
  hypo
  liver_bileduct vs. thyroid,myeloid_neoplasm,non_cancer, melanoma,cervical,prostate,anorectal,head_and_neck

SEQ ID NO: 463397 - DNA, 97 bp, Homo sapiens; identical to SEQ ID NO: 462498
  chr16:2042503-2042600
  hypo
  liver_bileduct vs. cervical,non_cancer

SEQ ID NO: 463398 - DNA, 226 bp, Homo sapiens; identical to SEQ ID NO: 360772
  chr16:2042617-2042843
  hypo
  liver_bileduct vs. cervical,non_cancer

SEQ ID NO: 463399 - DNA, 367 bp, Homo sapiens; identical to SEQ ID NO: 366847
  chr16:5703287-5703654
  hypo
  liver_bileduct vs. lymphoid_neoplasm,head_and_neck

SEQ ID NO: 463400 - DNA, 184 bp, Homo sapiens; identical to SEQ ID NO: 360800
  chr16:23193716-23193900
  hypo
  liver_bileduct vs. lung

SEQ ID NO: 463401 - DNA, 10 bp, Homo sapiens
  chr16:23846783-23846793
  hypo
  liver_bileduct vs. thyroid,non_cancer,myeloid_neoplasm, melanoma,multiple_myeloma,bladder_and_urothelial,prostate
cgctcctccc

SEQ ID NO: 463402 - DNA, 533 bp, Homo sapiens; identical to SEQ ID NO: 347376
  chr16:29624651-29625184
  hypo
  liver_bileduct vs. upper_gi,melanoma, pancreas_gallbladder,head_and_neck

SEQ ID NO: 463403 - DNA, 305 bp, Homo sapiens; identical to SEQ ID NO: 462510
  chr16:47176468-47176773
  hypo
  liver_bileduct vs. lung,cervical,head_and_neck, bladder_and_urothelial,breast,uterine,ovary,renal,prostate, multiple_myeloma,sarcoma,non_cancer,lymphoid_neoplasm, colorectal

SEQ ID NO: 463404 - DNA, 1 bp, Homo sapiens
  chr16:47177759-47177760
  hypo
  liver_bileduct vs. cervical,head_and_neck,lung, bladder_and_urothelial,breast,ovary,uterine,multiple_myeloma, renal,prostate,non_cancer,anorectal,myeloid_neoplasm,sarcoma, colorectal,thyroid,lymphoid_neoplasm
c

SEQ ID NO: 463405 - DNA, 18 bp, Homo sapiens
  chr16:47177802-47177820
  hypo
  liver_bileduct vs. breast,cervical, bladder_and_urothelial,head_and_neck,lung,anorectal,colorectal
cgcgggaccggcaggcag

SEQ ID NO: 463406 - DNA, 812 bp, Homo sapiens; identical to SEQ ID NO: 462516
  chr16:84650982-84651794
  hypo
  liver_bileduct vs. upper_gi,bladder_and_urothelial,lung, pancreas_gallbladder,ovary

SEQ ID NO: 463407 - DNA, 9 bp, Homo sapiens
  chr16:84651822-84651831
  hypo
  liver_bileduct vs. upper_gi,bladder_and_urothelial,lung, pancreas_gallbladder,ovary
tcccagacc

SEQ ID NO: 463408 - DNA, 270 bp, Homo sapiens; identical to SEQ ID NO: 360900
  chr16:86542673-86542943
  hypo
  liver_bileduct vs. ovary,anorectal

SEQ ID NO: 463409 - DNA, 353 bp, Homo sapiens; identical to SEQ ID NO: 462520
  chr16:86543822-86544175
  hypo
  liver_bileduct vs. melanoma

SEQ ID NO: 463410 - DNA, 60 bp, Homo sapiens; identical to SEQ ID NO: 462521
  chr16:87635912-87635972
  hypo
  liver_bileduct vs. melanoma

SEQ ID NO: 463411 - DNA, 190 bp, Homo sapiens; identical to SEQ ID NO: 462522
  chr16:87636008-87636198
  hypo
  liver_bileduct vs. melanoma

SEQ ID NO: 463412 - DNA, 491 bp, Homo sapiens; identical to SEQ ID NO: 127736
  chr16:87902835-87903326
  hypo
  liver_bileduct vs. upper_gi

SEQ ID NO: 463413 - DNA, 225 bp, Homo sapiens; identical to SEQ ID NO: 342741
  chr16:88368380-88368605
  hypo
  liver_bileduct vs. melanoma

SEQ ID NO: 463414 - DNA, 164 bp, Homo sapiens; identical to SEQ ID NO: 381414
  chr16:88993230-88993394
  hypo
  liver_bileduct vs. prostate

SEQ ID NO: 463415 - DNA, 400 bp, Homo sapiens; identical to SEQ ID NO: 462524
  chr16:89006909-89007309
  hypo
  liver_bileduct vs. breast,sarcoma,multiple_myeloma, anorectal,prostate,uterine,lung,melanoma,thyroid,non_cancer, lymphoid_neoplasm

SEQ ID NO: 463416 - DNA, 84 bp, Homo sapiens; identical to SEQ ID NO: 462525
  chr16:89007225-89007309
  hypo
  liver_bileduct vs. breast,sarcoma,prostate, multiple_myeloma,uterine,melanoma,thyroid,non_cancer, lymphoid_neoplasm

SEQ ID NO: 463417 - DNA, 92 bp, Homo sapiens; identical to SEQ ID NO: 462526
  chr16:89007789-89007881
  hypo
  liver_bileduct vs. breast,sarcoma,prostate, multiple_myeloma,uterine,melanoma,thyroid,non_cancer, lymphoid_neoplasm

SEQ ID NO: 463418 - DNA, 211 bp, Homo sapiens; identical to SEQ ID NO: 347401
  chr16:89007995-89008206
  hypo
  liver_bileduct vs. breast,sarcoma,prostate, multiple_myeloma,uterine,melanoma,thyroid,non_cancer, lymphoid_neoplasm

SEQ ID NO: 463419 - DNA, 92 bp, Homo sapiens; identical to SEQ ID NO: 462526
  chr16:89007789-89007881
  hypo
  liver_bileduct vs. melanoma,breast

SEQ ID NO: 463420 - DNA, 374 bp, Homo sapiens; identical to SEQ ID NO: 462529
  chr16:89007995-89008369
  hypo
  liver_bileduct vs. melanoma,breast

SEQ ID NO: 463421 - DNA, 7 bp, Homo sapiens
  chr16:89008592-89008599
  hypo
  liver_bileduct vs. melanoma,breast
cccgccc

SEQ ID NO: 463422 - DNA, 152 bp, Homo sapiens; identical to SEQ ID NO: 342773
  chr16:89028925-89029077
  hypo
  liver_bileduct vs. multiple_myeloma,lymphoid_neoplasm, renal

SEQ ID NO: 463423 - DNA, 34 bp, Homo sapiens
  chr16:89109415-89109449
  hypo
  liver_bileduct vs. anorectal
ctaacccaggtggcaaacaggggccgcccgactg

SEQ ID NO: 463424 - DNA, 121 bp, Homo sapiens; identical to SEQ ID NO: 367077
  chr16:89109659-89109780
  hypo
  liver_bileduct vs. anorectal

SEQ ID NO: 463425 - DNA, 539 bp, Homo sapiens; identical to SEQ ID NO: 342817
  chr17:951725-952264
  hypo
  liver_bileduct vs. upper_gi,lung

SEQ ID NO: 463426 - DNA, 459 bp, Homo sapiens; identical to SEQ ID NO: 351870
  chr17:3867210-3867669
  hypo
  liver_bileduct vs. upper_gi,multiple_myeloma,colorectal, pancreas_gallbladder,myeloid_neoplasm

SEQ ID NO: 463427 - DNA, 201 bp, Homo sapiens; identical to SEQ ID NO: 335438
  chr17:3867893-3868094
  hypo
  liver_bileduct vs. pancreas_gallbladder

SEQ ID NO: 463428 - DNA, 60 bp, Homo sapiens; identical to SEQ ID NO: 462535
  chr17:27332307-27332367
  hypo
  liver_bileduct vs. anorectal,sarcoma,ovary

SEQ ID NO: 463429 - DNA, 122 bp, Homo sapiens; identical to SEQ ID NO: 351909
  chr17:27332733-27332855
  hypo
  liver_bileduct vs. anorectal,sarcoma,ovary

SEQ ID NO: 463430 - DNA, 338 bp, Homo sapiens; identical to SEQ ID NO: 462539
  chr17:29248950-29249288
  hypo
  liver_bileduct vs. sarcoma,myeloid_neoplasm

SEQ ID NO: 463431 - DNA, 33 bp, Homo sapiens; identical to SEQ ID NO: 462542
  chr17:29718746-29718779
  hypo
  liver_bileduct vs. bladder_and_urothelial,sarcoma,ovary, prostate,breast,head_and_neck,uterine,renal

SEQ ID NO: 463432 - DNA, 1 bp, Homo sapiens
  chr17:29719289-29719290
  hypo
  liver_bileduct vs. bladder_and_urothelial,sarcoma,ovary, prostate,breast,head_and_neck,uterine,renal
c

SEQ ID NO: 463433 - DNA, 717 bp, Homo sapiens; identical to SEQ ID NO: 335510
  chr17:33814248-33814965
  hypo
  liver_bileduct vs. upper_gi,cervical

SEQ ID NO: 463434 - DNA, 508 bp, Homo sapiens; identical to SEQ ID NO: 342975
  chr17:39658629-39659137
  hypo
  liver_bileduct vs. renal,breast

SEQ ID NO: 463435 - DNA, 104 bp, Homo sapiens; identical to SEQ ID NO: 342976
  chr17:39659216-39659320
  hypo
  liver_bileduct vs. upper_gi

SEQ ID NO: 463436 - DNA, 37 bp, Homo sapiens; identical to SEQ ID NO: 455770
  chr17:40332770-40332807
  hypo
  liver_bileduct vs. bladder_and_urothelial,anorectal, non_cancer,uterine,prostate

SEQ ID NO: 463437 - DNA, 122 bp, Homo sapiens; identical to SEQ ID NO: 462557
  chr17:42906461-42906583
  hypo
  liver_bileduct vs. sarcoma,melanoma

SEQ ID NO: 463438 - DNA, 64 bp, Homo sapiens; identical to SEQ ID NO: 460782
  chr17:46687527-46687591
  hypo
  liver_bileduct vs. colorectal,ovary, bladder_and_urothelial,uterine,anorectal,upper_gi,renal, multiple_myeloma,thyroid,non_cancer,cervical,sarcoma

SEQ ID NO: 463439 - DNA, 66 bp, Homo sapiens; identical to SEQ ID NO: 462563
  chr17:47653244-47653310
  hypo
  liver_bileduct vs. lung,ovary,breast

SEQ ID NO: 463440 - DNA, 715 bp, Homo sapiens; identical to SEQ ID NO: 351982
  chr17:47653373-47654088
  hypo
  liver_bileduct vs. lung,ovary,breast

SEQ ID NO: 463441 - DNA, 112 bp, Homo sapiens; identical to SEQ ID NO: 454237
  chr17:61777761-61777873
  hypo
  liver_bileduct vs. cervical,sarcoma,anorectal, multiple_myeloma,thyroid,non_cancer,head_and_neck, lymphoid_neoplasm,renal,prostate,myeloid_neoplasm, bladder_and_urothelial,melanoma

SEQ ID NO: 463442 - DNA, 76 bp, Homo sapiens; identical to SEQ ID NO: 345537
  chr17:61778423-61778499
  hypo
  liver_bileduct vs. cervical,sarcoma,anorectal, multiple_myeloma,thyroid,non_cancer,head_and_neck, lymphoid_neoplasm,renal,prostate,myeloid_neoplasm, bladder_and_urothelial,melanoma

SEQ ID NO: 463443 - DNA, 256 bp, Homo sapiens; identical to SEQ ID NO: 343083
  chr17:71431621-71431877
  hypo
  liver_bileduct vs. pancreas_gallbladder,upper_gi,breast, colorectal,lymphoid_neoplasm,cervical,head_and_neck,prostate, lung

SEQ ID NO: 463444 - DNA, 81 bp, Homo sapiens; identical to SEQ ID NO: 454240
  chr17:73584287-73584368
  hypo
  liver_bileduct vs. cervical,anorectal

SEQ ID NO: 463445 - DNA, 170 bp, Homo sapiens; identical to SEQ ID NO: 352021
  chr17:73584951-73585121
  hypo
  liver_bileduct vs. cervical,anorectal

SEQ ID NO: 463446 - DNA, 44 bp, Homo sapiens; identical to SEQ ID NO: 462570
  chr17:74864600-74864644
  hypo
  liver_bileduct vs. lung

SEQ ID NO: 463447 - DNA, 104 bp, Homo sapiens
  chr17:74908627-74908731
  hypo
  liver_bileduct vs. melanoma,anorectal
cgcagatgttcacggcagatgtcctggccactgatggagcaacaaggctggacggatgagccggtcccgctctgctcctcgggtctcggtgtttcaattaactg

SEQ ID NO: 463448 - DNA, 132 bp, Homo sapiens; identical to SEQ ID NO: 355722
  chr17:74908814-74908946
  hypo
  liver_bileduct vs. melanoma,anorectal

SEQ ID NO: 463449 - DNA, 244 bp, Homo sapiens; identical to SEQ ID NO: 343160
  chr17:76851787-76852031
  hypo
  liver_bileduct vs. pancreas_gallbladder

SEQ ID NO: 463450 - DNA, 287 bp, Homo sapiens; identical to SEQ ID NO: 355741
  chr17:77113248-77113535
  hypo
  liver_bileduct vs. pancreas_gallbladder

SEQ ID NO: 463451 - DNA, 47 bp, Homo sapiens
  chr17:77126804-77126851
  hypo
  liver_bileduct vs. anorectal,pancreas_gallbladder
cgataccgagcagtcttctgacacagtccctggaacgagtggagtgc

SEQ ID NO: 463452 - DNA, 245 bp, Homo sapiens
  chr17:77126880-77127125
  hypo
  liver_bileduct vs. anorectal,pancreas_gallbladder
atggggcctgccatgctctaagctctggcctccctgcctggaggcgggacctggcccaagcctcaaagccgaagcacaaattcctcatcagtgaagatccagagccgccgtggtgctaggacacggtgcgcgggaatcagccccgcacctgcaaggcagcgtgctctgcgtgccctgcgtgtgccccatgtgtactgtgtgccccgtgtgtgagcatgtgtgccccatgtgtgctgtgcccccat

SEQ ID NO: 463453 - DNA, 295 bp, Homo sapiens; identical to SEQ ID NO: 367405
  chr17:77127177-77127472
  hypo
  liver_bileduct vs. anorectal,pancreas_gallbladder

SEQ ID NO: 463454 - DNA, 221 bp, Homo sapiens; identical to SEQ ID NO: 455803
  chr17:80186335-80186556
  hypo
  liver_bileduct vs. upper_gi,bladder_and_urothelial, colorectal

SEQ ID NO: 463455 - DNA, 517 bp, Homo sapiens; identical to SEQ ID NO: 347473
  chr17:80186618-80187135
  hypo
  liver_bileduct vs. upper_gi,bladder_and_urothelial, colorectal

SEQ ID NO: 463456 - DNA, 799 bp, Homo sapiens; identical to SEQ ID NO: 462575
  chr17:80186637-80187436
  hypo
  liver_bileduct vs. upper_gi,lung,colorectal

SEQ ID NO: 463457 - DNA, 278 bp, Homo sapiens; identical to SEQ ID NO: 462576
  chr17:81038567-81038845
  hypo
  liver_bileduct vs. upper_gi,colorectal,lung, pancreas_gallbladder,bladder_and_urothelial

SEQ ID NO: 463458 - DNA, 508 bp, Homo sapiens; identical to SEQ ID NO: 352045
  chr17:81038865-81039373
  hypo
  liver_bileduct vs. upper_gi,colorectal,lung, pancreas_gallbladder,bladder_and_urothelial

SEQ ID NO: 463459 - DNA, 79 bp, Homo sapiens
  chr17:81050575-81050654
  hypo
cgaaggccctgggacatggccggactgagggtcttgctctcggacatgtgcccatcatggccgaggtgcaggtgccttt

SEQ ID NO: 463460 - DNA, 206 bp, Homo sapiens
  chr17:81050716-81050922
  hypo
tgtctcccgtgctgccggcccctccagcacgtgccgccaactcacatttgaagtggcgttggtcacaaaggtgccttgacgtggacaccctccctgacttggctttgctgagtgtgagatcctttgacggtggtgggcggcgttccagagcctgtcccgtccaggctgcttcctgactctgcctttcttctccagcgccgtgccgt

SEQ ID NO: 463461 - DNA, 134 bp, Homo sapiens; identical to SEQ ID NO: 343292
  chr17:81080737-81080871
  hypo

SEQ ID NO: 463462 - DNA, 238 bp, Homo sapiens; identical to SEQ ID NO: 345538
  chr18:2848166-2848404
  hypo
  liver_bileduct vs. uterine,prostate,thyroid, myeloid_neoplasm,ovary,non_cancer

SEQ ID NO: 463463 - DNA, 369 bp, Homo sapiens; identical to SEQ ID NO: 361185
  chr18:2906430-2906799
  hypo
  liver_bileduct vs. upper_gi

SEQ ID NO: 463464 - DNA, 103 bp, Homo sapiens
  chr18:5133043-5133146
  hypo
  liver_bileduct vs. colorectal
cgcctcgggttttggtaagctggtttggtgtccatgggggcctggctcttgagctgctccaggctgagagcagcgagctgcgggttcccgggaggcagcgagg

SEQ ID NO: 463465 - DNA, 276 bp, Homo sapiens; identical to SEQ ID NO: 462581
  chr18:9708063-9708339
  hypo
  liver_bileduct vs. lung,ovary,pancreas_gallbladder, cervical,anorectal,breast,head_and_neck

SEQ ID NO: 463466 - DNA, 3 bp, Homo sapiens
  chr18:9708731-9708734
  hypo
  liver_bileduct vs. cervical,breast
cgg

SEQ ID NO: 463467 - DNA, 307 bp, Homo sapiens; identical to SEQ ID NO: 462584
  chr18:12407715-12408022
  hypo
  liver_bileduct vs. lung,melanoma,breast

SEQ ID NO: 463468 - DNA, 207 bp, Homo sapiens; identical to SEQ ID NO: 462585
  chr18:12408117-12408324
  hypo
  liver_bileduct vs. lung,melanoma,breast

SEQ ID NO: 463469 - DNA, 28 bp, Homo sapiens
  chr18:12408339-12408367
  hypo
  liver_bileduct vs. lung,melanoma,breast
cgggggggcggccgggggcctggcgctc

SEQ ID NO: 463470 - DNA, 158 bp, Homo sapiens
  chr18:22804909-22805067
  hypo
  liver_bileduct vs. upper_gi,lymphoid_neoplasm,colorectal, uterine,renal,breast,cervical
cggcagtttccagtatcaagactcttactatgcgtgactttgtgttcagtaagagttaaaagggagggaaaccgctctccgcaaatagggcacatgtagtgtttgacagggcctaggtgggtctgcatatgttcccggaggccattttcggagaagaa

SEQ ID NO: 463471 - DNA, 804 bp, Homo sapiens; identical to SEQ ID NO: 462587
  chr18:23806188-23806992
  hypo
  liver_bileduct vs. upper_gi,lung,colorectal

SEQ ID NO: 463472 - DNA, 792 bp, Homo sapiens; identical to SEQ ID NO: 462588
  chr18:23806509-23807301
  hypo
  liver_bileduct vs. upper_gi,lung,colorectal

SEQ ID NO: 463473 - DNA, 414 bp, Homo sapiens; identical to SEQ ID NO: 343373
  chr18:35249615-35250029
  hypo
  liver_bileduct vs. lymphoid_neoplasm, pancreas_gallbladder

SEQ ID NO: 463474 - DNA, 14 bp, Homo sapiens
  chr18:44337138-44337152
  hypo
  liver_bileduct vs. renal,thyroid,myeloid_neoplasm, prostate,non_cancer,sarcoma,breast,ovary,multiple_myeloma, bladder_and_urothelial,melanoma
caggggctgggcgc

SEQ ID NO: 463475 - DNA, 204 bp, Homo sapiens; identical to SEQ ID NO: 335816
  chr18:47813485-47813689
  hypo
  liver_bileduct vs. upper_gi

SEQ ID NO: 463476 - DNA, 135 bp, Homo sapiens; identical to SEQ ID NO: 367645
  chr18:75339359-75339494
  hypo
  liver_bileduct vs. colorectal

SEQ ID NO: 463477 - DNA, 241 bp, Homo sapiens; identical to SEQ ID NO: 343461
  chr18:75873544-75873785
  hypo
  liver_bileduct vs. colorectal,lymphoid_neoplasm,renal, pancreas_gallbladder,upper_gi,bladder_and_urothelial, head_and_neck

SEQ ID NO: 463478 - DNA, 107 bp, Homo sapiens
  chr18:76123588-76123695
  hypo
  liver_bileduct vs. pancreas_gallbladder,colorectal, anorectal,lymphoid_neoplasm
cgtgatccacagaaatgattgctacgttccctgcagaacggacggcagtcgctggacagggccccagagcgcctgggtgcggtcagctccgcggactccccccggga

SEQ ID NO: 463479 - DNA, 31 bp, Homo sapiens; identical to SEQ ID NO: 367649
  chr18:76123894-76123925
  hypo
  liver_bileduct vs. pancreas_gallbladder,colorectal, anorectal,lymphoid_neoplasm

SEQ ID NO: 463480 - DNA, 144 bp, Homo sapiens
  chr18:76129277-76129421
  hypo
  liver_bileduct vs. pancreas_gallbladder,head_and_neck, upper_gi,lymphoid_neoplasm,bladder_and_urothelial,colorectal, sarcoma,lung
cgcagtaacacacggcacagaccgcgtgcctttcctccatctgcttaccgagtcggcgcggccacttaccacccatggcagcacattgcaaggtttgtccgtataaaagaaagtgccggcagatcgtgacgtggaggcctcgga

SEQ ID NO: 463481 - DNA, 180 bp, Homo sapiens; identical to SEQ ID NO: 355881
  chr18:76129450-76129630
  hypo
  liver_bileduct vs. pancreas_gallbladder,head_and_neck, upper_gi,lymphoid_neoplasm,bladder_and_urothelial,colorectal, sarcoma,lung

SEQ ID NO: 463482 - DNA, 441 bp, Homo sapiens; identical to SEQ ID NO: 343466
  chr18:76151089-76151530
  hypo
  liver_bileduct vs. bladder_and_urothelial, lymphoid_neoplasm

SEQ ID NO: 463483 - DNA, 115 bp, Homo sapiens
  chr18:76189679-76189794
  hypo
  liver_bileduct vs. pancreas_gallbladder,renal, head_and_neck,upper_gi
cgtgggacccatgacgcagagaggcaggtccctacccaccgggccgtgggccgctgagcacagagcgtggagccctgcggcggggtcgttcctgggccccgcgtgccatcctggg

SEQ ID NO: 463484 - DNA, 273 bp, Homo sapiens; identical to SEQ ID NO: 355883
  chr18:76189872-76190145
  hypo
  liver_bileduct vs. pancreas_gallbladder,renal, head_and_neck,upper_gi

SEQ ID NO: 463485 - DNA, 464 bp, Homo sapiens
  chr18:76435960-76436424
  hypo
  liver_bileduct vs. pancreas_gallbladder,colorectal, upper_gi,cervical,lymphoid_neoplasm,head_and_neck,renal
cgttcactcaggaagccgaagcccagaagagtgaggtctcaaagttcacagcacgtggcctagaattcaggggtgcagagctcctgcttggtaactcatcccctgtgcggtgatgcttctgatcccacagcaatgcctgcttctgcgaggctggtccagggctggaacggagccctgtgccgtgatgcttccgatcccacagcaatgccacgctcctccagagctggagcagattccgatcccacagcaatgccacgctcctccagggctggagcagattctgatcccacagcaaggccgcgcttctccaaggctggagcagattctgatcccaccgcaatgccgcgcttctccaagactggagcacattctgatcccaccgcaatgccgcatttctccaaggctggagcagattccgatcccaccgcaatgccgcatttctccagggctggagcagattccaa

SEQ ID NO: 463486 - DNA, 29 bp, Homo sapiens
  chr18:76436455-76436484
  hypo
  liver_bileduct vs. pancreas_gallbladder,colorectal, upper_gi,cervical,lymphoid_neoplasm,head_and_neck,renal
ggagcagattctgatcccaccgcaatgcc

SEQ ID NO: 463487 - DNA, 148 bp, Homo sapiens; identical to SEQ ID NO: 343469
  chr18:76480528-76480676
  hypo
  liver_bileduct vs. pancreas_gallbladder,head_and_neck, melanoma

SEQ ID NO: 463488 - DNA, 487 bp, Homo sapiens
  chr18:76486313-76486800
  hypo
  liver_bileduct vs. pancreas_gallbladder
cgagtgatggcgcaaagcaggccggtgaagcctcggcgctgggcccggcctggcactgcgcatccttggccttcgggacccgggctcccgcccccgtgcccagcctcacggagcccgcccaggcctgctgtcccccgagctccaggcccactgcccgccagaaccttctggtcttgcctcgcttcccgcctgcacttttctttcccggcctggcagagacatctataccagtgggaaaggcgagccactccggcagcgctgccaggttgcactccagcacctcacactcgcttctcccgggacttaaatttaaactcctcgagcgtcatgtccccatggctgtctggggccatcattgccacctcgtactcctctcttcactgccacaagaccaagagacagatgcgtcccggggtccttccacagcgttcccaggggaggaggagggcgcctggagccctggggaaggcgagcccgagccagcgca

SEQ ID NO: 463489 - DNA, 26 bp, Homo sapiens
  chr18:76486873-76486899
  hypo
  liver_bileduct vs. pancreas_gallbladder
accccagtgcacatggagacttccac

SEQ ID NO: 463490 - DNA, 432 bp, Homo sapiens; identical to SEQ ID NO: 343471
  chr18:76495838-76496270
  hypo
  liver_bileduct vs. pancreas_gallbladder,head_and_neck, colorectal,upper_gi,lymphoid_neoplasm

SEQ ID NO: 463491 - DNA, 284 bp, Homo sapiens; identical to SEQ ID NO: 343472
  chr18:76534718-76535002
  hypo
  liver_bileduct vs. pancreas_gallbladder

SEQ ID NO: 463492 - DNA, 178 bp, Homo sapiens; identical to SEQ ID NO: 343473
  chr18:76552775-76552953
  hypo
  liver_bileduct vs. renal,colorectal,lymphoid_neoplasm, pancreas_gallbladder,head_and_neck,anorectal,upper_gi,lung, prostate,uterine,bladder_and_urothelial

SEQ ID NO: 463493 - DNA, 63 bp, Homo sapiens; identical to SEQ ID NO: 382130
  chr18:76626405-76626468
  hypo
  liver_bileduct vs. lymphoid_neoplasm

SEQ ID NO: 463494 - DNA, 56 bp, Homo sapiens
  chr18:76653387-76653443
  hypo
  liver_bileduct vs. pancreas_gallbladder, lymphoid_neoplasm,sarcoma
cgcaccacatgactctatctacgggaaacacccagcagccagtcaccgaaggctac

SEQ ID NO: 463495 - DNA, 138 bp, Homo sapiens; identical to SEQ ID NO: 456674
  chr18:76685353-76685491
  hypo
  liver_bileduct vs. lymphoid_neoplasm, pancreas_gallbladder,colorectal,anorectal

SEQ ID NO: 463496 - DNA, 279 bp, Homo sapiens; identical to SEQ ID NO: 456675
  chr18:76685836-76686115
  hypo
  liver_bileduct vs. lymphoid_neoplasm, pancreas_gallbladder,colorectal,anorectal

SEQ ID NO: 463497 - DNA, 299 bp, Homo sapiens; identical to SEQ ID NO: 456676
  chr18:76685836-76686135
  hypo
  liver_bileduct vs. lymphoid_neoplasm, pancreas_gallbladder,anorectal,colorectal

SEQ ID NO: 463498 - DNA, 102 bp, Homo sapiens; identical to SEQ ID NO: 355890
  chr18:76686279-76686381
  hypo
  liver_bileduct vs. lymphoid_neoplasm, pancreas_gallbladder,anorectal,colorectal

SEQ ID NO: 463499 - DNA, 584 bp, Homo sapiens; identical to SEQ ID NO: 462594
  chr18:77160022-77160606
  hypo
  liver_bileduct vs. multiple_myeloma,non_cancer,ovary, myeloid_neoplasm,thyroid

SEQ ID NO: 463500 - DNA, 385 bp, Homo sapiens
  chr18:77307943-77308328
  hypo
  liver_bileduct vs. lymphoid_neoplasm, bladder_and_urothelial
cgaaggcctccagggccctctgttggctgctgacccagggccttctctagagcacctgactcgggcacacggaggctgctggaggagtgagagagtgagtggggggaggaattgcaaccaaattcagaatccgcccggccctgaggccgccccttgcctgccacccacccgggtgggggctttatttcgactcaggcacaggcgcacctgccggacccccggtgtctctgcgactccttctccgcactggcctgggcccgggctcccagccctccgctctgtctcgctggggcaaggcgtccctcactggccagttctgacattggtcccgggggagccgccttccacctgctggccctgctggccctgagtgtgactcagccgt

SEQ ID NO: 463501 - DNA, 174 bp, Homo sapiens; identical to SEQ ID NO: 382144
  chr18:77308568-77308742
  hypo
  liver_bileduct vs. lymphoid_neoplasm, bladder_and_urothelial

SEQ ID NO: 463502 - DNA, 122 bp, Homo sapiens; identical to SEQ ID NO: 343487
  chr18:77334284-77334406
  hypo
  liver_bileduct vs. head_and_neck,pancreas_gallbladder

SEQ ID NO: 463503 - DNA, 115 bp, Homo sapiens
  chr18:77338977-77339092
  hypo
cgcgccgagtgtcctaacacagttgccacacggctccatgtcctgtgcacaggccaggggttcgagtgggcatcagcaatgctcacttcagagcccctccgccacgacgtggcca

SEQ ID NO: 463504 - DNA, 259 bp, Homo sapiens; identical to SEQ ID NO: 367673
  chr18:77339121-77339380
  hypo

SEQ ID NO: 463505 - DNA, 29 bp, Homo sapiens
  chr18:77557780-77557809
  hypo
  liver_bileduct vs. lung,uterine,prostate,renal, myeloid_neoplasm,ovary,upper_gi
cgtgctccctccgagtggacttggccccg

SEQ ID NO: 463506 - DNA, 47 bp, Homo sapiens; identical to SEQ ID NO: 459506
  chr19:3785511-3785558
  hypo
  liver_bileduct vs. myeloid_neoplasm,uterine,breast, prostate,thyroid,ovary,cervical,non_cancer, bladder_and_urothelial,sarcoma

SEQ ID NO: 463507 - DNA, 100 bp, Homo sapiens; identical to SEQ ID NO: 460199
  chr19:3966587-3966687
  hypo
  liver_bileduct vs. melanoma

SEQ ID NO: 463508 - DNA, 183 bp, Homo sapiens; identical to SEQ ID NO: 367812
  chr19:3966755-3966938
  hypo
  liver_bileduct vs. melanoma

SEQ ID NO: 463509 - DNA, 33 bp, Homo sapiens; identical to SEQ ID NO: 361387
  chr19:4304684-4304717
  hypo
  liver_bileduct vs. bladder_and_urothelial

SEQ ID NO: 463510 - DNA, 73 bp, Homo sapiens; identical to SEQ ID NO: 462602
  chr19:8115163-8115236
  hypo
  liver_bileduct vs. ovary,uterine

SEQ ID NO: 463511 - DNA, 107 bp, Homo sapiens; identical to SEQ ID NO: 454983
  chr19:9129007-9129114
  hypo
  liver_bileduct vs. lymphoid_neoplasm

SEQ ID NO: 463512 - DNA, 92 bp, Homo sapiens; identical to SEQ ID NO: 356010
  chr19:9129229-9129321
  hypo
  liver_bileduct vs. lymphoid_neoplasm

SEQ ID NO: 463513 - DNA, 215 bp, Homo sapiens; identical to SEQ ID NO: 459511
  chr19:10400761-10400976
  hypo
  liver_bileduct vs. lung,head_and_neck,ovary

SEQ ID NO: 463514 - DNA, 215 bp, Homo sapiens; identical to SEQ ID NO: 459511
  chr19:10400761-10400976
  hypo
  liver_bileduct vs. lung

SEQ ID NO: 463515 - DNA, 485 bp, Homo sapiens; identical to SEQ ID NO: 462606
  chr19:10529649-10530134
  hypo
  liver_bileduct vs. bladder_and_urothelial,sarcoma

SEQ ID NO: 463516 - DNA, 111 bp, Homo sapiens; identical to SEQ ID NO: 352184
  chr19:10530526-10530637
  hypo
  liver_bileduct vs. bladder_and_urothelial,sarcoma

SEQ ID NO: 463517 - DNA, 631 bp, Homo sapiens; identical to SEQ ID NO: 457670
  chr19:10530654-10531285
  hypo
  liver_bileduct vs. sarcoma,breast,melanoma,prostate, uterine

SEQ ID NO: 463518 - DNA, 139 bp, Homo sapiens; identical to SEQ ID NO: 457671
  chr19:10531146-10531285
  hypo
  liver_bileduct vs. sarcoma

SEQ ID NO: 463519 - DNA, 68 bp, Homo sapiens; identical to SEQ ID NO: 462612
  chr19:11592604-11592672
  hypo
  liver_bileduct vs. uterine,myeloid_neoplasm,ovary, thyroid

SEQ ID NO: 463520 - DNA, 189 bp, Homo sapiens; identical to SEQ ID NO: 347537
  chr19:11593453-11593642
  hypo
  liver_bileduct vs. anorectal,melanoma,myeloid_neoplasm, prostate,bladder_and_urothelial,sarcoma,uterine,ovary, non_cancer,renal

SEQ ID NO: 463521 - DNA, 221 bp, Homo sapiens; identical to SEQ ID NO: 454280
  chr19:12995851-12996072
  hypo
  liver_bileduct vs. breast

SEQ ID NO: 463522 - DNA, 106 bp, Homo sapiens; identical to SEQ ID NO: 459516
  chr19:17392397-17392503
  hypo
  liver_bileduct vs. multiple_myeloma,anorectal, bladder_and_urothelial

SEQ ID NO: 463523 - DNA, 240 bp, Homo sapiens; identical to SEQ ID NO: 462619
  chr19:17716539-17716779
  hypo
  liver_bileduct vs. melanoma,uterine,myeloid_neoplasm, ovary,prostate,non_cancer,thyroid,cervical

SEQ ID NO: 463524 - DNA, 6 bp, Homo sapiens
  chr19:17717524-17717530
  hypo
  liver_bileduct vs. melanoma,uterine,myeloid_neoplasm, non_cancer,thyroid,prostate,ovary,cervical
ccgcac

SEQ ID NO: 463525 - DNA, 91 bp, Homo sapiens; identical to SEQ ID NO: 455837
  chr19:19729161-19729252
  hypo
  liver_bileduct vs. upper_gi,lung,ovary

SEQ ID NO: 463526 - DNA, 136 bp, Homo sapiens; identical to SEQ ID NO: 455838
  chr19:19729395-19729531
  hypo
  liver_bileduct vs. upper_gi,lung,ovary

SEQ ID NO: 463527 - DNA, 147 bp, Homo sapiens; identical to SEQ ID NO: 352245
  chr19:19729585-19729732
  hypo
  liver_bileduct vs. upper_gi,lung,ovary

SEQ ID NO: 463528 - DNA, 51 bp, Homo sapiens; identical to SEQ ID NO: 462626
  chr19:19738572-19738623
  hypo
  liver_bileduct vs. upper_gi,lung,pancreas_gallbladder, breast

SEQ ID NO: 463529 - DNA, 505 bp, Homo sapiens; identical to SEQ ID NO: 462627
  chr19:19738668-19739173
  hypo
  liver_bileduct vs. upper_gi,lung,pancreas_gallbladder, breast

SEQ ID NO: 463530 - DNA, 298 bp, Homo sapiens; identical to SEQ ID NO: 462628
  chr19:19738875-19739173
  hypo
  liver_bileduct vs. upper_gi,lung,pancreas_gallbladder, breast

SEQ ID NO: 463531 - DNA, 247 bp, Homo sapiens; identical to SEQ ID NO: 205295
  chr19:19739428-19739675
  hypo
  liver_bileduct vs. upper_gi,lung,pancreas_gallbladder, breast

SEQ ID NO: 463532 - DNA, 262 bp, Homo sapiens; identical to SEQ ID NO: 452993
  chr19:19843330-19843592
  hypo
  liver_bileduct vs. melanoma,breast

SEQ ID NO: 463533 - DNA, 47 bp, Homo sapiens; identical to SEQ ID NO: 352250
  chr19:19844044-19844091
  hypo
  liver_bileduct vs. melanoma,breast

SEQ ID NO: 463534 - DNA, 196 bp, Homo sapiens; identical to SEQ ID NO: 343880
  chr19:22799568-22799764
  hypo
  liver_bileduct vs. colorectal,sarcoma

SEQ ID NO: 463535 - DNA, 296 bp, Homo sapiens; identical to SEQ ID NO: 343893
  chr19:30936361-30936657
  hypo
  liver_bileduct vs. head_and_neck,pancreas_gallbladder

SEQ ID NO: 463536 - DNA, 412 bp, Homo sapiens
  chr19:31767664-31768076
  hypo
  liver_bileduct vs. head_and_neck,pancreas_gallbladder, prostate,lymphoid_neoplasm,colorectal,renal,breast,anorectal, uterine
cggtggacagtttggataagtcccgtagccggaagcctaagtgtgactctaggtgactgatgtacgtggaaggagtcctgatttgggacgcacaatcgttacaaaagaagacggggtggccagtgtccaagtttttgaggaactttgttccacctgtccttcgaagctggtatttcacgttggccagccagtggctgatggtggtcatggacagcccggtgaacctggagatatgcatccgctcctgggggctcaggtctgacatgatgtacttcccttctgaggtctgccggaggctggcggcaaactgggcctggaggatcaggaggtgctgggggttccagtttgactggcggcccttcctcttctgggcgggcgtcgactcctcagcctcctccagagtggccccgtc

SEQ ID NO: 463537 - DNA, 320 bp, Homo sapiens
  chr19:31768105-31768425
  hypo
  liver_bileduct vs. head_and_neck,pancreas_gallbladder, prostate,lymphoid_neoplasm,colorectal,renal,breast,anorectal, uterine
gagtggaggattttgacgtgtggctctctgtcaagttcttcagcatatcggatatatctgacaaggcattctcgcgtagcggcgagtttgacatgaatgatacgacggcagatgtctttgccgttgtcaccgtggatgaggaggttgccggggctgtggacgtgggtgacagaagcactgaacccaaggagcagcctttgtcactcttcccttttgtcaagtctatgggctggtcgttgttgacgtggtagaaatagcggtcgaggtggtctgccttcttggactgcaggggcggcggggtggccacagcagccttctcc

SEQ ID NO: 463538 - DNA, 59 bp, Homo sapiens
  chr19:31768017-31768076
  hypo
  liver_bileduct vs. head_and_neck,pancreas_gallbladder, lymphoid_neoplasm
cggcccttcctcttctgggcgggcgtcgactcctcagcctcctccagagtggccccgtc

SEQ ID NO: 463539 - DNA, 701 bp, Homo sapiens; identical to SEQ ID NO: 356103
  chr19:31768105-31768806
  hypo
  liver_bileduct vs. head_and_neck,pancreas_gallbladder, lymphoid_neoplasm

SEQ ID NO: 463540 - DNA, 574 bp, Homo sapiens
  chr19:31769887-31770461
  hypo
  liver_bileduct vs. head_and_neck,pancreas_gallbladder, renal,lymphoid_neoplasm,sarcoma,bladder_and_urothelial
cgtcttccttcccttccatttccagcaaggagcgtttgcgaggcttggaccagcgcttggggttgttgttatcggtctcatggttgtcgtcgcggtaatgccccgtctcgttcatgtgcaccgtcaactccaccagggtgtcgtaggcagcgctgcagtccttacagcggaacttgctggcccccgtgaagatggagccatagagcttgctgctctgccggtacagctgcacggtgctgaagaggctgggctccgggagcatgcggctctgtgacacctgctgcagcgtcttagccatggcgctctggtgccagtcgaagctcccgctgccacagctgctgctgctgctactgctgctgctgctgctgccgttgttcttctccgaggagggctggtgcaggttgaggttgaggttggaccagtaggagttggagaggaagttgttgtacacggccttcatctgctccaggctatccgacacagtcgtgtcttccagtgggaccgtgacctccttggtctcctcttcgttcttgatggagccgctttcaaagtcagccattcggtcactggtctc

SEQ ID NO: 463541 - DNA, 157 bp, Homo sapiens; identical to SEQ ID NO: 348964
  chr19:31770490-31770647
  hypo
  liver_bileduct vs. head_and_neck,pancreas_gallbladder, renal,lymphoid_neoplasm,sarcoma,bladder_and_urothelial

SEQ ID NO: 463542 - DNA, 59 bp, Homo sapiens; identical to SEQ ID NO: 462632
  chr19:31839508-31839567
  hypo
  liver_bileduct vs. sarcoma

SEQ ID NO: 463543 - DNA, 21 bp, Homo sapiens
  chr19:36478129-36478150
  hypo
  liver_bileduct vs. ovary
cgttcgcgctgagctgcgcgc

SEQ ID NO: 463544 - DNA, 63 bp, Homo sapiens; identical to SEQ ID NO: 352285
  chr19:36478303-36478366
  hypo
  liver_bileduct vs. ovary

SEQ ID NO: 463545 - DNA, 264 bp, Homo sapiens; identical to SEQ ID NO: 457750
  chr19:38719956-38720220
  hypo
  liver_bileduct vs. sarcoma,breast,bladder_and_urothelial, ovary,anorectal,prostate,head_and_neck,lung

SEQ ID NO: 463546 - DNA, 187 bp, Homo sapiens; identical to SEQ ID NO: 352306
  chr19:38720439-38720626
  hypo
  liver_bileduct vs. sarcoma,breast,bladder_and_urothelial, ovary,anorectal,prostate,head_and_neck,lung

SEQ ID NO: 463547 - DNA, 390 bp, Homo sapiens; identical to SEQ ID NO: 462642
  chr19:38754883-38755273
  hypo
  liver_bileduct vs. upper_gi

SEQ ID NO: 463548 - DNA, 175 bp, Homo sapiens; identical to SEQ ID NO: 347598
  chr19:38755344-38755519
  hypo
  liver_bileduct vs. upper_gi

SEQ ID NO: 463549 - DNA, 182 bp, Homo sapiens; identical to SEQ ID NO: 462644
  chr19:38852786-38852968
  hypo
  liver_bileduct vs. breast

SEQ ID NO: 463550 - DNA, 291 bp, Homo sapiens; identical to SEQ ID NO: 361584
  chr19:38853193-38853484
  hypo
  liver_bileduct vs. breast

SEQ ID NO: 463551 - DNA, 127 bp, Homo sapiens; identical to SEQ ID NO: 462646
  chr19:42927599-42927726
  hypo
  liver_bileduct vs. multiple_myeloma

SEQ ID NO: 463552 - DNA, 331 bp, Homo sapiens
  chr19:44222791-44223122
  hypo
  liver_bileduct vs. colorectal
cgcacagcctttgagtcgggtgacctcccccaggccgcctctcacctccaggagctgctggcctccacggaaagcatccgcctggaggtgggcgtcacgggcgagtcgggcgcgggcaagtcctccctcatcaatgccctgcgtggcctggaggccgaggaccctggcgcggctctcacgggcgtcatggagaccacgatgcaaccgtcgccctatccacacccacagttccctgacgtgaccctctgggacctgccaggagccggctctccaggctgcccggctgacaagtacctaaagcaggtagacttcagccgctatgacttcttcc

SEQ ID NO: 463553 - DNA, 345 bp, Homo sapiens
  chr19:44223175-44223520
  hypo
  liver_bileduct vs. colorectal
atcctgtgccagggcaagaagttctactttgtgcgcaccaaggtggacgaggacctggcggccacgcgcacccagcggccgtcgggcttcagagaggccgctgtcctgcaggagatccgagaccactgtgccgagcggctgcgggaggccggcgtggctgaccctcgcatcttcctggtgtccaacctctcgccggcccgctacgactttcccacgctggtgtccacctgggagcacgacctgccctcccaccggcgccacgctggcctgctgtcgctccccgacatctcgctggaggccttgcagaagaagaaggccatgcttcaagagcaagtcctcaagacc

SEQ ID NO: 463554 - DNA, 225 bp, Homo sapiens; identical to SEQ ID NO: 343998
  chr19:44273529-44273754
  hypo
  liver_bileduct vs. lung,lymphoid_neoplasm,sarcoma

SEQ ID NO: 463555 - DNA, 89 bp, Homo sapiens; identical to SEQ ID NO: 454300
  chr19:46519167-46519256
  hypo
  liver_bileduct vs. ovary

SEQ ID NO: 463556 - DNA, 421 bp, Homo sapiens; identical to SEQ ID NO: 352340
  chr19:46519582-46520003
  hypo
  liver_bileduct vs. ovary

SEQ ID NO: 463557 - DNA, 312 bp, Homo sapiens; identical to SEQ ID NO: 462655
  chr19:48901504-48901816
  hypo
  liver_bileduct vs. upper_gi,colorectal,thyroid, head_and_neck,cervical,prostate,uterine,non_cancer

SEQ ID NO: 463558 - DNA, 219 bp, Homo sapiens; identical to SEQ ID NO: 453035
  chr19:50553779-50553998
  hypo
  liver_bileduct vs. bladder_and_urothelial,prostate,ovary, uterine

SEQ ID NO: 463559 - DNA, 16 bp, Homo sapiens
  chr19:50833813-50833829
  hypo
  liver_bileduct vs. melanoma
cgaggcgagaacttct

SEQ ID NO: 463560 - DNA, 446 bp, Homo sapiens; identical to SEQ ID NO: 352368
  chr19:50833970-50834416
  hypo
  liver_bileduct vs. melanoma

SEQ ID NO: 463561 - DNA, 73 bp, Homo sapiens; identical to SEQ ID NO: 345605
  chr19:51228809-51228882
  hypo
  liver_bileduct vs. melanoma

SEQ ID NO: 463562 - DNA, 36 bp, Homo sapiens; identical to SEQ ID NO: 348998
  chr19:52058332-52058368
  hypo
  liver_bileduct vs. pancreas_gallbladder,head_and_neck, lymphoid_neoplasm,renal,colorectal,uterine,anorectal,melanoma

SEQ ID NO: 463563 - DNA, 566 bp, Homo sapiens; identical to SEQ ID NO: 344086
  chr19:52342906-52343472
  hypo
  liver_bileduct vs. cervical

SEQ ID NO: 463564 - DNA, 143 bp, Homo sapiens; identical to SEQ ID NO: 344098
  chr19:53806012-53806155
  hypo
  liver_bileduct vs. sarcoma

SEQ ID NO: 463565 - DNA, 80 bp, Homo sapiens
  chr19:54109766-54109846
  hypo
  liver_bileduct vs. bladder_and_urothelial
cggcaaggggttctcgggacatatcaggtagtaggggcactatgagggtgagcgccgctgagacaccaaaataggccaag

SEQ ID NO: 463566 - DNA, 285 bp, Homo sapiens; identical to SEQ ID NO: 368224
  chr19:54109903-54110188
  hypo
  liver_bileduct vs. bladder_and_urothelial

SEQ ID NO: 463567 - DNA, 496 bp, Homo sapiens
  chr19:56538418-56538914
  hypo
  liver_bileduct vs. renal,colorectal,pancreas_gallbladder, prostate
cggtggggcttccggcctcgcacggtggttctgcacggaaagtcaggaattgggaaatcggctctagccagaaggatcgtgctgtgctgggcgcaaggtggactctaccagggaatgttctcctacgtcttcttcctccccgttagagagatgcagcggaagaaggagagcagtgtcacagagttcatctccagggagtggccagactcccaggctccggtgacggagatcatgtcccgaccagaaaggctgttgttcatcattgacggtttcgatgacctgggctctgtcctcaacaatgacacaaagctctgcaaagactgggctgagaagcagcctccgttcaccctcatacgcagtctgctgaggaaggtcctgctccctgagtccttcctgatcgtcaccgtcagagacgtgggcacagagaagctcaagtcagaggtcgtgtctccccgttacctgttagttagaggaatctccggggaacaaagaatcc

SEQ ID NO: 463568 - DNA, 74 bp, Homo sapiens; identical to SEQ ID NO: 349006
  chr19:56539122-56539196
  hypo
  liver_bileduct vs. renal,colorectal,pancreas_gallbladder, prostate

SEQ ID NO: 463569 - DNA, 11 bp, Homo sapiens
  chr19:58039267-58039278
  hypo
  liver_bileduct vs. bladder_and_urothelial
cctgagcaacc

SEQ ID NO: 463570 - DNA, 121 bp, Homo sapiens; identical to SEQ ID NO: 344134
  chr19:58556965-58557086
  hypo

SEQ ID NO: 463571 - DNA, 259 bp, Homo sapiens; identical to SEQ ID NO: 369479
  chr2:264204-264463
  hypo
  liver_bileduct vs. upper_gi

SEQ ID NO: 463572 - DNA, 295 bp, Homo sapiens; identical to SEQ ID NO: 337457
  chr2:364121-364416
  hypo
  liver_bileduct vs. anorectal

SEQ ID NO: 463573 - DNA, 185 bp, Homo sapiens
  chr2:502892-503077
  hypo
  liver_bileduct vs. bladder_and_urothelial,head_and_neck, colorectal,upper_gi,lymphoid_neoplasm
cggtgggcaggaggcccttgccactgtggcgccaggagactgggtaaggcgcccaccacagggctggggatctcaggggcgtctgaagaggaagagctggctcggggcgctcggggtagcacagccacacatccaaccacggcgcgagaatcaaggtgccagaatcacaggacgcgggaatcacg

SEQ ID NO: 463574 - DNA, 96 bp, Homo sapiens; identical to SEQ ID NO: 353031
  chr2:503145-503241
  hypo
  liver_bileduct vs. bladder_and_urothelial,head_and_neck, colorectal,upper_gi,lymphoid_neoplasm

SEQ ID NO: 463575 - DNA, 161 bp, Homo sapiens; identical to SEQ ID NO: 337460
  chr2:817641-817802
  hypo
  liver_bileduct vs. cervical,sarcoma

SEQ ID NO: 463576 - DNA, 71 bp, Homo sapiens
  chr2:875867-875938
  hypo
  liver_bileduct vs. renal,lymphoid_neoplasm, pancreas_gallbladder
cgaggccggtttcccgtcgggctgcaaacggcagagcacgcggccctgtcccgggcaggctcggctccagg

SEQ ID NO: 463577 - DNA, 147 bp, Homo sapiens; identical to SEQ ID NO: 337463
  chr2:1282750-1282897
  hypo
  liver_bileduct vs. head_and_neck,colorectal, pancreas_gallbladder

SEQ ID NO: 463578 - DNA, 230 bp, Homo sapiens; identical to SEQ ID NO: 337465
  chr2:1488408-1488638
  hypo

SEQ ID NO: 463579 - DNA, 91 bp, Homo sapiens; identical to SEQ ID NO: 337466
  chr2:1520228-1520319
  hypo
  liver_bileduct vs. head_and_neck

SEQ ID NO: 463580 - DNA, 238 bp, Homo sapiens; identical to SEQ ID NO: 337468
  chr2:1647077-1647315
  hypo

SEQ ID NO: 463581 - DNA, 237 bp, Homo sapiens; identical to SEQ ID NO: 362767
  chr2:1651995-1652232
  hypo
  liver_bileduct vs. pancreas_gallbladder,head_and_neck, lung,lymphoid_neoplasm

SEQ ID NO: 463582 - DNA, 211 bp, Homo sapiens; identical to SEQ ID NO: 337471
  chr2:1709564-1709775
  hypo
  liver_bileduct vs. pancreas_gallbladder

SEQ ID NO: 463583 - DNA, 279 bp, Homo sapiens; identical to SEQ ID NO: 337473
  chr2:1771840-1772119
  hypo
  liver_bileduct vs. breast

SEQ ID NO: 463584 - DNA, 605 bp, Homo sapiens; identical to SEQ ID NO: 362772
  chr2:1863600-1864205
  hypo
  liver_bileduct vs. lymphoid_neoplasm

SEQ ID NO: 463585 - DNA, 444 bp, Homo sapiens; identical to SEQ ID NO: 337476
  chr2:1895697-1896141
  hypo
  liver_bileduct vs. pancreas_gallbladder

SEQ ID NO: 463586 - DNA, 442 bp, Homo sapiens
  chr2:1940969-1941411
  hypo
  liver_bileduct vs. pancreas_gallbladder,cervical
cgactcccctgacccccacatcgactctgcctcagggcggcctccatgccttgcccagagcagctgcagccatcatttcgcacatcaagaagttcctaacgtccgcggccatcagatcgcacatcaagaaggtcctaatgtctgcagccatcagatcgcacagcgagaaggccctaatgtccgcggccatcagatcgcacagcgagaaagccctaacgtctgcggccatcagatcgtacatcgagaaggccctaacgtccgcagccatcagatcgtacgtcgagaaggccctaacgtccgcggccatcagattgcacatcgagaaggccctaatgtccgcagccatcagatcgcacagtgagaaggccctaatgtccacagccatcagatcgcaagtcgagaaggccctaatgtccacagccatcagatcgcacactgagaa

SEQ ID NO: 463587 - DNA, 107 bp, Homo sapiens; identical to SEQ ID NO: 376190
  chr2:1941452-1941559
  hypo
  liver_bileduct vs. pancreas_gallbladder,cervical

SEQ ID NO: 463588 - DNA, 176 bp, Homo sapiens; identical to SEQ ID NO: 337482
  chr2:2696901-2697077
  hypo

SEQ ID NO: 463589 - DNA, 110 bp, Homo sapiens; identical to SEQ ID NO: 337483
  chr2:2705311-2705421
  hypo

SEQ ID NO: 463590 - DNA, 249 bp, Homo sapiens; identical to SEQ ID NO: 337484
  chr2:2737154-2737403
  hypo
  liver_bileduct vs. pancreas_gallbladder, lymphoid_neoplasm

SEQ ID NO: 463591 - DNA, 442 bp, Homo sapiens; identical to SEQ ID NO: 376202
  chr2:2797217-2797659
  hypo
  liver_bileduct vs. head_and_neck

SEQ ID NO: 463592 - DNA, 1 bp, Homo sapiens
  chr2:2799315-2799316
  hypo
  liver_bileduct vs. uterine,lymphoid_neoplasm,cervical, renal
c

SEQ ID NO: 463593 - DNA, 98 bp, Homo sapiens
  chr2:2854244-2854342
  hypo
  liver_bileduct vs. pancreas_gallbladder, lymphoid_neoplasm,uterine
cggggaagccttcctcagggtttctgcagaagccctgcccactgccccctgcagagagccatcctgccacagagatgcgccccagatgcgtcctggat

SEQ ID NO: 463594 - DNA, 160 bp, Homo sapiens; identical to SEQ ID NO: 353046
  chr2:2854463-2854623
  hypo
  liver_bileduct vs. pancreas_gallbladder, lymphoid_neoplasm,uterine

SEQ ID NO: 463595 - DNA, 392 bp, Homo sapiens; identical to SEQ ID NO: 337488
  chr2:2893376-2893768
  hypo
  liver_bileduct vs. head_and_neck,colorectal,anorectal

SEQ ID NO: 463596 - DNA, 348 bp, Homo sapiens; identical to SEQ ID NO: 337515
  chr2:9078588-9078936
  hypo
  liver_bileduct vs. upper_gi,lung,pancreas_gallbladder, renal,breast,bladder_and_urothelial,colorectal,head_and_neck, cervical

SEQ ID NO: 463597 - DNA, 211 bp, Homo sapiens; identical to SEQ ID NO: 369488
  chr2:9143655-9143866
  hypo
  liver_bileduct vs. lung,upper_gi

SEQ ID NO: 463598 - DNA, 5 bp, Homo sapiens
  chr2:25391009-25391014
  hypo
  liver_bileduct vs. myeloid_neoplasm,ovary
cgaaa

SEQ ID NO: 463599 - DNA, 22 bp, Homo sapiens
  chr2:25391734-25391756
  hypo
  liver_bileduct vs. myeloid_neoplasm,ovary
gcacccccgtgtggggcaggcc

SEQ ID NO: 463600 - DNA, 59 bp, Homo sapiens; identical to SEQ ID NO: 455879
  chr2:27938267-27938326
  hypo
  liver_bileduct vs. ovary

SEQ ID NO: 463601 - DNA, 52 bp, Homo sapiens; identical to SEQ ID NO: 462675
  chr2:29033285-29033337
  hypo
  liver_bileduct vs. sarcoma

SEQ ID NO: 463602 - DNA, 38 bp, Homo sapiens; identical to SEQ ID NO: 454314
  chr2:30453530-30453568
  hypo
  liver_bileduct vs. ovary,myeloid_neoplasm,thyroid, non_cancer,multiple_myeloma,uterine

SEQ ID NO: 463603 - DNA, 69 bp, Homo sapiens; identical to SEQ ID NO: 459569
  chr2:31361021-31361090
  hypo
  liver_bileduct vs. renal,breast,head_and_neck,ovary

SEQ ID NO: 463604 - DNA, 179 bp, Homo sapiens; identical to SEQ ID NO: 459570
  chr2:31361118-31361297
  hypo
  liver_bileduct vs. renal,breast,head_and_neck,ovary

SEQ ID NO: 463605 - DNA, 69 bp, Homo sapiens; identical to SEQ ID NO: 459569
  chr2:31361021-31361090
  hypo
  liver_bileduct vs. breast,ovary,head_and_neck,renal

SEQ ID NO: 463606 - DNA, 179 bp, Homo sapiens; identical to SEQ ID NO: 459570
  chr2:31361118-31361297
  hypo
  liver_bileduct vs. breast,ovary,head_and_neck,renal

SEQ ID NO: 463607 - DNA, 70 bp, Homo sapiens; identical to SEQ ID NO: 346429
  chr2:31361690-31361760
  hypo
  liver_bileduct vs. breast,ovary,head_and_neck,renal

SEQ ID NO: 463608 - DNA, 281 bp, Homo sapiens; identical to SEQ ID NO: 357157
  chr2:42721246-42721527
  hypo
  liver_bileduct vs. cervical

SEQ ID NO: 463609 - DNA, 60 bp, Homo sapiens; identical to SEQ ID NO: 462685
  chr2:47747991-47748051
  hypo
  liver_bileduct vs. multiple_myeloma, bladder_and_urothelial

SEQ ID NO: 463610 - DNA, 204 bp, Homo sapiens; identical to SEQ ID NO: 462686
  chr2:47748523-47748727
  hypo
  liver_bileduct vs. multiple_myeloma, bladder_and_urothelial

SEQ ID NO: 463611 - DNA, 276 bp, Homo sapiens; identical to SEQ ID NO: 462693
  chr2:74425444-74425720
  hypo
  liver_bileduct vs. upper_gi,colorectal,lymphoid_neoplasm, lung,pancreas_gallbladder,breast,bladder_and_urothelial, head_and_neck,ovary,cervical,sarcoma,uterine,multiple_myeloma, melanoma,anorectal,prostate

SEQ ID NO: 463612 - DNA, 396 bp, Homo sapiens; identical to SEQ ID NO: 462694
  chr2:74425790-74426186
  hypo
  liver_bileduct vs. upper_gi,colorectal,lymphoid_neoplasm, lung,pancreas_gallbladder,breast,bladder_and_urothelial, head_and_neck,ovary,cervical,sarcoma,uterine,multiple_myeloma, melanoma,anorectal,prostate

SEQ ID NO: 463613 - DNA, 228 bp, Homo sapiens; identical to SEQ ID NO: 345018
  chr2:74426214-74426442
  hypo
  liver_bileduct vs. upper_gi,colorectal,lymphoid_neoplasm, lung,pancreas_gallbladder,breast,bladder_and_urothelial, head_and_neck,ovary,cervical,sarcoma,uterine,multiple_myeloma, melanoma,anorectal,prostate

SEQ ID NO: 463614 - DNA, 937 bp, Homo sapiens; identical to SEQ ID NO: 462696
  chr2:75060920-75061857
  hypo
  liver_bileduct vs. pancreas_gallbladder,lung,upper_gi, bladder_and_urothelial,breast,melanoma,ovary,colorectal, cervical,uterine

SEQ ID NO: 463615 - DNA, 977 bp, Homo sapiens; identical to SEQ ID NO: 462697
  chr2:75061375-75062352
  hypo
  liver_bileduct vs. lung,breast,upper_gi,melanoma, colorectal,pancreas_gallbladder,head_and_neck,prostate,renal, cervical,sarcoma,ovary,uterine

SEQ ID NO: 463616 - DNA, 658 bp, Homo sapiens; identical to SEQ ID NO: 462698
  chr2:75061872-75062530
  hypo
  liver_bileduct vs. upper_gi,colorectal,lung

SEQ ID NO: 463617 - DNA, 163 bp, Homo sapiens; identical to SEQ ID NO: 349538
  chr2:87018396-87018559
  hypo
  liver_bileduct vs. uterine,myeloid_neoplasm, bladder_and_urothelial,ovary,thyroid,renal,non_cancer,melanoma

SEQ ID NO: 463618 - DNA, 43 bp, Homo sapiens; identical to SEQ ID NO: 462703
  chr2:97203334-97203377
  hypo
  liver_bileduct vs. cervical,sarcoma, bladder_and_urothelial

SEQ ID NO: 463619 - DNA, 39 bp, Homo sapiens; identical to SEQ ID NO: 346465
  chr2:97203545-97203584
  hypo
  liver_bileduct vs. cervical,sarcoma, bladder_and_urothelial

SEQ ID NO: 463620 - DNA, 97 bp, Homo sapiens; identical to SEQ ID NO: 453106
  chr2:105468467-105468564
  hypo
  liver_bileduct vs. melanoma

SEQ ID NO: 463621 - DNA, 144 bp, Homo sapiens; identical to SEQ ID NO: 345031
  chr2:105471069-105471213
  hypo
  liver_bileduct vs. melanoma,renal

SEQ ID NO: 463622 - DNA, 156 bp, Homo sapiens; identical to SEQ ID NO: 337713
  chr2:108085842-108085998
  hypo
  liver_bileduct vs. pancreas_gallbladder,colorectal, cervical,sarcoma,head_and_neck,upper_gi,lymphoid_neoplasm, bladder_and_urothelial

SEQ ID NO: 463623 - DNA, 18 bp, Homo sapiens
  chr2:108160861-108160879
  hypo
  liver_bileduct vs. lung,pancreas_gallbladder,colorectal, melanoma
cggacgtgaaaccgagtg

SEQ ID NO: 463624 - DNA, 701 bp, Homo sapiens; identical to SEQ ID NO: 362956
  chr2:108160925-108161626
  hypo
  liver_bileduct vs. lung,pancreas_gallbladder,colorectal, melanoma

SEQ ID NO: 463625 - DNA, 244 bp, Homo sapiens; identical to SEQ ID NO: 353173
  chr2:127435291-127435535
  hypo
  liver_bileduct vs. multiple_myeloma

SEQ ID NO: 463626 - DNA, 154 bp, Homo sapiens; identical to SEQ ID NO: 337763
  chr2:130512142-130512296
  hypo
  liver_bileduct vs. lymphoid_neoplasm,sarcoma, pancreas_gallbladder

SEQ ID NO: 463627 - DNA, 792 bp, Homo sapiens; identical to SEQ ID NO: 345040
  chr2:136874020-136874812
  hypo
  liver_bileduct vs. breast,uterine,ovary, lymphoid_neoplasm,prostate,multiple_myeloma,head_and_neck,renal, non_cancer,myeloid_neoplasm,thyroid,lung,anorectal

SEQ ID NO: 463628 - DNA, 588 bp, Homo sapiens; identical to SEQ ID NO: 457864
  chr2:136874345-136874933
  hypo
  liver_bileduct vs. breast,lymphoid_neoplasm,ovary, uterine,prostate,multiple_myeloma,renal,myeloid_neoplasm, non_cancer,thyroid

SEQ ID NO: 463629 - DNA, 94 bp, Homo sapiens; identical to SEQ ID NO: 457865
  chr2:136874839-136874933
  hypo
  liver_bileduct vs. lymphoid_neoplasm,breast, multiple_myeloma,ovary

SEQ ID NO: 463630 - DNA, 427 bp, Homo sapiens; identical to SEQ ID NO: 457866
  chr2:136875399-136875826
  hypo
  liver_bileduct vs. lymphoid_neoplasm,breast, multiple_myeloma,ovary

SEQ ID NO: 463631 - DNA, 483 bp, Homo sapiens; identical to SEQ ID NO: 453118
  chr2:136875399-136875882
  hypo
  liver_bileduct vs. multiple_myeloma,lymphoid_neoplasm, prostate

SEQ ID NO: 463632 - DNA, 44 bp, Homo sapiens; identical to SEQ ID NO: 453120
  chr2:136875838-136875882
  hypo
  liver_bileduct vs. multiple_myeloma

SEQ ID NO: 463633 - DNA, 189 bp, Homo sapiens; identical to SEQ ID NO: 376466
  chr2:147344896-147345085
  hypo
  liver_bileduct vs. lung

SEQ ID NO: 463634 - DNA, 51 bp, Homo sapiens; identical to SEQ ID NO: 453124
  chr2:149632592-149632643
  hypo
  liver_bileduct vs. prostate,ovary,sarcoma,thyroid,breast, non_cancer,melanoma

SEQ ID NO: 463635 - DNA, 9 bp, Homo sapiens
  chr2:160760627-160760636
  hypo
  liver_bileduct vs. upper_gi,lymphoid_neoplasm,cervical, pancreas_gallbladder,anorectal,colorectal,ovary, myeloid_neoplasm,non_cancer,head_and_neck,breast, bladder_and_urothelial,uterine,multiple_myeloma
cgggaatcg

SEQ ID NO: 463636 - DNA, 124 bp, Homo sapiens; identical to SEQ ID NO: 462727
  chr2:161264043-161264167
  hypo
  liver_bileduct vs. lung

SEQ ID NO: 463637 - DNA, 16 bp, Homo sapiens
  chr2:161264340-161264356
  hypo
  liver_bileduct vs. lung
cgccgactctcccggc

SEQ ID NO: 463638 - DNA, 204 bp, Homo sapiens; identical to SEQ ID NO: 462729
  chr2:161264419-161264623
  hypo
  liver_bileduct vs. lung

SEQ ID NO: 463639 - DNA, 118 bp, Homo sapiens; identical to SEQ ID NO: 337841
  chr2:208688685-208688803
  hypo
  liver_bileduct vs. sarcoma

SEQ ID NO: 463640 - DNA, 863 bp, Homo sapiens; identical to SEQ ID NO: 331634
  chr2:223183542-223184405
  hypo
  liver_bileduct vs. lung

SEQ ID NO: 463641 - DNA, 67 bp, Homo sapiens
  chr2:238280432-238280499
  hypo
  liver_bileduct vs. melanoma,renal,breast,colorectal, uterine,pancreas_gallbladder,bladder_and_urothelial, lymphoid_neoplasm,anorectal,cervical,prostate
cgtgatgggcgtcagcagtttctgctccaggctgggcagctcccggaaggtgctcaccgagaacaca

SEQ ID NO: 463642 - DNA, 235 bp, Homo sapiens; identical to SEQ ID NO: 347951
  chr2:238280812-238281047
  hypo
  liver_bileduct vs. melanoma,renal,breast,colorectal, uterine,pancreas_gallbladder,bladder_and_urothelial, lymphoid_neoplasm,anorectal,cervical,prostate

SEQ ID NO: 463643 - DNA, 105 bp, Homo sapiens
  chr2:239888414-239888519
  hypo
  liver_bileduct vs. melanoma
cgtggctccccgtccctccggtgaccaggtgggcactggctcctgatggttcgaagccccggtcagcccccgccatccctaaactagtgacttccacttgcgttc

SEQ ID NO: 463644 - DNA, 76 bp, Homo sapiens; identical to SEQ ID NO: 363140
  chr2:239888789-239888865
  hypo
  liver_bileduct vs. melanoma

SEQ ID NO: 463645 - DNA, 155 bp, Homo sapiens; identical to SEQ ID NO: 337958
  chr2:240567524-240567679
  hypo
  liver_bileduct vs. head_and_neck

SEQ ID NO: 463646 - DNA, 107 bp, Homo sapiens; identical to SEQ ID NO: 363158
  chr2:240672200-240672307
  hypo
  liver_bileduct vs. melanoma

SEQ ID NO: 463647 - DNA, 44 bp, Homo sapiens
  chr2:240690358-240690402
  hypo
  liver_bileduct vs. breast
cggtggctcggcaaagtcagtccctcacacatcctcgatccagg

SEQ ID NO: 463648 - DNA, 225 bp, Homo sapiens; identical to SEQ ID NO: 337963
  chr2:240725299-240725524
  hypo
  liver_bileduct vs. renal

SEQ ID NO: 463649 - DNA, 34 bp, Homo sapiens; identical to SEQ ID NO: 376653
  chr2:240809701-240809735
  hypo
  liver_bileduct vs. cervical

SEQ ID NO: 463650 - DNA, 126 bp, Homo sapiens; identical to SEQ ID NO: 455922
  chr20:3229128-3229254
  hypo
  liver_bileduct vs. upper_gi,multiple_myeloma,colorectal, cervical

SEQ ID NO: 463651 - DNA, 155 bp, Homo sapiens; identical to SEQ ID NO: 455923
  chr20:3229326-3229481
  hypo
  liver_bileduct vs. upper_gi,multiple_myeloma,colorectal, cervical

SEQ ID NO: 463652 - DNA, 32 bp, Homo sapiens; identical to SEQ ID NO: 455924
  chr20:3229526-3229558
  hypo
  liver_bileduct vs. upper_gi,multiple_myeloma,colorectal, cervical

SEQ ID NO: 463653 - DNA, 144 bp, Homo sapiens; identical to SEQ ID NO: 352449
  chr20:3229659-3229803
  hypo
  liver_bileduct vs. upper_gi,multiple_myeloma,colorectal, cervical

SEQ ID NO: 463654 - DNA, 414 bp, Homo sapiens; identical to SEQ ID NO: 347652
  chr20:4804008-4804422
  hypo
  liver_bileduct vs. melanoma,lymphoid_neoplasm, multiple_myeloma

SEQ ID NO: 463655 - DNA, 268 bp, Homo sapiens; identical to SEQ ID NO: 462763
  chr20:19193616-19193884
  hypo

SEQ ID NO: 463656 - DNA, 143 bp, Homo sapiens; identical to SEQ ID NO: 344175
  chr20:19497049-19497192
  hypo
  liver_bileduct vs. breast

SEQ ID NO: 463657 - DNA, 17 bp, Homo sapiens
  chr20:24524102-24524119
  hypo
  liver_bileduct vs. lymphoid_neoplasm,anorectal, head_and_neck,renal,uterine,prostate,ovary
gacagcctcgagtaccc

SEQ ID NO: 463658 - DNA, 8 bp, Homo sapiens
  chr20:24570974-24570982
  hypo
  liver_bileduct vs. pancreas_gallbladder, lymphoid_neoplasm,head_and_neck,uterine
cggggcca

SEQ ID NO: 463659 - DNA, 116 bp, Homo sapiens; identical to SEQ ID NO: 368294
  chr20:29873935-29874051
  hypo
  liver_bileduct vs. anorectal

SEQ ID NO: 463660 - DNA, 483 bp, Homo sapiens; identical to SEQ ID NO: 462765
  chr20:30555404-30555887
  hypo
  liver_bileduct vs. uterine,ovary,melanoma,non_cancer, anorectal,renal,bladder_and_urothelial,breast

SEQ ID NO: 463661 - DNA, 108 bp, Homo sapiens; identical to SEQ ID NO: 462766
  chr20:30555779-30555887
  hypo
  liver_bileduct vs. ovary,uterine,renal,thyroid,prostate, melanoma,non_cancer

SEQ ID NO: 463662 - DNA, 248 bp, Homo sapiens; identical to SEQ ID NO: 352477
  chr20:30556403-30556651
  hypo
  liver_bileduct vs. ovary,uterine,renal,thyroid,prostate, melanoma,non_cancer

SEQ ID NO: 463663 - DNA, 390 bp, Homo sapiens; identical to SEQ ID NO: 455936
  chr20:37433723-37434113
  hypo
  liver_bileduct vs. ovary,multiple_myeloma

SEQ ID NO: 463664 - DNA, 27 bp, Homo sapiens
  chr20:37434086-37434113
  hypo
  liver_bileduct vs. multiple_myeloma,ovary,uterine
cggggtgggggttaggaaaactatttt

SEQ ID NO: 463665 - DNA, 66 bp, Homo sapiens; identical to SEQ ID NO: 352499
  chr20:44937643-44937709
  hypo
  liver_bileduct vs. cervical

SEQ ID NO: 463666 - DNA, 64 bp, Homo sapiens
  chr20:57767480-57767544
  hypo
  liver_bileduct vs. pancreas_gallbladder, lymphoid_neoplasm,head_and_neck
cgtgcgctccacctggacgcccccagacaagtctcggcccctcttcttccactccgtccccact

SEQ ID NO: 463667 - DNA, 211 bp, Homo sapiens; identical to SEQ ID NO: 344334
  chr20:60094644-60094855
  hypo
  liver_bileduct vs. lymphoid_neoplasm,renal,head_and_neck

SEQ ID NO: 463668 - DNA, 146 bp, Homo sapiens; identical to SEQ ID NO: 344335
  chr20:60173821-60173967
  hypo
  liver_bileduct vs. lymphoid_neoplasm

SEQ ID NO: 463669 - DNA, 428 bp, Homo sapiens; identical to SEQ ID NO: 368418
  chr20:60226081-60226509
  hypo
  liver_bileduct vs. head_and_neck,renal

SEQ ID NO: 463670 - DNA, 353 bp, Homo sapiens
  chr20:60238496-60238849
  hypo
  liver_bileduct vs. renal,lymphoid_neoplasm
ttctgaaggctctgggtcgggggcatttcaggcgagggtcctagaaatgccaatgctggggatgccgccgagtgggtcagaggggccggaggaaggtgaacagggcagggggcagtggggctggattttatcccaagtgagtcgggagctgctgggacggcaggaccgggtgtgtgtgtccaagagaccatcttggctgcccaggggaagcggggactcgaggagagcagggagtgctgtcttcccggcgggagctggcggtactgaggaaggacgtgcagaaccaggcagggctgacagacgcggggtcgggggaagatcaggagctcccggtgtccaggctgcacaatgtg

SEQ ID NO: 463671 - DNA, 331 bp, Homo sapiens; identical to SEQ ID NO: 356333
  chr20:60273150-60273481
  hypo
  liver_bileduct vs. anorectal,renal,head_and_neck, lymphoid_neoplasm,cervical

SEQ ID NO: 463672 - DNA, 546 bp, Homo sapiens; identical to SEQ ID NO: 344339
  chr20:60275663-60276209
  hypo
  liver_bileduct vs. renal,pancreas_gallbladder,anorectal, head_and_neck,cervical,lymphoid_neoplasm

SEQ ID NO: 463673 - DNA, 30 bp, Homo sapiens; identical to SEQ ID NO: 455116
  chr20:60281877-60281907
  hypo
  liver_bileduct vs. renal,anorectal,head_and_neck, lymphoid_neoplasm,pancreas_gallbladder

SEQ ID NO: 463674 - DNA, 249 bp, Homo sapiens; identical to SEQ ID NO: 368422
  chr20:60313847-60314096
  hypo
  liver_bileduct vs. pancreas_gallbladder, lymphoid_neoplasm,renal

SEQ ID NO: 463675 - DNA, 12 bp, Homo sapiens
  chr20:60352666-60352678
  hypo
  liver_bileduct vs. pancreas_gallbladder,colorectal,lung, upper_gi,cervical,lymphoid_neoplasm,renal,head_and_neck, bladder_and_urothelial,breast,uterine,anorectal,sarcoma
cgcacacacgtg

SEQ ID NO: 463676 - DNA, 347 bp, Homo sapiens; identical to SEQ ID NO: 349042
  chr20:60352702-60353049
  hypo
  liver_bileduct vs. pancreas_gallbladder,colorectal,lung, upper_gi,cervical,lymphoid_neoplasm,renal,head_and_neck, bladder_and_urothelial,breast,uterine,anorectal,sarcoma

SEQ ID NO: 463677 - DNA, 350 bp, Homo sapiens; identical to SEQ ID NO: 368425
  chr20:60373188-60373538
  hypo
  liver_bileduct vs. pancreas_gallbladder,cervical, lymphoid_neoplasm,renal

SEQ ID NO: 463678 - DNA, 111 bp, Homo sapiens; identical to SEQ ID NO: 368426
  chr20:60448951-60449062
  hypo
  liver_bileduct vs. anorectal,renal,pancreas_gallbladder, lymphoid_neoplasm,prostate

SEQ ID NO: 463679 - DNA, 3 bp, Homo sapiens
  chr20:60485014-60485017
  hypo
cgt

SEQ ID NO: 463680 - DNA, 242 bp, Homo sapiens; identical to SEQ ID NO: 368427
  chr20:60485425-60485667
  hypo

SEQ ID NO: 463681 - DNA, 194 bp, Homo sapiens
  chr20:60494919-60495113
  hypo
  liver_bileduct vs. melanoma
cgcggtgattgcatggaagcttgtgattgtgtggaagcatggtatcgtgattatgtggaagcgtggtgtcacggtgattgcgtggaagcgtgttgtgattgtgtggaagcgtggtatcgcggtgattgcatggaagtgtggtgtcacagtgattgcgtggaagcgtgtcgtgattgtgtggaagcatggtatcg

SEQ ID NO: 463682 - DNA, 105 bp, Homo sapiens; identical to SEQ ID NO: 368429
  chr20:60495161-60495266
  hypo
  liver_bileduct vs. melanoma

SEQ ID NO: 463683 - DNA, 197 bp, Homo sapiens
  chr20:60992542-60992739
  hypo
  liver_bileduct vs. breast,colorectal
cgtctgtcccgtccacgcagcccccccagtcatctgcacgctcctctgtgacgtctgtcccgtccacgcaacgcccccccagtcatctgcacgctcctctgtgacgtctgttccgtccacgcaccaccccccccagtcatctgcacgctcctctgtgacgtctgtcccgtccacgcaccccccccagtcatctgcac

SEQ ID NO: 463684 - DNA, 203 bp, Homo sapiens; identical to SEQ ID NO: 368453
  chr20:60992781-60992984
  hypo
  liver_bileduct vs. breast,colorectal

SEQ ID NO: 463685 - DNA, 69 bp, Homo sapiens; identical to SEQ ID NO: 368467
  chr20:61665975-61666044
  hypo

SEQ ID NO: 463686 - DNA, 441 bp, Homo sapiens
  chr20:61674884-61675325
  hypo
  liver_bileduct vs. thyroid
cgatgcgcatcatggtcggggctgttttggggccgtttccaacaccagcagcgtcgtggctccacagcagcaaggcttcctgaaggaagaagggggcttcgcagtatagttcgagtcgggctctgtttctttccatcccaaacacatagagacgaccaaggccctgatcccaaaagaagaacccaggctgccggcgatcctggggacaacgatgttaactcagggacaggcgcagtctctggaccaggccaggtcgtggtgcacacactcgatctctgcagcgtttcccacatgggcactgcggaccgggaatgtcaggggaacgcgggcaccgtggaccgggaatgccaggggatcgtgggcaccgccgaccgggaatgtcaggggaacacgggcactgccgaccgggaatgtcaggggaacgggggcactgcagaccgg

SEQ ID NO: 463687 - DNA, 78 bp, Homo sapiens; identical to SEQ ID NO: 383099
  chr20:61675700-61675778
  hypo
  liver_bileduct vs. thyroid

SEQ ID NO: 463688 - DNA, 5 bp, Homo sapiens
  chr20:61695613-61695618
  hypo
  liver_bileduct vs. prostate,anorectal,renal,sarcoma
cgggt

SEQ ID NO: 463689 - DNA, 248 bp, Homo sapiens; identical to SEQ ID NO: 459641
  chr20:61810310-61810558
  hypo
  liver_bileduct vs. melanoma

SEQ ID NO: 463690 - DNA, 234 bp, Homo sapiens; identical to SEQ ID NO: 456881
  chr20:62031374-62031608
  hypo
  liver_bileduct vs. lymphoid_neoplasm,cervical, pancreas_gallbladder,renal,anorectal

SEQ ID NO: 463691 - DNA, 264 bp, Homo sapiens; identical to SEQ ID NO: 352532
  chr20:62461639-62461903
  hypo
  liver_bileduct vs. breast

SEQ ID NO: 463692 - DNA, 136 bp, Homo sapiens; identical to SEQ ID NO: 462780
  chr21:40032971-40033107
  hypo

SEQ ID NO: 463693 - DNA, 151 bp, Homo sapiens; identical to SEQ ID NO: 344488
  chr21:42593821-42593972
  hypo
  liver_bileduct vs. upper_gi

SEQ ID NO: 463694 - DNA, 91 bp, Homo sapiens
  chr21:46035068-46035159
  hypo
cggcgcatgtacgtaagcggcactgtttgttaccatgaaaaattagaaacaacctaaatatccatccacgagggaatggaggcgaatggag

SEQ ID NO: 463695 - DNA, 18 bp, Homo sapiens
  chr21:46035260-46035278
  hypo
gccgcacaggtgccaagc

SEQ ID NO: 463696 - DNA, 6 bp, Homo sapiens
  chr21:47026394-47026400
  hypo
  liver_bileduct vs. pancreas_gallbladder,renal,colorectal, cervical,lymphoid_neoplasm
cgctgc

SEQ ID NO: 463697 - DNA, 3 bp, Homo sapiens
  chr21:47026819-47026822
  hypo
  liver_bileduct vs. pancreas_gallbladder,renal,colorectal, cervical,lymphoid_neoplasm
ggc

SEQ ID NO: 463698 - DNA, 143 bp, Homo sapiens; identical to SEQ ID NO: 453174
  chr21:47063290-47063433
  hypo
  liver_bileduct vs. lung,melanoma,ovary,non_cancer, prostate

SEQ ID NO: 463699 - DNA, 137 bp, Homo sapiens; identical to SEQ ID NO: 453177
  chr22:22862472-22862609
  hypo
  liver_bileduct vs. uterine,prostate,myeloid_neoplasm, multiple_myeloma,non_cancer,lymphoid_neoplasm,melanoma

SEQ ID NO: 463700 - DNA, 261 bp, Homo sapiens; identical to SEQ ID NO: 383542
  chr22:45277521-45277782
  hypo

SEQ ID NO: 463701 - DNA, 177 bp, Homo sapiens; identical to SEQ ID NO: 462796
  chr22:45405768-45405945
  hypo
  liver_bileduct vs. melanoma,sarcoma

SEQ ID NO: 463702 - DNA, 177 bp, Homo sapiens; identical to SEQ ID NO: 462796
  chr22:45405768-45405945
  hypo
  liver_bileduct vs. melanoma

SEQ ID NO: 463703 - DNA, 178 bp, Homo sapiens; identical to SEQ ID NO: 362097
  chr22:45406385-45406563
  hypo
  liver_bileduct vs. melanoma

SEQ ID NO: 463704 - DNA, 235 bp, Homo sapiens; identical to SEQ ID NO: 456947
  chr22:48027392-48027627
  hypo
  liver_bileduct vs. lymphoid_neoplasm

SEQ ID NO: 463705 - DNA, 22 bp, Homo sapiens
  chr22:48027655-48027677
  hypo
  liver_bileduct vs. lymphoid_neoplasm
gtgtcagtgtgcgtgtgcatgg

SEQ ID NO: 463706 - DNA, 41 bp, Homo sapiens; identical to SEQ ID NO: 368872
  chr22:48027786-48027827
  hypo
  liver_bileduct vs. lymphoid_neoplasm

SEQ ID NO: 463707 - DNA, 110 bp, Homo sapiens; identical to SEQ ID NO: 344850
  chr22:48280063-48280173
  hypo
  liver_bileduct vs. breast,prostate,renal,uterine, lymphoid_neoplasm

SEQ ID NO: 463708 - DNA, 302 bp, Homo sapiens; identical to SEQ ID NO: 344854
  chr22:49042371-49042673
  hypo
  liver_bileduct vs. pancreas_gallbladder,colorectal

SEQ ID NO: 463709 - DNA, 46 bp, Homo sapiens
  chr22:49146962-49147008
  hypo
  liver_bileduct vs. pancreas_gallbladder
cgtacaatatcttgaacatgcttcttccaatgggttttgtttccca

SEQ ID NO: 463710 - DNA, 106 bp, Homo sapiens
  chr22:49637423-49637529
  hypo
cgcgactccagctccttccgaggaggtcactgagctttgcacgatgccggctccttctcaggaggtcaccagagcttctcgtgactccagccccttcccaggaggt

SEQ ID NO: 463711 - DNA, 107 bp, Homo sapiens; identical to SEQ ID NO: 368880
  chr22:49637781-49637888
  hypo

SEQ ID NO: 463712 - DNA, 279 bp, Homo sapiens; identical to SEQ ID NO: 368881
  chr22:49693555-49693834
  hypo
  liver_bileduct vs. renal

SEQ ID NO: 463713 - DNA, 298 bp, Homo sapiens; identical to SEQ ID NO: 344861
  chr22:49729101-49729399
  hypo
  liver_bileduct vs. colorectal,lymphoid_neoplasm,renal, anorectal,pancreas_gallbladder

SEQ ID NO: 463714 - DNA, 108 bp, Homo sapiens; identical to SEQ ID NO: 456950
  chr22:49967872-49967980
  hypo
  liver_bileduct vs. lymphoid_neoplasm,renal

SEQ ID NO: 463715 - DNA, 60 bp, Homo sapiens
  chr22:49980101-49980161
  hypo
  liver_bileduct vs. lymphoid_neoplasm
cgcaggctctcgtgtcagggcgcacagccatgtgatgactccacattcactcagtgctca

SEQ ID NO: 463716 - DNA, 239 bp, Homo sapiens
  chr22:50002819-50003058
  hypo
  liver_bileduct vs. pancreas_gallbladder, lymphoid_neoplasm,renal,anorectal,colorectal,head_and_neck, non_cancer,prostate,uterine,thyroid
agccggtgtcctcgggagccggtggtggggctccctgaaggtcctagaaatccggcggcacagggacgtgcaggcggatgagctggagggagattctgcttttctcagttcctagtgagaagtcagagcccctctgaaagacagacagtcatctaggtcccatctcaggagaaagtggaaccgcccgggccgtgcctgctagaatcaagtgcagttttcacaagaccttgctggaaact

SEQ ID NO: 463717 - DNA, 211 bp, Homo sapiens
  chr22:50008973-50009184
  hypo
  liver_bileduct vs. colorectal,head_and_neck, lymphoid_neoplasm,renal,pancreas_gallbladder,uterine,prostate, upper_gi,thyroid,lung,non_cancer
ctctgggcagcctggctagagctctgcccacggcacgtcagcccctccacttccgtctgaaaggtgccggccgcgtgtgtcacgcgagaccagtcctgcacgtggatctggacggggcaactgcgcgaagggtcatgaatcccgccggccagggaggatcgtctcctgtgcagaatgaggtgcggtcagaacacggcagaagctgggagct

SEQ ID NO: 463718 - DNA, 290 bp, Homo sapiens
  chr22:50009330-50009620
  hypo
  liver_bileduct vs. colorectal,head_and_neck, lymphoid_neoplasm,renal,pancreas_gallbladder,uterine,prostate, upper_gi,thyroid,lung,non_cancer
aacccggaaacacctcgacgcggccggtcaatctgaatccccagaaaacaccgcggcgcggcaggtcagtccgaacccggaaacaccgcggcgcggcctgtcaatctgaacccggaaacaccgcagcgtggcctgtcagtctgaacccggaaacacctcgacgcggccggtcaatctgaatccccggaaaacactgcggcgcggcaggtcaatccaaacccgggacatcattgctaccagggcggaggagaatacacgcaaaatataccagggcggaggggaatacacgg

SEQ ID NO: 463719 - DNA, 48 bp, Homo sapiens; identical to SEQ ID NO: 346291
  chr22:50009663-50009711
  hypo
  liver_bileduct vs. colorectal,head_and_neck, lymphoid_neoplasm,renal,pancreas_gallbladder,uterine,prostate, upper_gi,thyroid,lung,non_cancer

SEQ ID NO: 463720 - DNA, 271 bp, Homo sapiens; identical to SEQ ID NO: 455200
  chr3:13611739-13612010
  hypo
  liver_bileduct vs. renal

SEQ ID NO: 463721 - DNA, 186 bp, Homo sapiens; identical to SEQ ID NO: 363219
  chr3:13612341-13612527
  hypo
  liver_bileduct vs. renal

SEQ ID NO: 463722 - DNA, 92 bp, Homo sapiens; identical to SEQ ID NO: 331702
  chr3:14443834-14443926
  hypo
  liver_bileduct vs. upper_gi,lung

SEQ ID NO: 463723 - DNA, 580 bp, Homo sapiens; identical to SEQ ID NO: 462802
  chr3:14443996-14444576
  hypo
  liver_bileduct vs. lung,upper_gi

SEQ ID NO: 463724 - DNA, 234 bp, Homo sapiens; identical to SEQ ID NO: 453203
  chr3:49906737-49906971
  hypo
  liver_bileduct vs. prostate,multiple_myeloma,uterine, sarcoma,ovary,non_cancer,head_and_neck,lung,thyroid,breast

SEQ ID NO: 463725 - DNA, 49 bp, Homo sapiens; identical to SEQ ID NO: 349768
  chr3:49907379-49907428
  hypo
  liver_bileduct vs. prostate,multiple_myeloma,uterine, sarcoma,ovary,non_cancer,head_and_neck,lung,thyroid,breast

SEQ ID NO: 463726 - DNA, 12 bp, Homo sapiens
  chr3:101497830-101497842
  hypo
  liver_bileduct vs. lung,lymphoid_neoplasm, bladder_and_urothelial,melanoma
cgtccgaagttc

SEQ ID NO: 463727 - DNA, 299 bp, Homo sapiens; identical to SEQ ID NO: 349796
  chr3:101497996-101498295
  hypo
  liver_bileduct vs. lung,lymphoid_neoplasm, bladder_and_urothelial,melanoma

SEQ ID NO: 463728 - DNA, 98 bp, Homo sapiens; identical to SEQ ID NO: 349797
  chr3:101498512-101498610
  hypo
  liver_bileduct vs. lung

SEQ ID NO: 463729 - DNA, 199 bp, Homo sapiens
  chr3:106362771-106362970
  hypo
  liver_bileduct vs. lung,pancreas_gallbladder
cggagggtgcgctgggtcccccagcactgccggcccaccttcaccatgctcgaaatctccccgggcctcagctgctgcctcgcggggcaggactcgggacctgcagcccgccatgctggacaaccttccctctgccactgtgggcttgcgtgcggcctgagcctctctgacgggtgccaccccctgctcccccgcgccc

SEQ ID NO: 463730 - DNA, 152 bp, Homo sapiens; identical to SEQ ID NO: 462816
  chr3:112930655-112930807
  hypo

SEQ ID NO: 463731 - DNA, 132 bp, Homo sapiens
  chr3:129982901-129983033
  hypo
  liver_bileduct vs. pancreas_gallbladder, lymphoid_neoplasm,upper_gi
cgagggcttccacttgaccacctatggcaaccggaagcagatgcagagacatgtgcgcgaggcttcagcccgccccttacagggaaccgccccccctgggccacgccctggagtggacgctggagaatgtgc

SEQ ID NO: 463732 - DNA, 237 bp, Homo sapiens; identical to SEQ ID NO: 363341
  chr3:129983103-129983340
  hypo
  liver_bileduct vs. pancreas_gallbladder, lymphoid_neoplasm,upper_gi

SEQ ID NO: 463733 - DNA, 13 bp, Homo sapiens
  chr3:138679565-138679578
  hypo
  liver_bileduct vs. thyroid,multiple_myeloma
cgggcacagacgc

SEQ ID NO: 463734 - DNA, 995 bp, Homo sapiens; identical to SEQ ID NO: 462820
  chr3:140660238-140661233
  hypo
  liver_bileduct vs. upper_gi,lung

SEQ ID NO: 463735 - DNA, 986 bp, Homo sapiens; identical to SEQ ID NO: 346597
  chr3:140660747-140661733
  hypo
  liver_bileduct vs. upper_gi,lung,pancreas_gallbladder, head_and_neck,breast,melanoma,ovary,colorectal, lymphoid_neoplasm,renal

SEQ ID NO: 463736 - DNA, 15 bp, Homo sapiens
  chr3:142837817-142837832
  hypo
  liver_bileduct vs. renal,ovary,multiple_myeloma, myeloid_neoplasm,uterine,lymphoid_neoplasm,non_cancer
cgggacaagtatttt

SEQ ID NO: 463737 - DNA, 86 bp, Homo sapiens; identical to SEQ ID NO: 458017
  chr3:150802802-150802888
  hypo
  liver_bileduct vs. breast,lung,prostate

SEQ ID NO: 463738 - DNA, 581 bp, Homo sapiens; identical to SEQ ID NO: 338253
  chr3:180546449-180547030
  hypo

SEQ ID NO: 463739 - DNA, 37 bp, Homo sapiens; identical to SEQ ID NO: 462827
  chr3:181430331-181430368
  hypo
  liver_bileduct vs. lung

SEQ ID NO: 463740 - DNA, 253 bp, Homo sapiens; identical to SEQ ID NO: 462828
  chr3:181430443-181430696
  hypo
  liver_bileduct vs. lung

SEQ ID NO: 463741 - DNA, 11 bp, Homo sapiens
  chr3:184870185-184870196
  hypo
  liver_bileduct vs. anorectal,sarcoma,breast
cgaggcgcccc

SEQ ID NO: 463742 - DNA, 302 bp, Homo sapiens; identical to SEQ ID NO: 462834
  chr3:184870307-184870609
  hypo
  liver_bileduct vs. anorectal,sarcoma,breast

SEQ ID NO: 463743 - DNA, 291 bp, Homo sapiens; identical to SEQ ID NO: 453235
  chr3:186079331-186079622
  hypo
  liver_bileduct vs. myeloid_neoplasm

SEQ ID NO: 463744 - DNA, 561 bp, Homo sapiens; identical to SEQ ID NO: 462837
  chr4:2060916-2061477
  hypo
  liver_bileduct vs. breast

SEQ ID NO: 463745 - DNA, 198 bp, Homo sapiens; identical to SEQ ID NO: 462838
  chr4:2061279-2061477
  hypo
  liver_bileduct vs. uterine,thyroid

SEQ ID NO: 463746 - DNA, 173 bp, Homo sapiens; identical to SEQ ID NO: 353484
  chr4:8615920-8616093
  hypo
  liver_bileduct vs. lymphoid_neoplasm

SEQ ID NO: 463747 - DNA, 120 bp, Homo sapiens; identical to SEQ ID NO: 377124
  chr4:9523558-9523678
  hypo
  liver_bileduct vs. pancreas_gallbladder

SEQ ID NO: 463748 - DNA, 25 bp, Homo sapiens
  chr4:10459327-10459352
  hypo
  liver_bileduct vs. sarcoma,anorectal,prostate
gggtcccgcggagggcggccttggc

SEQ ID NO: 463749 - DNA, 96 bp, Homo sapiens; identical to SEQ ID NO: 353492
  chr4:42317342-42317438
  hypo
  liver_bileduct vs. pancreas_gallbladder,upper_gi

SEQ ID NO: 463750 - DNA, 958 bp, Homo sapiens; identical to SEQ ID NO: 332106
  chr4:56914942-56915900
  hypo
  liver_bileduct vs. upper_gi

SEQ ID NO: 463751 - DNA, 29 bp, Homo sapiens
  chr4:57180896-57180925
  hypo
  liver_bileduct vs. upper_gi
cgcacctggaggactggagggggcagctc

SEQ ID NO: 463752 - DNA, 894 bp, Homo sapiens
  chr4:57180972-57181866
  hypo
  liver_bileduct vs. upper_gi
cctgaaacccgaaggacaaagagaacactccgaggagccaggtatttgcgaggagcagaacccagaggccgagcggcgaagagagcagcagggaaggagcggggatttccagggggccgatcgtcctgggcccgaggaaaagagagaagaaggggacacggagcctctcctgaaacaagaggggccggtggaagccgcgcagcctccggtggagaggaaagaagccgccgcccttgaacaaggccgcaaggtggaggagctgcggtggcaggaggtggacgagagacagaccatgccccggccctacacgttccaggtgtcctccggagggaagcagattctctttcccaaagtcaacctgagccccgtgacgcccgcaaaggacacggggctcaccgctgctccccaggaaccaaaggcccccaaagccagcccagtccagcacgccctaccgtcgtccctgagcgttccccacaccgccattctggtcacgggcgcgcagctctgtggcccggcagtcaacctgagccagatcaaggacaccgcgtgcaagtccctcctgggcttggaggagaagaagcacgcggaagccccagctggggagaaccctccccgaggccccggcgacgcgagggcgggcagcgggaaggctaagccccgccaggagtctcccagcagcgcgtccgcactcgcagaatgggcttccattcggtccagaatcctgaagaacgcagagagtgacccgcgcagcagcgagagggaccagttgaggcccggtgatgagtccactcccaggggccggtgtgattcccgcgggaaccaacggaagactccgccagtcaatgcaaagttctctattatgcctgcctggcagaaattttccgatggtggcac

SEQ ID NO: 463753 - DNA, 768 bp, Homo sapiens
  chr4:57181416-57182184
  hypo
  liver_bileduct vs. pancreas_gallbladder,upper_gi
cgccctaccgtcgtccctgagcgttccccacaccgccattctggtcacgggcgcgcagctctgtggcccggcagtcaacctgagccagatcaaggacaccgcgtgcaagtccctcctgggcttggaggagaagaagcacgcggaagccccagctggggagaaccctccccgaggccccggcgacgcgagggcgggcagcgggaaggctaagccccgccaggagtctcccagcagcgcgtccgcactcgcagaatgggcttccattcggtccagaatcctgaagaacgcagagagtgacccgcgcagcagcgagagggaccagttgaggcccggtgatgagtccactcccaggggccggtgtgattcccgcgggaaccaacggaagactccgccagtcaatgcaaagttctctattatgcctgcctggcagaaattttccgatggtggcacggagacctccaaacagagcacggaagctgaaagcatacgaaaaagacccatgctgggacccagcgaagagacagccccccagcctcctcctgctggtgttcgcgagctcgggaagggtccggagaagtcggagatgcaccgggagcccgcagacaccaccgagggatgcaaatttgccaaagacctcccgtctttccttgtcccaagccttccttaccctccgcagaaagtggtggcccacacagagttcacgacctcgtcggacagcgagactgcaaacgggatagcaaagccagaccctgtgatgccaggtggaga

SEQ ID NO: 463754 - DNA, 74 bp, Homo sapiens
  chr4:57182262-57182336
  hypo
  liver_bileduct vs. pancreas_gallbladder,upper_gi
acagaagaagaagaagaggcacagcagcaccggagacagcgcggatgcagggccgcctgcagcggggagcgctc

SEQ ID NO: 463755 - DNA, 298 bp, Homo sapiens
  chr4:57181886-57182184
  hypo
  liver_bileduct vs. upper_gi,lung,bladder_and_urothelial
cggaagctgaaagcatacgaaaaagacccatgctgggacccagcgaagagacagccccccagcctcctcctgctggtgttcgcgagctcgggaagggtccggagaagtcggagatgcaccgggagcccgcagacaccaccgagggatgcaaatttgccaaagacctcccgtctttccttgtcccaagccttccttaccctccgcagaaagtggtggcccacacagagttcacgacctcgtcggacagcgagactgcaaacgggatagcaaagccagaccctgtgatgccaggtggaga

SEQ ID NO: 463756 - DNA, 510 bp, Homo sapiens; identical to SEQ ID NO: 353496
  chr4:57182262-57182772
  hypo
  liver_bileduct vs. upper_gi,lung,bladder_and_urothelial

SEQ ID NO: 463757 - DNA, 94 bp, Homo sapiens; identical to SEQ ID NO: 458065
  chr4:57687545-57687639
  hypo
  liver_bileduct vs. lung,ovary,anorectal

SEQ ID NO: 463758 - DNA, 27 bp, Homo sapiens
  chr4:81307585-81307612
  hypo
  liver_bileduct vs. bladder_and_urothelial, pancreas_gallbladder,head_and_neck
cgggtcaggcaagggggtcaccacctt

SEQ ID NO: 463759 - DNA, 61 bp, Homo sapiens; identical to SEQ ID NO: 461075
  chr4:111543907-111543968
  hypo
  liver_bileduct vs. colorectal

SEQ ID NO: 463760 - DNA, 243 bp, Homo sapiens; identical to SEQ ID NO: 462856
  chr4:113436585-113436828
  hypo
  liver_bileduct vs. sarcoma,ovary,thyroid, myeloid_neoplasm,uterine,non_cancer,breast,prostate, head_and_neck,bladder_and_urothelial,renal

SEQ ID NO: 463761 - DNA, 243 bp, Homo sapiens; identical to SEQ ID NO: 462856
  chr4:113436585-113436828
  hypo
  liver_bileduct vs. breast,renal,ovary,sarcoma,prostate, anorectal,head_and_neck,lung,uterine,myeloid_neoplasm, non_cancer

SEQ ID NO: 463762 - DNA, 113 bp, Homo sapiens; identical to SEQ ID NO: 462859
  chr4:113438278-113438391
  hypo
  liver_bileduct vs. bladder_and_urothelial,sarcoma, uterine

SEQ ID NO: 463763 - DNA, 215 bp, Homo sapiens; identical to SEQ ID NO: 349969
  chr4:115520945-115521160
  hypo
  liver_bileduct vs. upper_gi

SEQ ID NO: 463764 - DNA, 841 bp, Homo sapiens; identical to SEQ ID NO: 462869
  chr4:174089737-174090578
  hypo
  liver_bileduct vs. lung

SEQ ID NO: 463765 - DNA, 999 bp, Homo sapiens; identical to SEQ ID NO: 350012
  chr4:174090080-174091079
  hypo
  liver_bileduct vs. lung,upper_gi,pancreas_gallbladder

SEQ ID NO: 463766 - DNA, 837 bp, Homo sapiens; identical to SEQ ID NO: 462871
  chr4:174090585-174091422
  hypo
  liver_bileduct vs. lung

SEQ ID NO: 463767 - DNA, 482 bp, Homo sapiens; identical to SEQ ID NO: 338580
  chr4:189552385-189552867
  hypo
  liver_bileduct vs. pancreas_gallbladder,upper_gi, melanoma,head_and_neck,colorectal,renal,lung

SEQ ID NO: 463768 - DNA, 203 bp, Homo sapiens; identical to SEQ ID NO: 338581
  chr4:189717765-189717968
  hypo
  liver_bileduct vs. bladder_and_urothelial, pancreas_gallbladder,lung,head_and_neck

SEQ ID NO: 463769 - DNA, 183 bp, Homo sapiens; identical to SEQ ID NO: 338582
  chr4:190345382-190345565
  hypo
  liver_bileduct vs. head_and_neck

SEQ ID NO: 463770 - DNA, 702 bp, Homo sapiens; identical to SEQ ID NO: 338583
  chr4:190462487-190463189
  hypo
  liver_bileduct vs. head_and_neck,pancreas_gallbladder, colorectal,lymphoid_neoplasm,breast,uterine

SEQ ID NO: 463771 - DNA, 337 bp, Homo sapiens; identical to SEQ ID NO: 377239
  chr5:110572-110909
  hypo

SEQ ID NO: 463772 - DNA, 277 bp, Homo sapiens; identical to SEQ ID NO: 338660
  chr5:1702104-1702381
  hypo
  liver_bileduct vs. renal,lymphoid_neoplasm,upper_gi, sarcoma,colorectal,anorectal,head_and_neck,lung

SEQ ID NO: 463773 - DNA, 54 bp, Homo sapiens
  chr5:1787325-1787379
  hypo
  liver_bileduct vs. melanoma
cgcccaggctgctgggcaggctgaggctgggggaagcagagctcctgggcaggt

SEQ ID NO: 463774 - DNA, 174 bp, Homo sapiens; identical to SEQ ID NO: 377326
  chr5:1787418-1787592
  hypo
  liver_bileduct vs. melanoma

SEQ ID NO: 463775 - DNA, 161 bp, Homo sapiens
  chr5:1922827-1922988
  hypo
  liver_bileduct vs. upper_gi
cgctgctgctcagggacccctcctcccattctggaaaccatcggcaaaacctcagcagaccacggggccattactgtgggctccggtttccagccactgcacttccagacttttctcttcggagccagtgggaatttagcaaatgactggatggggtctgg

SEQ ID NO: 463776 - DNA, 48 bp, Homo sapiens; identical to SEQ ID NO: 363720
  chr5:1923074-1923122
  hypo
  liver_bileduct vs. upper_gi

SEQ ID NO: 463777 - DNA, 130 bp, Homo sapiens
  chr5:1951382-1951512
  hypo
  liver_bileduct vs. pancreas_gallbladder
cgccgtctgctgtgcgtgcgccgtctgctgtgcgtgagtcgtctgctgtgcgtgtgccgtctgctgtgcgtgagtcgtctgctgtgcgtgtgtcgtttgctgtgcgtgtgccgtctgctgtgcgtgtgtc

SEQ ID NO: 463778 - DNA, 146 bp, Homo sapiens; identical to SEQ ID NO: 210032
  chr5:1951710-1951856
  hypo
  liver_bileduct vs. pancreas_gallbladder

SEQ ID NO: 463779 - DNA, 2 bp, Homo sapiens
  chr5:2180343-2180345
  hypo
  liver_bileduct vs. pancreas_gallbladder,renal, head_and_neck
cg

SEQ ID NO: 463780 - DNA, 23 bp, Homo sapiens
  chr5:2261209-2261232
  hypo
  liver_bileduct vs. renal,anorectal,prostate, lymphoid_neoplasm,non_cancer,uterine,breast
cggaaagcctgctctccgggtgg

SEQ ID NO: 463781 - DNA, 298 bp, Homo sapiens
  chr5:2261313-2261611
  hypo
  liver_bileduct vs. renal,anorectal,prostate, lymphoid_neoplasm,non_cancer,uterine,breast
cctccagtgaggactcccaggggaccgagttttccacctgcgttctagatgttctccgtgaaagcatcacgtggtgtcccggtgaggggcctggctgagtgggcatcggcttgagcgcctggagcttgctggagaagagactcatgggcaccaccgggcccaccatgcagacttcagggaaagagagcagccggaatgcgttttaaatcctgcctgagagcgtggatgctacaggactcctggcgtggggaacccggcatctgtgtatgtgcccgtgggcatgtggtcagcgaggcaa

SEQ ID NO: 463782 - DNA, 418 bp, Homo sapiens; identical to SEQ ID NO: 338677
  chr5:2371462-2371880
  hypo
  liver_bileduct vs. renal,lymphoid_neoplasm,anorectal, colorectal,head_and_neck,pancreas_gallbladder,uterine

SEQ ID NO: 463783 - DNA, 133 bp, Homo sapiens
  chr5:2412076-2412209
  hypo
cgctctggccggattcggccattctcatggaaaccaggggcccttcccagggcgcctcctcacttcatctccaagctgagaggcaattagtaggagtccgtctcagagtttctggagcctcagccatgatggc

SEQ ID NO: 463784 - DNA, 51 bp, Homo sapiens; identical to SEQ ID NO: 377341
  chr5:2412238-2412289
  hypo

SEQ ID NO: 463785 - DNA, 25 bp, Homo sapiens
  chr5:2541643-2541668
  hypo
  liver_bileduct vs. lymphoid_neoplasm,uterine
tattgtgtgccctgtgtgcatactc

SEQ ID NO: 463786 - DNA, 37 bp, Homo sapiens
  chr5:3221011-3221048
  hypo
  liver_bileduct vs. pancreas_gallbladder,head_and_neck, cervical,lymphoid_neoplasm
cggcgcactgtgctcctggtcctggcgcgagcatctc

SEQ ID NO: 463787 - DNA, 142 bp, Homo sapiens; identical to SEQ ID NO: 353590
  chr5:3221181-3221323
  hypo
  liver_bileduct vs. pancreas_gallbladder,head_and_neck, cervical,lymphoid_neoplasm

SEQ ID NO: 463788 - DNA, 317 bp, Homo sapiens; identical to SEQ ID NO: 338683
  chr5:3282952-3283269
  hypo
  liver_bileduct vs. pancreas_gallbladder

SEQ ID NO: 463789 - DNA, 216 bp, Homo sapiens; identical to SEQ ID NO: 338687
  chr5:3627893-3628109
  hypo
  liver_bileduct vs. lymphoid_neoplasm,head_and_neck, anorectal

SEQ ID NO: 463790 - DNA, 114 bp, Homo sapiens
  chr5:3740590-3740704
  hypo
  liver_bileduct vs. lymphoid_neoplasm,renal,cervical, colorectal,uterine,thyroid,non_cancer
cggtgtgaggtgaccgcgtgctgtgctctgcagggccaggcctagaccccgacgtcccagtcccagtctctgtctgcccaagtgggcgggagaatctgggggagggagggagag

SEQ ID NO: 463791 - DNA, 22 bp, Homo sapiens
  chr5:3741017-3741039
  hypo
  liver_bileduct vs. lymphoid_neoplasm,renal,cervical, colorectal,uterine,thyroid,non_cancer
gacccaccccagcgtgcctacc

SEQ ID NO: 463792 - DNA, 328 bp, Homo sapiens
  chr5:3761240-3761568
  hypo
  liver_bileduct vs. colorectal,renal,head_and_neck, anorectal,upper_gi,uterine,lymphoid_neoplasm, pancreas_gallbladder,bladder_and_urothelial
gaaaagctgtgtggaaaaacccgactgcgactttcaagcttgtgcttcacaacccaggagccgtgcattatgtccatgtgttcagatgcaagatgctcagaccccaggaaaaagggaattcggtgtaaagaaaaaaggactcttagcatggtccagtattaggacagtaacaccctgtgtgtgtgcacgtgccctccctccatctccctggcctttgcgtctctgtgtgggtgcacatgccctccctcctccctccatctccctggcctttgcgtctctgagtgggtgcacatgcgctccctccatctccgtggcctttgcgcctctg

SEQ ID NO: 463793 - DNA, 301 bp, Homo sapiens; identical to SEQ ID NO: 353596
  chr5:3761623-3761924
  hypo
  liver_bileduct vs. colorectal,renal,head_and_neck, anorectal,upper_gi,uterine,lymphoid_neoplasm, pancreas_gallbladder,bladder_and_urothelial

SEQ ID NO: 463794 - DNA, 130 bp, Homo sapiens; identical to SEQ ID NO: 338690
  chr5:3781386-3781516
  hypo
  liver_bileduct vs. head_and_neck,colorectal

SEQ ID NO: 463795 - DNA, 147 bp, Homo sapiens; identical to SEQ ID NO: 377357
  chr5:3865172-3865319
  hypo
  liver_bileduct vs. anorectal

SEQ ID NO: 463796 - DNA, 208 bp, Homo sapiens; identical to SEQ ID NO: 353598
  chr5:3932149-3932357
  hypo
  liver_bileduct vs. lymphoid_neoplasm,renal,colorectal

SEQ ID NO: 463797 - DNA, 521 bp, Homo sapiens
  chr5:4144516-4145037
  hypo
  liver_bileduct vs. lymphoid_neoplasm,head_and_neck, pancreas_gallbladder,anorectal,colorectal,uterine,breast
acacagctaagtgtgttctgtgtggcatgctctagtgtgcgcatggaatgctgactgcacagcttactacgtgtgttctgtgttccgtgctctcacatgcatgcggaattctgacggcacagcttactaagtgtgttcggtatgccacacacttgtgtgcatgcggaatgctgactgcatagcttactatacgtgttctgtgtgccccactctcctgtgcatgtggaatgctgactgcatagcttactatgtatgctctgtgggctgtgctctcatgtgcacgtggaatgctgaccgcacagcttactaagggcgtcctacgtgcggtgctctcatgcacatgcacaatgccgatggcacagcttactaagtgtgtactgtgtgctctgctctcgtgtgcacgtggaatgctgactgcacagcttactacatgtgttctttgtgccacgctctcatgtgcgtgcacaatgatgactgcacagcttactacgtgtgttctgtgtgccgtgctcttgtgtgca

SEQ ID NO: 463798 - DNA, 146 bp, Homo sapiens; identical to SEQ ID NO: 363742
  chr5:4145066-4145212
  hypo
  liver_bileduct vs. lymphoid_neoplasm,head_and_neck, pancreas_gallbladder,anorectal,colorectal,uterine,breast

SEQ ID NO: 463799 - DNA, 53 bp, Homo sapiens; identical to SEQ ID NO: 462874
  chr5:17217629-17217682
  hypo
  liver_bileduct vs. sarcoma,lymphoid_neoplasm

SEQ ID NO: 463800 - DNA, 337 bp, Homo sapiens; identical to SEQ ID NO: 338716
  chr5:17354400-17354737
  hypo

SEQ ID NO: 463801 - DNA, 799 bp, Homo sapiens; identical to SEQ ID NO: 350063
  chr5:41870076-41870875
  hypo
  liver_bileduct vs. upper_gi,lung,head_and_neck

SEQ ID NO: 463802 - DNA, 217 bp, Homo sapiens; identical to SEQ ID NO: 462887
  chr5:72744481-72744698
  hypo
  liver_bileduct vs. colorectal

SEQ ID NO: 463803 - DNA, 38 bp, Homo sapiens; identical to SEQ ID NO: 456033
  chr5:77268330-77268368
  hypo
  liver_bileduct vs. thyroid,myeloid_neoplasm,ovary, non_cancer

SEQ ID NO: 463804 - DNA, 42 bp, Homo sapiens; identical to SEQ ID NO: 462893
  chr5:79865662-79865704
  hypo
  liver_bileduct vs. uterine,ovary,sarcoma,prostate,lung

SEQ ID NO: 463805 - DNA, 91 bp, Homo sapiens; identical to SEQ ID NO: 462894
  chr5:79865744-79865835
  hypo
  liver_bileduct vs. uterine,ovary,sarcoma,prostate,lung

SEQ ID NO: 463806 - DNA, 31 bp, Homo sapiens; identical to SEQ ID NO: 462895
  chr5:79865673-79865704
  hypo
  liver_bileduct vs. sarcoma,prostate,uterine,thyroid

SEQ ID NO: 463807 - DNA, 91 bp, Homo sapiens; identical to SEQ ID NO: 462894
  chr5:79865744-79865835
  hypo
  liver_bileduct vs. sarcoma,prostate,uterine,thyroid

SEQ ID NO: 463808 - DNA, 4 bp, Homo sapiens
  chr5:88179111-88179115
  hypo
  liver_bileduct vs. lung,renal,melanoma,lymphoid_neoplasm, breast,uterine,sarcoma,ovary,prostate,bladder_and_urothelial
gctc

SEQ ID NO: 463809 - DNA, 214 bp, Homo sapiens; identical to SEQ ID NO: 462907
  chr5:114506308-114506522
  hypo
  liver_bileduct vs. upper_gi,breast,ovary,colorectal, uterine,prostate

SEQ ID NO: 463810 - DNA, 25 bp, Homo sapiens
  chr5:114506551-114506576
  hypo
  liver_bileduct vs. upper_gi,breast,ovary,colorectal, uterine,prostate
agtgctgctgaacgttaaggcgcgc

SEQ ID NO: 463811 - DNA, 3 bp, Homo sapiens
  chr5:151784172-151784175
  hypo
  liver_bileduct vs. breast
cga

SEQ ID NO: 463812 - DNA, 2 bp, Homo sapiens
  chr5:151784304-151784306
  hypo
  liver_bileduct vs. breast
cc

SEQ ID NO: 463813 - DNA, 214 bp, Homo sapiens; identical to SEQ ID NO: 338846
  chr5:168189525-168189739
  hypo
  liver_bileduct vs. pancreas_gallbladder, lymphoid_neoplasm

SEQ ID NO: 463814 - DNA, 129 bp, Homo sapiens; identical to SEQ ID NO: 348113
  chr5:168195266-168195395
  hypo
  liver_bileduct vs. sarcoma,anorectal,prostate,renal, uterine,bladder_and_urothelial,colorectal

SEQ ID NO: 463815 - DNA, 34 bp, Homo sapiens; identical to SEQ ID NO: 370969
  chr5:175084709-175084743
  hypo
  liver_bileduct vs. bladder_and_urothelial

SEQ ID NO: 463816 - DNA, 75 bp, Homo sapiens; identical to SEQ ID NO: 462926
  chr5:175084745-175084820
  hypo
  liver_bileduct vs. bladder_and_urothelial

SEQ ID NO: 463817 - DNA, 317 bp, Homo sapiens
  chr5:178220780-178221097
  hypo
  liver_bileduct vs. pancreas_gallbladder
cgttcagaacagcgcctggccccagcaggatgagggaagcaattaagcagccatgaaacagaatgaggtctgggctgacgcggaaccgcctccaaagaaggaggtctgggctgacgcggaaccgtctccaaagaaggaggtctgggctgacgcggaaccgtctccaaagaaggaggtctgggctgacgcggaaccgtctccaagacattgttcatacaaagcaagcatgcagcataaccctgtcagtccagaggaaaggacagatatgtaaacacacacgctcacacacacatgcccatacatatgcacacacacac

SEQ ID NO: 463818 - DNA, 93 bp, Homo sapiens; identical to SEQ ID NO: 353706
  chr5:178411761-178411854
  hypo
  liver_bileduct vs. bladder_and_urothelial, pancreas_gallbladder,sarcoma,lymphoid_neoplasm,colorectal, head_and_neck

SEQ ID NO: 463819 - DNA, 149 bp, Homo sapiens; identical to SEQ ID NO: 377569
  chr5:178650433-178650582
  hypo
  liver_bileduct vs. pancreas_gallbladder

SEQ ID NO: 463820 - DNA, 128 bp, Homo sapiens; identical to SEQ ID NO: 338904
  chr5:178651199-178651327
  hypo
  liver_bileduct vs. pancreas_gallbladder,colorectal

SEQ ID NO: 463821 - DNA, 102 bp, Homo sapiens; identical to SEQ ID NO: 338905
  chr5:178652545-178652647
  hypo
  liver_bileduct vs. sarcoma,bladder_and_urothelial

SEQ ID NO: 463822 - DNA, 365 bp, Homo sapiens; identical to SEQ ID NO: 358348
  chr5:180046947-180047312
  hypo
  liver_bileduct vs. renal,lymphoid_neoplasm

SEQ ID NO: 463823 - DNA, 595 bp, Homo sapiens; identical to SEQ ID NO: 462930
  chr5:180479644-180480239
  hypo
  liver_bileduct vs. upper_gi,ovary,bladder_and_urothelial

SEQ ID NO: 463824 - DNA, 332 bp, Homo sapiens; identical to SEQ ID NO: 462931
  chr5:180480302-180480634
  hypo
  liver_bileduct vs. upper_gi,ovary,bladder_and_urothelial

SEQ ID NO: 463825 - DNA, 97 bp, Homo sapiens; identical to SEQ ID NO: 462932
  chr5:180480142-180480239
  hypo
  liver_bileduct vs. upper_gi,ovary,bladder_and_urothelial, melanoma,head_and_neck,pancreas_gallbladder,anorectal, colorectal,cervical

SEQ ID NO: 463826 - DNA, 829 bp, Homo sapiens; identical to SEQ ID NO: 346765
  chr5:180480302-180481131
  hypo
  liver_bileduct vs. upper_gi,ovary,bladder_and_urothelial, melanoma,head_and_neck,pancreas_gallbladder,anorectal, colorectal,cervical

SEQ ID NO: 463827 - DNA, 55 bp, Homo sapiens; identical to SEQ ID NO: 346767
  chr6:393764-393819
  hypo
  liver_bileduct vs. lymphoid_neoplasm

SEQ ID NO: 463828 - DNA, 406 bp, Homo sapiens; identical to SEQ ID NO: 338954
  chr6:4559591-4559997
  hypo
  liver_bileduct vs. renal,cervical,colorectal,breast,lung, upper_gi

SEQ ID NO: 463829 - DNA, 2 bp, Homo sapiens
  chr6:6534754-6534756
  hypo
cg

SEQ ID NO: 463830 - DNA, 451 bp, Homo sapiens; identical to SEQ ID NO: 338981
  chr6:10319622-10320073
  hypo
  liver_bileduct vs. bladder_and_urothelial,melanoma, pancreas_gallbladder,upper_gi,breast,head_and_neck

SEQ ID NO: 463831 - DNA, 108 bp, Homo sapiens; identical to SEQ ID NO: 455327
  chr6:36238212-36238320
  hypo
  liver_bileduct vs. renal

SEQ ID NO: 463832 - DNA, 321 bp, Homo sapiens; identical to SEQ ID NO: 462965
  chr6:45390544-45390865
  hypo
  liver_bileduct vs. anorectal

SEQ ID NO: 463833 - DNA, 58 bp, Homo sapiens; identical to SEQ ID NO: 462966
  chr6:45390807-45390865
  hypo
  liver_bileduct vs. renal,cervical

SEQ ID NO: 463834 - DNA, 637 bp, Homo sapiens; identical to SEQ ID NO: 456077
  chr6:52227115-52227752
  hypo
  liver_bileduct vs. upper_gi,pancreas_gallbladder, colorectal,melanoma

SEQ ID NO: 463835 - DNA, 291 bp, Homo sapiens; identical to SEQ ID NO: 462972
  chr6:74405623-74405914
  hypo
  liver_bileduct vs. lung

SEQ ID NO: 463836 - DNA, 174 bp, Homo sapiens; identical to SEQ ID NO: 358578
  chr6:74406015-74406189
  hypo
  liver_bileduct vs. lung

SEQ ID NO: 463837 - DNA, 83 bp, Homo sapiens; identical to SEQ ID NO: 350409
  chr6:80657600-80657683
  hypo
  liver_bileduct vs. melanoma

SEQ ID NO: 463838 - DNA, 134 bp, Homo sapiens; identical to SEQ ID NO: 358617
  chr6:105628083-105628217
  hypo
  liver_bileduct vs. lung,breast,bladder_and_urothelial

SEQ ID NO: 463839 - DNA, 353 bp, Homo sapiens; identical to SEQ ID NO: 462978
  chr6:106533693-106534046
  hypo
  liver_bileduct vs. pancreas_gallbladder,lung,upper_gi, head_and_neck,colorectal,bladder_and_urothelial,cervical,ovary, multiple_myeloma

SEQ ID NO: 463840 - DNA, 440 bp, Homo sapiens; identical to SEQ ID NO: 453397
  chr6:127836226-127836666
  hypo
  liver_bileduct vs. lung

SEQ ID NO: 463841 - DNA, 225 bp, Homo sapiens; identical to SEQ ID NO: 453398
  chr6:127836441-127836666
  hypo
  liver_bileduct vs. lung,sarcoma

SEQ ID NO: 463842 - DNA, 31 bp, Homo sapiens; identical to SEQ ID NO: 350458
  chr6:127837749-127837780
  hypo
  liver_bileduct vs. lung

SEQ ID NO: 463843 - DNA, 49 bp, Homo sapiens; identical to SEQ ID NO: 462985
  chr6:137243410-137243459
  hypo
  liver_bileduct vs. lung,breast,upper_gi

SEQ ID NO: 463844 - DNA, 49 bp, Homo sapiens; identical to SEQ ID NO: 462985
  chr6:137243410-137243459
  hypo
  liver_bileduct vs. bladder_and_urothelial,breast

SEQ ID NO: 463845 - DNA, 40 bp, Homo sapiens; identical to SEQ ID NO: 462992
  chr6:158957708-158957748
  hypo
  liver_bileduct vs. upper_gi

SEQ ID NO: 463846 - DNA, 207 bp, Homo sapiens; identical to SEQ ID NO: 462993
  chr6:158957988-158958195
  hypo
  liver_bileduct vs. upper_gi

SEQ ID NO: 463847 - DNA, 385 bp, Homo sapiens; identical to SEQ ID NO: 339207
  chr6:169567224-169567609
  hypo
  liver_bileduct vs. bladder_and_urothelial

SEQ ID NO: 463848 - DNA, 124 bp, Homo sapiens; identical to SEQ ID NO: 455366
  chr7:1308164-1308288
  hypo
  liver_bileduct vs. anorectal,renal

SEQ ID NO: 463849 - DNA, 157 bp, Homo sapiens; identical to SEQ ID NO: 339352
  chr7:2959057-2959214
  hypo
  liver_bileduct vs. pancreas_gallbladder

SEQ ID NO: 463850 - DNA, 44 bp, Homo sapiens
  chr7:3283455-3283499
  hypo
  liver_bileduct vs. lymphoid_neoplasm
cgtgagccaccgcgcccagcctcagaagtgctccttttttacca

SEQ ID NO: 463851 - DNA, 761 bp, Homo sapiens; identical to SEQ ID NO: 339359
  chr7:4219149-4219910
  hypo

SEQ ID NO: 463852 - DNA, 203 bp, Homo sapiens; identical to SEQ ID NO: 339360
  chr7:4243576-4243779
  hypo
  liver_bileduct vs. bladder_and_urothelial

SEQ ID NO: 463853 - DNA, 304 bp, Homo sapiens; identical to SEQ ID NO: 364284
  chr7:4349444-4349748
  hypo
  liver_bileduct vs. cervical,anorectal

SEQ ID NO: 463854 - DNA, 316 bp, Homo sapiens; identical to SEQ ID NO: 339363
  chr7:4410656-4410972
  hypo
  liver_bileduct vs. cervical

SEQ ID NO: 463855 - DNA, 527 bp, Homo sapiens; identical to SEQ ID NO: 353922
  chr7:4917102-4917629
  hypo
  liver_bileduct vs. breast

SEQ ID NO: 463856 - DNA, 636 bp, Homo sapiens; identical to SEQ ID NO: 462995
  chr7:5632268-5632904
  hypo
  liver_bileduct vs. bladder_and_urothelial,sarcoma, cervical,ovary,head_and_neck,myeloid_neoplasm,renal,thyroid, uterine,lung,prostate,non_cancer

SEQ ID NO: 463857 - DNA, 198 bp, Homo sapiens; identical to SEQ ID NO: 462996
  chr7:5632706-5632904
  hypo
  liver_bileduct vs. sarcoma,cervical,head_and_neck,ovary, bladder_and_urothelial,myeloid_neoplasm,renal,uterine

SEQ ID NO: 463858 - DNA, 123 bp, Homo sapiens; identical to SEQ ID NO: 350511
  chr7:5633472-5633595
  hypo
  liver_bileduct vs. sarcoma,cervical,head_and_neck,ovary, bladder_and_urothelial,myeloid_neoplasm,renal,uterine

SEQ ID NO: 463859 - DNA, 62 bp, Homo sapiens; identical to SEQ ID NO: 463000
  chr7:6570393-6570455
  hypo
  liver_bileduct vs. prostate,uterine,non_cancer

SEQ ID NO: 463860 - DNA, 105 bp, Homo sapiens; identical to SEQ ID NO: 463001
  chr7:18125868-18125973
  hypo
  liver_bileduct vs. lung,upper_gi

SEQ ID NO: 463861 - DNA, 219 bp, Homo sapiens; identical to SEQ ID NO: 463002
  chr7:18126225-18126444
  hypo
  liver_bileduct vs. lung,upper_gi

SEQ ID NO: 463862 - DNA, 219 bp, Homo sapiens; identical to SEQ ID NO: 463002
  chr7:18126225-18126444
  hypo
  liver_bileduct vs. lung,cervical,sarcoma,ovary

SEQ ID NO: 463863 - DNA, 60 bp, Homo sapiens; identical to SEQ ID NO: 454474
  chr7:19156644-19156704
  hypo
  liver_bileduct vs. melanoma

SEQ ID NO: 463864 - DNA, 142 bp, Homo sapiens; identical to SEQ ID NO: 345270
  chr7:27136790-27136932
  hypo
  liver_bileduct vs. bladder_and_urothelial,head_and_neck, renal,lymphoid_neoplasm,prostate,anorectal,sarcoma,melanoma, non_cancer,ovary,multiple_myeloma,myeloid_neoplasm,thyroid, uterine,cervical,colorectal

SEQ ID NO: 463865 - DNA, 257 bp, Homo sapiens; identical to SEQ ID NO: 339469
  chr7:38725412-38725669
  hypo
  liver_bileduct vs. pancreas_gallbladder,upper_gi,lung, colorectal

SEQ ID NO: 463866 - DNA, 180 bp, Homo sapiens; identical to SEQ ID NO: 339474
  chr7:42834387-42834567
  hypo
  liver_bileduct vs. breast,lymphoid_neoplasm,melanoma, bladder_and_urothelial,cervical,sarcoma,colorectal, head_and_neck

SEQ ID NO: 463867 - DNA, 1 bp, Homo sapiens
  chr7:45613422-45613423
  hypo
  liver_bileduct vs. bladder_and_urothelial,uterine, prostate,thyroid
c

SEQ ID NO: 463868 - DNA, 95 bp, Homo sapiens; identical to SEQ ID NO: 353982
  chr7:50251628-50251723
  hypo
  liver_bileduct vs. anorectal

SEQ ID NO: 463869 - DNA, 102 bp, Homo sapiens; identical to SEQ ID NO: 345274
  chr7:50344738-50344840
  hypo
  liver_bileduct vs. anorectal,multiple_myeloma

SEQ ID NO: 463870 - DNA, 588 bp, Homo sapiens
  chr7:53103586-53104174
  hypo
  liver_bileduct vs. head_and_neck,renal,prostate
acccacctcatcgaggtgcggcccacccaggaccccgccaagccgcagcgggtggtctccgagggctggaggcgccctgcccttcccggggagaccgctctggggcgagacctctcctgtgcctgggagggttgcatgaaaggggggctgtgtcgtgcctggaacccaggacggacctggagcccggtgaccatcgggatcgcgccccctgagcgtcaggagagcccctggagatcccctggacagagagcccgccccgcaggccgccccgccgcccaggagctcctggacccctgcacccgggagactctgctgggggcgctcagccagtgccccaagggaagcgctaggttcgacgggccgttgtggttcgaggtctcagacagcaagggtggcaggcggaacctgcagccccggccctctgccttcaagcccctgagcaaaaatggagcggttgcttccttcgtgcccaggccagggcctctgaagccgagcctcggcccctggagcctcagtttttgtgatgatgcttggccttccgtgctggtccagcccgccccatccgccatctgggacttctgggaggcg

SEQ ID NO: 463871 - DNA, 64 bp, Homo sapiens; identical to SEQ ID NO: 353989
  chr7:53104233-53104297
  hypo
  liver_bileduct vs. head_and_neck,renal,prostate

SEQ ID NO: 463872 - DNA, 294 bp, Homo sapiens; identical to SEQ ID NO: 339518
  chr7:57324312-57324606
  hypo

SEQ ID NO: 463873 - DNA, 188 bp, Homo sapiens; identical to SEQ ID NO: 339519
  chr7:57706384-57706572
  hypo
  liver_bileduct vs. head_and_neck,colorectal, pancreas_gallbladder,upper_gi,bladder_and_urothelial,renal, anorectal

SEQ ID NO: 463874 - DNA, 118 bp, Homo sapiens; identical to SEQ ID NO: 339521
  chr7:63569143-63569261
  hypo
  liver_bileduct vs. lymphoid_neoplasm

SEQ ID NO: 463875 - DNA, 54 bp, Homo sapiens
  chr7:63652630-63652684
  hypo
  liver_bileduct vs. renal
cgccttgggcacctcggcctgcgtcattgcgctctgcctggctgcggccgctgt

SEQ ID NO: 463876 - DNA, 122 bp, Homo sapiens; identical to SEQ ID NO: 364412
  chr7:63652839-63652961
  hypo
  liver_bileduct vs. renal

SEQ ID NO: 463877 - DNA, 494 bp, Homo sapiens; identical to SEQ ID NO: 339525
  chr7:64332690-64333184
  hypo
  liver_bileduct vs. bladder_and_urothelial

SEQ ID NO: 463878 - DNA, 113 bp, Homo sapiens
  chr7:70543004-70543117
  hypo
  liver_bileduct vs. head_and_neck,upper_gi,colorectal
cgcggcggcactcgcaagccagtgcagttccgggtgggcatgggcttggccgccccacactgggagcagcaggccggcgtcaccagccccgggcagtgaggggcttagcaccc

SEQ ID NO: 463879 - DNA, 164 bp, Homo sapiens
  chr7:77324199-77324363
  hypo
  liver_bileduct vs. melanoma
cgcgcccggccacattccttatcttttaagctaaaacccatctccccaaattgcttattttcgaagcaaaaatcaaagcacatgcttacaaaacatcgaacacgcagtgtgcttactaaacgctaaaatacagaaacctaaaaaaacaattcttgcttttcaaa

SEQ ID NO: 463880 - DNA, 493 bp, Homo sapiens
  chr7:86415591-86416084
  hypo
  liver_bileduct vs. upper_gi
cggctcttccagatccctcagatcagctacgcatccaccagcgccaaactcagtgataagtcgcgctatgattactttgccaggaccgtgccccccgacttctaccaggccaaagccatggctgagatcttgcgcttcttcaactggacctacgtgtccacagtagcctccgagggtgattacggggagacagggatcgaggccttcgagcaggaagcccgcctgcgcaacatctgcatcgctacggcggagaaggtgggccgctccaacatccgcaagtcctacgacagcgtgatccgagaactgttgcagaagcccaacgcgcgcgtcgtggtcctcttcatgcgcagcgacgactcgcgggagctcattgcagccgccagccgcgccaatgcctccttcacctgggtggccagcgacggctggggcgcgcaggagagcatcatcaagggcagcgagcatgtggcctacggcgccatcaccctggagctgg

SEQ ID NO: 463881 - DNA, 37 bp, Homo sapiens; identical to SEQ ID NO: 364435
  chr7:86416125-86416162
  hypo
  liver_bileduct vs. upper_gi

SEQ ID NO: 463882 - DNA, 191 bp, Homo sapiens; identical to SEQ ID NO: 458269
  chr7:87563639-87563830
  hypo
  liver_bileduct vs. bladder_and_urothelial,sarcoma, anorectal

SEQ ID NO: 463883 - DNA, 440 bp, Homo sapiens; identical to SEQ ID NO: 458270
  chr7:87563890-87564330
  hypo
  liver_bileduct vs. bladder_and_urothelial,sarcoma, anorectal

SEQ ID NO: 463884 - DNA, 207 bp, Homo sapiens; identical to SEQ ID NO: 350608
  chr7:87564359-87564566
  hypo
  liver_bileduct vs. bladder_and_urothelial,sarcoma, anorectal

SEQ ID NO: 463885 - DNA, 148 bp, Homo sapiens
  chr7:106622687-106622835
  hypo
  liver_bileduct vs. melanoma,renal
cgcaccggaacaatgtgcggcacatattagacactcaatacatgtttgccaaatgaatacgtgaatgattgtagtcttggacaagtcaaatggcccttagggactatttgttcattgattattttcccacctgcgtcacagcatggct

SEQ ID NO: 463886 - DNA, 20 bp, Homo sapiens
  chr7:106684813-106684833
  hypo
  liver_bileduct vs. lung,melanoma,breast,renal, bladder_and_urothelial,ovary,prostate
cgggggttcaccatggcgaa

SEQ ID NO: 463887 - DNA, 252 bp, Homo sapiens; identical to SEQ ID NO: 463034
  chr7:106684920-106685172
  hypo
  liver_bileduct vs. lung,melanoma,breast,renal, bladder_and_urothelial,ovary,prostate

SEQ ID NO: 463888 - DNA, 24 bp, Homo sapiens
  chr7:108095249-108095273
  hypo
  liver_bileduct vs. ovary,renal
cgaggaagagcccagtctcttaga

SEQ ID NO: 463889 - DNA, 362 bp, Homo sapiens; identical to SEQ ID NO: 345285
  chr7:139930346-139930708
  hypo
  liver_bileduct vs. colorectal,upper_gi,cervical,lung, multiple_myeloma,uterine,pancreas_gallbladder,anorectal,ovary, head_and_neck,bladder_and_urothelial,myeloid_neoplasm, non_cancer,thyroid

SEQ ID NO: 463890 - DNA, 184 bp, Homo sapiens; identical to SEQ ID NO: 463043
  chr7:140340368-140340552
  hypo

SEQ ID NO: 463891 - DNA, 1 bp, Homo sapiens
  chr7:154540210-154540211
  hypo
  liver_bileduct vs. pancreas_gallbladder,colorectal
c

SEQ ID NO: 463892 - DNA, 273 bp, Homo sapiens; identical to SEQ ID NO: 364560
  chr7:154540240-154540513
  hypo
  liver_bileduct vs. pancreas_gallbladder,colorectal

SEQ ID NO: 463893 - DNA, 128 bp, Homo sapiens
  chr7:154541944-154542072
  hypo
  liver_bileduct vs. lymphoid_neoplasm
cgtagatgaacaccctcgctctccagaagacaagaagcgggagtcgcagcctattgaagtgtagacatgatgtctacacagccaccctgtgtcctgcaagagcccaggctcagagcgtgtgcaccgtg

SEQ ID NO: 463894 - DNA, 135 bp, Homo sapiens; identical to SEQ ID NO: 354096
  chr7:154542290-154542425
  hypo
  liver_bileduct vs. lymphoid_neoplasm

SEQ ID NO: 463895 - DNA, 219 bp, Homo sapiens; identical to SEQ ID NO: 378397
  chr7:157334647-157334866
  hypo
  liver_bileduct vs. pancreas_gallbladder

SEQ ID NO: 463896 - DNA, 262 bp, Homo sapiens
  chr7:157341254-157341516
  hypo
  liver_bileduct vs. pancreas_gallbladder
cgcaggccccggagaggccgggcagcgctcagagagctcagaacatcctcctgagggttctgggatttatcgtcaacctctttctacaaaaatgcagcgttctccccccacccccaaatctagtgaatggaaagagccagtggatcgagttcctaggacttgagatgtggctgcatctggaggtgttgcaggaaacgccagtggacctttgggggcccagaagtgaccccgcccatgcaaggccggcatggacgaggccggt

SEQ ID NO: 463897 - DNA, 120 bp, Homo sapiens; identical to SEQ ID NO: 378400
  chr7:157341671-157341791
  hypo
  liver_bileduct vs. pancreas_gallbladder

SEQ ID NO: 463898 - DNA, 476 bp, Homo sapiens
  chr7:157347322-157347798
  hypo
  liver_bileduct vs. renal,lymphoid_neoplasm,prostate, cervical
cgaaagttaaattccagggaaacagaaaggcccagtggtgtgacgctgacatcgaaaagcctgcaaacagtcgaggagtcagcgcacacacaaagaaaatccagatggaaggaaagaaaggaaccttaacgatgtctaccggggacagagcgtggggtccacggagaagtcccaggcgttttccacctaagaagcatcatggtgattcaaacaccagggaaatgaatggactcagtggagccactttctgctacttgaccaggtttaattcgagttgtccatgtcgggaatctacagggaagtgacgcaggctgccatcttgctcagcaccccagtgtggcgggcgccccagtgtggcgggcgtcccagtgtggtgagcaccggccaagtcagtttgggttgggctgcaccctcgtgcctgggacacccaggaagacccacctctctcgtgttagtggaccagggaggcagccaca

SEQ ID NO: 463899 - DNA, 9 bp, Homo sapiens
  chr7:157347844-157347853
  hypo
  liver_bileduct vs. renal,lymphoid_neoplasm,prostate, cervical
taccatccc

SEQ ID NO: 463900 - DNA, 3 bp, Homo sapiens
  chr7:157353111-157353114
  hypo
  liver_bileduct vs. renal
atc

SEQ ID NO: 463901 - DNA, 159 bp, Homo sapiens
  chr7:157404210-157404369
  hypo
  liver_bileduct vs. pancreas_gallbladder
cgtaccctcccccaaaaagacacactggagtcccagccctgggaacatgaccttatttggaaatagggtctttacagaggtaagcgagcggagggcatttgggcggccctaatgcaatatgactggcgtgctgttaggaagaaggactctgcacaccca

SEQ ID NO: 463902 - DNA, 46 bp, Homo sapiens; identical to SEQ ID NO: 354109
  chr7:157404566-157404612
  hypo
  liver_bileduct vs. pancreas_gallbladder

SEQ ID NO: 463903 - DNA, 152 bp, Homo sapiens; identical to SEQ ID NO: 339739
  chr7:157414227-157414379
  hypo
  liver_bileduct vs. pancreas_gallbladder,upper_gi

SEQ ID NO: 463904 - DNA, 297 bp, Homo sapiens
  chr7:157445780-157446077
  hypo
  liver_bileduct vs. renal
cgctcttggtgctgagcctgccccccagacggtgcagccggcctctcccacctgctggggctcctcacatctagcttggcctccagacatcaccaacctctgctgtttatttcatcggatcgtggggttcagatgccacgttttgtccaacgtgccccaggagtggctgcatgtcaggaacatgtcgctgggaatctctgtggcttatctgaccatcctgccatcctcaggtgaggggcactgaggtggccggttgggtgtctggcggaaacgaggctttgcgcacagagggctggg

SEQ ID NO: 463905 - DNA, 69 bp, Homo sapiens; identical to SEQ ID NO: 339741
  chr7:157446148-157446217
  hypo
  liver_bileduct vs. renal

SEQ ID NO: 463906 - DNA, 232 bp, Homo sapiens; identical to SEQ ID NO: 339746
  chr7:157507378-157507610
  hypo
  liver_bileduct vs. pancreas_gallbladder,colorectal, anorectal

SEQ ID NO: 463907 - DNA, 284 bp, Homo sapiens; identical to SEQ ID NO: 339747
  chr7:157510178-157510462
  hypo
  liver_bileduct vs. pancreas_gallbladder

SEQ ID NO: 463908 - DNA, 3 bp, Homo sapiens
  chr7:157511449-157511452
  hypo
  liver_bileduct vs. lymphoid_neoplasm,upper_gi,renal
cgg

SEQ ID NO: 463909 - DNA, 115 bp, Homo sapiens; identical to SEQ ID NO: 354113
  chr7:157511495-157511610
  hypo
  liver_bileduct vs. lymphoid_neoplasm,upper_gi,renal

SEQ ID NO: 463910 - DNA, 408 bp, Homo sapiens; identical to SEQ ID NO: 339749
  chr7:157513007-157513415
  hypo
  liver_bileduct vs. pancreas_gallbladder,colorectal

SEQ ID NO: 463911 - DNA, 45 bp, Homo sapiens
  chr7:157550880-157550925
  hypo
  liver_bileduct vs. pancreas_gallbladder
cggtgtcgtaattgactggacaggtactaatgccgaccacatcca

SEQ ID NO: 463912 - DNA, 263 bp, Homo sapiens
  chr7:157550958-157551221
  hypo
  liver_bileduct vs. pancreas_gallbladder
agtccaggcctgtccaggcgccattccccgtggcctgcacgctcctgggtcatgctccgctcaggcggctccttcagtgaagttgcacagcagtcagggtaacctccatgtccccaaagggcaagaccggctcagaggcgaggtaggtggcacgaggccacacagctggtcagctcagccgggctgggacgcgggccccagaccgtggcccccgtgcagctctgggtccagctggccaaggtggactttgcacaaggtttggg

SEQ ID NO: 463913 - DNA, 242 bp, Homo sapiens; identical to SEQ ID NO: 333344
  chr7:157594777-157595019
  hypo
  liver_bileduct vs. pancreas_gallbladder

SEQ ID NO: 463914 - DNA, 332 bp, Homo sapiens; identical to SEQ ID NO: 339756
  chr7:157621949-157622281
  hypo
  liver_bileduct vs. pancreas_gallbladder,head_and_neck, lymphoid_neoplasm,anorectal,renal,colorectal

SEQ ID NO: 463915 - DNA, 469 bp, Homo sapiens; identical to SEQ ID NO: 339757
  chr7:157625840-157626309
  hypo
  liver_bileduct vs. pancreas_gallbladder,head_and_neck, anorectal,prostate

SEQ ID NO: 463916 - DNA, 203 bp, Homo sapiens; identical to SEQ ID NO: 339758
  chr7:157642963-157643166
  hypo
  liver_bileduct vs. pancreas_gallbladder,upper_gi, anorectal,head_and_neck,prostate,uterine,lymphoid_neoplasm

SEQ ID NO: 463917 - DNA, 239 bp, Homo sapiens; identical to SEQ ID NO: 339762
  chr7:157730053-157730292
  hypo
  liver_bileduct vs. pancreas_gallbladder

SEQ ID NO: 463918 - DNA, 227 bp, Homo sapiens; identical to SEQ ID NO: 339763
  chr7:157736806-157737033
  hypo
  liver_bileduct vs. pancreas_gallbladder

SEQ ID NO: 463919 - DNA, 273 bp, Homo sapiens; identical to SEQ ID NO: 339764
  chr7:157738113-157738386
  hypo
  liver_bileduct vs. pancreas_gallbladder,colorectal, head_and_neck,anorectal,prostate,upper_gi,lymphoid_neoplasm

SEQ ID NO: 463920 - DNA, 145 bp, Homo sapiens; identical to SEQ ID NO: 339765
  chr7:157744287-157744432
  hypo
  liver_bileduct vs. pancreas_gallbladder

SEQ ID NO: 463921 - DNA, 410 bp, Homo sapiens; identical to SEQ ID NO: 339766
  chr7:157853839-157854249
  hypo
  liver_bileduct vs. pancreas_gallbladder,colorectal, upper_gi,head_and_neck,lymphoid_neoplasm,prostate,anorectal

SEQ ID NO: 463922 - DNA, 337 bp, Homo sapiens; identical to SEQ ID NO: 339767
  chr7:157860325-157860662
  hypo
  liver_bileduct vs. pancreas_gallbladder, lymphoid_neoplasm,upper_gi,renal,head_and_neck,colorectal

SEQ ID NO: 463923 - DNA, 218 bp, Homo sapiens; identical to SEQ ID NO: 339770
  chr7:157916520-157916738
  hypo
  liver_bileduct vs. pancreas_gallbladder,upper_gi

SEQ ID NO: 463924 - DNA, 241 bp, Homo sapiens; identical to SEQ ID NO: 339771
  chr7:157919964-157920205
  hypo
  liver_bileduct vs. pancreas_gallbladder,colorectal, cervical,lymphoid_neoplasm,upper_gi,anorectal

SEQ ID NO: 463925 - DNA, 234 bp, Homo sapiens; identical to SEQ ID NO: 339772
  chr7:157929571-157929805
  hypo
  liver_bileduct vs. pancreas_gallbladder,upper_gi, lymphoid_neoplasm,prostate,head_and_neck,anorectal

SEQ ID NO: 463926 - DNA, 111 bp, Homo sapiens; identical to SEQ ID NO: 339773
  chr7:157934031-157934142
  hypo
  liver_bileduct vs. pancreas_gallbladder,colorectal

SEQ ID NO: 463927 - DNA, 39 bp, Homo sapiens
  chr7:157934555-157934594
  hypo
  liver_bileduct vs. pancreas_gallbladder,upper_gi, lymphoid_neoplasm,head_and_neck,colorectal,prostate,renal, anorectal
cggacagagtcctttaaagtcaatctgtacacgaaatgt

SEQ ID NO: 463928 - DNA, 92 bp, Homo sapiens; identical to SEQ ID NO: 348285
  chr7:157934659-157934751
  hypo
  liver_bileduct vs. pancreas_gallbladder,upper_gi, lymphoid_neoplasm,head_and_neck,colorectal,prostate,renal, anorectal

SEQ ID NO: 463929 - DNA, 119 bp, Homo sapiens; identical to SEQ ID NO: 364621
  chr7:157935699-157935818
  hypo
  liver_bileduct vs. renal

SEQ ID NO: 463930 - DNA, 264 bp, Homo sapiens; identical to SEQ ID NO: 339776
  chr7:157936035-157936299
  hypo
  liver_bileduct vs. pancreas_gallbladder,renal, lymphoid_neoplasm,head_and_neck,upper_gi

SEQ ID NO: 463931 - DNA, 224 bp, Homo sapiens; identical to SEQ ID NO: 339777
  chr7:157949173-157949397
  hypo
  liver_bileduct vs. pancreas_gallbladder,colorectal, head_and_neck,anorectal,prostate,lymphoid_neoplasm,cervical

SEQ ID NO: 463932 - DNA, 5 bp, Homo sapiens
  chr7:157958509-157958514
  hypo
  liver_bileduct vs. pancreas_gallbladder
cgcct

SEQ ID NO: 463933 - DNA, 105 bp, Homo sapiens; identical to SEQ ID NO: 339779
  chr7:157959868-157959973
  hypo
  liver_bileduct vs. pancreas_gallbladder,upper_gi, lymphoid_neoplasm

SEQ ID NO: 463934 - DNA, 392 bp, Homo sapiens; identical to SEQ ID NO: 364625
  chr7:158037726-158038118
  hypo
  liver_bileduct vs. pancreas_gallbladder

SEQ ID NO: 463935 - DNA, 143 bp, Homo sapiens
  chr7:158039908-158040051
  hypo
  liver_bileduct vs. pancreas_gallbladder
cgaggcgcacgctgggctctgagacgccccctggccaagaggggtggaggaagggggcaggcgccaggatctggaaggagatttccaacccacgtggggtctcacaggagaaggccgtgatgggaggtggggaagtggggagg

SEQ ID NO: 463936 - DNA, 127 bp, Homo sapiens; identical to SEQ ID NO: 339785
  chr7:158087705-158087832
  hypo
  liver_bileduct vs. colorectal

SEQ ID NO: 463937 - DNA, 338 bp, Homo sapiens; identical to SEQ ID NO: 339787
  chr7:158136094-158136432
  hypo
  liver_bileduct vs. pancreas_gallbladder,colorectal, upper_gi

SEQ ID NO: 463938 - DNA, 118 bp, Homo sapiens; identical to SEQ ID NO: 339788
  chr7:158198545-158198663
  hypo
  liver_bileduct vs. lung,upper_gi

SEQ ID NO: 463939 - DNA, 479 bp, Homo sapiens; identical to SEQ ID NO: 354136
  chr7:158270795-158271274
  hypo
  liver_bileduct vs. pancreas_gallbladder,colorectal, upper_gi

SEQ ID NO: 463940 - DNA, 515 bp, Homo sapiens
  chr7:158282327-158282842
  hypo
  liver_bileduct vs. upper_gi
cagctccaggccagcggcggggctcaccaggctgggcgctgcgcacggcgggcaggagaggggcagaccagggcgcagcagccaggaccccacactcaccgttcacacaggcctcggacgctccgcagaggccctcctcgagcaggcagcctgcggggaaacagagaagagacgcggtcagctggaggggaggaggggggtgcccccgaggctgccttcctggccccctggtgaatttcagagaaaccgccggtcaagcaggctcctccgacccggcttttccgagatggggccgattattctgaagccagaacgctgcgcccctgacccggccacgtgcgaggcctcctggcctagtcccggagcccagctctcacctggaccaggcccacagctctgggctgagggtcaagccggcgtcatcacaggagactctctggccgcgggagcagcagcggggccggggcctccccttgaggcctcccctgggcccggcgcctcccctggaccgggtg

SEQ ID NO: 463941 - DNA, 162 bp, Homo sapiens; identical to SEQ ID NO: 364634
  chr7:158282873-158283035
  hypo
  liver_bileduct vs. upper_gi

SEQ ID NO: 463942 - DNA, 70 bp, Homo sapiens; identical to SEQ ID NO: 455422
  chr7:158349387-158349457
  hypo
  liver_bileduct vs. pancreas_gallbladder

SEQ ID NO: 463943 - DNA, 361 bp, Homo sapiens; identical to SEQ ID NO: 354138
  chr7:158349747-158350108
  hypo
  liver_bileduct vs. pancreas_gallbladder

SEQ ID NO: 463944 - DNA, 845 bp, Homo sapiens
  chr7:158962544-158963389
  hypo
  liver_bileduct vs. pancreas_gallbladder
cgagggcataaccgggctccatcccaatgctgcctcatccctgcagtcaccccgcacaggtgacgcaggcttcagagggccccggacctcgcctgagggtgaagaaaatcacggcatcactgacaaggccgccatgaggatcgcgtgagcagaaacacgatgatcatggctcactgatggggcagctctgaggatcgcgtgagcagaaacacacagataatcacagaatcactgacggggcagctctgaggatcacgtgagcagaaacacacagataatcacagaatcactgacggggctgctgtgaggatcccgtgagcagaaacatggatgatcacggctcactgacggggcagctctgaggatcgcgtgagcagaaacacacagataatcacagaatcactgacggggccgctgtgaggatcccgtgagcagaaacatggatgatcacggctcactgacggggcagctctgaggatcacgtgagcagaaacacacagataatcacagaatcactgacgaggcctctgtgaggatcccgtgagcagaaacatggatgatcgcggcctgactggcggggctgctgtgaggatcatatgaccagaaacacgtggaagatcatggctcactgacggggctgctgtgactattgcgtgagcagaaacacgatgatcatggctcactgaatgggcagctctgaggatcgcgtgagcagaaacatggatgatcatggctcactgacagggaggtctgaggattgcgtgagcagaaacacagataatcacagaatcactgagggggccactgtgaggatcgcatgagcagaaacacacagatgatcacgg

SEQ ID NO: 463945 - DNA, 298 bp, Homo sapiens; identical to SEQ ID NO: 339811
  chr8:1026288-1026586
  hypo

SEQ ID NO: 463946 - DNA, 233 bp, Homo sapiens; identical to SEQ ID NO: 354148
  chr8:1078113-1078346
  hypo
  liver_bileduct vs. head_and_neck

SEQ ID NO: 463947 - DNA, 439 bp, Homo sapiens
  chr8:1132651-1133090
  hypo
  liver_bileduct vs. cervical,colorectal
cgtggtgagttgggcattgagctgccgtaggtcactgagtctgccctgccatcacgtctgcgctgccctgagacacggagctccagcacattctgcagagctcacactatcgagtccagcgcgcatgtgagaggcaggaagggagagtccacgggtcggcaactctgggcagtggcgcgtgggggacggactccgcagcctgtgggatcggcagcatccagtgaggtggagcggggctcaggggcactcaggatgcagtgagcgcacagccctgcggtggcatgggtgggagacgcgcaccatggagccggtggaaggtagacattcgagcgagctggggccagttcctggaagtgtgtcactgccagtgcggggaacgtgagatttactcacccagcagcgggacctactggagtgctttcggtaagagctgggatga

SEQ ID NO: 463948 - DNA, 11 bp, Homo sapiens
  chr8:1269539-1269550
  hypo
  liver_bileduct vs. lymphoid_neoplasm
catgtgtatcc

SEQ ID NO: 463949 - DNA, 117 bp, Homo sapiens; identical to SEQ ID NO: 364651
  chr8:1326617-1326734
  hypo
  liver_bileduct vs. melanoma

SEQ ID NO: 463950 - DNA, 132 bp, Homo sapiens
  chr8:1471350-1471482
  hypo
  liver_bileduct vs. anorectal
cgggcccatggtcctgccaggggcccacagcatgaagatgtagctccctcacacacacgttgaatttggatttgcttgtctggcttctgctggggcgcaggatgtggggatggaaggaccaagacacacgac

SEQ ID NO: 463951 - DNA, 49 bp, Homo sapiens; identical to SEQ ID NO: 364653
  chr8:1471664-1471713
  hypo
  liver_bileduct vs. anorectal

SEQ ID NO: 463952 - DNA, 169 bp, Homo sapiens; identical to SEQ ID NO: 339824
  chr8:3509598-3509767
  hypo
  liver_bileduct vs. colorectal,head_and_neck, lymphoid_neoplasm,anorectal

SEQ ID NO: 463953 - DNA, 50 bp, Homo sapiens
  chr8:41553941-41553991
  hypo
  liver_bileduct vs. renal,pancreas_gallbladder,cervical
cggccagtgggggcggcgtgctgagcttctggggcttgaccaggcggcag

SEQ ID NO: 463954 - DNA, 29 bp, Homo sapiens
  chr8:41554371-41554400
  hypo
  liver_bileduct vs. renal,pancreas_gallbladder,cervical
gaaccttgccgctagaaaccaggtgccac

SEQ ID NO: 463955 - DNA, 206 bp, Homo sapiens
  chr8:56364032-56364238
  hypo
  liver_bileduct vs. lymphoid_neoplasm
cgagtctgcctggaactggcctggagaaggtgcgttctgggccttaaagagtccgactacacctatgccgtacaggcccccagaatgcagcagtactgccttggaccgccggatgcgccagcagacaacggtgaagcggttctggcggtagcagtaggacacgcgctgcagggcgttgtcctggacactctggggcacgatcagca

SEQ ID NO: 463956 - DNA, 159 bp, Homo sapiens; identical to SEQ ID NO: 378583
  chr8:56364333-56364492
  hypo
  liver_bileduct vs. lymphoid_neoplasm

SEQ ID NO: 463957 - DNA, 23 bp, Homo sapiens
  chr8:56365024-56365047
  hypo
  liver_bileduct vs. lymphoid_neoplasm,cervical
cccatccggtggcaggtagatgc

SEQ ID NO: 463958 - DNA, 157 bp, Homo sapiens
  chr8:56602062-56602219
  hypo
  liver_bileduct vs. upper_gi,renal,bladder_and_urothelial, anorectal,cervical,pancreas_gallbladder,head_and_neck,uterine, lung
cgcccttcccggactccatccggctgcgcggggcagagttctgcattgcagaggccgggctgtggggacccaggccagcaccactcagggagcagcttggtgggccccgttcccgggtgtgagggcaggaaaactggctgaggagtcggcactagaa

SEQ ID NO: 463959 - DNA, 72 bp, Homo sapiens; identical to SEQ ID NO: 354188
  chr8:56602280-56602352
  hypo
  liver_bileduct vs. upper_gi,renal,bladder_and_urothelial, anorectal,cervical,pancreas_gallbladder,head_and_neck,uterine, lung

SEQ ID NO: 463960 - DNA, 114 bp, Homo sapiens; identical to SEQ ID NO: 339934
  chr8:61156160-61156274
  hypo
  liver_bileduct vs. upper_gi,pancreas_gallbladder,breast, uterine

SEQ ID NO: 463961 - DNA, 144 bp, Homo sapiens; identical to SEQ ID NO: 201426
  chr8:61822883-61823027
  hypo
  liver_bileduct vs. ovary,colorectal,upper_gi

SEQ ID NO: 463962 - DNA, 181 bp, Homo sapiens; identical to SEQ ID NO: 459870
  chr8:73449197-73449378
  hypo
  liver_bileduct vs. head_and_neck,sarcoma,ovary

SEQ ID NO: 463963 - DNA, 208 bp, Homo sapiens; identical to SEQ ID NO: 459871
  chr8:73449432-73449640
  hypo
  liver_bileduct vs. head_and_neck,sarcoma,ovary

SEQ ID NO: 463964 - DNA, 19 bp, Homo sapiens
  chr8:73450162-73450181
  hypo
  liver_bileduct vs. head_and_neck,sarcoma,ovary
tttaagaatgaatcatcgc

SEQ ID NO: 463965 - DNA, 99 bp, Homo sapiens; identical to SEQ ID NO: 345308
  chr8:82193698-82193797
  hypo
  liver_bileduct vs. bladder_and_urothelial, pancreas_gallbladder,upper_gi,renal,colorectal, lymphoid_neoplasm,anorectal,ovary

SEQ ID NO: 463966 - DNA, 827 bp, Homo sapiens; identical to SEQ ID NO: 463068
  chr8:99956460-99957287
  hypo
  liver_bileduct vs. upper_gi

SEQ ID NO: 463967 - DNA, 420 bp, Homo sapiens; identical to SEQ ID NO: 463069
  chr8:99956867-99957287
  hypo
  liver_bileduct vs. upper_gi,colorectal,head_and_neck, cervical,breast,uterine

SEQ ID NO: 463968 - DNA, 398 bp, Homo sapiens; identical to SEQ ID NO: 463071
  chr8:104511554-104511952
  hypo
  liver_bileduct vs. prostate,ovary,breast,uterine,lung, head_and_neck,non_cancer,bladder_and_urothelial

SEQ ID NO: 463969 - DNA, 430 bp, Homo sapiens; identical to SEQ ID NO: 463072
  chr8:104511554-104511984
  hypo
  liver_bileduct vs. head_and_neck,bladder_and_urothelial, ovary,melanoma,breast,prostate,cervical,uterine,lung,thyroid, non_cancer,sarcoma,renal

SEQ ID NO: 463970 - DNA, 18 bp, Homo sapiens
  chr8:104511966-104511984
  hypo
  liver_bileduct vs. melanoma,cervical,head_and_neck, sarcoma,anorectal,prostate,thyroid,lung,non_cancer,breast, uterine,bladder_and_urothelial,ovary,myeloid_neoplasm
cgctcagtctctcctccc

SEQ ID NO: 463971 - DNA, 12 bp, Homo sapiens
  chr8:133492249-133492261
  hypo
cgcgtgctgagg

SEQ ID NO: 463972 - DNA, 805 bp, Homo sapiens; identical to SEQ ID NO: 463075
  chr8:142138208-142139013
  hypo
  liver_bileduct vs. lung,pancreas_gallbladder, head_and_neck,breast

SEQ ID NO: 463973 - DNA, 973 bp, Homo sapiens; identical to SEQ ID NO: 463076
  chr8:142138536-142139509
  hypo
  liver_bileduct vs. lung,pancreas_gallbladder,ovary, head_and_neck,renal

SEQ ID NO: 463974 - DNA, 89 bp, Homo sapiens; identical to SEQ ID NO: 460536
  chr8:142243860-142243949
  hypo
  liver_bileduct vs. melanoma

SEQ ID NO: 463975 - DNA, 66 bp, Homo sapiens; identical to SEQ ID NO: 354264
  chr8:142244214-142244280
  hypo
  liver_bileduct vs. melanoma

SEQ ID NO: 463976 - DNA, 593 bp, Homo sapiens; identical to SEQ ID NO: 340079
  chr8:142262690-142263283
  hypo
  liver_bileduct vs. lung,upper_gi,pancreas_gallbladder, colorectal,renal

SEQ ID NO: 463977 - DNA, 450 bp, Homo sapiens; identical to SEQ ID NO: 463077
  chr8:142317706-142318156
  hypo
  liver_bileduct vs. lung,upper_gi,renal, pancreas_gallbladder,breast,ovary,head_and_neck,colorectal, cervical

SEQ ID NO: 463978 - DNA, 415 bp, Homo sapiens; identical to SEQ ID NO: 345317
  chr8:142318184-142318599
  hypo
  liver_bileduct vs. lung,upper_gi,renal, pancreas_gallbladder,breast,ovary,head_and_neck,colorectal, cervical

SEQ ID NO: 463979 - DNA, 77 bp, Homo sapiens
  chr8:142630171-142630248
  hypo
  liver_bileduct vs. anorectal
cgagggtggtgggcgccccggagcgctggtggggattgggcaaagacgtcaacaccagggctgtggaaggaggcgag

SEQ ID NO: 463980 - DNA, 337 bp, Homo sapiens; identical to SEQ ID NO: 364861
  chr8:142630288-142630625
  hypo
  liver_bileduct vs. anorectal

SEQ ID NO: 463981 - DNA, 70 bp, Homo sapiens
  chr8:142984443-142984513
  hypo
  liver_bileduct vs. renal
cgcaggtccgctctatcgcaggccgggcacgctttgctcagaggcccacactgcagaagtccagtctcag

SEQ ID NO: 463982 - DNA, 260 bp, Homo sapiens; identical to SEQ ID NO: 354278
  chr8:143662794-143663054
  hypo
  liver_bileduct vs. breast,anorectal

SEQ ID NO: 463983 - DNA, 878 bp, Homo sapiens; identical to SEQ ID NO: 333605
  chr9:503936-504814
  hypo
  liver_bileduct vs. upper_gi,lung

SEQ ID NO: 463984 - DNA, 772 bp, Homo sapiens; identical to SEQ ID NO: 463083
  chr9:504833-505605
  hypo
  liver_bileduct vs. colorectal

SEQ ID NO: 463985 - DNA, 82 bp, Homo sapiens; identical to SEQ ID NO: 372044
  chr9:505639-505721
  hypo
  liver_bileduct vs. colorectal

SEQ ID NO: 463986 - DNA, 200 bp, Homo sapiens; identical to SEQ ID NO: 354303
  chr9:2876419-2876619
  hypo
  liver_bileduct vs. ovary,bladder_and_urothelial

SEQ ID NO: 463987 - DNA, 715 bp, Homo sapiens
  chr9:2933129-2933844
  hypo
  liver_bileduct vs. sarcoma,ovary
cgctgccatgacgccggctgcagtggggtacaggagtaggtcgcgggtcctcaggtacagactctgaggtgtgcagcccctggagcctgcacctaggagcgcccccggaacctgctgccctgagaactcacccctgggagccccgggaatagggctgggcccagccaccccctggagggagagtagggaggtgaggcacagaaaatgggcagagagggtccccaagacagaactgggcccagggcggtgccgcgcttgcacgcggagcatgggggccgggcccgagacatggaactggggccccgcttcaggggcccagggcaagaagtgggagcggcacccacttcgaggacctgcccagtggcatgaccactgcgcccaacccgccgatggcgccaagttcctgcgcctcaggaagaggctccgtatggggccgcctgaggccgtatccccaggacctgccccacattaaggtgaccgctaagccagacaatcctgatggtgaggccccgtgcctgccatctgctcctggagacgccccccaaccccaggcatggccgtcagccggcgaggcggtactgaggcagggggcgcgtcctggtcattggagagtttcagcccagtgggtgaaccagacacactgttcaagggggcagcggttagtaagcaggacgagggggagccccaggccgcagggagaactcgtgacaacgtc

SEQ ID NO: 463988 - DNA, 98 bp, Homo sapiens; identical to SEQ ID NO: 378822
  chr9:2933873-2933971
  hypo
  liver_bileduct vs. sarcoma,ovary

SEQ ID NO: 463989 - DNA, 238 bp, Homo sapiens; identical to SEQ ID NO: 463087
  chr9:37035890-37036128
  hypo
  liver_bileduct vs. myeloid_neoplasm,uterine,thyroid, non_cancer,head_and_neck,ovary

SEQ ID NO: 463990 - DNA, 3 bp, Homo sapiens
  chr9:66494093-66494096
  hypo
  liver_bileduct vs. breast,bladder_and_urothelial
cgc

SEQ ID NO: 463991 - DNA, 1 bp, Homo sapiens
  chr9:71223967-71223968
  hypo
  liver_bileduct vs. pancreas_gallbladder,upper_gi, colorectal,lymphoid_neoplasm,anorectal,breast
c

SEQ ID NO: 463992 - DNA, 703 bp, Homo sapiens; identical to SEQ ID NO: 333740
  chr9:101569830-101570533
  hypo
  liver_bileduct vs. lung,upper_gi,bladder_and_urothelial, colorectal,pancreas_gallbladder

SEQ ID NO: 463993 - DNA, 88 bp, Homo sapiens; identical to SEQ ID NO: 340297
  chr9:119976921-119977009
  hypo
  liver_bileduct vs. pancreas_gallbladder

SEQ ID NO: 463994 - DNA, 83 bp, Homo sapiens; identical to SEQ ID NO: 463093
  chr9:124990438-124990521
  hypo
  liver_bileduct vs. ovary,lung

SEQ ID NO: 463995 - DNA, 142 bp, Homo sapiens; identical to SEQ ID NO: 345329
  chr9:124991012-124991154
  hypo
  liver_bileduct vs. ovary,lung

SEQ ID NO: 463996 - DNA, 351 bp, Homo sapiens; identical to SEQ ID NO: 340406
  chr9:137620493-137620844
  hypo
  liver_bileduct vs. bladder_and_urothelial

SEQ ID NO: 463997 - DNA, 51 bp, Homo sapiens
  chr9:137623301-137623352
  hypo
  liver_bileduct vs. lymphoid_neoplasm
cgtttgcgaggcaaccctgcgccttcctctccctctgcagccagctccgcc

SEQ ID NO: 463998 - DNA, 153 bp, Homo sapiens; identical to SEQ ID NO: 345982
  chr9:137623543-137623696
  hypo
  liver_bileduct vs. lymphoid_neoplasm

SEQ ID NO: 463999 - DNA, 473 bp, Homo sapiens; identical to SEQ ID NO: 354414
  chr9:137642188-137642661
  hypo
  liver_bileduct vs. breast

SEQ ID NO: 464000 - DNA, 305 bp, Homo sapiens; identical to SEQ ID NO: 340409
  chr9:137645508-137645813
  hypo
  liver_bileduct vs. breast,bladder_and_urothelial

SEQ ID NO: 464001 - DNA, 323 bp, Homo sapiens; identical to SEQ ID NO: 354418
  chr9:138662685-138663008
  hypo
  liver_bileduct vs. cervical,renal

SEQ ID NO: 464002 - DNA, 257 bp, Homo sapiens; identical to SEQ ID NO: 344897
  chrX:34149228-34149485
  hypo
  liver_bileduct vs. pancreas_gallbladder

SEQ ID NO: 464003 - DNA, 191 bp, Homo sapiens; identical to SEQ ID NO: 344924
  NW_001838286.2_1380778-1470498:80846-81037
  hypo
  liver_bileduct vs. pancreas_gallbladder,melanoma, colorectal,lymphoid_neoplasm,upper_gi,lung

SEQ ID NO: 464004 - DNA, 850 bp, Homo sapiens
  NW_001838286.2_1380778-1470498:81101-81951
  hypo
cggggcaaaaagccacggcggcaagggcaaaaagttgtggcttcgggggcaaaaaaccatagcagcggggcaaaaagcagtggtggcggcggggccagaaaaaccacaaaatcccgcggcgatggggggaaaagctgcaggggcaaaaagccgcagcagcagggggaaaaaagccgtaaaaagcagcagcggcgggggggcaaaaaccgtggcggcaaaaagcctcagcggcaggagcaaaaagccatggcggcaggggcaaaaaccgcagtggaaagaagactcagtggcaggagcaaaaacgatggctgtggggggcaaaaagccatgactgcaaaaactgcggagtgtgagcccaaaaagccatggcggtggggataaaaagccacagctgcaaaaagcagcggtggtggggataaaaagccgtggcggcaaaaacccgcagcagcacaggcaaaaagccgtggcagcaggggcaaaaagccacggtggcaggggcaaaaagccgcggcggtgagggcagaaagctgtggcttcgggggcaaataaacacggcggccaaaagccgtagtggcagggcaaaaagctgcagcagtgggggcaaaaagcagcgggagcgggtgcaaaaacccacaaaaacccatggcaacgggaggaaaaagccatggtggcaaaaagccacagtggcggggggtaaaaagccatggcggtgagggggcaaaaagccacaaaaagcagcgtcggcggggacaaaaaccacggcggcaaaaagcctcagtggcaggagcaaaaagccatggcggcggaggcaaaaagccgtggcagcaaaaacccgtggtggcaaaaaccc

SEQ ID NO: 464005 - DNA, 860 bp, Homo sapiens; identical to SEQ ID NO: 356624
  NW_001838286.2_1380778-1470498:81470-82330
  hypo
  liver_bileduct vs. melanoma,upper_gi

SEQ ID NO: 464006 - DNA, 133 bp, Homo sapiens
  NW_001840306.1_6328-82586:33382-33515
  hypo
  liver_bileduct vs. head_and_neck
cgcaacgaaaccccagacaacatcctccgttttcacaagagcggtgcctcccctggtcaccactgcgacccctgcttccagctggcacgagccacacacactgctcatttttctcagcgcctgattgtctgtc

SEQ ID NO: 464007 - DNA, 124 bp, Homo sapiens
  NW_001842432.1_1-179261:102996-103120
  hypo
cgttcctgatggaggccgtgggcctctttgtcctcgcttaccaggcagcagctccagccattctcagccccaccggtgggtgccgccttccatcaggccaaagactttccgaaactgcccttct

SEQ ID NO: 464008 - DNA, 62 bp, Homo sapiens; identical to SEQ ID NO: 368952
  NW_001842432.1_1-179261:103214-103276
  hypo

SEQ ID NO: 464009 - DNA, 59 bp, Homo sapiens
  chr1:1566482-1566541
  hyper
  lung vs. anorectal,cervical
cgccagctgcttggcgctgaccccgttggccgggctgccgtcaccctgggcccgacgcc

SEQ ID NO: 464010 - DNA, 97 bp, Homo sapiens; identical to SEQ ID NO: 349142
  chr1:1566979-1567076
  hyper
  lung vs. anorectal

SEQ ID NO: 464011 - DNA, 14 bp, Homo sapiens
  chr1:2375641-2375655
  hyper
  lung vs. breast
gggggccgcccctc

SEQ ID NO: 464012 - DNA, 56 bp, Homo sapiens; identical to SEQ ID NO: 356644
  chr1:6302010-6302066
  hyper
  lung vs. ovary

SEQ ID NO: 464013 - DNA, 220 bp, Homo sapiens; identical to SEQ ID NO: 455498
  chr1:6479997-6480217
  hyper
  lung vs. upper_gi

SEQ ID NO: 464014 - DNA, 64 bp, Homo sapiens; identical to SEQ ID NO: 346318
  chr1:12123950-12124014
  hyper
  lung vs. lymphoid_neoplasm

SEQ ID NO: 464015 - DNA, 57 bp, Homo sapiens
  chr1:18960805-18960862
  hyper
  lung vs. renal
cgcttggccaaggccgggtcaatcagctgggaggggtcttcatcaatgggcgacccc

SEQ ID NO: 464016 - DNA, 125 bp, Homo sapiens; identical to SEQ ID NO: 369025
  chr1:18963947-18964072
  hyper
  lung vs. ovary

SEQ ID NO: 464017 - DNA, 201 bp, Homo sapiens; identical to SEQ ID NO: 344942
  chr1:20512799-20513000
  hyper
  lung vs. liver_bileduct

SEQ ID NO: 464018 - DNA, 33 bp, Homo sapiens; identical to SEQ ID NO: 454089
  chr1:25255579-25255612
  hyper
  lung vs. lymphoid_neoplasm

SEQ ID NO: 464019 - DNA, 7 bp, Homo sapiens
  chr1:25255934-25255941
  hyper
  lung vs. lymphoid_neoplasm
agccaga

SEQ ID NO: 464020 - DNA, 149 bp, Homo sapiens; identical to SEQ ID NO: 454092
  chr1:29585852-29586001
  hyper
  lung vs. breast,prostate,head_and_neck,uterine, multiple_myeloma,thyroid,non_cancer,renal,colorectal, myeloid_neoplasm,upper_gi,pancreas_gallbladder,sarcoma,cervical

SEQ ID NO: 464021 - DNA, 5 bp, Homo sapiens
  chr1:29804763-29804768
  hyper
  lung vs. bladder_and_urothelial
cgctg

SEQ ID NO: 464022 - DNA, 130 bp, Homo sapiens; identical to SEQ ID NO: 454093
  chr1:32410105-32410235
  hyper
  lung vs. upper_gi,colorectal

SEQ ID NO: 464023 - DNA, 91 bp, Homo sapiens; identical to SEQ ID NO: 349210
  chr1:33772615-33772706
  hyper
  lung vs. cervical,head_and_neck,breast, bladder_and_urothelial

SEQ ID NO: 464024 - DNA, 15 bp, Homo sapiens
  chr1:35390551-35390566
  hyper
  lung vs. head_and_neck
cgggaccgaacgaag

SEQ ID NO: 464025 - DNA, 21 bp, Homo sapiens
  chr1:36042458-36042479
  hyper
  lung vs. renal,non_cancer,multiple_myeloma,prostate, thyroid,myeloid_neoplasm
cgggacgcggccgcgcggact

SEQ ID NO: 464026 - DNA, 79 bp, Homo sapiens; identical to SEQ ID NO: 356733
  chr1:37721195-37721274
  hyper
  lung vs. upper_gi,liver_bileduct

SEQ ID NO: 464027 - DNA, 183 bp, Homo sapiens
  chr1:40149563-40149746
  hyper
  lung vs. head_and_neck
cgaagcgctggcctcgggaacagcagcgcccgcgcggccccgcacctcgatgatctccagcatctccaggcgcgtgatgcgcccgtcgccgtccaggtcgtacatctcaaaggcccagttgagcttctgctcgaagctgccgcgggaggtgaccgacagggcgcagatgaactcccggaagtc

SEQ ID NO: 464028 - DNA, 10 bp, Homo sapiens
  chr1:40149784-40149794
  hyper
  lung vs. head_and_neck
cgtgctgcgc

SEQ ID NO: 464029 - DNA, 1 bp, Homo sapiens
  chr1:41284752-41284753
  hyper
  lung vs. multiple_myeloma,bladder_and_urothelial
c

SEQ ID NO: 464030 - DNA, 2 bp, Homo sapiens
  chr1:46951168-46951170
  hyper
cg

SEQ ID NO: 464031 - DNA, 255 bp, Homo sapiens; identical to SEQ ID NO: 346339
  chr1:46957171-46957426
  hyper
  lung vs. myeloid_neoplasm,non_cancer,multiple_myeloma, prostate,thyroid

SEQ ID NO: 464032 - DNA, 114 bp, Homo sapiens; identical to SEQ ID NO: 344955
  chr1:50893877-50893991
  hyper
  lung vs. breast,myeloid_neoplasm,prostate

SEQ ID NO: 464033 - DNA, 9 bp, Homo sapiens
  chr1:61519352-61519361
  hyper
  lung vs. upper_gi
cgaattaat

SEQ ID NO: 464034 - DNA, 266 bp, Homo sapiens; identical to SEQ ID NO: 369143
  chr1:61519704-61519970
  hyper
  lung vs. upper_gi

SEQ ID NO: 464035 - DNA, 103 bp, Homo sapiens; identical to SEQ ID NO: 460586
  chr1:63791875-63791978
  hyper
  lung vs. colorectal,upper_gi,bladder_and_urothelial

SEQ ID NO: 464036 - DNA, 164 bp, Homo sapiens; identical to SEQ ID NO: 460587
  chr1:63792016-63792180
  hyper
  lung vs. colorectal,upper_gi,bladder_and_urothelial

SEQ ID NO: 464037 - DNA, 50 bp, Homo sapiens; identical to SEQ ID NO: 356786
  chr1:63792231-63792281
  hyper
  lung vs. colorectal,upper_gi,bladder_and_urothelial

SEQ ID NO: 464038 - DNA, 260 bp, Homo sapiens; identical to SEQ ID NO: 452717
  chr1:63793072-63793332
  hyper
  lung vs. uterine,thyroid

SEQ ID NO: 464039 - DNA, 47 bp, Homo sapiens; identical to SEQ ID NO: 349264
  chr1:75603159-75603206
  hyper
  lung vs. prostate,myeloid_neoplasm

SEQ ID NO: 464040 - DNA, 4 bp, Homo sapiens
  chr1:78511432-78511436
  hyper
  lung vs. pancreas_gallbladder,upper_gi,colorectal, sarcoma
cgtg

SEQ ID NO: 464041 - DNA, 78 bp, Homo sapiens; identical to SEQ ID NO: 455534
  chr1:85773944-85774022
  hyper
  lung vs. pancreas_gallbladder

SEQ ID NO: 464042 - DNA, 112 bp, Homo sapiens; identical to SEQ ID NO: 346347
  chr1:85774083-85774195
  hyper
  lung vs. pancreas_gallbladder

SEQ ID NO: 464043 - DNA, 438 bp, Homo sapiens
  chr1:90308855-90309293
  hyper
  lung vs. pancreas_gallbladder
cggcggaggaagcgtggagtccattgatctaggtacttgtggggaggggagaacccgagcagcagctgcaaacggaagggctgtgagcgagcgggcgggcgggtggctggcagcgaggccaccagcagggggggcccgggccgaggccgcgccacctcggcaccacgcgggcagccggtgcggcggggtcgccacggccaggggagcgctgggtgcccaccatggcagttatgcaagcggtgaccccctggtcttgcctccccgccgccctgcactccttcctccccgctgccgacacttggatctctctagctctttctctcccctgtgttttcaaacaggaagtgcacggctgtctataacgtgctgccgggtctcaggatggaggagtgaagtctcctgtcgccgtggttccagcctccggagctcgcccaagcc

SEQ ID NO: 464044 - DNA, 115 bp, Homo sapiens; identical to SEQ ID NO: 344961
  chr1:90309490-90309605
  hyper
  lung vs. pancreas_gallbladder

SEQ ID NO: 464045 - DNA, 171 bp, Homo sapiens; identical to SEQ ID NO: 330889
  chr1:91170461-91170632
  hyper

SEQ ID NO: 464046 - DNA, 28 bp, Homo sapiens
  chr1:91180306-91180334
  hyper
  lung vs. bladder_and_urothelial
tttgtccctaccatagaaacccagccac

SEQ ID NO: 464047 - DNA, 61 bp, Homo sapiens; identical to SEQ ID NO: 455537
  chr1:91185065-91185126
  hyper
  lung vs. multiple_myeloma,thyroid,myeloid_neoplasm

SEQ ID NO: 464048 - DNA, 142 bp, Homo sapiens; identical to SEQ ID NO: 344962
  chr1:92949466-92949608
  hyper
  lung vs. bladder_and_urothelial

SEQ ID NO: 464049 - DNA, 27 bp, Homo sapiens
  chr1:92949665-92949692
  hyper
cggggggaggggggaacagaacacaag

SEQ ID NO: 464050 - DNA, 228 bp, Homo sapiens; identical to SEQ ID NO: 452729
  chr1:92950207-92950435
  hyper

SEQ ID NO: 464051 - DNA, 228 bp, Homo sapiens; identical to SEQ ID NO: 452729
  chr1:92950207-92950435
  hyper

SEQ ID NO: 464052 - DNA, 148 bp, Homo sapiens; identical to SEQ ID NO: 349288
  chr1:95428574-95428722
  hyper
  lung vs. pancreas_gallbladder,colorectal

SEQ ID NO: 464053 - DNA, 185 bp, Homo sapiens; identical to SEQ ID NO: 455547
  chr1:101774910-101775095
  hyper
  lung vs. head_and_neck

SEQ ID NO: 464054 - DNA, 25 bp, Homo sapiens
  chr1:101775488-101775513
  hyper
  lung vs. head_and_neck
ctcttgtgttgcacttgtgtccccc

SEQ ID NO: 464055 - DNA, 306 bp, Homo sapiens; identical to SEQ ID NO: 452735
  chr1:108506290-108506596
  hyper
  lung vs. multiple_myeloma

SEQ ID NO: 464056 - DNA, 66 bp, Homo sapiens; identical to SEQ ID NO: 455550
  chr1:110672768-110672834
  hyper
  lung vs. bladder_and_urothelial,anorectal

SEQ ID NO: 464057 - DNA, 818 bp, Homo sapiens; identical to SEQ ID NO: 330937
  chr1:113498720-113499538
  hyper
  lung vs. upper_gi

SEQ ID NO: 464058 - DNA, 142 bp, Homo sapiens
  chr1:119548917-119549059
  hyper
  lung vs. myeloid_neoplasm
tcttctaaggatgaagaggacattataaaactgcacactacctccctaatggcccattcgtcctagctctgtctagtgaagtagagagcagaaaaaaacatctagctctatcaagttgaaaacattttcacattcaccttaa

SEQ ID NO: 464059 - DNA, 34 bp, Homo sapiens
  chr1:150947664-150947698
  hyper
  lung vs. upper_gi
cggcccccggtccccgccagggtgggcacattcc

SEQ ID NO: 464060 - DNA, 1 bp, Homo sapiens
  chr1:152080369-152080370
  hyper
  lung vs. melanoma,breast
c

SEQ ID NO: 464061 - DNA, 322 bp, Homo sapiens
  chr1:152080641-152080963
  hyper
  lung vs. melanoma,breast
agctgctgttcctccccttcctggagcagctgttcctcttcacggaattttctgtcgcggtcgtgacgcagctgttgttcgcgctcctggcggcgcagctgcggttcctcctcgaggaattttctgtcacgctcttggcggtgcagctgctgttcttccctttcctggagcagctgttcgtcttcgcggaattttctgtcgcgctcctggcgcagctgttgttggccctcctggcggcgcagctgctgttcgtcctccatgaattttctctcttgttcctggcggcgcactttctgttcctctaaacggaattttctgtcac

SEQ ID NO: 464062 - DNA, 13 bp, Homo sapiens
  chr1:153438455-153438468
  hyper
  lung vs. pancreas_gallbladder,colorectal,upper_gi, bladder_and_urothelial,melanoma
cttgccggttctc

SEQ ID NO: 464063 - DNA, 30 bp, Homo sapiens
  chr1:156405338-156405368
  hyper
  lung vs. thyroid,myeloid_neoplasm,ovary,multiple_myeloma
cggggccaggccaaaaccaggctggaaccc

SEQ ID NO: 464064 - DNA, 629 bp, Homo sapiens; identical to SEQ ID NO: 356926
  chr1:166135586-166136215
  hyper
  lung vs. sarcoma

SEQ ID NO: 464065 - DNA, 17 bp, Homo sapiens
  chr1:170630320-170630337
  hyper
  lung vs. prostate,thyroid
tatgtgtaggggaaaaa

SEQ ID NO: 464066 - DNA, 136 bp, Homo sapiens
  chr1:170637507-170637643
  hyper
  lung vs. colorectal,pancreas_gallbladder,upper_gi
cgaaaccagattgtcctaataagaccttttgttggaaacacatgtagtcataaaaaggtagacggaaagtcaattagacacgcgcgcacacacgcacacattcacaagccggtgctaagtgtgcacccggcgcagc

SEQ ID NO: 464067 - DNA, 27 bp, Homo sapiens
  chr1:170637810-170637837
  hyper
  lung vs. colorectal,pancreas_gallbladder,upper_gi
caggagagcgggaacattttctagggc

SEQ ID NO: 464068 - DNA, 78 bp, Homo sapiens
  chr1:182911469-182911547
  hyper
  lung vs. bladder_and_urothelial
cgccccgatctcctgttgggctcttccttggcggccccttcggcggagctgaccttcctcttgggtatcctggcggca

SEQ ID NO: 464069 - DNA, 8 bp, Homo sapiens
  chr1:182911576-182911584
  hyper
  lung vs. bladder_and_urothelial
cgtggcgc

SEQ ID NO: 464070 - DNA, 51 bp, Homo sapiens; identical to SEQ ID NO: 462272
  chr1:197882002-197882053
  hyper
  lung vs. bladder_and_urothelial,cervical,head_and_neck

SEQ ID NO: 464071 - DNA, 220 bp, Homo sapiens; identical to SEQ ID NO: 462273
  chr1:197882208-197882428
  hyper
  lung vs. bladder_and_urothelial,cervical,head_and_neck

SEQ ID NO: 464072 - DNA, 261 bp, Homo sapiens; identical to SEQ ID NO: 279146
  chr1:197882611-197882872
  hyper
  lung vs. bladder_and_urothelial,cervical,head_and_neck

SEQ ID NO: 464073 - DNA, 93 bp, Homo sapiens; identical to SEQ ID NO: 349371
  chr1:200012227-200012320
  hyper
  lung vs. colorectal,upper_gi,pancreas_gallbladder, uterine

SEQ ID NO: 464074 - DNA, 160 bp, Homo sapiens; identical to SEQ ID NO: 331074
  chr1:202112280-202112440
  hyper
  lung vs. breast

SEQ ID NO: 464075 - DNA, 70 bp, Homo sapiens; identical to SEQ ID NO: 349391
  chr1:214387777-214387847
  hyper
  lung vs. pancreas_gallbladder,breast,upper_gi

SEQ ID NO: 464076 - DNA, 84 bp, Homo sapiens; identical to SEQ ID NO: 452746
  chr1:221051890-221051974
  hyper
  lung vs. ovary,uterine

SEQ ID NO: 464077 - DNA, 38 bp, Homo sapiens; identical to SEQ ID NO: 452747
  chr1:223936543-223936581
  hyper
  lung vs. prostate,non_cancer,multiple_myeloma,renal, thyroid,myeloid_neoplasm,uterine

SEQ ID NO: 464078 - DNA, 25 bp, Homo sapiens
  chr1:228644877-228644902
  hyper
  lung vs. melanoma
cgagggttccctgttgttaacagaa

SEQ ID NO: 464079 - DNA, 17 bp, Homo sapiens
  chr1:228645891-228645908
  hyper
  lung vs. melanoma
aggcacagaagaaggac

SEQ ID NO: 464080 - DNA, 9 bp, Homo sapiens
  chr1:228652216-228652225
  hyper
  lung vs. multiple_myeloma
cgtccttct

SEQ ID NO: 464081 - DNA, 142 bp, Homo sapiens; identical to SEQ ID NO: 357036
  chr1:228652629-228652771
  hyper
  lung vs. multiple_myeloma

SEQ ID NO: 464082 - DNA, 175 bp, Homo sapiens
  chr1:234736252-234736427
  hyper
  lung vs. pancreas_gallbladder,upper_gi
cgatacaaagtgaaaaaataaattttttaaaaaagaaagggaaaaactacaatttgaccattctgaccagcctccttgttccaactggcctcttgatttgtataaagataatggggtccggcggcccccttgatgcatgaattgcacgctgggcataatgaacttattgtgcgaa

SEQ ID NO: 464083 - DNA, 157 bp, Homo sapiens
  chr1:243646223-243646380
  hyper
  lung vs. anorectal
cgtgtgtggttcgcaggctgtggggggcttcttgcagcgggggctgctgcctaaacagactccgcgggccccatgatggcaaaccccctcgccccgttcatgacttaatgcctcctagaagaaaaggctaaaaacaagacacacagaacaagaaatt

SEQ ID NO: 464084 - DNA, 1 bp, Homo sapiens
  chr1:243646877-243646878
  hyper
  lung vs. anorectal
c

SEQ ID NO: 464085 - DNA, 52 bp, Homo sapiens; identical to SEQ ID NO: 462290
  chr10:8097537-8097589
  hyper
  lung vs. breast

SEQ ID NO: 464086 - DNA, 101 bp, Homo sapiens; identical to SEQ ID NO: 457323
  chr10:11207330-11207431
  hyper
  lung vs. melanoma,sarcoma

SEQ ID NO: 464087 - DNA, 156 bp, Homo sapiens; identical to SEQ ID NO: 459304
  chr10:11207724-11207880
  hyper
  lung vs. melanoma,sarcoma

SEQ ID NO: 464088 - DNA, 398 bp, Homo sapiens; identical to SEQ ID NO: 454118
  chr10:43892377-43892775
  hyper
  lung vs. pancreas_gallbladder

SEQ ID NO: 464089 - DNA, 171 bp, Homo sapiens; identical to SEQ ID NO: 347088
  chr10:43892970-43893141
  hyper
  lung vs. pancreas_gallbladder

SEQ ID NO: 464090 - DNA, 54 bp, Homo sapiens
  chr10:50815014-50815068
  hyper
  lung vs. liver_bileduct
cgttttctcctacaggattggacaggaagttctctgttgcctgcaagttatgct

SEQ ID NO: 464091 - DNA, 159 bp, Homo sapiens; identical to SEQ ID NO: 359567
  chr10:50815344-50815503
  hyper
  lung vs. liver_bileduct

SEQ ID NO: 464092 - DNA, 86 bp, Homo sapiens; identical to SEQ ID NO: 460634
  chr10:72015065-72015151
  hyper
  lung vs. anorectal,cervical,multiple_myeloma, bladder_and_urothelial

SEQ ID NO: 464093 - DNA, 147 bp, Homo sapiens; identical to SEQ ID NO: 455589
  chr10:73846836-73846983
  hyper
  lung vs. pancreas_gallbladder

SEQ ID NO: 464094 - DNA, 164 bp, Homo sapiens; identical to SEQ ID NO: 351056
  chr10:73847427-73847591
  hyper
  lung vs. pancreas_gallbladder

SEQ ID NO: 464095 - DNA, 428 bp, Homo sapiens
  chr10:94450942-94451370
  hyper
  lung vs. thyroid,myeloid_neoplasm
cgccagttaggaagggaagcagggacacatagggcatatattccagaacttcggggcttgtcccctcaatgtgcggcctaacaaataagccgcccgtggtccgcgctgtgggtgacccttggcgccttcgaggtctggagccctagggtaaataaggaaacggggcgcctctagagttttaaatgaactctgttattggaagcttcagtagggaccctgaaaacaattaacgtcttaattagcattttaatgtctccattattacggcgcgggctctagctcagccctttaccttaccttctcaccgttaacaggggagggggattgtatttttagttcatctttttatgtttttgagttgttatcctgtctgtctgattccagcctcgagggtttgatgatgcggcccgagcctggctgtggtcgcc

SEQ ID NO: 464096 - DNA, 20 bp, Homo sapiens
  chr10:100993468-100993488
  hyper
  lung vs. thyroid,breast
cgtggctaccccagggtctt

SEQ ID NO: 464097 - DNA, 124 bp, Homo sapiens; identical to SEQ ID NO: 345364
  chr10:100994695-100994819
  hyper
  lung vs. breast

SEQ ID NO: 464098 - DNA, 313 bp, Homo sapiens
  chr10:101279860-101280173
  hyper
  lung vs. upper_gi
cggggccaatcagcagccataaatcttagagaaccttcaccgttttacaagggagttcgcaggggctgcccttctccctcacgcggtctatttacaacgccgaaatctccgtgttaatggacctaggataatggtgtttactttaccgcgataaagcgctgggcttcctgggggagcggctgtaaaatgtcctggaggtagggatggaacgggcgccgtaaaagcgggcgctggaagggcgggggcaccaggttctccttcaggccggcgcccccgccctccaccctctaggccaggctgagcagcccaggcc

SEQ ID NO: 464099 - DNA, 34 bp, Homo sapiens; identical to SEQ ID NO: 455599
  chr10:102995986-102996020
  hyper
  lung vs. thyroid,myeloid_neoplasm,non_cancer

SEQ ID NO: 464100 - DNA, 233 bp, Homo sapiens
  chr10:112403994-112404227
  hyper
  lung vs. anorectal
ggcccccgcccccgcgtggccggccgggacgagctggagcagcgggaggaggcggcgccgccaggactgcctcctccccgcccctcgcgtctcctccccgcgccaccgggaaggacaaggggactgggcacggggaccccggccagtgagcgcccgtggcccgggaccgcccctcccttgagctctctcgccgcgatcccgggcgggtctcgccccgcatggtgctggcagca

SEQ ID NO: 464101 - DNA, 654 bp, Homo sapiens; identical to SEQ ID NO: 334071
  chr10:114708972-114709626
  hyper
  lung vs. colorectal

SEQ ID NO: 464102 - DNA, 240 bp, Homo sapiens; identical to SEQ ID NO: 454122
  chr10:118891774-118892014
  hyper
  lung vs. multiple_myeloma,thyroid,myeloid_neoplasm, prostate,non_cancer

SEQ ID NO: 464103 - DNA, 240 bp, Homo sapiens; identical to SEQ ID NO: 454122
  chr10:118891774-118892014
  hyper
  lung vs. thyroid,prostate,multiple_myeloma,non_cancer

SEQ ID NO: 464104 - DNA, 20 bp, Homo sapiens
  chr10:119300904-119300924
  hyper
  lung vs. ovary
cgccagcagcctggggatgt

SEQ ID NO: 464105 - DNA, 138 bp, Homo sapiens; identical to SEQ ID NO: 345371
  chr10:122708760-122708898
  hyper
  lung vs. renal,pancreas_gallbladder,multiple_myeloma, thyroid,sarcoma,melanoma,myeloid_neoplasm,prostate,non_cancer, colorectal,lymphoid_neoplasm,bladder_and_urothelial,breast

SEQ ID NO: 464106 - DNA, 23 bp, Homo sapiens
  chr10:124899013-124899036
  hyper
  lung vs. bladder_and_urothelial,upper_gi
cgctgactgcctctgcgctctct

SEQ ID NO: 464107 - DNA, 368 bp, Homo sapiens
  chr10:124899187-124899555
  hyper
  lung vs. bladder_and_urothelial,upper_gi
cttaggcttatctagtttgcgaaattgagcaaagcgacagcgcgcgaggcgagataccagagacagctggtatttccgaacactggtctgcagcctcccgttctgttcttaaacctgggttccttcgggagccgagagcttttgggcagggcatccctgggcattcgtcagctggttaacttcggtgggctctggttggagggaagaagggagtgagttcagagtttagctgcagccgtaggccgattgccaagtcaggctaggaaaggctgggccacaagaggacaaccccagggacagccagctcttgggacagcggctcccactaccaggagaggggaacttcctcaggtcttgcagagctgaga

SEQ ID NO: 464108 - DNA, 203 bp, Homo sapiens
  chr10:124899352-124899555
  hyper
  lung vs. upper_gi
cgtcagctggttaacttcggtgggctctggttggagggaagaagggagtgagttcagagtttagctgcagccgtaggccgattgccaagtcaggctaggaaaggctgggccacaagaggacaaccccagggacagccagctcttgggacagcggctcccactaccaggagaggggaacttcctcaggtcttgcagagctgaga

SEQ ID NO: 464109 - DNA, 4 bp, Homo sapiens
  chr10:125650746-125650750
  hyper
  lung vs. melanoma
cggc

SEQ ID NO: 464110 - DNA, 1 bp, Homo sapiens
  chr11:407389-407390
  hyper
  lung vs. head_and_neck
c

SEQ ID NO: 464111 - DNA, 2 bp, Homo sapiens
  chr11:407531-407533
  hyper
  lung vs. head_and_neck
tc

SEQ ID NO: 464112 - DNA, 8 bp, Homo sapiens
  chr11:19264049-19264057
  hyper
  lung vs. bladder_and_urothelial
ggtctctc

SEQ ID NO: 464113 - DNA, 28 bp, Homo sapiens
  chr11:19264093-19264121
  hyper
  lung vs. bladder_and_urothelial
cgcgtgtctttaggctccagcagggccc

SEQ ID NO: 464114 - DNA, 87 bp, Homo sapiens
  chr11:20230312-20230399
  hyper
  lung vs. anorectal
cgcattcccactccagacgccgcagttttgaggcgcaatggggcctttggcctgatcatactcaggaatccttttaggccctttggc

SEQ ID NO: 464115 - DNA, 53 bp, Homo sapiens; identical to SEQ ID NO: 351169
  chr11:20230510-20230563
  hyper
  lung vs. anorectal

SEQ ID NO: 464116 - DNA, 225 bp, Homo sapiens
  chr11:31821778-31822003
  hyper
  lung vs. prostate
tgctcaccttttcatgtgcaccctactcatagtcacataatttgtcaattacagcaaaaagcaacaggatacaattatgttaacctcgcagtctgtcagtgcgttatcttgtcacacttctacaagggggctctccctgcattctaatgtcaaatttgaatagtgcaccacgcagctcgttcttatgcacacagtgctgcccacaaacacacacacgcacccacc

SEQ ID NO: 464117 - DNA, 100 bp, Homo sapiens; identical to SEQ ID NO: 351175
  chr11:31842276-31842376
  hyper
  lung vs. anorectal,cervical,myeloid_neoplasm

SEQ ID NO: 464118 - DNA, 52 bp, Homo sapiens
  chr11:57056851-57056903
  hyper
  lung vs. cervical
cgaaaacaaagggctgggtcaataaatctgccgcagcagccgtggatcagtg

SEQ ID NO: 464119 - DNA, 15 bp, Homo sapiens
  chr11:57056934-57056949
  hyper
  lung vs. cervical
cagtttctctgaaac

SEQ ID NO: 464120 - DNA, 20 bp, Homo sapiens
  chr11:60718609-60718629
  hyper
  lung vs. cervical,thyroid,multiple_myeloma,non_cancer, lymphoid_neoplasm
cggcgacgcgggcatctctc

SEQ ID NO: 464121 - DNA, 198 bp, Homo sapiens; identical to SEQ ID NO: 351218
  chr11:65185728-65185926
  hyper
  lung vs. cervical,upper_gi,anorectal

SEQ ID NO: 464122 - DNA, 133 bp, Homo sapiens; identical to SEQ ID NO: 459356
  chr11:67895663-67895796
  hyper
  lung vs. liver_bileduct

SEQ ID NO: 464123 - DNA, 270 bp, Homo sapiens
  chr11:68095765-68096035
  hyper
  lung vs. upper_gi,ovary
cgatgataaatttggcatgtctttattattattattttttcaacacttaaagaaaataaaagctggtacaaaggtatgtttgtttctgaaatgtgtttccttccccagatgttcttttctgccagttctaaaatgcgttctgagctcggtcctccagtttcctccctgtgaggaagaacaatgagacctttgtaaccacacaggggaaacggccgcttccctctgcagtgggcatgggggaggggctgggacgtcccacctcctcccacc

SEQ ID NO: 464124 - DNA, 13 bp, Homo sapiens
  chr11:119613444-119613457
  hyper
  lung vs. ovary,bladder_and_urothelial
ggcttatcagcgc

SEQ ID NO: 464125 - DNA, 17 bp, Homo sapiens
  chr11:133938756-133938773
  hyper
  lung vs. melanoma
cgccaagttcattgaaa

SEQ ID NO: 464126 - DNA, 161 bp, Homo sapiens; identical to SEQ ID NO: 345407
  chr11:133939437-133939598
  hyper
  lung vs. melanoma

SEQ ID NO: 464127 - DNA, 86 bp, Homo sapiens; identical to SEQ ID NO: 452813
  chr12:4377809-4377895
  hyper
  lung vs. lymphoid_neoplasm,ovary,colorectal

SEQ ID NO: 464128 - DNA, 142 bp, Homo sapiens; identical to SEQ ID NO: 452814
  chr12:4378558-4378700
  hyper
  lung vs. lymphoid_neoplasm,ovary,colorectal

SEQ ID NO: 464129 - DNA, 245 bp, Homo sapiens; identical to SEQ ID NO: 452815
  chr12:4378558-4378803
  hyper
  lung vs. lymphoid_neoplasm,colorectal,ovary,non_cancer, melanoma

SEQ ID NO: 464130 - DNA, 88 bp, Homo sapiens; identical to SEQ ID NO: 454142
  chr12:4378715-4378803
  hyper
  lung vs. colorectal,melanoma

SEQ ID NO: 464131 - DNA, 247 bp, Homo sapiens; identical to SEQ ID NO: 455641
  chr12:4379920-4380167
  hyper
  lung vs. colorectal

SEQ ID NO: 464132 - DNA, 202 bp, Homo sapiens; identical to SEQ ID NO: 454143
  chr12:4381232-4381434
  hyper
  lung vs. colorectal

SEQ ID NO: 464133 - DNA, 167 bp, Homo sapiens; identical to SEQ ID NO: 347205
  chr12:4382439-4382606
  hyper
  lung vs. colorectal

SEQ ID NO: 464134 - DNA, 95 bp, Homo sapiens; identical to SEQ ID NO: 347209
  chr12:6445038-6445133
  hyper
  lung vs. liver_bileduct,pancreas_gallbladder,colorectal

SEQ ID NO: 464135 - DNA, 107 bp, Homo sapiens; identical to SEQ ID NO: 345417
  chr12:14928211-14928318
  hyper
  lung vs. liver_bileduct

SEQ ID NO: 464136 - DNA, 669 bp, Homo sapiens
  chr12:29301988-29302657
  hyper
  lung vs. upper_gi
cgaatggaagcgcggggcgggcctgcgcgcgcggccgccctgcccacgatgctgtcgcccccgcgacctgtagggccttcgctggcccctcaccctcctcccgccccgggctgaggctgccgccggtttcgcgcccagtgccgaggcagcggcggagccggggaaggtcggagggagggtggtttcctcccgccccacacccagtctccgagccggatatatagagtgtcacgtttgggagccgaaagactggagccgtttccttgtggctggagcgcttcccgtagcctcggggaaggagcaggatttagaggaccactagttggaccccatcctcgtgctggaggaacaggtattccagggtccccagccctggcgctcgcagagcccacgcgctccaaaagcagagaccggactgggggtggcccaggagggagggctcggctgggttcgcagggcggggcggttcccggcgggacctcgaggagggtgggtgtgaggccgggtgggaggagagaagcatttgcggaggctctgccccctgaagctgcccccggctgcaccccaatcgtcaccggccgtttacgcgcggttggcgtcggcggagcccgccaaggtggggcgcgcgggggttgcaaagggcagaaagccgggaaggacccagcaagg

SEQ ID NO: 464137 - DNA, 86 bp, Homo sapiens
  chr12:29302688-29302774
  hyper
  lung vs. upper_gi
ggacccgggaagagaggcgcggggccgagtcccacccaggcctcctgggcccttggggctattcctggagagagcgcgaaaatgcc

SEQ ID NO: 464138 - DNA, 3 bp, Homo sapiens
  chr12:52401537-52401540
  hyper
  lung vs. anorectal
tcc

SEQ ID NO: 464139 - DNA, 54 bp, Homo sapiens; identical to SEQ ID NO: 347231
  chr12:52401605-52401659
  hyper
  lung vs. anorectal

SEQ ID NO: 464140 - DNA, 394 bp, Homo sapiens
  chr12:54378327-54378721
  hyper
  lung vs. breast
tttagtcctgtttggtattccttaactttttttcccctttctctgctcatcagatccccccaaacccccccccccacaaacctcaccccactcccatccccaaggtaagaagtgggagtcgggtccggggatatggaaaggggagatgaagagtggggagaagtacctgattcgtgtctcgaccttttaatttgaatttgactgttttgagccccgggttgcctcgctctctccctctctcccgcatttcccccctctccgcccccttctccccaggagttacaggctggttactggataaacaaaccccactcttcctagaacccccacccccacccccacccccctccacccctctacctcccctgccgcccggggggcgcttcctttgttc

SEQ ID NO: 464141 - DNA, 104 bp, Homo sapiens
  chr12:54393256-54393360
  hyper
  lung vs. breast
cgctccccttccctccttccctccctgtatctcagcttccccagtcccctcccaccctccctccctcaccgcccctgctgctcctgaaagaaatacatacatac

SEQ ID NO: 464142 - DNA, 30 bp, Homo sapiens; identical to SEQ ID NO: 455672
  chr12:54521011-54521041
  hyper
  lung vs. pancreas_gallbladder,cervical,anorectal

SEQ ID NO: 464143 - DNA, 189 bp, Homo sapiens; identical to SEQ ID NO: 351378
  chr12:57619157-57619346
  hyper
  lung vs. pancreas_gallbladder,uterine

SEQ ID NO: 464144 - DNA, 184 bp, Homo sapiens; identical to SEQ ID NO: 345428
  chr12:63026256-63026440
  hyper
  lung vs. pancreas_gallbladder,sarcoma,ovary,uterine, upper_gi

SEQ ID NO: 464145 - DNA, 14 bp, Homo sapiens
  chr12:65220439-65220453
  hyper
  lung vs. ovary
cttaatattccttc

SEQ ID NO: 464146 - DNA, 204 bp, Homo sapiens
  chr12:66122570-66122774
  hyper
  lung vs. uterine,myeloid_neoplasm,ovary,thyroid,breast, multiple_myeloma,prostate,non_cancer
aggagctgtcaggctaatctgaggacatttagggaaagccaataaactgtcacgaacttaaaacaagtgaggtttctcgtggtttggtcgaaattttaacacttctcctctcctacccttcacctcttctcctcaaaacacttttttttcttttacaataactgtaaatgccagctctaaatttccctccaatctgggaaagtc

SEQ ID NO: 464147 - DNA, 88 bp, Homo sapiens; identical to SEQ ID NO: 360168
  chr12:85674884-85674972
  hyper
  lung vs. melanoma

SEQ ID NO: 464148 - DNA, 321 bp, Homo sapiens; identical to SEQ ID NO: 455674
  chr12:111844290-111844611
  hyper
  lung vs. liver_bileduct,lymphoid_neoplasm

SEQ ID NO: 464149 - DNA, 99 bp, Homo sapiens; identical to SEQ ID NO: 351412
  chr12:111844690-111844789
  hyper
  lung vs. liver_bileduct,lymphoid_neoplasm

SEQ ID NO: 464150 - DNA, 9 bp, Homo sapiens
  chr12:116946078-116946087
  hyper
  lung vs. ovary,uterine,multiple_myeloma
cgccaagct

SEQ ID NO: 464151 - DNA, 58 bp, Homo sapiens; identical to SEQ ID NO: 345435
  chr12:116946548-116946606
  hyper
  lung vs. ovary,uterine,multiple_myeloma

SEQ ID NO: 464152 - DNA, 751 bp, Homo sapiens; identical to SEQ ID NO: 334681
  chr12:122231543-122232294
  hyper
  lung vs. pancreas_gallbladder,upper_gi

SEQ ID NO: 464153 - DNA, 168 bp, Homo sapiens; identical to SEQ ID NO: 462415
  chr13:20735265-20735433
  hyper
  lung vs. head_and_neck

SEQ ID NO: 464154 - DNA, 127 bp, Homo sapiens; identical to SEQ ID NO: 351453
  chr13:28491488-28491615
  hyper
  lung vs. upper_gi,colorectal,multiple_myeloma, pancreas_gallbladder,renal

SEQ ID NO: 464155 - DNA, 177 bp, Homo sapiens; identical to SEQ ID NO: 452839
  chr13:28491617-28491794
  hyper
  lung vs. upper_gi,colorectal,multiple_myeloma, pancreas_gallbladder,renal

SEQ ID NO: 464156 - DNA, 38 bp, Homo sapiens; identical to SEQ ID NO: 454161
  chr13:28527202-28527240
  hyper
  lung vs. colorectal,upper_gi

SEQ ID NO: 464157 - DNA, 462 bp, Homo sapiens; identical to SEQ ID NO: 454162
  chr13:28527384-28527846
  hyper
  lung vs. colorectal,upper_gi

SEQ ID NO: 464158 - DNA, 469 bp, Homo sapiens
  chr13:28534792-28535261
  hyper
  lung vs. upper_gi
cgttagaagcgcggtggcctcacttgccggagagggtcttggttttgcgcctttttccgtggcccgggaggcttgccaggcgctcgcagcagcgagccgggtgcttgcatctcagagagcagccgagctcccttccctggccccgtacccgcgtgcaaggggaccgagccccgggaaggggaagaacttgtaatcgcttgcagcgggacaatgtcgacttttgaacctctaaccactaagcaaacaacccatgtgctcttgctccactgtccaaacagggtttattgacaggcgtttcacggcaacgcatagcaaccccggcggctagggggcgggcctgtgggcgcggccggggcgcggggagacctgcggggcaccggggctcagaccggccctgacccaggacccctgacccaggacccctcgcccagcggacccggacacggcttcctcctctgcccggcacccc

SEQ ID NO: 464159 - DNA, 37 bp, Homo sapiens; identical to SEQ ID NO: 360266
  chr13:28535573-28535610
  hyper
  lung vs. upper_gi

SEQ ID NO: 464160 - DNA, 58 bp, Homo sapiens; identical to SEQ ID NO: 457477
  chr13:28540416-28540474
  hyper
  lung vs. colorectal

SEQ ID NO: 464161 - DNA, 112 bp, Homo sapiens; identical to SEQ ID NO: 360268
  chr13:28541283-28541395
  hyper
  lung vs. colorectal

SEQ ID NO: 464162 - DNA, 81 bp, Homo sapiens
  chr13:50701609-50701690
  hyper
  lung vs. anorectal,cervical
cgcgcttttcgcccctactttgttcttgcgcagtcttcccagctgcggagaggagggagcgaaagcaaaacgaaagcaccc

SEQ ID NO: 464163 - DNA, 1 bp, Homo sapiens
  chr13:50701959-50701960
  hyper
  lung vs. anorectal,cervical
c

SEQ ID NO: 464164 - DNA, 280 bp, Homo sapiens
  chr13:50704210-50704490
  hyper
  lung vs. ovary
cgcggctggatgggcgtggggaatgttgccagtgttcggtcccgactcaggggagaaacggggtgggggtgtggggatcccggaaagggccggaaaagccgggagcaccgggaggtgtgaggccagagtttctgctactgggggctcttccagggaagacgctggcgggaataggatggggctggcagctggggagcctcgcggtggctattgcacgtctcggcccccctggacagggttatgtcaggagagcgccctggcaccgagctctggccgctgg

SEQ ID NO: 464165 - DNA, 248 bp, Homo sapiens
  chr13:50704800-50705048
  hyper
  lung vs. ovary
ccatttccccttccagaagaaaactgaaggcgtattcctccaaaggaaggctgcagtcaggcgccacacagaacacaggcagtcctctccggccgatctcgggctcgcctctcccagggccgtagggagcatcttttctgagcagccccgggagggcagctccgggcgctctccgcgctgggccctgccgcggccggtgcgttacatcaggaaacgcttggtccggttttctgtctgctagtcaaaac

SEQ ID NO: 464166 - DNA, 26 bp, Homo sapiens
  chr13:50705099-50705125
  hyper
  lung vs. ovary
acaaatagactcaccatcaggcttgc

SEQ ID NO: 464167 - DNA, 304 bp, Homo sapiens
  chr13:58207012-58207316
  hyper
  lung vs. anorectal
cgacaaggagatctgcatgatcaaggtagagatccaggacatcaacgacaacgcgccctccttctcctcggaccagatcgaaatggacatctcggagaacgctgctccgggcacccgcttccccctcaccagcgcacatgaccccgacgccggcgagaatgggctccgcacctacctgctcacgcgcgacgatcacggcctctttggactggacgttaagtcccgcggcgacggcaccaagttcccagaactggtcatccagaaggctctggaccgcgagcaacagaatcaccatacgctcgtg

SEQ ID NO: 464168 - DNA, 174 bp, Homo sapiens
  chr13:72438297-72438471
  hyper
  lung vs. uterine,colorectal,breast
cgcgcgcgcgcacatacacacacacacacacacacacacacacacacacaacatttaccccaaaatagtcgaaggttcaaagcccaaacacacccaagtcccatggaaggaagaatacctaaacacggaaaagaatttctggctaggtcaggataggacatttgctggactgga

SEQ ID NO: 464169 - DNA, 207 bp, Homo sapiens
  chr13:72438563-72438770
  hyper
  lung vs. uterine,colorectal,breast
atgtccttctggtctccttgctacacttcctttccacctaagtttccctatctctgcgggagcacacactaactccgctccttctctcaatcttcaaacttatttggagggtaccgaagtttctgcgcaaattttgcgcgcagttcccacgtgcccgcttcaggtcttcaactttccctattttctttctcccggaatctcactctg

SEQ ID NO: 464170 - DNA, 72 bp, Homo sapiens; identical to SEQ ID NO: 289885
  chr13:100650019-100650091
  hyper
  lung vs. myeloid_neoplasm

SEQ ID NO: 464171 - DNA, 113 bp, Homo sapiens; identical to SEQ ID NO: 345453
  chr14:21101056-21101169
  hyper
  lung vs. upper_gi,melanoma,uterine

SEQ ID NO: 464172 - DNA, 4 bp, Homo sapiens
  chr14:23291730-23291734
  hyper
  lung vs. pancreas_gallbladder,cervical,anorectal, upper_gi,colorectal,renal
cgct

SEQ ID NO: 464173 - DNA, 377 bp, Homo sapiens; identical to SEQ ID NO: 347283
  chr14:23291965-23292342
  hyper
  lung vs. pancreas_gallbladder,cervical,anorectal, upper_gi,colorectal,renal

SEQ ID NO: 464174 - DNA, 266 bp, Homo sapiens; identical to SEQ ID NO: 457518
  chr14:29225768-29226034
  hyper
  lung vs. bladder_and_urothelial

SEQ ID NO: 464175 - DNA, 6 bp, Homo sapiens
  chr14:29234550-29234556
  hyper
  lung vs. multiple_myeloma
cgggat

SEQ ID NO: 464176 - DNA, 100 bp, Homo sapiens; identical to SEQ ID NO: 373388
  chr14:37129247-37129347
  hyper
  lung vs. bladder_and_urothelial

SEQ ID NO: 464177 - DNA, 203 bp, Homo sapiens; identical to SEQ ID NO: 454173
  chr14:37135434-37135637
  hyper
  lung vs. anorectal,head_and_neck

SEQ ID NO: 464178 - DNA, 10 bp, Homo sapiens
  chr14:37135775-37135785
  hyper
  lung vs. anorectal,head_and_neck
agccctggag

SEQ ID NO: 464179 - DNA, 22 bp, Homo sapiens
  chr14:37136618-37136640
  hyper
  lung vs. head_and_neck,anorectal,multiple_myeloma
agttcaaaactctcaaaaaacc

SEQ ID NO: 464180 - DNA, 55 bp, Homo sapiens
  chr14:38072497-38072552
  hyper
  lung vs. colorectal,breast,renal,uterine, multiple_myeloma
cggattctggcaatcgtcagttgtaggaacaaagtctggagtagtggctggcatg

SEQ ID NO: 464181 - DNA, 28 bp, Homo sapiens
  chr14:38072679-38072707
  hyper
  lung vs. colorectal,breast,renal,uterine, multiple_myeloma
ggaggaagactctgggataattggcacc

SEQ ID NO: 464182 - DNA, 53 bp, Homo sapiens; identical to SEQ ID NO: 455691
  chr14:38725469-38725522
  hyper
  lung vs. myeloid_neoplasm,multiple_myeloma,melanoma

SEQ ID NO: 464183 - DNA, 77 bp, Homo sapiens; identical to SEQ ID NO: 334894
  chr14:50511831-50511908
  hyper
  lung vs. liver_bileduct,colorectal,upper_gi, pancreas_gallbladder

SEQ ID NO: 464184 - DNA, 260 bp, Homo sapiens; identical to SEQ ID NO: 334898
  chr14:52327346-52327606
  hyper
  lung vs. head_and_neck

SEQ ID NO: 464185 - DNA, 315 bp, Homo sapiens; identical to SEQ ID NO: 452872
  chr14:52781114-52781429
  hyper
  lung vs. upper_gi

SEQ ID NO: 464186 - DNA, 24 bp, Homo sapiens
  chr14:52781405-52781429
  hyper
  lung vs. upper_gi
cgcgccgctggcggggggacgtgg

SEQ ID NO: 464187 - DNA, 27 bp, Homo sapiens
  chr14:52781982-52782009
  hyper
  lung vs. upper_gi
cagtggccggggcggccccggggcccg

SEQ ID NO: 464188 - DNA, 80 bp, Homo sapiens; identical to SEQ ID NO: 452875
  chr14:52782046-52782126
  hyper
  lung vs. upper_gi

SEQ ID NO: 464189 - DNA, 17 bp, Homo sapiens
  chr14:52782173-52782190
  hyper
  lung vs. upper_gi
cctccaccctttccacc

SEQ ID NO: 464190 - DNA, 144 bp, Homo sapiens; identical to SEQ ID NO: 360441
  chr14:57265912-57266056
  hyper
  lung vs. multiple_myeloma,bladder_and_urothelial

SEQ ID NO: 464191 - DNA, 23 bp, Homo sapiens
  chr14:57270914-57270937
  hyper
  lung vs. prostate,myeloid_neoplasm,renal,non_cancer
cgactcgggcaagttgattttca

SEQ ID NO: 464192 - DNA, 12 bp, Homo sapiens
  chr14:57279657-57279669
  hyper
  lung vs. renal,multiple_myeloma,prostate, myeloid_neoplasm,thyroid,non_cancer
ccaataaactac

SEQ ID NO: 464193 - DNA, 30 bp, Homo sapiens; identical to SEQ ID NO: 460715
  chr14:60974092-60974122
  hyper
  lung vs. bladder_and_urothelial,multiple_myeloma

SEQ ID NO: 464194 - DNA, 277 bp, Homo sapiens; identical to SEQ ID NO: 460716
  chr14:60974092-60974369
  hyper
  lung vs. bladder_and_urothelial

SEQ ID NO: 464195 - DNA, 110 bp, Homo sapiens; identical to SEQ ID NO: 351567
  chr14:60974415-60974525
  hyper
  lung vs. bladder_and_urothelial

SEQ ID NO: 464196 - DNA, 134 bp, Homo sapiens; identical to SEQ ID NO: 351568
  chr14:60982999-60983133
  hyper
  lung vs. bladder_and_urothelial,renal,myeloid_neoplasm, non_cancer,cervical,multiple_myeloma

SEQ ID NO: 464197 - DNA, 167 bp, Homo sapiens; identical to SEQ ID NO: 345459
  chr14:61104864-61105031
  hyper
  lung vs. myeloid_neoplasm,uterine,non_cancer,ovary

SEQ ID NO: 464198 - DNA, 1 bp, Homo sapiens
  chr14:61108567-61108568
  hyper
  lung vs. anorectal
c

SEQ ID NO: 464199 - DNA, 116 bp, Homo sapiens
  chr14:61108996-61109112
  hyper
  lung vs. anorectal
gcgggaagcgcggggcctgggaggcagggagcgctcacacctgcggtcgggcaggaggcgcaacgcgctgccagggcggctttatcctgccgccacagggcggggaccagcccggc

SEQ ID NO: 464200 - DNA, 241 bp, Homo sapiens
  chr14:61110268-61110509
  hyper
  lung vs. myeloid_neoplasm
gattcagttaaactgcgacgcccagaaggtaaactggaggtcccttaacagctggttctcgaagatttcctcgagggaagaaaaaaatatggttagtttcccctaatgatctctctgaaatgattgccaaaaaaactcaaagcaatatccagctttctcgcctcctcctgctcgccccttttacccagactgagccgaggatggcggaaggaggcacattgtgcaatttcttattaaacac

SEQ ID NO: 464201 - DNA, 130 bp, Homo sapiens; identical to SEQ ID NO: 334940
  chr14:61943723-61943853
  hyper
  lung vs. cervical,anorectal

SEQ ID NO: 464202 - DNA, 1 bp, Homo sapiens
  chr14:65006715-65006716
  hyper
  lung vs. head_and_neck
c

SEQ ID NO: 464203 - DNA, 536 bp, Homo sapiens; identical to SEQ ID NO: 452882
  chr14:65006776-65007312
  hyper
  lung vs. head_and_neck

SEQ ID NO: 464204 - DNA, 100 bp, Homo sapiens
  chr14:65008577-65008677
  hyper
  lung vs. cervical,head_and_neck
cgtgctggtgggcggctccactcgtatccccaagatccagaagctgctgcaggatttcttcaacggcaaggagctgaacaagagcatcaaccccgacgag

SEQ ID NO: 464205 - DNA, 218 bp, Homo sapiens
  chr14:65008720-65008938
  hyper
  lung vs. cervical,head_and_neck
gcgacaaatcagagaatgtgcaggacctgctgctactcgacgtgaccccgttgtcgctgggcatcgagacagctggcggtgtcatgaccccactcatcaagaggaacaccacgatccccaccaagcagacgcagaccttcaccacctactcggacaaccagagcagcgtactggtgcaggtatacgagggcgaacgggccatgaccaaggacaataac

SEQ ID NO: 464206 - DNA, 163 bp, Homo sapiens; identical to SEQ ID NO: 360472
  chr14:65009279-65009442
  hyper
  lung vs. cervical,head_and_neck

SEQ ID NO: 464207 - DNA, 85 bp, Homo sapiens
  chr14:74254318-74254403
  hyper
  lung vs. pancreas_gallbladder,colorectal
cgtttggtgttggggctaaaagggtcatgtcagaaagcagtgtgctctatgtgttcttaatgcctaaagtgggccttaaaacaag

SEQ ID NO: 464208 - DNA, 242 bp, Homo sapiens
  chr14:74708533-74708775
  hyper
  lung vs. breast
agcctcagtttcctcgtctgcaaaatggagtggtaggcgatgtagactggacggtcccaccagccgtagctggagtagggtggactgcatcggggtacagactagaaagggttttgttttgttttgttttgttttgtttttgtctttaaatggaaattacttgcacaaagttaaaactcagtagatgccgacaggtatatcttgaaaagtaacctacccttctcccacccccgccctcattc

SEQ ID NO: 464209 - DNA, 14 bp, Homo sapiens
  chr14:77600389-77600403
  hyper
  lung vs. ovary,head_and_neck,bladder_and_urothelial
ttaatgagattgac

SEQ ID NO: 464210 - DNA, 5 bp, Homo sapiens
  chr14:90084014-90084019
  hyper
  lung vs. bladder_and_urothelial,multiple_myeloma, upper_gi,uterine
cgtgt

SEQ ID NO: 464211 - DNA, 486 bp, Homo sapiens; identical to SEQ ID NO: 457545
  chr14:90085312-90085798
  hyper
  lung vs. upper_gi

SEQ ID NO: 464212 - DNA, 102 bp, Homo sapiens; identical to SEQ ID NO: 347317
  chr14:94889915-94890017
  hyper
  lung vs. upper_gi,pancreas_gallbladder

SEQ ID NO: 464213 - DNA, 64 bp, Homo sapiens
  chr14:100613205-100613269
  hyper
cggcaggtggtcgtagtactcgggcgcgatcttccgcacctgtagagaggagggcggggctcag

SEQ ID NO: 464214 - DNA, 63 bp, Homo sapiens; identical to SEQ ID NO: 373550
  chr14:101034173-101034236
  hyper

SEQ ID NO: 464215 - DNA, 43 bp, Homo sapiens
  chr14:103686664-103686707
  hyper
  lung vs. anorectal
cgcgctcccgggccgaccctctgcggcctctgctctgcgcagt

SEQ ID NO: 464216 - DNA, 61 bp, Homo sapiens
  chr15:37180043-37180104
  hyper
  lung vs. pancreas_gallbladder,bladder_and_urothelial
cgacaccccccttcctgcgttccccccagttatttactgggtgaccccgtcctttctcttc

SEQ ID NO: 464217 - DNA, 172 bp, Homo sapiens
  chr15:37180138-37180310
  hyper
  lung vs. pancreas_gallbladder,bladder_and_urothelial
tggattttgcgattgttcttgtcagggaaaaaaatctccacagaaccccacgttttcatctttcaactgttttatttaagccaatgggaaggtattgagggcagtaattgattcataatgatccataaatcgatgtcggaaagcggggggagagggtggaggtgtactaaga

SEQ ID NO: 464218 - DNA, 133 bp, Homo sapiens; identical to SEQ ID NO: 351659
  chr15:37403336-37403469
  hyper
  lung vs. upper_gi,pancreas_gallbladder

SEQ ID NO: 464219 - DNA, 385 bp, Homo sapiens; identical to SEQ ID NO: 460730
  chr15:41786420-41786805
  hyper
  lung vs. upper_gi

SEQ ID NO: 464220 - DNA, 28 bp, Homo sapiens
  chr15:41788111-41788139
  hyper
  lung vs. upper_gi,colorectal,bladder_and_urothelial
gcccaagcctgggtgtagagaccgcccc

SEQ ID NO: 464221 - DNA, 43 bp, Homo sapiens; identical to SEQ ID NO: 351664
  chr15:41788242-41788285
  hyper
  lung vs. upper_gi,colorectal,bladder_and_urothelial

SEQ ID NO: 464222 - DNA, 2 bp, Homo sapiens
  chr15:45427859-45427861
  hyper
  lung vs. pancreas_gallbladder,colorectal, multiple_myeloma,renal,upper_gi,uterine,non_cancer
cc

SEQ ID NO: 464223 - DNA, 205 bp, Homo sapiens; identical to SEQ ID NO: 360624
  chr15:45479833-45480038
  hyper
  lung vs. ovary

SEQ ID NO: 464224 - DNA, 228 bp, Homo sapiens; identical to SEQ ID NO: 457565
  chr15:53078992-53079220
  hyper
  lung vs. liver_bileduct,bladder_and_urothelial,breast

SEQ ID NO: 464225 - DNA, 108 bp, Homo sapiens
  chr15:53080082-53080190
  hyper
  lung vs. liver_bileduct
ccagctgaactcagaaacacctggggcttggggtttcgggcaggagacctctgctcctagacttgggggtcatttacacactctcatccccaaacccccctcccgcac

SEQ ID NO: 464226 - DNA, 99 bp, Homo sapiens; identical to SEQ ID NO: 452899
  chr15:53080201-53080300
  hyper
  lung vs. liver_bileduct

SEQ ID NO: 464227 - DNA, 35 bp, Homo sapiens
  chr15:60288752-60288787
  hyper
  lung vs. colorectal
cgtcgggccagtgaacgacgtcagccgcaactcta

SEQ ID NO: 464228 - DNA, 72 bp, Homo sapiens; identical to SEQ ID NO: 452902
  chr15:63795400-63795472
  hyper
  lung vs. upper_gi,liver_bileduct,pancreas_gallbladder, colorectal,bladder_and_urothelial

SEQ ID NO: 464229 - DNA, 351 bp, Homo sapiens; identical to SEQ ID NO: 452903
  chr15:63795501-63795852
  hyper
  lung vs. upper_gi,liver_bileduct,pancreas_gallbladder, colorectal,bladder_and_urothelial

SEQ ID NO: 464230 - DNA, 338 bp, Homo sapiens; identical to SEQ ID NO: 347348
  chr15:63795894-63796232
  hyper
  lung vs. upper_gi,liver_bileduct,pancreas_gallbladder, colorectal,bladder_and_urothelial

SEQ ID NO: 464231 - DNA, 25 bp, Homo sapiens
  chr15:68118684-68118709
  hyper
  lung vs. ovary
caagctgcccgagaacttcgccttc

SEQ ID NO: 464232 - DNA, 41 bp, Homo sapiens
  chr15:68125183-68125224
  hyper
  lung vs. bladder_and_urothelial,renal,uterine
cgagcccagcaaacggcttgcaggcatcattacatggagtg

SEQ ID NO: 464233 - DNA, 21 bp, Homo sapiens
  chr15:69136422-69136443
  hyper
  lung vs. ovary
agctcgctggggcgcctcagc

SEQ ID NO: 464234 - DNA, 457 bp, Homo sapiens; identical to SEQ ID NO: 335177
  chr15:75075794-75076251
  hyper
  lung vs. anorectal

SEQ ID NO: 464235 - DNA, 50 bp, Homo sapiens; identical to SEQ ID NO: 455711
  chr15:75250996-75251046
  hyper
  lung vs. uterine

SEQ ID NO: 464236 - DNA, 86 bp, Homo sapiens; identical to SEQ ID NO: 351723
  chr15:75251811-75251897
  hyper
  lung vs. uterine

SEQ ID NO: 464237 - DNA, 24 bp, Homo sapiens
  chr15:76627485-76627509
  hyper
  lung vs. colorectal,uterine,thyroid
cggaccggtgagaagactagacct

SEQ ID NO: 464238 - DNA, 28 bp, Homo sapiens
  chr15:76628038-76628066
  hyper
  lung vs. colorectal,uterine,thyroid
actgtaaattacccagcgccttacgttc

SEQ ID NO: 464239 - DNA, 1 bp, Homo sapiens
  chr15:76629494-76629495
  hyper
  lung vs. ovary,uterine,prostate,myeloid_neoplasm,thyroid
c

SEQ ID NO: 464240 - DNA, 135 bp, Homo sapiens
  chr15:76629531-76629666
  hyper
  lung vs. ovary,uterine,prostate,myeloid_neoplasm,thyroid
ttttgcgcaaaggcaattaggtttgatttagggatgtgggtttttttttttttggttgttgtttgtttgcctttcggtttttcaaagctaggaagctttctttcgcttgctctgggatatttaaactaagaaatg

SEQ ID NO: 464241 - DNA, 68 bp, Homo sapiens
  chr15:76638250-76638318
  hyper
  lung vs. upper_gi,colorectal
cggttccccgttgggaaagagcgtgtttaagttaaggcgtggtttgagagtagctaaccagagatcag

SEQ ID NO: 464242 - DNA, 86 bp, Homo sapiens; identical to SEQ ID NO: 351727
  chr15:76639126-76639212
  hyper
  lung vs. upper_gi,colorectal

SEQ ID NO: 464243 - DNA, 25 bp, Homo sapiens
  chr15:76639451-76639476
  hyper
  lung vs. bladder_and_urothelial,cervical
cggccgacacttgcctccgtacccc

SEQ ID NO: 464244 - DNA, 12 bp, Homo sapiens
  chr15:76639743-76639755
  hyper
  lung vs. bladder_and_urothelial,cervical
ctggacacccgc

SEQ ID NO: 464245 - DNA, 137 bp, Homo sapiens
  chr15:89921803-89921940
  hyper
  lung vs. breast,anorectal,cervical
cgcggctgcttcccgcccgcgcaggatcaggccggcccccgcgggcctggagctggatccagagctagggaaactggaaaaacaggcacaaactcggaagccgcggtacggcaagagcctaagcaaagaatcctttc

SEQ ID NO: 464246 - DNA, 2 bp, Homo sapiens
  chr15:89945289-89945291
  hyper
  lung vs. upper_gi
cc

SEQ ID NO: 464247 - DNA, 48 bp, Homo sapiens; identical to SEQ ID NO: 345484
  chr16:2042503-2042551
  hyper
  lung vs. non_cancer,anorectal,thyroid,myeloid_neoplasm, head_and_neck,cervical

SEQ ID NO: 464248 - DNA, 97 bp, Homo sapiens; identical to SEQ ID NO: 462498
  chr16:2042503-2042600
  hyper
  lung vs. head_and_neck

SEQ ID NO: 464249 - DNA, 226 bp, Homo sapiens; identical to SEQ ID NO: 360772
  chr16:2042617-2042843
  hyper
  lung vs. head_and_neck

SEQ ID NO: 464250 - DNA, 275 bp, Homo sapiens; identical to SEQ ID NO: 455722
  chr16:2391769-2392044
  hyper
  lung vs. anorectal,cervical

SEQ ID NO: 464251 - DNA, 212 bp, Homo sapiens; identical to SEQ ID NO: 345485
  chr16:3222239-3222451
  hyper
  lung vs. non_cancer,thyroid

SEQ ID NO: 464252 - DNA, 18 bp, Homo sapiens
  chr16:3234164-3234182
  hyper
  lung vs. thyroid
cgcacccaaagcgagaat

SEQ ID NO: 464253 - DNA, 49 bp, Homo sapiens; identical to SEQ ID NO: 452915
  chr16:4363872-4363921
  hyper
  lung vs. liver_bileduct,pancreas_gallbladder,colorectal

SEQ ID NO: 464254 - DNA, 158 bp, Homo sapiens; identical to SEQ ID NO: 345488
  chr16:4364080-4364238
  hyper
  lung vs. liver_bileduct,pancreas_gallbladder,colorectal

SEQ ID NO: 464255 - DNA, 452 bp, Homo sapiens
  chr16:4421671-4422123
  hyper
  lung vs. liver_bileduct
cgcgcaggtcaggtggccgcagggtgagggccagggcaacccggcccacgagcccctcggtggggaaggggcgtgtctccacgcggctccgccccggccaatggggagaggccccgcccctgccgcggcgggcccgccccccgggactcttaaggcgcgacctgcctccagcgagccgactccggagcccgagcccggggcgggtggacgcggactcgaacgcagttgcttcgggacccaggaccccctcgggcccgacccgccaggaaagactgaggccgcggcctgccccgcccggctccctgcgccgccgccgcctcccggtgagtttctgtggggctggggggctgcgggcggggaagggggcgccacggccaggctgtgcacacgcgcggggaccgccgccgcgcgcacacacgcactctcgggcgggaccgcggccccagccccac

SEQ ID NO: 464256 - DNA, 50 bp, Homo sapiens; identical to SEQ ID NO: 373840
  chr16:4422253-4422303
  hyper
  lung vs. liver_bileduct

SEQ ID NO: 464257 - DNA, 10 bp, Homo sapiens
  chr16:23846783-23846793
  hyper
  lung vs. non_cancer,myeloid_neoplasm,thyroid,melanoma
cgctcctccc

SEQ ID NO: 464258 - DNA, 124 bp, Homo sapiens
  chr16:54324470-54324594
  hyper
  lung vs. anorectal
ggtgggctctttgctcctccgcttcgcccctgcgcctcccgcgacccgtctcacttccctgcgtctctgagcggcccgagaggcgcagcgctcagagtggccttgatggaagaacctggccctc

SEQ ID NO: 464259 - DNA, 58 bp, Homo sapiens; identical to SEQ ID NO: 373895
  chr16:55365468-55365526
  hyper
  lung vs. cervical

SEQ ID NO: 464260 - DNA, 44 bp, Homo sapiens; identical to SEQ ID NO: 360838
  chr16:56659821-56659865
  hyper
  lung vs. pancreas_gallbladder

SEQ ID NO: 464261 - DNA, 300 bp, Homo sapiens; identical to SEQ ID NO: 459457
  chr16:67197294-67197594
  hyper
  lung vs. anorectal,cervical

SEQ ID NO: 464262 - DNA, 271 bp, Homo sapiens; identical to SEQ ID NO: 454215
  chr16:67198282-67198553
  hyper
  lung vs. anorectal

SEQ ID NO: 464263 - DNA, 60 bp, Homo sapiens
  chr16:67199532-67199592
  hyper
  lung vs. anorectal,cervical
tgtgagtccctacggccgggcggggagcggggatgggggactcggtgccggggatggggc

SEQ ID NO: 464264 - DNA, 50 bp, Homo sapiens; identical to SEQ ID NO: 351831
  chr16:73100590-73100640
  hyper
  lung vs. head_and_neck

SEQ ID NO: 464265 - DNA, 205 bp, Homo sapiens; identical to SEQ ID NO: 457590
  chr16:77247511-77247716
  hyper
  lung vs. lymphoid_neoplasm

SEQ ID NO: 464266 - DNA, 178 bp, Homo sapiens; identical to SEQ ID NO: 452923
  chr16:85932121-85932299
  hyper
  lung vs. colorectal,upper_gi,lymphoid_neoplasm, pancreas_gallbladder,thyroid,non_cancer

SEQ ID NO: 464267 - DNA, 94 bp, Homo sapiens
  chr16:89992765-89992859
  hyper
  lung vs. head_and_neck,colorectal
cgggcgggaaccgcattcgggtcctggaggggcttggaggccccagtctcgcagccccttcatcggggacccccgctcccacctgccttggcca

SEQ ID NO: 464268 - DNA, 5 bp, Homo sapiens
  chr16:89993019-89993024
  hyper
  lung vs. head_and_neck,colorectal
cgccc

SEQ ID NO: 464269 - DNA, 57 bp, Homo sapiens
  chr17:9143010-9143067
  hyper
  lung vs. pancreas_gallbladder
cggtgaacatcatctccgtgtataagcagggcacgagccgcatccgccgcggtgacc

SEQ ID NO: 464270 - DNA, 187 bp, Homo sapiens
  chr17:9143110-9143297
  hyper
  lung vs. pancreas_gallbladder
caaaatcaagcccctcaagaagtacctgctgctgggcaacgcggaggactctccggaccagagcggcatcgtggccgataaaagcagcctggtgatccagtggcgggacacgtgggcgcggcggctgcgcaagttccagcagcgtgagaagaagggcaagtgcaagaaggcctagcgccgaggcagc

SEQ ID NO: 464271 - DNA, 90 bp, Homo sapiens
  chr17:9143376-9143466
  hyper
  lung vs. pancreas_gallbladder
cgagggctttcccaggtggggggagggagggggcggggccgcacggcgcggggggcgggaccctcggcggcccctccccctacccccacc

SEQ ID NO: 464272 - DNA, 34 bp, Homo sapiens
  chr17:9143504-9143538
  hyper
  lung vs. pancreas_gallbladder
gggtgcgccgccggccgggccctggagaaatgac

SEQ ID NO: 464273 - DNA, 184 bp, Homo sapiens
  chr17:9143607-9143791
  hyper
  lung vs. pancreas_gallbladder
cgtggaggggctgggggcagcctgccctggggcccgggggcgggcgcagaatcgcacaactggggccccaggcgcggggcgtggatggcgcggagacgtggacgggaggagaactgtgaattctcaagcccgtagtgtgggcggggcgcggagcacccaccaaaccaccacccgacacgcagcc

SEQ ID NO: 464274 - DNA, 288 bp, Homo sapiens; identical to SEQ ID NO: 374075
  chr17:26578647-26578935
  hyper
  lung vs. breast

SEQ ID NO: 464275 - DNA, 356 bp, Homo sapiens; identical to SEQ ID NO: 455755
  chr17:27038294-27038650
  hyper
  lung vs. anorectal,cervical,multiple_myeloma, lymphoid_neoplasm,non_cancer,bladder_and_urothelial

SEQ ID NO: 464276 - DNA, 53 bp, Homo sapiens; identical to SEQ ID NO: 347416
  chr17:27940911-27940964
  hyper
  lung vs. anorectal,cervical,renal

SEQ ID NO: 464277 - DNA, 4 bp, Homo sapiens
  chr17:27949429-27949433
  hyper
  lung vs. ovary
cgtg

SEQ ID NO: 464278 - DNA, 2 bp, Homo sapiens
  chr17:36105728-36105730
  hyper
  lung vs. pancreas_gallbladder,colorectal,liver_bileduct
cc

SEQ ID NO: 464279 - DNA, 122 bp, Homo sapiens; identical to SEQ ID NO: 455769
  chr17:37760007-37760129
  hyper
  lung vs. cervical

SEQ ID NO: 464280 - DNA, 37 bp, Homo sapiens; identical to SEQ ID NO: 455770
  chr17:40332770-40332807
  hyper
  lung vs. bladder_and_urothelial

SEQ ID NO: 464281 - DNA, 7 bp, Homo sapiens
  chr17:46507738-46507745
  hyper
  lung vs. cervical
gggtgcc

SEQ ID NO: 464282 - DNA, 54 bp, Homo sapiens; identical to SEQ ID NO: 459477
  chr17:46620299-46620353
  hyper
  lung vs. ovary,breast,cervical,uterine

SEQ ID NO: 464283 - DNA, 260 bp, Homo sapiens; identical to SEQ ID NO: 345530
  chr17:46621458-46621718
  hyper
  lung vs. ovary,cervical,breast,uterine

SEQ ID NO: 464284 - DNA, 322 bp, Homo sapiens; identical to SEQ ID NO: 459479
  chr17:46621458-46621780
  hyper
  lung vs. ovary,cervical,breast,sarcoma

SEQ ID NO: 464285 - DNA, 182 bp, Homo sapiens; identical to SEQ ID NO: 455779
  chr17:46659093-46659275
  hyper
  lung vs. bladder_and_urothelial,cervical

SEQ ID NO: 464286 - DNA, 46 bp, Homo sapiens; identical to SEQ ID NO: 455780
  chr17:46659384-46659430
  hyper
  lung vs. bladder_and_urothelial,cervical

SEQ ID NO: 464287 - DNA, 30 bp, Homo sapiens
  chr17:46663379-46663409
  hyper
  lung vs. bladder_and_urothelial,uterine
cgaccaaaaccagccgctgtgctccgaagc

SEQ ID NO: 464288 - DNA, 56 bp, Homo sapiens; identical to SEQ ID NO: 374178
  chr17:46663887-46663943
  hyper
  lung vs. bladder_and_urothelial,uterine

SEQ ID NO: 464289 - DNA, 89 bp, Homo sapiens; identical to SEQ ID NO: 351969
  chr17:46675757-46675846
  hyper
  lung vs. breast,uterine,prostate

SEQ ID NO: 464290 - DNA, 64 bp, Homo sapiens; identical to SEQ ID NO: 460782
  chr17:46687527-46687591
  hyper
  lung vs. ovary,colorectal

SEQ ID NO: 464291 - DNA, 13 bp, Homo sapiens
  chr17:46688806-46688819
  hyper
  lung vs. ovary,colorectal
gggaagttggtcc

SEQ ID NO: 464292 - DNA, 149 bp, Homo sapiens; identical to SEQ ID NO: 347451
  chr17:46690905-46691054
  hyper
  lung vs. ovary,bladder_and_urothelial,cervical,anorectal

SEQ ID NO: 464293 - DNA, 16 bp, Homo sapiens
  chr17:46692424-46692440
  hyper
  lung vs. cervical,bladder_and_urothelial,uterine
agaagggatgccagtt

SEQ ID NO: 464294 - DNA, 170 bp, Homo sapiens; identical to SEQ ID NO: 351973
  chr17:46724200-46724370
  hyper
  lung vs. colorectal

SEQ ID NO: 464295 - DNA, 325 bp, Homo sapiens; identical to SEQ ID NO: 455784
  chr17:46829655-46829980
  hyper
  lung vs. anorectal

SEQ ID NO: 464296 - DNA, 170 bp, Homo sapiens; identical to SEQ ID NO: 460791
  chr17:53341536-53341706
  hyper
  lung vs. uterine,ovary,bladder_and_urothelial,upper_gi, non_cancer,pancreas_gallbladder,prostate,myeloid_neoplasm, colorectal,thyroid

SEQ ID NO: 464297 - DNA, 1 bp, Homo sapiens
  chr17:53341786-53341787
  hyper
  lung vs. uterine,ovary,bladder_and_urothelial,upper_gi, non_cancer,pancreas_gallbladder,prostate,myeloid_neoplasm, colorectal,thyroid
c

SEQ ID NO: 464298 - DNA, 12 bp, Homo sapiens
  chr17:58228061-58228073
  hyper
  lung vs. bladder_and_urothelial,pancreas_gallbladder
cggacccgcctc

SEQ ID NO: 464299 - DNA, 85 bp, Homo sapiens; identical to SEQ ID NO: 347456
  chr17:58228397-58228482
  hyper
  lung vs. bladder_and_urothelial,pancreas_gallbladder

SEQ ID NO: 464300 - DNA, 80 bp, Homo sapiens; identical to SEQ ID NO: 455791
  chr17:58498618-58498698
  hyper
  lung vs. anorectal

SEQ ID NO: 464301 - DNA, 38 bp, Homo sapiens; identical to SEQ ID NO: 347458
  chr17:59478678-59478716
  hyper
  lung vs. bladder_and_urothelial,sarcoma,myeloid_neoplasm

SEQ ID NO: 464302 - DNA, 15 bp, Homo sapiens
  chr17:59532358-59532373
  hyper
  lung vs. myeloid_neoplasm,non_cancer,thyroid, multiple_myeloma,renal,prostate,cervical
actcctaggtttccg

SEQ ID NO: 464303 - DNA, 132 bp, Homo sapiens; identical to SEQ ID NO: 455793
  chr17:59532387-59532519
  hyper
  lung vs. myeloid_neoplasm,non_cancer,thyroid, multiple_myeloma,renal,prostate,cervical

SEQ ID NO: 464304 - DNA, 1 bp, Homo sapiens
  chr17:59532591-59532592
  hyper
  lung vs. myeloid_neoplasm,non_cancer,thyroid, multiple_myeloma,renal,prostate,cervical
c

SEQ ID NO: 464305 - DNA, 9 bp, Homo sapiens
  chr17:59533751-59533760
  hyper
  lung vs. myeloid_neoplasm,multiple_myeloma,non_cancer
cgccccgca

SEQ ID NO: 464306 - DNA, 48 bp, Homo sapiens; identical to SEQ ID NO: 351995
  chr17:59539943-59539991
  hyper
  lung vs. pancreas_gallbladder

SEQ ID NO: 464307 - DNA, 112 bp, Homo sapiens; identical to SEQ ID NO: 454237
  chr17:61777761-61777873
  hyper
  lung vs. cervical,anorectal,sarcoma,head_and_neck

SEQ ID NO: 464308 - DNA, 76 bp, Homo sapiens; identical to SEQ ID NO: 345537
  chr17:61778423-61778499
  hyper
  lung vs. cervical,anorectal,sarcoma,head_and_neck

SEQ ID NO: 464309 - DNA, 29 bp, Homo sapiens
  chr17:66434420-66434449
  hyper
  lung vs. colorectal,pancreas_gallbladder,upper_gi
cctggccccagccttagaagaggccactc

SEQ ID NO: 464310 - DNA, 40 bp, Homo sapiens
  chr17:76254688-76254728
  hyper
cgacataagccccaggtgggctgcctttcacggcgccccc

SEQ ID NO: 464311 - DNA, 62 bp, Homo sapiens; identical to SEQ ID NO: 361154
  chr17:76254854-76254916
  hyper

SEQ ID NO: 464312 - DNA, 123 bp, Homo sapiens
  chr17:77290660-77290783
  hyper
  lung vs. head_and_neck
cgtgagccaccacgccccgctagatacctttgcttcttggagaaacaggaaagatgcggaatgggggaaggcaggagttcagcaccacggacagcgacctgcgggtgggagacgctgccagcc

SEQ ID NO: 464313 - DNA, 404 bp, Homo sapiens
  chr17:77778031-77778435
  hyper
  lung vs. cervical
ggggctcggctggcgtcgaggctccgcggccagagcgcggcggctccgcgcacgcccagaagccgtgttgccggttccggggctgccggaaagcgtggggccaagctgctgctctgtgcccgcgcaagcgcctcgctacccgggcgggaccttgctctctccggccgccctgggccgaggggtggctcagcatcgtgggggcggacgcagacggccactcggccgggacaccgtcggcccgggagccgtgatgccttttctctctgcagctgaagcctccgatcggtttccccgcccttctgtaggaaatcaaattcagggaacatggtaccgtatttacccgcacaacttcctcccttgacattttgcactctcgaagttggggcagaagtaattatgcaaac

SEQ ID NO: 464314 - DNA, 42 bp, Homo sapiens
  chr17:77788305-77788347
  hyper
  lung vs. breast
cgatcgtatttcctggggacagctcgacccccaggggagcac

SEQ ID NO: 464315 - DNA, 234 bp, Homo sapiens
  chr17:77788400-77788634
  hyper
  lung vs. breast
cgtgccccagtctacctagactcccaggagcgtccggccggaagagacagtgggagatgaggaaactgagattgggagggggacgtgatggggtaaggccattcctaaggcttgtggcagagctgcctcttcaccccacccccatttctttcagatgcggagatcaaagcccaggctcactggtgggtcgggagctcactcctccaagtacacttggccaacctcggggagccc

SEQ ID NO: 464316 - DNA, 122 bp, Homo sapiens; identical to SEQ ID NO: 462589
  chr18:24130266-24130388
  hyper
  lung vs. head_and_neck,cervical,anorectal

SEQ ID NO: 464317 - DNA, 8 bp, Homo sapiens
  chr18:28621176-28621184
  hyper
  lung vs. head_and_neck,cervical,anorectal
atcccttc

SEQ ID NO: 464318 - DNA, 1 bp, Homo sapiens
  chr18:34823778-34823779
  hyper
  lung vs. bladder_and_urothelial
c

SEQ ID NO: 464319 - DNA, 33 bp, Homo sapiens
  chr18:34823862-34823895
  hyper
  lung vs. bladder_and_urothelial
cgaggatgacggcggcggcggcggcggcgaccc

SEQ ID NO: 464320 - DNA, 20 bp, Homo sapiens
  chr18:34823977-34823997
  hyper
  lung vs. bladder_and_urothelial
gcctggcccttggggacaac

SEQ ID NO: 464321 - DNA, 80 bp, Homo sapiens; identical to SEQ ID NO: 452959
  chr18:44335955-44336035
  hyper
  lung vs. sarcoma

SEQ ID NO: 464322 - DNA, 196 bp, Homo sapiens; identical to SEQ ID NO: 452964
  chr18:47339411-47339607
  hyper
  lung vs. pancreas_gallbladder

SEQ ID NO: 464323 - DNA, 401 bp, Homo sapiens; identical to SEQ ID NO: 452965
  chr18:47339758-47340159
  hyper
  lung vs. pancreas_gallbladder

SEQ ID NO: 464324 - DNA, 121 bp, Homo sapiens
  chr18:55103761-55103882
  hyper
  lung vs. liver_bileduct
cgcggtgagcaacacctgtcccgcggcctgggcaccccacctgcggccatgatgtcgcacctgaacggcctgcaccacccgggccacactcagtctcacgggccggtgctggcacccagtc

SEQ ID NO: 464325 - DNA, 166 bp, Homo sapiens
  chr18:55103897-55104063
  hyper
  lung vs. liver_bileduct
cgtcctcatcgggctcgcaggtggccacgtcgggccagctggaagaaatcaacaccaaagaggtggcccagcgcatcacagcggagctgaagcgctacagtatcccccaggcgatctttgcgcagagggtgctgtgccggtctcaggggactctctccgacctgct

SEQ ID NO: 464326 - DNA, 50 bp, Homo sapiens
  chr18:55104092-55104142
  hyper
  lung vs. liver_bileduct
aatctggcagggagaccttccgcaggatgtggaagtggcttcaggagccc

SEQ ID NO: 464327 - DNA, 182 bp, Homo sapiens; identical to SEQ ID NO: 374450
  chr18:55104166-55104348
  hyper
  lung vs. liver_bileduct

SEQ ID NO: 464328 - DNA, 255 bp, Homo sapiens; identical to SEQ ID NO: 452968
  chr18:55105210-55105465
  hyper
  lung vs. ovary

SEQ ID NO: 464329 - DNA, 57 bp, Homo sapiens; identical to SEQ ID NO: 347514
  chr18:55106090-55106147
  hyper
  lung vs. ovary

SEQ ID NO: 464330 - DNA, 101 bp, Homo sapiens; identical to SEQ ID NO: 454266
  chr18:60985398-60985499
  hyper
  lung vs. melanoma

SEQ ID NO: 464331 - DNA, 75 bp, Homo sapiens; identical to SEQ ID NO: 347516
  chr18:60985973-60986048
  hyper
  lung vs. melanoma

SEQ ID NO: 464332 - DNA, 165 bp, Homo sapiens
  chr19:660994-661159
  hyper
  lung vs. upper_gi,head_and_neck,colorectal
cgtccatgattaaatatttgtcaatcactgttccatgctggctccctggccagcctgtaaattctgtgagggcaaagaccacagcggcctgtcaccacagagttcctttcactacaggaaggccctccccaggcccagtgacagtcggaggaggtcaaggtcctc

SEQ ID NO: 464333 - DNA, 2 bp, Homo sapiens
  chr19:661261-661263
  hyper
  lung vs. upper_gi,head_and_neck,colorectal
tc

SEQ ID NO: 464334 - DNA, 156 bp, Homo sapiens
  chr19:661431-661587
  hyper
  lung vs. upper_gi,colorectal
cgagacccctgggagacagaggagtaaggcaaggctcagtctcagctccccaaccttcgccccacacccgagatttcactttatttgttcctcctgctggggaggggaagccctgtggcttcagtagagaggaaaccacacctctctctttccact

SEQ ID NO: 464335 - DNA, 296 bp, Homo sapiens; identical to SEQ ID NO: 352131
  chr19:661720-662016
  hyper
  lung vs. upper_gi,colorectal

SEQ ID NO: 464336 - DNA, 15 bp, Homo sapiens
  chr19:1856948-1856963
  hyper
  lung vs. colorectal,upper_gi,pancreas_gallbladder, lymphoid_neoplasm
cggggtggggggggc

SEQ ID NO: 464337 - DNA, 109 bp, Homo sapiens; identical to SEQ ID NO: 345559
  chr19:1857456-1857565
  hyper
  lung vs. colorectal,upper_gi,pancreas_gallbladder, lymphoid_neoplasm

SEQ ID NO: 464338 - DNA, 116 bp, Homo sapiens; identical to SEQ ID NO: 345560
  chr19:1979018-1979134
  hyper
  lung vs. liver_bileduct,lymphoid_neoplasm

SEQ ID NO: 464339 - DNA, 728 bp, Homo sapiens; identical to SEQ ID NO: 335895
  chr19:2164931-2165659
  hyper
  lung vs. upper_gi

SEQ ID NO: 464340 - DNA, 230 bp, Homo sapiens; identical to SEQ ID NO: 454276
  chr19:3360723-3360953
  hyper
  lung vs. cervical,anorectal

SEQ ID NO: 464341 - DNA, 264 bp, Homo sapiens
  chr19:10402631-10402895
  hyper
  lung vs. prostate,uterine,ovary
cgataagatagtgcatgtcaagtgcttaggacatattgagcgctcggagttagttcaaacttggttcttcgacccctagccctgtctccggatgccccgcgcctcgctgctccccggctcttggaagttggctcggaaaggcccgtgagctgcactctggacggactgtttccagcctcagaggccagggtctacctcgcactgggggaccagaatctgagtcctgatgtcaccctcgaaggggacgcattcgtggccactgcc

SEQ ID NO: 464342 - DNA, 341 bp, Homo sapiens
  chr19:10402960-10403301
  hyper
  lung vs. prostate,uterine,ovary
cgaaaaccgggagacccgggagaacgtgaccatctacagtaaggaaggaggcggggtctccgcggctccgaggtgggaccagaggaatgcgaaggcggggcgaagagtgggcgggacctcagtaccggaacaggcgtggcccgaggggcggggcaggtgggggcggagacgtaatcgctggggaggaggagcctgtacagcctgagaggcggggcgccgtaccctagttcgttctcagcaccccgaggattcgggcagataaggggcgggccttgaccggagggaggggtatggtcagtatactacgaccaaatgctccgcccccaggcttcccggcacca

SEQ ID NO: 464343 - DNA, 131 bp, Homo sapiens; identical to SEQ ID NO: 352182
  chr19:10403330-10403461
  hyper
  lung vs. prostate,uterine,ovary

SEQ ID NO: 464344 - DNA, 3 bp, Homo sapiens
  chr19:10407174-10407177
  hyper
  lung vs. anorectal,uterine,bladder_and_urothelial, cervical,colorectal
agc

SEQ ID NO: 464345 - DNA, 39 bp, Homo sapiens; identical to SEQ ID NO: 452979
  chr19:10616220-10616259
  hyper
  lung vs. pancreas_gallbladder

SEQ ID NO: 464346 - DNA, 116 bp, Homo sapiens; identical to SEQ ID NO: 452980
  chr19:10691764-10691880
  hyper
  lung vs. melanoma,lymphoid_neoplasm

SEQ ID NO: 464347 - DNA, 598 bp, Homo sapiens
  chr19:11491655-11492253
  hyper
  lung vs. upper_gi,head_and_neck,breast, bladder_and_urothelial,colorectal
cggggaggaggtcagggcggtgggcttgccccgtgattcgccctggctcctcctacacccccgcctggggcctcaccgctaggcgtcagcagcgacacaggctccgaccaggcgctccagaagccgccgaagctcggctcagccatacgcgcgcggacggcgaaggtgtagcgcgtccggccccgcaggttgctcagcacacactcggtgcggccctccaggatctccacctgggggcggaatcagggcgagggacgcgtagcagacaaaaatagatgacgtgggggcgggccctggtggaactgagccaatcaggggaaaggaaaacggtgccctagaattgcaatgggaccaataagagtagggggaggagcccaagaaagctcagggccaatcagagagagagtctctggtacgaaagggcgggacccgggcaatttaatatctgggctagcactcgtagagggacccgggcgctaaaggggtctagggttacgggccggagggagaagaagttggggttcaacaggcttgcgaggacattaggaaagggggtgtgtctgtgggcgtggaacggtcttcagcaccagggtaatgg

SEQ ID NO: 464348 - DNA, 183 bp, Homo sapiens
  chr19:11492070-11492253
  hyper
  lung vs. upper_gi,head_and_neck,breast, bladder_and_urothelial,colorectal,cervical,melanoma
cgaaagggcgggacccgggcaatttaatatctgggctagcactcgtagagggacccgggcgctaaaggggtctagggttacgggccggagggagaagaagttggggttcaacaggcttgcgaggacattaggaaagggggtgtgtctgtgggcgtggaacggtcttcagcaccagggtaatgg

SEQ ID NO: 464349 - DNA, 135 bp, Homo sapiens
  chr19:11492528-11492663
  hyper
  lung vs. upper_gi,head_and_neck,breast, bladder_and_urothelial,colorectal,cervical,melanoma
caggcatgggggttggtcaggtgggcgaggactgagaccctctcctccgaccactcctccattcccagagcacttacctacttcattgatgtggatgacacggtgatatcgcggagcgccggaggctgctgtgac

SEQ ID NO: 464350 - DNA, 31 bp, Homo sapiens; identical to SEQ ID NO: 455833
  chr19:17007056-17007087
  hyper
  lung vs. bladder_and_urothelial,ovary,cervical, head_and_neck,uterine,upper_gi,melanoma,pancreas_gallbladder, anorectal,renal

SEQ ID NO: 464351 - DNA, 215 bp, Homo sapiens; identical to SEQ ID NO: 455834
  chr19:17008145-17008360
  hyper
  lung vs. uterine,cervical,bladder_and_urothelial, anorectal,ovary,head_and_neck,sarcoma,upper_gi,multiple_myeloma, non_cancer,thyroid,renal,myeloid_neoplasm,melanoma

SEQ ID NO: 464352 - DNA, 31 bp, Homo sapiens; identical to SEQ ID NO: 55797
  chr19:17008820-17008851
  hyper
  lung vs. uterine,cervical,bladder_and_urothelial, anorectal,ovary,head_and_neck,sarcoma,upper_gi,multiple_myeloma, non_cancer,thyroid,renal,myeloid_neoplasm,melanoma

SEQ ID NO: 464353 - DNA, 240 bp, Homo sapiens; identical to SEQ ID NO: 462619
  chr19:17716539-17716779
  hyper
  lung vs. uterine

SEQ ID NO: 464354 - DNA, 6 bp, Homo sapiens
  chr19:17717524-17717530
  hyper
  lung vs. uterine
ccgcac

SEQ ID NO: 464355 - DNA, 24 bp, Homo sapiens
  chr19:17790882-17790906
  hyper
  lung vs. pancreas_gallbladder,bladder_and_urothelial
cgagagtggcgagggggttctcag

SEQ ID NO: 464356 - DNA, 133 bp, Homo sapiens; identical to SEQ ID NO: 455836
  chr19:17958343-17958476
  hyper
  lung vs. lymphoid_neoplasm,multiple_myeloma

SEQ ID NO: 464357 - DNA, 31 bp, Homo sapiens
  chr19:18811469-18811500
  hyper
  lung vs. ovary,uterine
cgcccggaaatctctgggaggaagtatcagc

SEQ ID NO: 464358 - DNA, 225 bp, Homo sapiens; identical to SEQ ID NO: 361546
  chr19:35531876-35532101
  hyper
  lung vs. liver_bileduct

SEQ ID NO: 464359 - DNA, 32 bp, Homo sapiens; identical to SEQ ID NO: 459521
  chr19:37095634-37095666
  hyper
  lung vs. breast,ovary,bladder_and_urothelial,uterine, sarcoma,prostate

SEQ ID NO: 464360 - DNA, 105 bp, Homo sapiens; identical to SEQ ID NO: 347589
  chr19:37096594-37096699
  hyper
  lung vs. breast,uterine,prostate,melanoma,ovary,sarcoma, bladder_and_urothelial

SEQ ID NO: 464361 - DNA, 42 bp, Homo sapiens; identical to SEQ ID NO: 453018
  chr19:37463952-37463994
  hyper
  lung vs. breast

SEQ ID NO: 464362 - DNA, 38 bp, Homo sapiens; identical to SEQ ID NO: 453024
  chr19:38182720-38182758
  hyper
  lung vs. sarcoma,breast,ovary,prostate

SEQ ID NO: 464363 - DNA, 423 bp, Homo sapiens; identical to SEQ ID NO: 336134
  chr19:40948768-40949191
  hyper
  lung vs. upper_gi

SEQ ID NO: 464364 - DNA, 127 bp, Homo sapiens; identical to SEQ ID NO: 462646
  chr19:42927599-42927726
  hyper
  lung vs. pancreas_gallbladder,anorectal, bladder_and_urothelial

SEQ ID NO: 464365 - DNA, 166 bp, Homo sapiens
  chr19:44030452-44030618
  hyper
  lung vs. pancreas_gallbladder,upper_gi
cggagcagccccgagcctgtaatgtggtccgcgtggcagtgggtattcactgggagagagaggagggacaggtccggagggtacagaaaggacctgggagtcccagcccagatccttctccctcagactcaggagttctgggccccagcttcccattccactgacg

SEQ ID NO: 464366 - DNA, 133 bp, Homo sapiens; identical to SEQ ID NO: 374807
  chr19:44030819-44030952
  hyper
  lung vs. pancreas_gallbladder,upper_gi

SEQ ID NO: 464367 - DNA, 68 bp, Homo sapiens; identical to SEQ ID NO: 345595
  chr19:44711963-44712031
  hyper
  lung vs. pancreas_gallbladder

SEQ ID NO: 464368 - DNA, 3 bp, Homo sapiens
  chr19:45655296-45655299
  hyper
  lung vs. anorectal
cgg

SEQ ID NO: 464369 - DNA, 4 bp, Homo sapiens
  chr19:46379840-46379844
  hyper
  lung vs. pancreas_gallbladder
cgcc

SEQ ID NO: 464370 - DNA, 72 bp, Homo sapiens
  chr19:46996430-46996502
  hyper
  lung vs. cervical,anorectal
cgcaggccccgagagcgccacgaagagccctgctcgcctctgcaggtgcccggcgtccacacacacaccccc

SEQ ID NO: 464371 - DNA, 35 bp, Homo sapiens; identical to SEQ ID NO: 352347
  chr19:46997221-46997256
  hyper
  lung vs. cervical,anorectal

SEQ ID NO: 464372 - DNA, 242 bp, Homo sapiens; identical to SEQ ID NO: 336199
  chr19:48229040-48229282
  hyper
  lung vs. upper_gi

SEQ ID NO: 464373 - DNA, 57 bp, Homo sapiens
  chr19:49244884-49244941
  hyper
  lung vs. upper_gi,pancreas_gallbladder
cggggccagaggccacgcccccggcaggaagccacaccccgtgccccgaaaccacac

SEQ ID NO: 464374 - DNA, 77 bp, Homo sapiens; identical to SEQ ID NO: 336229
  chr19:51111319-51111396
  hyper
  lung vs. ovary

SEQ ID NO: 464375 - DNA, 29 bp, Homo sapiens
  chr19:58239193-58239222
  hyper
  lung vs. lymphoid_neoplasm,melanoma,sarcoma,prostate
ccgagtttcaaagggctgacaggacttcc

SEQ ID NO: 464376 - DNA, 1 bp, Homo sapiens
  chr19:58952140-58952141
  hyper
  lung vs. sarcoma
c

SEQ ID NO: 464377 - DNA, 178 bp, Homo sapiens; identical to SEQ ID NO: 345000
  chr2:10588876-10589054
  hyper
  lung vs. pancreas_gallbladder

SEQ ID NO: 464378 - DNA, 117 bp, Homo sapiens; identical to SEQ ID NO: 455869
  chr2:10589056-10589173
  hyper
  lung vs. pancreas_gallbladder

SEQ ID NO: 464379 - DNA, 197 bp, Homo sapiens; identical to SEQ ID NO: 345002
  chr2:10589298-10589495
  hyper
  lung vs. pancreas_gallbladder

SEQ ID NO: 464380 - DNA, 17 bp, Homo sapiens
  chr2:19550023-19550040
  hyper
  lung vs. pancreas_gallbladder
cgcccctccagggctgg

SEQ ID NO: 464381 - DNA, 138 bp, Homo sapiens; identical to SEQ ID NO: 453089
  chr2:19550409-19550547
  hyper
  lung vs. pancreas_gallbladder

SEQ ID NO: 464382 - DNA, 274 bp, Homo sapiens; identical to SEQ ID NO: 346421
  chr2:19550611-19550885
  hyper
  lung vs. pancreas_gallbladder

SEQ ID NO: 464383 - DNA, 297 bp, Homo sapiens; identical to SEQ ID NO: 349464
  chr2:19551656-19551953
  hyper
  lung vs. thyroid,non_cancer,multiple_myeloma,prostate, uterine,myeloid_neoplasm

SEQ ID NO: 464384 - DNA, 20 bp, Homo sapiens
  chr2:19556672-19556692
  hyper
  lung vs. breast
tgcttgcattaatgagaacg

SEQ ID NO: 464385 - DNA, 18 bp, Homo sapiens
  chr2:19556772-19556790
  hyper
  lung vs. breast
agtggtgacaggcgtccg

SEQ ID NO: 464386 - DNA, 41 bp, Homo sapiens
  chr2:19557098-19557139
  hyper
  lung vs. breast
gggtgaaatttaccaaattgtggcaacaaagaaacccttgc

SEQ ID NO: 464387 - DNA, 286 bp, Homo sapiens; identical to SEQ ID NO: 357114
  chr2:19561707-19561993
  hyper
  lung vs. non_cancer

SEQ ID NO: 464388 - DNA, 288 bp, Homo sapiens; identical to SEQ ID NO: 455875
  chr2:25354461-25354749
  hyper
  lung vs. colorectal,upper_gi,bladder_and_urothelial, head_and_neck

SEQ ID NO: 464389 - DNA, 44 bp, Homo sapiens; identical to SEQ ID NO: 357130
  chr2:25354957-25355001
  hyper
  lung vs. colorectal,upper_gi,bladder_and_urothelial, head_and_neck

SEQ ID NO: 464390 - DNA, 80 bp, Homo sapiens
  chr2:26521880-26521960
  hyper
  lung vs. anorectal,cervical
cgatgaggagtcctggggtaggggaggtgtgtgaaagtgtgtgaaagagatggtctcgggagaggccaacgcggggagtg

SEQ ID NO: 464391 - DNA, 374 bp, Homo sapiens; identical to SEQ ID NO: 349476
  chr2:26522127-26522501
  hyper
  lung vs. anorectal,cervical

SEQ ID NO: 464392 - DNA, 38 bp, Homo sapiens; identical to SEQ ID NO: 454314
  chr2:30453530-30453568
  hyper
  lung vs. ovary,myeloid_neoplasm,non_cancer,uterine, thyroid

SEQ ID NO: 464393 - DNA, 4 bp, Homo sapiens
  chr2:30454906-30454910
  hyper
  lung vs. ovary
tcac

SEQ ID NO: 464394 - DNA, 64 bp, Homo sapiens; identical to SEQ ID NO: 454317
  chr2:43019535-43019599
  hyper
  lung vs. anorectal

SEQ ID NO: 464395 - DNA, 395 bp, Homo sapiens; identical to SEQ ID NO: 345010
  chr2:43452443-43452838
  hyper
  lung vs. upper_gi,pancreas_gallbladder,liver_bileduct, melanoma,colorectal,breast,ovary,uterine

SEQ ID NO: 464396 - DNA, 5 bp, Homo sapiens
  chr2:63275188-63275193
  hyper
  lung vs. head_and_neck
ggctc

SEQ ID NO: 464397 - DNA, 90 bp, Homo sapiens
  chr2:63284469-63284559
  hyper
  lung vs. myeloid_neoplasm
cgcgggatatccgaagtgtggaggaaacagacaagtcagggtacagaggtgggggttgggcaggggcgcagggctgaccccctcacccgg

SEQ ID NO: 464398 - DNA, 54 bp, Homo sapiens; identical to SEQ ID NO: 346439
  chr2:63287368-63287422
  hyper
  lung vs. cervical,anorectal

SEQ ID NO: 464399 - DNA, 2 bp, Homo sapiens
  chr2:64836206-64836208
  hyper
  lung vs. pancreas_gallbladder
cg

SEQ ID NO: 464400 - DNA, 354 bp, Homo sapiens; identical to SEQ ID NO: 331320
  chr2:64994400-64994754
  hyper
  lung vs. bladder_and_urothelial,sarcoma

SEQ ID NO: 464401 - DNA, 121 bp, Homo sapiens; identical to SEQ ID NO: 454323
  chr2:73147029-73147150
  hyper
  lung vs. uterine,thyroid,myeloid_neoplasm,prostate,ovary, non_cancer

SEQ ID NO: 464402 - DNA, 16 bp, Homo sapiens
  chr2:73148243-73148259
  hyper
  lung vs. uterine,thyroid,myeloid_neoplasm,non_cancer, prostate,ovary,cervical
ggaccccgggtgcttc

SEQ ID NO: 464403 - DNA, 236 bp, Homo sapiens; identical to SEQ ID NO: 453103
  chr2:74781700-74781936
  hyper
  lung vs. upper_gi,colorectal,pancreas_gallbladder

SEQ ID NO: 464404 - DNA, 123 bp, Homo sapiens; identical to SEQ ID NO: 453104
  chr2:74782349-74782472
  hyper
  lung vs. upper_gi,colorectal,pancreas_gallbladder

SEQ ID NO: 464405 - DNA, 59 bp, Homo sapiens; identical to SEQ ID NO: 345026
  chr2:96991316-96991375
  hyper
  lung vs. multiple_myeloma,uterine

SEQ ID NO: 464406 - DNA, 97 bp, Homo sapiens; identical to SEQ ID NO: 453106
  chr2:105468467-105468564
  hyper
  lung vs. melanoma

SEQ ID NO: 464407 - DNA, 265 bp, Homo sapiens; identical to SEQ ID NO: 454328
  chr2:111874622-111874887
  hyper
  lung vs. head_and_neck,breast,upper_gi,cervical, pancreas_gallbladder,sarcoma,colorectal,uterine, multiple_myeloma

SEQ ID NO: 464408 - DNA, 205 bp, Homo sapiens; identical to SEQ ID NO: 453111
  chr2:111874987-111875192
  hyper
  lung vs. head_and_neck,breast,upper_gi,cervical, pancreas_gallbladder,sarcoma,colorectal,uterine, multiple_myeloma

SEQ ID NO: 464409 - DNA, 205 bp, Homo sapiens; identical to SEQ ID NO: 453111
  chr2:111874987-111875192
  hyper
  lung vs. breast,head_and_neck,upper_gi,sarcoma, pancreas_gallbladder,anorectal,cervical,colorectal,uterine, multiple_myeloma,renal

SEQ ID NO: 464410 - DNA, 138 bp, Homo sapiens; identical to SEQ ID NO: 345036
  chr2:111875611-111875749
  hyper
  lung vs. breast,head_and_neck,upper_gi,sarcoma, pancreas_gallbladder,anorectal,cervical,colorectal,uterine, multiple_myeloma,renal

SEQ ID NO: 464411 - DNA, 6 bp, Homo sapiens
  chr2:114034670-114034676
  hyper
  lung vs. ovary,cervical,renal,uterine
cgcgcc

SEQ ID NO: 464412 - DNA, 34 bp, Homo sapiens; identical to SEQ ID NO: 460951
  chr2:114035443-114035477
  hyper
  lung vs. ovary,cervical,renal,uterine

SEQ ID NO: 464413 - DNA, 88 bp, Homo sapiens; identical to SEQ ID NO: 357275
  chr2:114035830-114035918
  hyper
  lung vs. renal

SEQ ID NO: 464414 - DNA, 31 bp, Homo sapiens; identical to SEQ ID NO: 453113
  chr2:118981062-118981093
  hyper
  lung vs. prostate,non_cancer,thyroid,myeloid_neoplasm, multiple_myeloma,colorectal,renal,uterine

SEQ ID NO: 464415 - DNA, 61 bp, Homo sapiens
  chr2:119605299-119605360
  hyper
  lung vs. head_and_neck
ctgtttttttttttttttttttttttttttttttcaaatctctgacagctcggatctttgc

SEQ ID NO: 464416 - DNA, 85 bp, Homo sapiens
  chr2:119605386-119605471
  hyper
  lung vs. head_and_neck
tcacccaggcacactttttgccttcaaaccggaagcacgtgagtcagggccgcacgtgtgcggagccaatggcgagccgggactc

SEQ ID NO: 464417 - DNA, 118 bp, Homo sapiens; identical to SEQ ID NO: 369720
  chr2:119605501-119605619
  hyper
  lung vs. head_and_neck

SEQ ID NO: 464418 - DNA, 140 bp, Homo sapiens
  chr2:119913874-119914014
  hyper
  lung vs. bladder_and_urothelial
cggtgtggagaggtgaattttctgtttgctggaattctgctgtgggtggggttttggctgatggacagggaaatctgcacaagtatttcgggtcacaaagaaggacgccccaggaagcccgcgctccctctggcctacct

SEQ ID NO: 464419 - DNA, 148 bp, Homo sapiens
  chr2:119914053-119914201
  hyper
  lung vs. bladder_and_urothelial
ggaggaggctgtctgaggagggcaggctcccggccctgcctgtccagtctaatcaggtttgcaaagtctgtgccgccgcctcaagggctcgggcgtcccttcctcccttgccgggatggggatggagaccaggagcacagccctgagc

SEQ ID NO: 464420 - DNA, 34 bp, Homo sapiens
  chr2:119914247-119914281
  hyper
  lung vs. bladder_and_urothelial
cgcagggatttgtcttttccaaaggagatgtcag

SEQ ID NO: 464421 - DNA, 382 bp, Homo sapiens; identical to SEQ ID NO: 459587
  chr2:127413347-127413729
  hyper
  lung vs. sarcoma,lymphoid_neoplasm,anorectal

SEQ ID NO: 464422 - DNA, 53 bp, Homo sapiens; identical to SEQ ID NO: 459588
  chr2:127413676-127413729
  hyper
  lung vs. sarcoma,melanoma,anorectal,lymphoid_neoplasm

SEQ ID NO: 464423 - DNA, 255 bp, Homo sapiens; identical to SEQ ID NO: 349581
  chr2:127414108-127414363
  hyper
  lung vs. sarcoma,melanoma,anorectal,lymphoid_neoplasm

SEQ ID NO: 464424 - DNA, 1 bp, Homo sapiens
  chr2:131720732-131720733
  hyper
  lung vs. ovary
c

SEQ ID NO: 464425 - DNA, 1 bp, Homo sapiens
  chr2:145282267-145282268
  hyper
  lung vs. melanoma,lymphoid_neoplasm, bladder_and_urothelial,uterine,ovary,sarcoma,renal,non_cancer
c

SEQ ID NO: 464426 - DNA, 51 bp, Homo sapiens; identical to SEQ ID NO: 453124
  chr2:149632592-149632643
  hyper
  lung vs. ovary

SEQ ID NO: 464427 - DNA, 9 bp, Homo sapiens
  chr2:160760627-160760636
  hyper
  lung vs. upper_gi
cgggaatcg

SEQ ID NO: 464428 - DNA, 50 bp, Homo sapiens
  chr2:162284276-162284326
  hyper
  lung vs. cervical,non_cancer,myeloid_neoplasm
cggcgattcctctccgtaaactcagatttcctcagtttttaacagtgtat

SEQ ID NO: 464429 - DNA, 17 bp, Homo sapiens
  chr2:162284643-162284660
  hyper
  lung vs. cervical,non_cancer,myeloid_neoplasm
cgggcgtccgggagctc

SEQ ID NO: 464430 - DNA, 362 bp, Homo sapiens
  chr2:171567970-171568332
  hyper
  lung vs. upper_gi,ovary,pancreas_gallbladder
cgattcagtgccgcattagcaccggggaaattctgtccccaccctcccagaacctttagtatagcaacgatttaactaggcagatatgggcaactgcaaaattgagtctccttggcaaggagtggggagatccagccgattaagcaacatcttactgtgaaaggccaaagcattaagaatttgctgaaatgatctaaataatatctagatttttaaaaaatctagcttgagaggggtgactctctggttggatttatgccagaggcatgcgtcccttctagctgcaagaaaatgcccgaggcgaggtaccaagcttgggctggaagtagcaacccctgacttaatcccagagcgcgcagagc

SEQ ID NO: 464431 - DNA, 16 bp, Homo sapiens
  chr2:171568711-171568727
  hyper
  lung vs. upper_gi,ovary,pancreas_gallbladder
actgacccccgccccc

SEQ ID NO: 464432 - DNA, 93 bp, Homo sapiens
  chr2:171568239-171568332
  hyper
  lung vs. upper_gi,pancreas_gallbladder,ovary
cgtcccttctagctgcaagaaaatgcccgaggcgaggtaccaagcttgggctggaagtagcaacccctgacttaatcccagagcgcgcagagc

SEQ ID NO: 464433 - DNA, 273 bp, Homo sapiens; identical to SEQ ID NO: 349618
  chr2:171568711-171568984
  hyper
  lung vs. upper_gi,pancreas_gallbladder,ovary

SEQ ID NO: 464434 - DNA, 128 bp, Homo sapiens
  chr2:172947590-172947718
  hyper
  lung vs. cervical
cgccagcggctcggcatcagagggcccgcgctcagtgctcctccctagacctttctgagctaagaaataattccggagtgtagccatctcttgctcacacacaacccgcttctaaattaagcaaggct

SEQ ID NO: 464435 - DNA, 86 bp, Homo sapiens; identical to SEQ ID NO: 453138
  chr2:173099596-173099682
  hyper
  lung vs. colorectal

SEQ ID NO: 464436 - DNA, 42 bp, Homo sapiens; identical to SEQ ID NO: 454338
  chr2:175190730-175190772
  hyper
  lung vs. anorectal

SEQ ID NO: 464437 - DNA, 50 bp, Homo sapiens
  chr2:175197866-175197916
  hyper
  lung vs. bladder_and_urothelial
cgacccacatagccctccccacccacggagtgcgccaagacgcacccagg

SEQ ID NO: 464438 - DNA, 455 bp, Homo sapiens
  chr2:175198064-175198519
  hyper
  lung vs. bladder_and_urothelial
gtttggggttggtagtttaattttttttttttcctaagaagcagggtgtgggtttagtggggagtgtgctatattaaaaccagtgcccaggtctgcccgagggcgctggtatttctggttcaaaaacagcttctggctaccctggagaagaaagagaaagcggggcccagaaagagaaaaacaagcaggtcagcggttgctgggggactcgaagacgcaccctggtctgcttgaggacgcctcttttcacactgacaaggtccagggaggacttcaggatgcttccagcctgcaaaatgtggaagcgcccacgtgtggcctggtcctccgccctcccgggtgaaagtcctggagagatttctcgggcgcgtccgtgaaagcagggcactaatggggagcctacctcttaaaacagcgcacttgccctacggacgagcctctaggccctggtggtc

SEQ ID NO: 464439 - DNA, 150 bp, Homo sapiens; identical to SEQ ID NO: 457889
  chr2:175198369-175198519
  hyper
  lung vs. bladder_and_urothelial,pancreas_gallbladder

SEQ ID NO: 464440 - DNA, 297 bp, Homo sapiens; identical to SEQ ID NO: 346496
  chr2:175199018-175199315
  hyper
  lung vs. bladder_and_urothelial,pancreas_gallbladder

SEQ ID NO: 464441 - DNA, 351 bp, Homo sapiens; identical to SEQ ID NO: 454339
  chr2:175199018-175199369
  hyper
  lung vs. cervical,thyroid,ovary

SEQ ID NO: 464442 - DNA, 21 bp, Homo sapiens
  chr2:175199348-175199369
  hyper
  lung vs. ovary,uterine,cervical
cggggtggtttgtgtgtgggg

SEQ ID NO: 464443 - DNA, 206 bp, Homo sapiens; identical to SEQ ID NO: 462740
  chr2:175199935-175200141
  hyper
  lung vs. ovary,uterine,cervical

SEQ ID NO: 464444 - DNA, 206 bp, Homo sapiens; identical to SEQ ID NO: 462740
  chr2:175199935-175200141
  hyper
  lung vs. ovary

SEQ ID NO: 464445 - DNA, 207 bp, Homo sapiens; identical to SEQ ID NO: 357388
  chr2:176965522-176965729
  hyper
  lung vs. anorectal

SEQ ID NO: 464446 - DNA, 173 bp, Homo sapiens; identical to SEQ ID NO: 349636
  chr2:176969908-176970081
  hyper
  lung vs. bladder_and_urothelial,anorectal

SEQ ID NO: 464447 - DNA, 62 bp, Homo sapiens
  chr2:176980657-176980719
  hyper
  lung vs. myeloid_neoplasm,thyroid
cgagggacgctttcgcggatagtgaactgctggcaaagaattgtctctgggctgaaagctcc

SEQ ID NO: 464448 - DNA, 126 bp, Homo sapiens
  chr2:176993339-176993465
  hyper
  lung vs. bladder_and_urothelial,myeloid_neoplasm, cervical
gacagctttggagagagctgctaaaatcgggaatattttgtcgattcacactcgactgggccacatgactcgggcaacttttcttcatctctgctcacaaactaggctgagccttctctttctctg

SEQ ID NO: 464449 - DNA, 61 bp, Homo sapiens; identical to SEQ ID NO: 349639
  chr2:176995668-176995729
  hyper
  lung vs. colorectal

SEQ ID NO: 464450 - DNA, 22 bp, Homo sapiens
  chr2:177001081-177001103
  hyper
  lung vs. colorectal,anorectal,sarcoma,ovary, bladder_and_urothelial,prostate,renal,cervical,uterine, myeloid_neoplasm,non_cancer
cgggggagagagaaagcagaag

SEQ ID NO: 464451 - DNA, 34 bp, Homo sapiens; identical to SEQ ID NO: 345053
  chr2:182323095-182323129
  hyper
  lung vs. thyroid,lymphoid_neoplasm,non_cancer, myeloid_neoplasm

SEQ ID NO: 464452 - DNA, 51 bp, Homo sapiens
  chr2:200331873-200331924
  hyper
  lung vs. anorectal
cggccagactcaggcctttctaatacaggcgtgaagggcgggacgcccaga

SEQ ID NO: 464453 - DNA, 427 bp, Homo sapiens; identical to SEQ ID NO: 369896
  chr2:200331953-200332380
  hyper
  lung vs. anorectal

SEQ ID NO: 464454 - DNA, 173 bp, Homo sapiens; identical to SEQ ID NO: 331583
  chr2:206750391-206750564
  hyper
  lung vs. liver_bileduct,pancreas_gallbladder,upper_gi, bladder_and_urothelial

SEQ ID NO: 464455 - DNA, 325 bp, Homo sapiens; identical to SEQ ID NO: 453144
  chr2:219232221-219232546
  hyper
  lung vs. pancreas_gallbladder

SEQ ID NO: 464456 - DNA, 32 bp, Homo sapiens; identical to SEQ ID NO: 357453
  chr2:219232859-219232891
  hyper
  lung vs. pancreas_gallbladder

SEQ ID NO: 464457 - DNA, 133 bp, Homo sapiens
  chr2:223104742-223104875
  hyper
  lung vs. upper_gi
cgtctcacagcacgaggtcattagaaggaaaataagctcctgccaggttggggctaatcaaaatagcacaaataaaccctgacactcaacaactccccgagtgcctgctgccctgggaggagagtacagattg

SEQ ID NO: 464458 - DNA, 28 bp, Homo sapiens
  chr2:223104910-223104938
  hyper
  lung vs. upper_gi
agggcctggccgtgtgctccgttgctcc

SEQ ID NO: 464459 - DNA, 305 bp, Homo sapiens
  chr2:223166850-223167155
  hyper
  lung vs. uterine
tttcagagacactacaggtgaaaataacagcgggctggctgtccaggcctgagtggagcgtgcccttgttagcttgaaagttctccctcgcagcccgtttggatgcgtgcgtctacagcccagtcgcactttggtgaccggcctgggctgtgaagcaccctttagcgaacagcctccgcacttggggacactggcacaagggtttcatggcccgtggacttctcagggcctctgagggttgacttcatactcagccagacacaggtcttaagaggaaattatgatctatgcaaaataatgtccct

SEQ ID NO: 464460 - DNA, 305 bp, Homo sapiens; identical to SEQ ID NO: 464459
  chr2:223166850-223167155
  hyper
  lung vs. ovary,prostate,renal

SEQ ID NO: 464461 - DNA, 61 bp, Homo sapiens; identical to SEQ ID NO: 457900
  chr2:223170211-223170272
  hyper
  lung vs. uterine,renal

SEQ ID NO: 464462 - DNA, 61 bp, Homo sapiens; identical to SEQ ID NO: 457900
  chr2:223170211-223170272
  hyper
  lung vs. cervical

SEQ ID NO: 464463 - DNA, 157 bp, Homo sapiens
  chr2:231902837-231902994
  hyper
  lung vs. liver_bileduct,pancreas_gallbladder
cggcctcccggcctcctgcctggccgtccaggcggccgcctgcagggccctgcaagccgccggagccgggcaaccaggtgagactgcgcggggcccggctgggcgcgggcgggcggtggctcgggcacgtcccccaagttggacccctttggccatt

SEQ ID NO: 464464 - DNA, 105 bp, Homo sapiens
  chr2:232479181-232479286
  hyper
  lung vs. upper_gi,pancreas_gallbladder
cgagccgcctccccgcccccagcctcccctgccccggctgcccccgagtcctgtttcagggatcctagccctctctccagacgcgctgctctgtccactgtcccc

SEQ ID NO: 464465 - DNA, 227 bp, Homo sapiens; identical to SEQ ID NO: 349701
  chr2:232479454-232479681
  hyper
  lung vs. upper_gi,pancreas_gallbladder

SEQ ID NO: 464466 - DNA, 17 bp, Homo sapiens
  chr20:2668754-2668771
  hyper
cggggatctgacaggaa

SEQ ID NO: 464467 - DNA, 68 bp, Homo sapiens; identical to SEQ ID NO: 457912
  chr20:3052452-3052520
  hyper
  lung vs. pancreas_gallbladder

SEQ ID NO: 464468 - DNA, 1 bp, Homo sapiens
  chr20:3218936-3218937
  hyper
  lung vs. cervical
c

SEQ ID NO: 464469 - DNA, 54 bp, Homo sapiens; identical to SEQ ID NO: 453156
  chr20:9496982-9497036
  hyper
  lung vs. melanoma,ovary

SEQ ID NO: 464470 - DNA, 240 bp, Homo sapiens; identical to SEQ ID NO: 453157
  chr20:9497109-9497349
  hyper
  lung vs. melanoma,ovary

SEQ ID NO: 464471 - DNA, 118 bp, Homo sapiens; identical to SEQ ID NO: 361818
  chr20:9497378-9497496
  hyper
  lung vs. melanoma,ovary

SEQ ID NO: 464472 - DNA, 206 bp, Homo sapiens; identical to SEQ ID NO: 453161
  chr20:21080357-21080563
  hyper
  lung vs. colorectal,thyroid,lymphoid_neoplasm,non_cancer, upper_gi,multiple_myeloma,myeloid_neoplasm,prostate

SEQ ID NO: 464473 - DNA, 118 bp, Homo sapiens; identical to SEQ ID NO: 375056
  chr20:21084470-21084588
  hyper
  lung vs. bladder_and_urothelial

SEQ ID NO: 464474 - DNA, 185 bp, Homo sapiens; identical to SEQ ID NO: 457915
  chr20:21086682-21086867
  hyper

SEQ ID NO: 464475 - DNA, 107 bp, Homo sapiens; identical to SEQ ID NO: 361836
  chr20:21087188-21087295
  hyper

SEQ ID NO: 464476 - DNA, 62 bp, Homo sapiens; identical to SEQ ID NO: 453168
  chr20:30639044-30639106
  hyper
  lung vs. multiple_myeloma,thyroid,non_cancer

SEQ ID NO: 464477 - DNA, 139 bp, Homo sapiens; identical to SEQ ID NO: 453169
  chr20:30639494-30639633
  hyper
  lung vs. multiple_myeloma,thyroid,non_cancer

SEQ ID NO: 464478 - DNA, 139 bp, Homo sapiens; identical to SEQ ID NO: 453169
  chr20:30639494-30639633
  hyper
  lung vs. anorectal

SEQ ID NO: 464479 - DNA, 5 bp, Homo sapiens
  chr20:34188561-34188566
  hyper
  lung vs. anorectal,thyroid
cgtcc

SEQ ID NO: 464480 - DNA, 142 bp, Homo sapiens
  chr20:35201323-35201465
  hyper
  lung vs. ovary,upper_gi,pancreas_gallbladder
cgaggatgagacgggatgacacacacgaagtgccccgcacagcgtcgttgtaaagcgttggctgttttcacctctggccgccccctgtgagcccgatcatgtgctttttgggcttaggtcggaggcggcctcccagattcta

SEQ ID NO: 464481 - DNA, 38 bp, Homo sapiens
  chr20:35201548-35201586
  hyper
  lung vs. ovary,upper_gi,pancreas_gallbladder
cagtttcccctcgaagcaacgggaccaatcgcaccgcc

SEQ ID NO: 464482 - DNA, 120 bp, Homo sapiens; identical to SEQ ID NO: 347672
  chr20:35201647-35201767
  hyper
  lung vs. ovary,upper_gi,pancreas_gallbladder

SEQ ID NO: 464483 - DNA, 100 bp, Homo sapiens; identical to SEQ ID NO: 352489
  chr20:37303401-37303501
  hyper
  lung vs. ovary

SEQ ID NO: 464484 - DNA, 48 bp, Homo sapiens; identical to SEQ ID NO: 461000
  chr20:43729515-43729563
  hyper
  lung vs. pancreas_gallbladder

SEQ ID NO: 464485 - DNA, 71 bp, Homo sapiens; identical to SEQ ID NO: 345637
  chr20:44453063-44453134
  hyper
  lung vs. pancreas_gallbladder,breast,prostate,upper_gi, colorectal

SEQ ID NO: 464486 - DNA, 234 bp, Homo sapiens; identical to SEQ ID NO: 361977
  chr21:38073877-38074111
  hyper
  lung vs. upper_gi

SEQ ID NO: 464487 - DNA, 146 bp, Homo sapiens; identical to SEQ ID NO: 352554
  chr21:38080753-38080899
  hyper

SEQ ID NO: 464488 - DNA, 130 bp, Homo sapiens; identical to SEQ ID NO: 454357
  chr22:19706042-19706172
  hyper
  lung vs. anorectal,ovary

SEQ ID NO: 464489 - DNA, 10 bp, Homo sapiens
  chr22:19711681-19711691
  hyper
ggccgccccg

SEQ ID NO: 464490 - DNA, 124 bp, Homo sapiens; identical to SEQ ID NO: 453179
  chr22:28838056-28838180
  hyper
  lung vs. upper_gi,pancreas_gallbladder,uterine, colorectal,sarcoma

SEQ ID NO: 464491 - DNA, 61 bp, Homo sapiens; identical to SEQ ID NO: 453180
  chr22:28838449-28838510
  hyper
  lung vs. upper_gi,pancreas_gallbladder,uterine, colorectal,sarcoma

SEQ ID NO: 464492 - DNA, 244 bp, Homo sapiens; identical to SEQ ID NO: 453181
  chr22:28838551-28838795
  hyper
  lung vs. upper_gi,pancreas_gallbladder,uterine, colorectal,sarcoma

SEQ ID NO: 464493 - DNA, 125 bp, Homo sapiens; identical to SEQ ID NO: 453182
  chr22:28838844-28838969
  hyper
  lung vs. upper_gi,pancreas_gallbladder,uterine, colorectal,sarcoma

SEQ ID NO: 464494 - DNA, 24 bp, Homo sapiens
  chr22:28838486-28838510
  hyper
  lung vs. upper_gi,bladder_and_urothelial, pancreas_gallbladder
cggggcctgtgtcaggggtgcagc

SEQ ID NO: 464495 - DNA, 244 bp, Homo sapiens; identical to SEQ ID NO: 453181
  chr22:28838551-28838795
  hyper
  lung vs. upper_gi,bladder_and_urothelial, pancreas_gallbladder

SEQ ID NO: 464496 - DNA, 279 bp, Homo sapiens; identical to SEQ ID NO: 453185
  chr22:28838844-28839123
  hyper
  lung vs. upper_gi,bladder_and_urothelial, pancreas_gallbladder

SEQ ID NO: 464497 - DNA, 129 bp, Homo sapiens; identical to SEQ ID NO: 347720
  chr22:28839263-28839392
  hyper
  lung vs. upper_gi,bladder_and_urothelial, pancreas_gallbladder

SEQ ID NO: 464498 - DNA, 199 bp, Homo sapiens; identical to SEQ ID NO: 362054
  chr22:29876679-29876878
  hyper
  lung vs. sarcoma

SEQ ID NO: 464499 - DNA, 149 bp, Homo sapiens
  chr22:30642437-30642586
  hyper
  lung vs. head_and_neck
cggcgccccctccctcgccgccaacctgccgcggggcgtgcggtgcttgggaccatgtgcccgcgctcgctccgggccgccacccagcgcctccggtggctgcgcgggcgccccaagtgttcgtgtgtctgcggcgggtgggcgtccgg

SEQ ID NO: 464500 - DNA, 44 bp, Homo sapiens; identical to SEQ ID NO: 375314
  chr22:30642684-30642728
  hyper
  lung vs. head_and_neck

SEQ ID NO: 464501 - DNA, 224 bp, Homo sapiens; identical to SEQ ID NO: 336634
  chr22:33192959-33193183
  hyper
  lung vs. liver_bileduct

SEQ ID NO: 464502 - DNA, 180 bp, Homo sapiens; identical to SEQ ID NO: 336648
  chr22:39941870-39942050
  hyper
  lung vs. bladder_and_urothelial

SEQ ID NO: 464503 - DNA, 14 bp, Homo sapiens
  chr22:42354024-42354038
  hyper
  lung vs. lymphoid_neoplasm,pancreas_gallbladder,upper_gi, colorectal,multiple_myeloma
gcctgggccctccc

SEQ ID NO: 464504 - DNA, 1 bp, Homo sapiens
  chr22:42679388-42679389
  hyper
  lung vs. colorectal
c

SEQ ID NO: 464505 - DNA, 54 bp, Homo sapiens
  chr22:42896458-42896512
  hyper
  lung vs. pancreas_gallbladder
cggcggccctcgggatgggtcctgccagggcgcagagatggcggtggaaaggcg

SEQ ID NO: 464506 - DNA, 10 bp, Homo sapiens
  chr22:46262409-46262419
  hyper
  lung vs. cervical,breast,bladder_and_urothelial,renal, ovary,prostate,uterine,non_cancer,thyroid,myeloid_neoplasm
cgggtgctgg

SEQ ID NO: 464507 - DNA, 23 bp, Homo sapiens
  chr22:46367044-46367067
  hyper
  lung vs. melanoma,ovary,sarcoma,breast, bladder_and_urothelial,uterine,renal,upper_gi
cgcagggagcgggaaggcagcgg

SEQ ID NO: 464508 - DNA, 237 bp, Homo sapiens
  chr22:46367124-46367361
  hyper
  lung vs. melanoma,ovary,sarcoma,breast, bladder_and_urothelial,uterine,renal,upper_gi
gagggggaagggaagagaaggggagggagagcaggctctgaggtttaatcagtagcatccagcttaaattcccccaaacggcggttccataaatgaaacttctttttaagtcagaggccagagcatatgcgtcccattaggaattcggcgaagccaccactgcgcgccccctgggctcactgggctggactcggccctgcccggagcttctcagagccccgtgggctctgccttgcc

SEQ ID NO: 464509 - DNA, 121 bp, Homo sapiens; identical to SEQ ID NO: 462799
  chr22:46367867-46367988
  hyper
  lung vs. melanoma,ovary,sarcoma,breast, bladder_and_urothelial,uterine,renal,upper_gi

SEQ ID NO: 464510 - DNA, 121 bp, Homo sapiens; identical to SEQ ID NO: 462799
  chr22:46367867-46367988
  hyper
  lung vs. uterine,melanoma,ovary,breast,renal,sarcoma, thyroid,cervical,prostate,non_cancer

SEQ ID NO: 464511 - DNA, 59 bp, Homo sapiens; identical to SEQ ID NO: 453192
  chr22:50170525-50170584
  hyper
  lung vs. ovary

SEQ ID NO: 464512 - DNA, 79 bp, Homo sapiens; identical to SEQ ID NO: 462800
  chr22:51042182-51042261
  hyper
  lung vs. renal

SEQ ID NO: 464513 - DNA, 4 bp, Homo sapiens
  chr3:9904708-9904712
  hyper
  lung vs. bladder_and_urothelial,upper_gi, pancreas_gallbladder,colorectal,anorectal,cervical, head_and_neck
ggcc

SEQ ID NO: 464514 - DNA, 413 bp, Homo sapiens; identical to SEQ ID NO: 455963
  chr3:10206343-10206756
  hyper
  lung vs. liver_bileduct

SEQ ID NO: 464515 - DNA, 222 bp, Homo sapiens; identical to SEQ ID NO: 459681
  chr3:25469458-25469680
  hyper
  lung vs. pancreas_gallbladder

SEQ ID NO: 464516 - DNA, 130 bp, Homo sapiens; identical to SEQ ID NO: 345083
  chr3:25469874-25470004
  hyper
  lung vs. pancreas_gallbladder

SEQ ID NO: 464517 - DNA, 243 bp, Homo sapiens; identical to SEQ ID NO: 331723
  chr3:30648808-30649051
  hyper
  lung vs. upper_gi

SEQ ID NO: 464518 - DNA, 42 bp, Homo sapiens
  chr3:44063232-44063274
  hyper
  lung vs. ovary,uterine,renal,breast,prostate
cgtaatgccacttgcaggttacagctttcaaagcaaagccag

SEQ ID NO: 464519 - DNA, 82 bp, Homo sapiens; identical to SEQ ID NO: 454369
  chr3:50377892-50377974
  hyper
  lung vs. upper_gi,anorectal,head_and_neck,cervical

SEQ ID NO: 464520 - DNA, 167 bp, Homo sapiens; identical to SEQ ID NO: 346566
  chr3:50378002-50378169
  hyper
  lung vs. upper_gi,anorectal,head_and_neck,cervical

SEQ ID NO: 464521 - DNA, 2 bp, Homo sapiens
  chr3:50402119-50402121
  hyper
  lung vs. cervical,upper_gi,pancreas_gallbladder, anorectal,head_and_neck,bladder_and_urothelial,uterine,prostate, colorectal,ovary,non_cancer,thyroid,multiple_myeloma, myeloid_neoplasm,renal
cg

SEQ ID NO: 464522 - DNA, 38 bp, Homo sapiens
  chr3:51989952-51989990
  hyper
  lung vs. head_and_neck
cgccgctctgctgccggcctgcacgctcggggtggccg

SEQ ID NO: 464523 - DNA, 138 bp, Homo sapiens; identical to SEQ ID NO: 357614
  chr3:51990500-51990638
  hyper
  lung vs. head_and_neck

SEQ ID NO: 464524 - DNA, 438 bp, Homo sapiens; identical to SEQ ID NO: 345099
  chr3:124773932-124774370
  hyper
  lung vs. upper_gi,liver_bileduct,pancreas_gallbladder, cervical

SEQ ID NO: 464525 - DNA, 197 bp, Homo sapiens
  chr3:132756116-132756313
  hyper
  lung vs. pancreas_gallbladder,lymphoid_neoplasm,melanoma, anorectal
cgctgaacgacaaaggttctagctggccagtccgaaaacactgagtccttaggtcaaatttgagaaatgacagggccagtgggagtcctaacttctagactctggaattactgacagaagaatatttggacagtttttaagaccctcaaggcatattattttacaacctctttagcttatgcctgaatttgtgctgt

SEQ ID NO: 464526 - DNA, 39 bp, Homo sapiens; identical to SEQ ID NO: 346591
  chr3:132756477-132756516
  hyper
  lung vs. pancreas_gallbladder,lymphoid_neoplasm,melanoma, anorectal

SEQ ID NO: 464527 - DNA, 21 bp, Homo sapiens
  chr3:134032175-134032196
  hyper
  lung vs. liver_bileduct
cgggctgggagcggagtgggg

SEQ ID NO: 464528 - DNA, 13 bp, Homo sapiens
  chr3:138679565-138679578
  hyper
  lung vs. thyroid,myeloid_neoplasm,anorectal
cgggcacagacgc

SEQ ID NO: 464529 - DNA, 4 bp, Homo sapiens
  chr3:157812151-157812155
  hyper
  lung vs. prostate,thyroid,non_cancer,multiple_myeloma, myeloid_neoplasm
cgca

SEQ ID NO: 464530 - DNA, 194 bp, Homo sapiens; identical to SEQ ID NO: 461036
  chr3:157821711-157821905
  hyper
  lung vs. myeloid_neoplasm,prostate,non_cancer,renal, uterine,breast

SEQ ID NO: 464531 - DNA, 23 bp, Homo sapiens
  chr3:157822008-157822031
  hyper
  lung vs. myeloid_neoplasm,prostate,non_cancer,renal, uterine,breast
gaacctcgccgtcaggcgcgctg

SEQ ID NO: 464532 - DNA, 271 bp, Homo sapiens; identical to SEQ ID NO: 349862
  chr3:169379645-169379916
  hyper
  lung vs. upper_gi

SEQ ID NO: 464533 - DNA, 98 bp, Homo sapiens; identical to SEQ ID NO: 453231
  chr3:181421152-181421250
  hyper
  lung vs. prostate,thyroid,myeloid_neoplasm,breast,renal, non_cancer

SEQ ID NO: 464534 - DNA, 380 bp, Homo sapiens; identical to SEQ ID NO: 454390
  chr3:187456733-187457113
  hyper
  lung vs. pancreas_gallbladder

SEQ ID NO: 464535 - DNA, 60 bp, Homo sapiens; identical to SEQ ID NO: 454391
  chr3:187457654-187457714
  hyper
  lung vs. pancreas_gallbladder

SEQ ID NO: 464536 - DNA, 509 bp, Homo sapiens; identical to SEQ ID NO: 345125
  chr3:187457654-187458163
  hyper
  lung vs. pancreas_gallbladder

SEQ ID NO: 464537 - DNA, 89 bp, Homo sapiens
  chr4:8201024-8201113
  hyper
  lung vs. liver_bileduct,pancreas_gallbladder,colorectal
ggagacagccccgtggggccagccagcgctgggccaggagcggccacctggttcctgcgtgctacggccctgtgggcctgggagctgcc

SEQ ID NO: 464538 - DNA, 39 bp, Homo sapiens
  chr4:8201450-8201489
  hyper
  lung vs. liver_bileduct,pancreas_gallbladder,colorectal
gggagcagagccagcctgtcgctggattccaagtccagc

SEQ ID NO: 464539 - DNA, 29 bp, Homo sapiens
  chr4:13549864-13549893
  hyper
  lung vs. sarcoma,uterine
gcgatccaaaccgcctaagcatcccaagc

SEQ ID NO: 464540 - DNA, 202 bp, Homo sapiens; identical to SEQ ID NO: 456000
  chr4:30723862-30724064
  hyper
  lung vs. cervical

SEQ ID NO: 464541 - DNA, 91 bp, Homo sapiens; identical to SEQ ID NO: 456001
  chr4:30724126-30724217
  hyper
  lung vs. cervical

SEQ ID NO: 464542 - DNA, 183 bp, Homo sapiens
  chr4:39047105-39047288
  hyper
  lung vs. head_and_neck,liver_bileduct
cggattttttttttcctctccttattacttgcaggcaattttgacctaagtttttaagcttttcttttaaataataccctcgcccccggagtgtggagaataagacggggacttcattttcccgagacccggcgtgcctggtgaaacttttgcatttaggcatttatttcagtgcatgctctg

SEQ ID NO: 464543 - DNA, 59 bp, Homo sapiens
  chr4:41746763-41746822
  hyper
  lung vs. renal,multiple_myeloma,prostate
cgtggactgcaattgaccccaatccaaagcagtgccaaaaagttcagtaaaagctggtg

SEQ ID NO: 464544 - DNA, 66 bp, Homo sapiens; identical to SEQ ID NO: 461067
  chr4:41752247-41752313
  hyper
  lung vs. multiple_myeloma,thyroid,prostate,non_cancer

SEQ ID NO: 464545 - DNA, 3 bp, Homo sapiens
  chr4:42155097-42155100
  hyper
  lung vs. prostate
gac

SEQ ID NO: 464546 - DNA, 22 bp, Homo sapiens
  chr4:56503535-56503557
  hyper
  lung vs. bladder_and_urothelial,multiple_myeloma
tgtgtgaaaaccggcgaaaacc

SEQ ID NO: 464547 - DNA, 6 bp, Homo sapiens
  chr4:57521376-57521382
  hyper
  lung vs. ovary,sarcoma,multiple_myeloma,non_cancer, myeloid_neoplasm,uterine,anorectal,thyroid,prostate,cervical, head_and_neck
cgggga

SEQ ID NO: 464548 - DNA, 49 bp, Homo sapiens
  chr4:85403425-85403474
  hyper
  lung vs. myeloid_neoplasm
ttcataacattttaaaaatggtcaagtccggccgggcgcggtggctcac

SEQ ID NO: 464549 - DNA, 148 bp, Homo sapiens
  chr4:85404934-85405082
  hyper
  lung vs. cervical
cggccacggctgccttttcctgccctgaagtggtggagcttctgggaagatccggggcctgtagcgccctttccactgcgagtaggcgcagccgctttacaggttgtgcgatggatacaggtatcgtgtggcagacgtggtgccgtct

SEQ ID NO: 464550 - DNA, 93 bp, Homo sapiens; identical to SEQ ID NO: 357907
  chr4:85405111-85405204
  hyper
  lung vs. cervical

SEQ ID NO: 464551 - DNA, 48 bp, Homo sapiens
  chr4:94753232-94753280
  hyper
  lung vs. bladder_and_urothelial
cgccaaaaagaaaaggaaagcgccacaaactgggtttgcagaaagagt

SEQ ID NO: 464552 - DNA, 33 bp, Homo sapiens; identical to SEQ ID NO: 349951
  chr4:94753547-94753580
  hyper
  lung vs. bladder_and_urothelial

SEQ ID NO: 464553 - DNA, 135 bp, Homo sapiens; identical to SEQ ID NO: 458074
  chr4:100729543-100729678
  hyper
  lung vs. upper_gi,pancreas_gallbladder,liver_bileduct

SEQ ID NO: 464554 - DNA, 233 bp, Homo sapiens; identical to SEQ ID NO: 461074
  chr4:111543735-111543968
  hyper
  lung vs. colorectal

SEQ ID NO: 464555 - DNA, 61 bp, Homo sapiens; identical to SEQ ID NO: 461075
  chr4:111543907-111543968
  hyper
  lung vs. colorectal

SEQ ID NO: 464556 - DNA, 47 bp, Homo sapiens; identical to SEQ ID NO: 349961
  chr4:113432609-113432656
  hyper
  lung vs. breast

SEQ ID NO: 464557 - DNA, 229 bp, Homo sapiens
  chr4:113438278-113438507
  hyper
  lung vs. bladder_and_urothelial
gaggtcggataggggagcagttgatgagcttttagaggatgtgagaatgaaatcactcacatgttagagctgaaaggatccccctcattttacatacaggaaactgaggctccgggcactgatgcaggttttgctggggttaacccagtttatagcctggagggacagcaaggaggcttcctgcgtgggtggcagcgaaccgagcgggaggagcggcagagctgctgct

SEQ ID NO: 464558 - DNA, 157 bp, Homo sapiens; identical to SEQ ID NO: 349965
  chr4:113442552-113442709
  hyper
  lung vs. ovary,thyroid,prostate,non_cancer, multiple_myeloma

SEQ ID NO: 464559 - DNA, 11 bp, Homo sapiens
  chr4:113443992-113444003
  hyper
  lung vs. thyroid,non_cancer,prostate,multiple_myeloma, myeloid_neoplasm
cgtgtctacag

SEQ ID NO: 464560 - DNA, 88 bp, Homo sapiens; identical to SEQ ID NO: 349984
  chr4:141489128-141489216
  hyper
  lung vs. ovary,upper_gi,uterine

SEQ ID NO: 464561 - DNA, 43 bp, Homo sapiens
  chr4:174439755-174439798
  hyper
  lung vs. prostate
cgcagtcccccttctccccattccagaacctgccgagcccctg

SEQ ID NO: 464562 - DNA, 271 bp, Homo sapiens
  chr4:174440348-174440619
  hyper
  lung vs. prostate
ctttgggattggactttttcagtttcacacgaagagacttggagtatctggagaaggtttttgaagacgtttaggagggagggtgagttttctgctgagaaactcaatctgccatacagtagcggccccatctgggatctgtcactgctgacagcaccagagggcacagccgtgatcttctgcacagcctgcactccccgaaataccctccttaatcaaaggatgtctgcgcgcctgagctcagctgaccgcgccgggagcaccagggccg

SEQ ID NO: 464563 - DNA, 276 bp, Homo sapiens
  chr4:175138136-175138412
  hyper
  lung vs. breast
cgtgcaatgtcactttaacctggatagcgtcaggtttcctcacgcataaaataagatcagatgatgccctcttggattctttgactgcaggacaatcattaggccatagtgaacagatgcgcttggttgccagaccgcgccctttgcgggtctatcaaaagggcaagcgcatattctggagctgtctcggagacttggacagaaagattcgaggcaaatattctaggctgggaaatttcgcgccgagcccccccctcagttagcctgtctaaaggc

SEQ ID NO: 464564 - DNA, 458 bp, Homo sapiens
  chr5:490766-491224
  hyper
  lung vs. pancreas_gallbladder
caaggtaggtgtgagcctcgaggggccgcgggtccaggagtctctgctacaacccctgaggctttcccttgggtgcggtggctagggcggctgccccatccgaggtgtgtcctgaccacctatggcatcgcccacgtgacgggcctgccatccatgagcctgtctgtgccctcggcagctttccctgggctgcacctggtgggtgatgctggacggcagggactacagggaggggtgagaaggcgccaaggaaccacgtgctgggtgaggcggccccaacccgggagctcctctttctccatgcgtctccttggtctcaggtttcagccccttgattcccatggagaggccgggccgtgctctctcttgaaccagacggaaaatcgccaattcttgtgagtctggttcagctggtggatttgtttgaggctgagttctcagaccggtgagggcggcag

SEQ ID NO: 464565 - DNA, 19 bp, Homo sapiens
  chr5:1879488-1879507
  hyper
  lung vs. melanoma
cggtttgcacggtgaccgc

SEQ ID NO: 464566 - DNA, 87 bp, Homo sapiens; identical to SEQ ID NO: 358057
  chr5:1879747-1879834
  hyper
  lung vs. melanoma

SEQ ID NO: 464567 - DNA, 89 bp, Homo sapiens
  chr5:3602716-3602805
  hyper
  lung vs. prostate
cgcacccccagcctgtgacccgcccttcccggcttgctcgagacccactggcgccagtgctgcgcgtggggactccgtgcatggccgaa

SEQ ID NO: 464568 - DNA, 12 bp, Homo sapiens
  chr5:10333412-10333424
  hyper
  lung vs. pancreas_gallbladder
cgctcttagcgc

SEQ ID NO: 464569 - DNA, 171 bp, Homo sapiens; identical to SEQ ID NO: 456015
  chr5:10564301-10564472
  hyper
  lung vs. lymphoid_neoplasm,ovary

SEQ ID NO: 464570 - DNA, 22 bp, Homo sapiens
  chr5:40680513-40680535
  hyper
  lung vs. upper_gi,lymphoid_neoplasm,colorectal, multiple_myeloma,pancreas_gallbladder,anorectal, myeloid_neoplasm,bladder_and_urothelial,cervical,non_cancer, thyroid,renal
cgggtccaggacatctgagggc

SEQ ID NO: 464571 - DNA, 337 bp, Homo sapiens; identical to SEQ ID NO: 456017
  chr5:40680627-40680964
  hyper
  lung vs. upper_gi,lymphoid_neoplasm,colorectal, multiple_myeloma,pancreas_gallbladder,anorectal, myeloid_neoplasm,bladder_and_urothelial,cervical,non_cancer, thyroid,renal

SEQ ID NO: 464572 - DNA, 89 bp, Homo sapiens; identical to SEQ ID NO: 456018
  chr5:40680875-40680964
  hyper
  lung vs. multiple_myeloma,upper_gi,pancreas_gallbladder, lymphoid_neoplasm,colorectal,cervical,myeloid_neoplasm, anorectal,non_cancer,thyroid,bladder_and_urothelial

SEQ ID NO: 464573 - DNA, 99 bp, Homo sapiens; identical to SEQ ID NO: 453281
  chr5:42950747-42950846
  hyper
  lung vs. sarcoma,multiple_myeloma,non_cancer,thyroid, myeloid_neoplasm,lymphoid_neoplasm,prostate

SEQ ID NO: 464574 - DNA, 3 bp, Homo sapiens
  chr5:42993305-42993308
  hyper
  lung vs. lymphoid_neoplasm,multiple_myeloma, bladder_and_urothelial,colorectal,anorectal,uterine
cgc

SEQ ID NO: 464575 - DNA, 175 bp, Homo sapiens; identical to SEQ ID NO: 346682
  chr5:42995428-42995603
  hyper
  lung vs. lymphoid_neoplasm,melanoma

SEQ ID NO: 464576 - DNA, 388 bp, Homo sapiens; identical to SEQ ID NO: 456025
  chr5:43017314-43017702
  hyper
  lung vs. colorectal,cervical,anorectal,lymphoid_neoplasm, head_and_neck,uterine,prostate,bladder_and_urothelial, non_cancer,multiple_myeloma

SEQ ID NO: 464577 - DNA, 304 bp, Homo sapiens; identical to SEQ ID NO: 456026
  chr5:43019347-43019651
  hyper
  lung vs. cervical,colorectal

SEQ ID NO: 464578 - DNA, 304 bp, Homo sapiens; identical to SEQ ID NO: 456026
  chr5:43019347-43019651
  hyper
  lung vs. colorectal,cervical

SEQ ID NO: 464579 - DNA, 260 bp, Homo sapiens; identical to SEQ ID NO: 456028
  chr5:43019887-43020147
  hyper
  lung vs. colorectal,cervical

SEQ ID NO: 464580 - DNA, 9 bp, Homo sapiens
  chr5:43020294-43020303
  hyper
  lung vs. colorectal,cervical
agccctagc

SEQ ID NO: 464581 - DNA, 76 bp, Homo sapiens; identical to SEQ ID NO: 454408
  chr5:54518558-54518634
  hyper
  lung vs. renal,multiple_myeloma,myeloid_neoplasm, non_cancer,prostate

SEQ ID NO: 464582 - DNA, 202 bp, Homo sapiens
  chr5:59189507-59189709
  hyper
  lung vs. bladder_and_urothelial,breast
gccttcctgatgctgctgctgctgctgccgccgccgccgcttctgcagcccagcagaggctggtgcttagcttctcacttgaaggcgccagagcctcagggctaccgagagggggccctgccagcgggaggggtcacagaacgcggcagggctccttccaccgaggctatggcagagacacgctcccgggctccccaagtca

SEQ ID NO: 464583 - DNA, 53 bp, Homo sapiens; identical to SEQ ID NO: 358121
  chr5:59190083-59190136
  hyper
  lung vs. bladder_and_urothelial,breast

SEQ ID NO: 464584 - DNA, 9 bp, Homo sapiens
  chr5:67584441-67584450
  hyper
  lung vs. pancreas_gallbladder
ctgcctgcc

SEQ ID NO: 464585 - DNA, 82 bp, Homo sapiens
  chr5:72416165-72416247
  hyper
  lung vs. pancreas_gallbladder
tttctcccagattcctcgcgcgcacggccacgagcgcggaggctgccaaacccgccagccctgggttccgaagccgcccctg

SEQ ID NO: 464586 - DNA, 82 bp, Homo sapiens; identical to SEQ ID NO: 464585
  chr5:72416165-72416247
  hyper
  lung vs. pancreas_gallbladder

SEQ ID NO: 464587 - DNA, 14 bp, Homo sapiens
  chr5:72416751-72416765
  hyper
  lung vs. pancreas_gallbladder
ccatagctttggac

SEQ ID NO: 464588 - DNA, 115 bp, Homo sapiens
  chr5:72497779-72497894
  hyper
  lung vs. pancreas_gallbladder
cgtctgcagaagttcgccctttgctggcccctgtccaggctctcctctcgctggcccacgtgatcctttcctgccagtctcccctggctccagcttcctccacgcccagggctct

SEQ ID NO: 464589 - DNA, 270 bp, Homo sapiens
  chr5:72594501-72594771
  hyper
  lung vs. anorectal
ggactgtcctgagtgcatttttttcctcccttatagtctgttaaattgactaataaacccaacgcagcgttctctgtgcagcttcaaaaaactcagtaatttcgttagaaaacgttgaaatccgaccccaaagtattcagcccaaatgtttagttaaagtaaccccgtgggttaataaactaaacaaaggcaacccatgcaaaaccggagcaatgaaaaccaggctacataaacgaagggaagtttataagaactctttgggaggaaaaa

SEQ ID NO: 464590 - DNA, 171 bp, Homo sapiens
  chr5:72733185-72733356
  hyper
  lung vs. ovary,cervical,anorectal
ctccagcaaactaacatcttgataagtccgctgacaacaaaataaacagtggagaaggctggagggcggggggcgccgtggcccgcggctggttcgcagcagctcggcggccttctgcgaggggaaggcgggccgctctcggctttgtgcttggggctttaggaggggggc

SEQ ID NO: 464591 - DNA, 53 bp, Homo sapiens; identical to SEQ ID NO: 453291
  chr5:75698192-75698245
  hyper
  lung vs. upper_gi,colorectal

SEQ ID NO: 464592 - DNA, 916 bp, Homo sapiens; identical to SEQ ID NO: 453292
  chr5:75698274-75699190
  hyper
  lung vs. upper_gi,colorectal

SEQ ID NO: 464593 - DNA, 267 bp, Homo sapiens; identical to SEQ ID NO: 453294
  chr5:75699193-75699460
  hyper
  lung vs. upper_gi

SEQ ID NO: 464594 - DNA, 19 bp, Homo sapiens
  chr5:75700173-75700192
  hyper
  lung vs. upper_gi
ccagattaacaccaaccac

SEQ ID NO: 464595 - DNA, 21 bp, Homo sapiens
  chr5:76924480-76924501
  hyper
  lung vs. myeloid_neoplasm,thyroid,non_cancer
ccccacgagacccctcccgcc

SEQ ID NO: 464596 - DNA, 199 bp, Homo sapiens; identical to SEQ ID NO: 370767
  chr5:76936815-76937014
  hyper
  lung vs. colorectal

SEQ ID NO: 464597 - DNA, 89 bp, Homo sapiens; identical to SEQ ID NO: 358154
  chr5:76939813-76939902
  hyper
  lung vs. cervical

SEQ ID NO: 464598 - DNA, 10 bp, Homo sapiens
  chr5:77140518-77140528
  hyper
  lung vs. ovary
cgcaactttg

SEQ ID NO: 464599 - DNA, 3 bp, Homo sapiens
  chr5:77147514-77147517
  hyper
  lung vs. ovary,uterine,sarcoma,multiple_myeloma,thyroid, non_cancer
cgc

SEQ ID NO: 464600 - DNA, 23 bp, Homo sapiens
  chr5:77148195-77148218
  hyper
  lung vs. ovary,uterine,sarcoma,multiple_myeloma,thyroid, non_cancer
gtttctgcaattatggcttaaac

SEQ ID NO: 464601 - DNA, 192 bp, Homo sapiens; identical to SEQ ID NO: 453297
  chr5:77148195-77148387
  hyper
  lung vs. ovary,uterine,sarcoma,lymphoid_neoplasm, non_cancer,thyroid,multiple_myeloma

SEQ ID NO: 464602 - DNA, 38 bp, Homo sapiens; identical to SEQ ID NO: 456033
  chr5:77268330-77268368
  hyper
  lung vs. ovary,thyroid,myeloid_neoplasm,uterine

SEQ ID NO: 464603 - DNA, 15 bp, Homo sapiens
  chr5:77269447-77269462
  hyper
  lung vs. ovary,thyroid,non_cancer,uterine, bladder_and_urothelial
ttccccgcggggctc

SEQ ID NO: 464604 - DNA, 418 bp, Homo sapiens; identical to SEQ ID NO: 350103
  chr5:79551984-79552402
  hyper
  lung vs. liver_bileduct,upper_gi,pancreas_gallbladder

SEQ ID NO: 464605 - DNA, 81 bp, Homo sapiens
  chr5:87955380-87955461
  hyper
  lung vs. multiple_myeloma
aagcctatgacaggaagttgttaataatatccttcgaaatttacctgtgaaatacagagcttgactacttttgtaaaagtg

SEQ ID NO: 464606 - DNA, 50 bp, Homo sapiens
  chr5:87962917-87962967
  hyper
  lung vs. upper_gi,colorectal,head_and_neck, pancreas_gallbladder
aacgagatctgttgccttcagagtttattccgaacttttctttttccttt

SEQ ID NO: 464607 - DNA, 389 bp, Homo sapiens
  chr5:87963002-87963391
  hyper
  lung vs. upper_gi,colorectal,head_and_neck, pancreas_gallbladder
catctattaatatcagaaaataaaaccagctattaaggtgcagcaagctgttacgagtgagcagcagcatccgtcccttcacaggcctctatttgcattgtaaattgcttctttctcacgcaagactctttagcctctctctatagagatgtataaagccaacggcaatttccagcgcaggttaaggaggaaggaaaaaaaaatcccattctatagaagtgacagctgattcaaggatctgttcctgatcctttttggttaggcaccatggctttttaccaagcggtggcagcttgattgcacatatcttgtgtgtatgtgttttagggggaagatcctcgatttcacagggcttctaggctgggaaggagaagatgccgtcttgctgg

SEQ ID NO: 464608 - DNA, 48 bp, Homo sapiens
  chr5:87962919-87962967
  hyper
  lung vs. upper_gi,anorectal
cgagatctgttgccttcagagtttattccgaacttttctttttccttt

SEQ ID NO: 464609 - DNA, 389 bp, Homo sapiens; identical to SEQ ID NO: 464607
  chr5:87963002-87963391
  hyper
  lung vs. upper_gi,anorectal

SEQ ID NO: 464610 - DNA, 191 bp, Homo sapiens; identical to SEQ ID NO: 350114
  chr5:87963511-87963702
  hyper
  lung vs. upper_gi,anorectal

SEQ ID NO: 464611 - DNA, 157 bp, Homo sapiens; identical to SEQ ID NO: 453301
  chr5:87969885-87970042
  hyper
  lung vs. sarcoma

SEQ ID NO: 464612 - DNA, 22 bp, Homo sapiens
  chr5:92906252-92906274
  hyper
  lung vs. thyroid,non_cancer,multiple_myeloma, myeloid_neoplasm,prostate
cgccaactgcccgcgcggaacc

SEQ ID NO: 464613 - DNA, 17 bp, Homo sapiens
  chr5:112629411-112629428
  hyper
  lung vs. anorectal
cgcttgcctcaaagact

SEQ ID NO: 464614 - DNA, 470 bp, Homo sapiens; identical to SEQ ID NO: 458145
  chr5:112629778-112630248
  hyper
  lung vs. anorectal

SEQ ID NO: 464615 - DNA, 58 bp, Homo sapiens; identical to SEQ ID NO: 453320
  chr5:114515671-114515729
  hyper
  lung vs. prostate

SEQ ID NO: 464616 - DNA, 68 bp, Homo sapiens; identical to SEQ ID NO: 454414
  chr5:114515769-114515837
  hyper
  lung vs. prostate

SEQ ID NO: 464617 - DNA, 105 bp, Homo sapiens; identical to SEQ ID NO: 346729
  chr5:115911590-115911695
  hyper
  lung vs. liver_bileduct

SEQ ID NO: 464618 - DNA, 95 bp, Homo sapiens; identical to SEQ ID NO: 453336
  chr5:125930492-125930587
  hyper
  lung vs. liver_bileduct

SEQ ID NO: 464619 - DNA, 170 bp, Homo sapiens; identical to SEQ ID NO: 350157
  chr5:125931062-125931232
  hyper
  lung vs. liver_bileduct

SEQ ID NO: 464620 - DNA, 218 bp, Homo sapiens; identical to SEQ ID NO: 454420
  chr5:132082800-132083018
  hyper
  lung vs. colorectal,upper_gi

SEQ ID NO: 464621 - DNA, 1 bp, Homo sapiens
  chr5:134363127-134363128
  hyper
  lung vs. cervical
c

SEQ ID NO: 464622 - DNA, 37 bp, Homo sapiens
  chr5:134364991-134365028
  hyper
  lung vs. head_and_neck
cgccggttcttgaaccagacctgggggaggggacggg

SEQ ID NO: 464623 - DNA, 169 bp, Homo sapiens; identical to SEQ ID NO: 200034
  chr5:134365094-134365263
  hyper
  lung vs. head_and_neck

SEQ ID NO: 464624 - DNA, 186 bp, Homo sapiens; identical to SEQ ID NO: 462915
  chr5:134366533-134366719
  hyper
  lung vs. head_and_neck,anorectal

SEQ ID NO: 464625 - DNA, 124 bp, Homo sapiens; identical to SEQ ID NO: 200036
  chr5:134367305-134367429
  hyper
  lung vs. head_and_neck,anorectal

SEQ ID NO: 464626 - DNA, 63 bp, Homo sapiens
  chr5:134374385-134374448
  hyper
  lung vs. cervical
cgatcccggctttggggccctgcctttgccgcgggagaataggctccaatttacgaagctggt

SEQ ID NO: 464627 - DNA, 84 bp, Homo sapiens; identical to SEQ ID NO: 350171
  chr5:134375851-134375935
  hyper
  lung vs. cervical

SEQ ID NO: 464628 - DNA, 90 bp, Homo sapiens
  chr5:134879182-134879272
  hyper
  lung vs. bladder_and_urothelial
cgagttaaagggggaggaaagcgcctcattttctatgcccccaagggacggaccgagcgggcagcctctaaacaatgtatttatcacttt

SEQ ID NO: 464629 - DNA, 73 bp, Homo sapiens; identical to SEQ ID NO: 345194
  chr5:134880614-134880687
  hyper
  lung vs. thyroid,myeloid_neoplasm,non_cancer, multiple_myeloma

SEQ ID NO: 464630 - DNA, 156 bp, Homo sapiens; identical to SEQ ID NO: 454425
  chr5:141931151-141931307
  hyper
  lung vs. colorectal,myeloid_neoplasm,uterine,non_cancer

SEQ ID NO: 464631 - DNA, 11 bp, Homo sapiens
  chr5:141931539-141931550
  hyper
  lung vs. colorectal,myeloid_neoplasm,uterine,non_cancer
ccctcccctcc

SEQ ID NO: 464632 - DNA, 173 bp, Homo sapiens; identical to SEQ ID NO: 350200
  chr5:152870319-152870492
  hyper
  lung vs. bladder_and_urothelial,upper_gi

SEQ ID NO: 464633 - DNA, 194 bp, Homo sapiens; identical to SEQ ID NO: 370925
  chr5:153859808-153860002
  hyper
  lung vs. ovary

SEQ ID NO: 464634 - DNA, 240 bp, Homo sapiens; identical to SEQ ID NO: 462923
  chr5:157098032-157098272
  hyper
  lung vs. ovary

SEQ ID NO: 464635 - DNA, 13 bp, Homo sapiens
  chr5:169063996-169064009
  hyper
  lung vs. bladder_and_urothelial
cggcaatcaggaa

SEQ ID NO: 464636 - DNA, 4 bp, Homo sapiens
  chr5:170741050-170741054
  hyper
  lung vs. multiple_myeloma
tggc

SEQ ID NO: 464637 - DNA, 143 bp, Homo sapiens
  chr5:172665306-172665449
  hyper
  lung vs. ovary
cgagcgcattctccgtgaataaattattattaattgaaaagcgatcggcgcagccggagccggcccccctttcgtgcaatcagcagggctggtcgcaaaaggtatatatgattaattgaaagataagctggaactatcaccgg

SEQ ID NO: 464638 - DNA, 297 bp, Homo sapiens; identical to SEQ ID NO: 358315
  chr5:172665949-172666246
  hyper
  lung vs. ovary

SEQ ID NO: 464639 - DNA, 769 bp, Homo sapiens; identical to SEQ ID NO: 461179
  chr5:174151999-174152768
  hyper
  lung vs. upper_gi

SEQ ID NO: 464640 - DNA, 60 bp, Homo sapiens
  chr5:176038454-176038514
  hyper
  lung vs. head_and_neck
cgtgggactggcgtctccaggcagcacgccaggcaaggagaaaacctcagcgtgtcggac

SEQ ID NO: 464641 - DNA, 29 bp, Homo sapiens
  chr5:179867621-179867650
  hyper
  lung vs. anorectal
gagaattaagaagcacaacacccagatac

SEQ ID NO: 464642 - DNA, 61 bp, Homo sapiens; identical to SEQ ID NO: 453345
  chr6:391113-391174
  hyper
  lung vs. lymphoid_neoplasm

SEQ ID NO: 464643 - DNA, 10 bp, Homo sapiens
  chr6:5997274-5997284
  hyper
  lung vs. uterine,ovary
aattcaatcc

SEQ ID NO: 464644 - DNA, 116 bp, Homo sapiens; identical to SEQ ID NO: 453351
  chr6:5997274-5997390
  hyper
  lung vs. uterine,ovary

SEQ ID NO: 464645 - DNA, 113 bp, Homo sapiens; identical to SEQ ID NO: 453352
  chr6:5997401-5997514
  hyper
  lung vs. uterine,ovary

SEQ ID NO: 464646 - DNA, 144 bp, Homo sapiens
  chr6:10383584-10383728
  hyper
  lung vs. upper_gi
cgcccgacggagcgtcccctcgcacctccccagagttgcctaactcctaggccctgaaagtgccagaacaaaggccgactcccccggcgcctccctcggggactgagcaccctgggccctgctgacgaagcaaaccccagactc

SEQ ID NO: 464647 - DNA, 85 bp, Homo sapiens; identical to SEQ ID NO: 350273
  chr6:10384074-10384159
  hyper
  lung vs. upper_gi

SEQ ID NO: 464648 - DNA, 148 bp, Homo sapiens; identical to SEQ ID NO: 358395
  chr6:10392129-10392277
  hyper
  lung vs. anorectal

SEQ ID NO: 464649 - DNA, 180 bp, Homo sapiens
  chr6:10409954-10410134
  hyper
  lung vs. head_and_neck,breast
cgcaactactttgtgtggttcctcaaaacgtccctcactctccgcctccgaataaaatgtttttataaggaaatactagggagaacccgggcccaccgactgtatgttccaggtatcctttctggggtaggtaagtagggggctgtgttccctcccgcgctggttgcgcggcctcttacc

SEQ ID NO: 464650 - DNA, 203 bp, Homo sapiens
  chr6:10410242-10410445
  hyper
  lung vs. head_and_neck,breast
cgaggatccaggcccgacagctggtgaggcagcccccggtgcgtgtgcaggagcccagactcctggctctgcctctggccgggccagcctgggtgctgcggctgcggctgggcgtgcagggggttcaggctgtaggggtcgttgacgtgggagtaaggatcttgcgactgggggtagataggctggtagggtggggggaagta

SEQ ID NO: 464651 - DNA, 39 bp, Homo sapiens
  chr6:10410406-10410445
  hyper
  lung vs. head_and_neck
cgactgggggtagataggctggtagggtggggggaagta

SEQ ID NO: 464652 - DNA, 306 bp, Homo sapiens
  chr6:10410948-10411254
  hyper
  lung vs. head_and_neck
tgccactgcgttattgtttattctcttccatttatttggagagaaaaaaatcataaacgttcaaagactgttaccgtttcatgactacttaaatagaaacatatttcgcagaggggctgtaacaaaaacacacgtttaaattaccagcttaaagaaggttttaactgcaggatcggggtctgtctttttcgcttcctctgttaggagcctttttctcgacagagtcgatttatggtttggatagggaaagggggacgtcaagtcaaggtttaaaatagaaagattcagccttattgggtttaaaag

SEQ ID NO: 464653 - DNA, 61 bp, Homo sapiens
  chr6:10415329-10415390
  hyper
  lung vs. breast,cervical,upper_gi,anorectal
ggaggagggagaggaggtggaggaggagaaggaggagggagaggaggagggcaaggaggag

SEQ ID NO: 464654 - DNA, 283 bp, Homo sapiens
  chr6:10415836-10416119
  hyper
  lung vs. breast,cervical,upper_gi,anorectal
ccagcttctagcacttctcccttaaccctgctaccacgatccgagctgcccttttggccccgtgcaattttattagaaatcattatccctttcgcaattaaacataaccaccaaaccaagaccggcgaagtcactccaggattttttcccaacaagggatcgcctccgctcgaggcagccaccccctcgggccgcagcgccttgggagttttattggctttgagctttcccccaggttggagattctgccaagcggctccggtggctctgctggggtttgcaa

SEQ ID NO: 464655 - DNA, 283 bp, Homo sapiens; identical to SEQ ID NO: 464654
  chr6:10415836-10416119
  hyper
  lung vs. breast,upper_gi,cervical,ovary

SEQ ID NO: 464656 - DNA, 22 bp, Homo sapiens
  chr6:10416378-10416400
  hyper
  lung vs. breast,upper_gi,cervical,ovary
tcaaaataaatcaccgggaacc

SEQ ID NO: 464657 - DNA, 24 bp, Homo sapiens
  chr6:10416507-10416531
  hyper
  lung vs. breast,upper_gi,cervical,ovary
cgcgaggcagagcccggctgccgc

SEQ ID NO: 464658 - DNA, 2 bp, Homo sapiens
  chr6:10417835-10417837
  hyper
  lung vs. breast,cervical,myeloid_neoplasm,anorectal, multiple_myeloma
cg

SEQ ID NO: 464659 - DNA, 227 bp, Homo sapiens; identical to SEQ ID NO: 345207
  chr6:10417842-10418069
  hyper
  lung vs. breast,cervical,myeloid_neoplasm,anorectal, multiple_myeloma

SEQ ID NO: 464660 - DNA, 138 bp, Homo sapiens; identical to SEQ ID NO: 461191
  chr6:10418940-10419078
  hyper
  lung vs. breast

SEQ ID NO: 464661 - DNA, 24 bp, Homo sapiens
  chr6:10420695-10420719
  hyper
  lung vs. breast,bladder_and_urothelial,uterine
cgctgcttctaattagaggggagc

SEQ ID NO: 464662 - DNA, 2 bp, Homo sapiens
  chr6:26198838-26198840
  hyper
  lung vs. bladder_and_urothelial,head_and_neck,upper_gi, cervical,melanoma,colorectal,uterine,anorectal,breast, liver_bileduct,prostate,ovary
cg

SEQ ID NO: 464663 - DNA, 214 bp, Homo sapiens
  chr6:26198924-26199138
  hyper
  lung vs. bladder_and_urothelial,head_and_neck,upper_gi, cervical,melanoma,colorectal,uterine,anorectal,breast, liver_bileduct,prostate,ovary
aacacccacttataaatggaaaaattattaaagaaaactgcaaaatagctatttacacagaaaatgtgagcccttttaaggaatacatgggtggctctgaaaagagcctttgttaagactgcttccttaaaaagccaatataagagttctcgttttacttgcccttggccttgtggtgactctcagtcttcttggggagcagtacagcctggat

SEQ ID NO: 464664 - DNA, 16 bp, Homo sapiens
  chr6:26199167-26199183
  hyper
  lung vs. bladder_and_urothelial,head_and_neck,upper_gi, cervical,melanoma,colorectal,uterine,anorectal,breast, liver_bileduct,prostate,ovary
tgactttacccagcaa

SEQ ID NO: 464665 - DNA, 16 bp, Homo sapiens
  chr6:26199167-26199183
  hyper
  lung vs. head_and_neck,bladder_and_urothelial,upper_gi, cervical,colorectal,melanoma,anorectal,uterine,breast,prostate, liver_bileduct,ovary
tgactttacccagcaa

SEQ ID NO: 464666 - DNA, 2 bp, Homo sapiens
  chr6:26199878-26199880
  hyper
  lung vs. head_and_neck,bladder_and_urothelial,upper_gi, cervical,colorectal,melanoma,anorectal,uterine,breast,prostate, liver_bileduct,ovary
gc

SEQ ID NO: 464667 - DNA, 368 bp, Homo sapiens
  chr6:26204318-26204686
  hyper
  lung vs. upper_gi,colorectal,cervical,head_and_neck, bladder_and_urothelial,uterine,liver_bileduct,prostate,breast, ovary,melanoma
cgtgtttttctcttcgggaggaaaatccttttggtcagatttcccttggcttggtggtggagagggtgagatcttgcagttttcaaacacttcctaagggggttccgtccccaagagagcaagcagcagaaatgccagaggaaccgtgcctatggggacaaagctgaactcctcatggaaggagattactgcagttccggtcttgtgagccaaagctcctgttcaatcgtcctagagcatcccaagcagcaaatgattttaaacatgttaatgtatttaatctcatttagttgttaaaatatgcctaaatttcctctttgggaacgcaagacttgcagagatgactccatggagagcggactctgccg

SEQ ID NO: 464668 - DNA, 205 bp, Homo sapiens
  chr6:26205298-26205503
  hyper
  lung vs. upper_gi,cervical,colorectal,head_and_neck, uterine,breast,prostate,bladder_and_urothelial,ovary,melanoma
tttataagttaattgttcctgtcaacaggtacgtatatttttcagccgttttttttttttcgttccaaattacatttggggtttcggcatacgattttttaggctacgatccttttatgtttattgtagtagggccttagattgcactgaaaaggctagggtaatagtgtctgtttaccttaccacttttattttgagtacctaa

SEQ ID NO: 464669 - DNA, 55 bp, Homo sapiens; identical to SEQ ID NO: 345214
  chr6:26205712-26205767
  hyper
  lung vs. upper_gi,cervical,colorectal,head_and_neck, uterine,breast,prostate,bladder_and_urothelial,ovary,melanoma

SEQ ID NO: 464670 - DNA, 11 bp, Homo sapiens
  chr6:26216380-26216391
  hyper
  lung vs. cervical,bladder_and_urothelial
cggaaaaatta

SEQ ID NO: 464671 - DNA, 6 bp, Homo sapiens
  chr6:26216805-26216811
  hyper
  lung vs. upper_gi,head_and_neck,uterine,colorectal, cervical,liver_bileduct,breast,prostate
cgcctt

SEQ ID NO: 464672 - DNA, 224 bp, Homo sapiens; identical to SEQ ID NO: 453355
  chr6:26216853-26217077
  hyper
  lung vs. upper_gi,head_and_neck,uterine,colorectal, cervical,liver_bileduct,breast,prostate

SEQ ID NO: 464673 - DNA, 210 bp, Homo sapiens; identical to SEQ ID NO: 453356
  chr6:26217156-26217366
  hyper
  lung vs. upper_gi,head_and_neck,uterine,colorectal, cervical,liver_bileduct,breast,prostate

SEQ ID NO: 464674 - DNA, 210 bp, Homo sapiens; identical to SEQ ID NO: 453356
  chr6:26217156-26217366
  hyper
  lung vs. upper_gi,head_and_neck,cervical,colorectal, liver_bileduct,uterine,breast,prostate

SEQ ID NO: 464675 - DNA, 312 bp, Homo sapiens; identical to SEQ ID NO: 345216
  chr6:26217578-26217890
  hyper
  lung vs. upper_gi,head_and_neck,cervical,colorectal, liver_bileduct,uterine,breast,prostate

SEQ ID NO: 464676 - DNA, 126 bp, Homo sapiens
  chr6:26241269-26241395
  hyper
  lung vs. sarcoma
ttattcccacgtttctgaaatttactcctatgttaggtggctgggacttaactacactagcattacatgtttagtttttgagatggagttgctcttgtccaggctgtagtgcaatgacgcaatctc

SEQ ID NO: 464677 - DNA, 1 bp, Homo sapiens
  chr6:26250181-26250182
  hyper
  lung vs. anorectal,head_and_neck,uterine, multiple_myeloma,non_cancer
c

SEQ ID NO: 464678 - DNA, 26 bp, Homo sapiens
  chr6:26251515-26251541
  hyper
  lung vs. anorectal
cggaagctgcaatttggtaggaaact

SEQ ID NO: 464679 - DNA, 130 bp, Homo sapiens; identical to SEQ ID NO: 454440
  chr6:26271217-26271347
  hyper
  lung vs. anorectal,thyroid,non_cancer,cervical, myeloid_neoplasm,multiple_myeloma

SEQ ID NO: 464680 - DNA, 327 bp, Homo sapiens; identical to SEQ ID NO: 454441
  chr6:26272105-26272432
  hyper
  lung vs. anorectal,cervical,thyroid,myeloid_neoplasm, non_cancer

SEQ ID NO: 464681 - DNA, 210 bp, Homo sapiens; identical to SEQ ID NO: 453361
  chr6:26322359-26322569
  hyper
  lung vs. upper_gi,ovary

SEQ ID NO: 464682 - DNA, 71 bp, Homo sapiens; identical to SEQ ID NO: 453362
  chr6:26331633-26331704
  hyper
  lung vs. colorectal,upper_gi,uterine, bladder_and_urothelial,breast,lymphoid_neoplasm,non_cancer

SEQ ID NO: 464683 - DNA, 324 bp, Homo sapiens; identical to SEQ ID NO: 453363
  chr6:26331811-26332135
  hyper
  lung vs. colorectal,upper_gi,uterine, bladder_and_urothelial,breast,lymphoid_neoplasm,non_cancer

SEQ ID NO: 464684 - DNA, 243 bp, Homo sapiens; identical to SEQ ID NO: 345222
  chr6:26332283-26332526
  hyper
  lung vs. colorectal,upper_gi,uterine, bladder_and_urothelial,breast,lymphoid_neoplasm,non_cancer

SEQ ID NO: 464685 - DNA, 10 bp, Homo sapiens
  chr6:26502209-26502219
  hyper
  lung vs. bladder_and_urothelial
atacactttc

SEQ ID NO: 464686 - DNA, 248 bp, Homo sapiens; identical to SEQ ID NO: 453365
  chr6:26577475-26577723
  hyper
  lung vs. multiple_myeloma,cervical,non_cancer,thyroid, prostate

SEQ ID NO: 464687 - DNA, 30 bp, Homo sapiens
  chr6:27094883-27094913
  hyper
  lung vs. pancreas_gallbladder
cgaaatcataaaacgaaacaaagttttggc

SEQ ID NO: 464688 - DNA, 2 bp, Homo sapiens
  chr6:27100290-27100292
  hyper
  lung vs. head_and_neck
cg

SEQ ID NO: 464689 - DNA, 61 bp, Homo sapiens; identical to SEQ ID NO: 462956
  chr6:27100389-27100450
  hyper
  lung vs. head_and_neck

SEQ ID NO: 464690 - DNA, 61 bp, Homo sapiens; identical to SEQ ID NO: 462957
  chr6:27101049-27101110
  hyper
  lung vs. head_and_neck

SEQ ID NO: 464691 - DNA, 87 bp, Homo sapiens; identical to SEQ ID NO: 345226
  chr6:27101206-27101293
  hyper
  lung vs. head_and_neck

SEQ ID NO: 464692 - DNA, 205 bp, Homo sapiens; identical to SEQ ID NO: 453371
  chr6:27560506-27560711
  hyper
  lung vs. upper_gi

SEQ ID NO: 464693 - DNA, 2 bp, Homo sapiens
  chr6:27858278-27858280
  hyper
  lung vs. upper_gi,cervical,lymphoid_neoplasm
cg

SEQ ID NO: 464694 - DNA, 51 bp, Homo sapiens; identical to SEQ ID NO: 454452
  chr6:27858740-27858791
  hyper
  lung vs. upper_gi,cervical,lymphoid_neoplasm

SEQ ID NO: 464695 - DNA, 191 bp, Homo sapiens; identical to SEQ ID NO: 461210
  chr6:28303261-28303452
  hyper
  lung vs. pancreas_gallbladder,melanoma,upper_gi,sarcoma, colorectal,renal,prostate

SEQ ID NO: 464696 - DNA, 74 bp, Homo sapiens; identical to SEQ ID NO: 461211
  chr6:28303489-28303563
  hyper
  lung vs. pancreas_gallbladder,melanoma,upper_gi,sarcoma, colorectal,renal,prostate

SEQ ID NO: 464697 - DNA, 209 bp, Homo sapiens; identical to SEQ ID NO: 461212
  chr6:28303607-28303816
  hyper
  lung vs. pancreas_gallbladder,melanoma,upper_gi,sarcoma, colorectal,renal,prostate

SEQ ID NO: 464698 - DNA, 199 bp, Homo sapiens
  chr6:28303617-28303816
  hyper
  lung vs. pancreas_gallbladder,upper_gi,colorectal,renal, melanoma,sarcoma,prostate,bladder_and_urothelial
cgctcctttatcgtcttggaggcaggacaaagaactccgggcgttatctcagacaaagaaaggctgtttaatcttcaggataaggggcgggacctccacctactccacgggggcttcaggccagtgaatgtgtaggggcgggggtcacgcctgcgcagacgttccctccccgcctactccaaggcacagacctgaaatc

SEQ ID NO: 464699 - DNA, 150 bp, Homo sapiens; identical to SEQ ID NO: 345230
  chr6:28304301-28304451
  hyper
  lung vs. pancreas_gallbladder,upper_gi,colorectal,renal, melanoma,sarcoma,prostate,bladder_and_urothelial

SEQ ID NO: 464700 - DNA, 154 bp, Homo sapiens
  chr6:41339068-41339222
  hyper
  lung vs. bladder_and_urothelial
cgggacagcctcctctatgcactgcttcctcttccccagccctgctccctgcatccttccctctggtcctagtgtcctggtgtcttgaagatgctgggtagttagaccgacatccctctccctctctcaccctgggctctgggacgctggccct

SEQ ID NO: 464701 - DNA, 35 bp, Homo sapiens
  chr6:42145871-42145906
  hyper
  lung vs. anorectal,bladder_and_urothelial
cgctgcatctccgagggtccgggtctcccctcagc

SEQ ID NO: 464702 - DNA, 45 bp, Homo sapiens; identical to SEQ ID NO: 350360
  chr6:42145975-42146020
  hyper
  lung vs. anorectal,bladder_and_urothelial

SEQ ID NO: 464703 - DNA, 180 bp, Homo sapiens
  chr6:43243254-43243434
  hyper
  lung vs. pancreas_gallbladder
cggctaagcctccaggctcggagggccctgtcgccccacccctgactcccgttacctcactgcccgtcgggctgccccccaccccgccccaataattggccttgcaattggatgccaaagagcccagagttgagggggagcagagctttgagcccaggtctctcagagcaacccaacagc

SEQ ID NO: 464704 - DNA, 534 bp, Homo sapiens
  chr6:43243475-43244009
  hyper
  lung vs. pancreas_gallbladder
cccaccactgagggccctgggggtcaccaaacatgcccccccatttccagctcttcccacacccccacccccgaaaataaaactcagggaccaacatctgcttcctttgcacttgctccgtcgaccccgctccccgctcggaggggcttccgtgggggagggggcggggctccgggccctcagagttctcagtgtcgagcgaggagaggggctggcccctgcccccggagaagcgggactggtaggagagagaaactcagcaccggggcccagctgagccccttcctgcgtaaggagacgccttctaattgcggggtgggggcggagtaggggagggataggaaggggattagcgagaggaccctcgcggaggtcctgagtcccagtcggtttattcctgagccttcccctcccatcgtaagtccttccctcgaccccccattttgtactgcaataatactgtattatacgcttgcactatttcccgaccctggccagcggaagcatgcacgaaaaactcaaaaccacacacac

SEQ ID NO: 464705 - DNA, 41 bp, Homo sapiens; identical to SEQ ID NO: 358541
  chr6:50674750-50674791
  hyper
  lung vs. prostate,bladder_and_urothelial,thyroid

SEQ ID NO: 464706 - DNA, 369 bp, Homo sapiens
  chr6:50690697-50691066
  hyper
  lung vs. prostate,ovary,renal,melanoma,uterine
aggagcgctttcctgattgcccgtggctacacaaaatacaaactactttgaatcaaaacattttggaggaattaatatgatctgaactctgcacgttttaagagagtttgagtttgtcagagcgcttagaggtgactggcacgccaaggcaaaggcatttacgccgcggtacaaacattgtcagatctgatttaatttctttaaaaaaaaaattccttgaaatggaaccttagcttcaattgctcagtctgcccataacagagtagaaggacctgatcgcttttccctttagccggcctcaaggccggcagcaggctgcttggcaggaggaagcgatttcctctgcttctctgggtttcaggaaggccc

SEQ ID NO: 464707 - DNA, 84 bp, Homo sapiens; identical to SEQ ID NO: 350381
  chr6:50691095-50691179
  hyper
  lung vs. prostate,ovary,renal,melanoma,uterine

SEQ ID NO: 464708 - DNA, 13 bp, Homo sapiens
  chr6:50788401-50788414
  hyper
  lung vs. sarcoma
aaagaatattagc

SEQ ID NO: 464709 - DNA, 22 bp, Homo sapiens
  chr6:50789353-50789375
  hyper
  lung vs. ovary
cgtctgattacatctagtaatt

SEQ ID NO: 464710 - DNA, 22 bp, Homo sapiens
  chr6:50789579-50789601
  hyper
  lung vs. ovary
tgcatctggagccccgaagaac

SEQ ID NO: 464711 - DNA, 2 bp, Homo sapiens
  chr6:50791122-50791124
  hyper
  lung vs. multiple_myeloma,thyroid,myeloid_neoplasm, non_cancer
cg

SEQ ID NO: 464712 - DNA, 13 bp, Homo sapiens
  chr6:50794800-50794813
  hyper
  lung vs. colorectal
tatacatatttac

SEQ ID NO: 464713 - DNA, 14 bp, Homo sapiens
  chr6:50803791-50803805
  hyper
  lung vs. myeloid_neoplasm,multiple_myeloma
cggtgacttctcta

SEQ ID NO: 464714 - DNA, 44 bp, Homo sapiens; identical to SEQ ID NO: 456074
  chr6:50805695-50805739
  hyper
  lung vs. renal

SEQ ID NO: 464715 - DNA, 8 bp, Homo sapiens
  chr6:50805846-50805854
  hyper
  lung vs. renal
taactgtc

SEQ ID NO: 464716 - DNA, 194 bp, Homo sapiens; identical to SEQ ID NO: 456076
  chr6:50808438-50808632
  hyper
  lung vs. cervical,anorectal,colorectal

SEQ ID NO: 464717 - DNA, 43 bp, Homo sapiens; identical to SEQ ID NO: 461224
  chr6:50810509-50810552
  hyper
  lung vs. multiple_myeloma

SEQ ID NO: 464718 - DNA, 212 bp, Homo sapiens
  chr6:50811605-50811817
  hyper
  lung vs. colorectal,pancreas_gallbladder,upper_gi
cttttccatgttaccctcccttcctcacattgttacgggaatcttctgggatgaaaatgagtgtggttggcccttttgcgttgtttcagtcctctcggtacctccccgcccagccctgcgatcttaactcaccgggcccggctccccggccgcttgcataattagggagggcgagggcggggcgggaggcctgtggagaccaggcggaggct

SEQ ID NO: 464719 - DNA, 212 bp, Homo sapiens; identical to SEQ ID NO: 464718
  chr6:50811605-50811817
  hyper
  lung vs. colorectal,upper_gi

SEQ ID NO: 464720 - DNA, 313 bp, Homo sapiens; identical to SEQ ID NO: 358549
  chr6:50813939-50814252
  hyper
  lung vs. multiple_myeloma

SEQ ID NO: 464721 - DNA, 30 bp, Homo sapiens; identical to SEQ ID NO: 461225
  chr6:50817420-50817450
  hyper
  lung vs. thyroid,myeloid_neoplasm

SEQ ID NO: 464722 - DNA, 189 bp, Homo sapiens; identical to SEQ ID NO: 346826
  chr6:56716695-56716884
  hyper
  lung vs. pancreas_gallbladder

SEQ ID NO: 464723 - DNA, 164 bp, Homo sapiens; identical to SEQ ID NO: 456082
  chr6:73329621-73329785
  hyper
  lung vs. lymphoid_neoplasm,bladder_and_urothelial

SEQ ID NO: 464724 - DNA, 82 bp, Homo sapiens; identical to SEQ ID NO: 346833
  chr6:73330126-73330208
  hyper
  lung vs. lymphoid_neoplasm,bladder_and_urothelial

SEQ ID NO: 464725 - DNA, 42 bp, Homo sapiens; identical to SEQ ID NO: 459786
  chr6:91320244-91320286
  hyper
  lung vs. bladder_and_urothelial

SEQ ID NO: 464726 - DNA, 61 bp, Homo sapiens
  chr6:99292143-99292204
  hyper
  lung vs. ovary,bladder_and_urothelial,upper_gi
cgctgacccaaatgcagtgaactgcacggcccttgtggggccccaactttgatgtgggcct

SEQ ID NO: 464727 - DNA, 109 bp, Homo sapiens; identical to SEQ ID NO: 350435
  chr6:99292521-99292630
  hyper
  lung vs. ovary,bladder_and_urothelial,upper_gi

SEQ ID NO: 464728 - DNA, 97 bp, Homo sapiens; identical to SEQ ID NO: 358614
  chr6:100039474-100039571
  hyper
  lung vs. ovary

SEQ ID NO: 464729 - DNA, 27 bp, Homo sapiens
  chr6:100913285-100913312
  hyper
  lung vs. bladder_and_urothelial,cervical
ggtttggggagttattttctctttctc

SEQ ID NO: 464730 - DNA, 4 bp, Homo sapiens
  chr6:105405567-105405571
  hyper
  lung vs. uterine
cgat

SEQ ID NO: 464731 - DNA, 61 bp, Homo sapiens; identical to SEQ ID NO: 345244
  chr6:106443120-106443181
  hyper
  lung vs. head_and_neck,bladder_and_urothelial, myeloid_neoplasm

SEQ ID NO: 464732 - DNA, 40 bp, Homo sapiens; identical to SEQ ID NO: 453396
  chr6:108478767-108478807
  hyper
  lung vs. ovary,uterine

SEQ ID NO: 464733 - DNA, 45 bp, Homo sapiens
  chr6:108484828-108484873
  hyper
  lung vs. bladder_and_urothelial,cervical
cgccttaaatccgaggtcccccgtggcctgcagcagctttgcctg

SEQ ID NO: 464734 - DNA, 20 bp, Homo sapiens
  chr6:137811294-137811314
  hyper
  lung vs. bladder_and_urothelial
ttttctggcgtcgataattc

SEQ ID NO: 464735 - DNA, 369 bp, Homo sapiens; identical to SEQ ID NO: 453400
  chr6:143247975-143248344
  hyper
  lung vs. liver_bileduct,pancreas_gallbladder,upper_gi, colorectal

SEQ ID NO: 464736 - DNA, 369 bp, Homo sapiens; identical to SEQ ID NO: 453400
  chr6:143247975-143248344
  hyper
  lung vs. liver_bileduct

SEQ ID NO: 464737 - DNA, 208 bp, Homo sapiens; identical to SEQ ID NO: 350470
  chr6:143248451-143248659
  hyper
  lung vs. liver_bileduct

SEQ ID NO: 464738 - DNA, 42 bp, Homo sapiens; identical to SEQ ID NO: 332956
  chr6:150962790-150962832
  hyper
  lung vs. melanoma,colorectal,cervical,breast

SEQ ID NO: 464739 - DNA, 182 bp, Homo sapiens
  chr6:152622733-152622915
  hyper
  lung vs. uterine,bladder_and_urothelial,liver_bileduct, lymphoid_neoplasm,breast,cervical,head_and_neck,ovary,prostate, anorectal,sarcoma,renal,multiple_myeloma,pancreas_gallbladder, non_cancer,melanoma,myeloid_neoplasm,thyroid,colorectal
cgaaattataaacaaatacagggtagacctctgacatgttaagtaattcagctgtctcgagcacatagtttcattttaactgtcattgtttacagtgtcaaagattggcccggcccaacggtagtcaaagagacttaaggaatctgttcctccctctgaatctgcaagatcgaaggctggtc

SEQ ID NO: 464740 - DNA, 16 bp, Homo sapiens
  chr6:152623493-152623509
  hyper
  lung vs. uterine,bladder_and_urothelial,liver_bileduct, lymphoid_neoplasm,breast,cervical,head_and_neck,ovary,prostate, anorectal,sarcoma,renal,multiple_myeloma,pancreas_gallbladder, non_cancer,melanoma,myeloid_neoplasm,thyroid,colorectal
ggaatcatgaacttcc

SEQ ID NO: 464741 - DNA, 55 bp, Homo sapiens; identical to SEQ ID NO: 350493
  chr6:166268182-166268237
  hyper
  lung vs. bladder_and_urothelial

SEQ ID NO: 464742 - DNA, 5 bp, Homo sapiens
  chr6:166579711-166579716
  hyper
  lung vs. bladder_and_urothelial
cgact

SEQ ID NO: 464743 - DNA, 314 bp, Homo sapiens; identical to SEQ ID NO: 333029
  chr7:8480006-8480320
  hyper
  lung vs. bladder_and_urothelial

SEQ ID NO: 464744 - DNA, 66 bp, Homo sapiens; identical to SEQ ID NO: 333032
  chr7:11870605-11870671
  hyper
  lung vs. ovary,bladder_and_urothelial

SEQ ID NO: 464745 - DNA, 77 bp, Homo sapiens; identical to SEQ ID NO: 458241
  chr7:19146849-19146926
  hyper
  lung vs. uterine,multiple_myeloma,myeloid_neoplasm,ovary

SEQ ID NO: 464746 - DNA, 14 bp, Homo sapiens
  chr7:20816239-20816253
  hyper
  lung vs. bladder_and_urothelial
cgcggcattccagc

SEQ ID NO: 464747 - DNA, 42 bp, Homo sapiens
  chr7:20830567-20830609
  hyper
  lung vs. colorectal,sarcoma,bladder_and_urothelial, uterine
cgcgtacctctgcagggtacgtttaaacccggctcttagcat

SEQ ID NO: 464748 - DNA, 107 bp, Homo sapiens; identical to SEQ ID NO: 346884
  chr7:23287654-23287761
  hyper
  lung vs. melanoma,sarcoma

SEQ ID NO: 464749 - DNA, 225 bp, Homo sapiens; identical to SEQ ID NO: 456125
  chr7:26192423-26192648
  hyper
  lung vs. upper_gi

SEQ ID NO: 464750 - DNA, 20 bp, Homo sapiens
  chr7:26192666-26192686
  hyper
  lung vs. upper_gi
cgctggcggatgtgcgagcg

SEQ ID NO: 464751 - DNA, 112 bp, Homo sapiens; identical to SEQ ID NO: 456127
  chr7:26192748-26192860
  hyper
  lung vs. upper_gi

SEQ ID NO: 464752 - DNA, 91 bp, Homo sapiens; identical to SEQ ID NO: 456128
  chr7:27135176-27135267
  hyper
  lung vs. bladder_and_urothelial,head_and_neck, lymphoid_neoplasm,prostate,renal,multiple_myeloma,non_cancer, anorectal,cervical,thyroid,ovary,uterine,myeloid_neoplasm

SEQ ID NO: 464753 - DNA, 142 bp, Homo sapiens; identical to SEQ ID NO: 345270
  chr7:27136790-27136932
  hyper
  lung vs. head_and_neck,bladder_and_urothelial,anorectal, prostate,lymphoid_neoplasm,sarcoma,ovary,renal,non_cancer, melanoma,uterine,multiple_myeloma,cervical

SEQ ID NO: 464754 - DNA, 3 bp, Homo sapiens
  chr7:27191273-27191276
  hyper
  lung vs. colorectal,sarcoma,anorectal,non_cancer,thyroid, myeloid_neoplasm
aac

SEQ ID NO: 464755 - DNA, 21 bp, Homo sapiens
  chr7:27196839-27196860
  hyper
  lung vs. anorectal,colorectal,breast,thyroid,ovary,renal, cervical,non_cancer,myeloid_neoplasm,sarcoma,multiple_myeloma
tgtggttcgaataaagtcaac

SEQ ID NO: 464756 - DNA, 67 bp, Homo sapiens; identical to SEQ ID NO: 461252
  chr7:27203938-27204005
  hyper
  lung vs. renal,myeloid_neoplasm,thyroid,prostate

SEQ ID NO: 464757 - DNA, 22 bp, Homo sapiens
  chr7:27204090-27204112
  hyper
  lung vs. renal,myeloid_neoplasm,thyroid,prostate
cgtcccagctccggctgccctg

SEQ ID NO: 464758 - DNA, 244 bp, Homo sapiens; identical to SEQ ID NO: 461254
  chr7:27204141-27204385
  hyper
  lung vs. renal,myeloid_neoplasm,thyroid,prostate

SEQ ID NO: 464759 - DNA, 104 bp, Homo sapiens; identical to SEQ ID NO: 454482
  chr7:27204281-27204385
  hyper
  lung vs. prostate,renal,anorectal,thyroid, myeloid_neoplasm

SEQ ID NO: 464760 - DNA, 22 bp, Homo sapiens
  chr7:27206083-27206105
  hyper
  lung vs. prostate,anorectal,colorectal,thyroid, myeloid_neoplasm,renal,non_cancer
gtccccggccctcgaccccacg

SEQ ID NO: 464761 - DNA, 5 bp, Homo sapiens
  chr7:27219316-27219321
  hyper
  lung vs. upper_gi,colorectal
cgacg

SEQ ID NO: 464762 - DNA, 105 bp, Homo sapiens
  chr7:27223010-27223115
  hyper
  lung vs. colorectal,head_and_neck,upper_gi
cgcctgcggacatttcaccttccagcacctgggctgccccttcccaaggcagtaaaggcggctccagtcccagtctttcccggctgcggccaagactgggcagtc

SEQ ID NO: 464763 - DNA, 269 bp, Homo sapiens
  chr7:27223306-27223575
  hyper
  lung vs. colorectal,head_and_neck,upper_gi
tagggtgaagggaaagggggcttcccgaagctgcgggcaggctctacttgctccccctttaaaaaaaaaaaaaaaaaaaaaaaaaagacccacaagacaaaaaaaaaatcgcttttgacagattgaataacaattgtgaataacatgcagttgggcagaaggaggcacgtaattgccaccacgccagaggaaaatggcttcctttggacaaaaaggccaactttgggttaatttgttcttttaatatattgctagagctaagcgggcta

SEQ ID NO: 464764 - DNA, 244 bp, Homo sapiens; identical to SEQ ID NO: 463016
  chr7:27223331-27223575
  hyper
  lung vs. colorectal

SEQ ID NO: 464765 - DNA, 227 bp, Homo sapiens
  chr7:27237765-27237992
  hyper
  lung vs. colorectal
cgagttctgaagcgtttcttcaagttgccttcttgctctatttttaatccattaactagtggttttcagtttgttgatgacttttttctctttaaccctcctgttctggaaccagattgtgacctgccgctcagagagattcgtcgtggctgatatccgcctccgtttgtccttagtaatgaatttattcgtggcgtattcccgttcaagttcttttaattgcacct

SEQ ID NO: 464766 - DNA, 178 bp, Homo sapiens; identical to SEQ ID NO: 371507
  chr7:27238170-27238348
  hyper
  lung vs. colorectal

SEQ ID NO: 464767 - DNA, 158 bp, Homo sapiens; identical to SEQ ID NO: 463017
  chr7:27238984-27239142
  hyper
  lung vs. head_and_neck

SEQ ID NO: 464768 - DNA, 71 bp, Homo sapiens; identical to SEQ ID NO: 350551
  chr7:27245310-27245381
  hyper
  lung vs. colorectal

SEQ ID NO: 464769 - DNA, 156 bp, Homo sapiens; identical to SEQ ID NO: 358820
  chr7:29847067-29847223
  hyper
  lung vs. upper_gi

SEQ ID NO: 464770 - DNA, 32 bp, Homo sapiens
  chr7:31528326-31528358
  hyper
  lung vs. bladder_and_urothelial,head_and_neck
cgaaccgtgaaaggatgtgggctggacatact

SEQ ID NO: 464771 - DNA, 7 bp, Homo sapiens
  chr7:37487365-37487372
  hyper
  lung vs. lymphoid_neoplasm,uterine,ovary
cgctcgc

SEQ ID NO: 464772 - DNA, 63 bp, Homo sapiens
  chr7:42267546-42267609
  hyper
  lung vs. uterine,thyroid
cgctctttctctgcgctttcctgtcgagttcccttcaggttctggtttcctccgacggtggca

SEQ ID NO: 464773 - DNA, 139 bp, Homo sapiens; identical to SEQ ID NO: 350569
  chr7:42267822-42267961
  hyper
  lung vs. uterine,thyroid

SEQ ID NO: 464774 - DNA, 102 bp, Homo sapiens; identical to SEQ ID NO: 345274
  chr7:50344738-50344840
  hyper
  lung vs. anorectal

SEQ ID NO: 464775 - DNA, 51 bp, Homo sapiens; identical to SEQ ID NO: 346909
  chr7:65037711-65037762
  hyper
  lung vs. uterine,non_cancer,bladder_and_urothelial, multiple_myeloma,thyroid,prostate,myeloid_neoplasm,cervical, anorectal,ovary,renal,sarcoma

SEQ ID NO: 464776 - DNA, 116 bp, Homo sapiens; identical to SEQ ID NO: 358874
  chr7:79084011-79084127
  hyper
  lung vs. sarcoma

SEQ ID NO: 464777 - DNA, 3 bp, Homo sapiens
  chr7:113723783-113723786
  hyper
  lung vs. breast,colorectal,prostate,renal,cervical,ovary
ttc

SEQ ID NO: 464778 - DNA, 115 bp, Homo sapiens
  chr7:115117321-115117436
  hyper
  lung vs. colorectal
cgagccgccagacgtgagctaaagaaggtgctggggggcagaacgggtactggggcgcctggaggagagttgaggggcctgaaagactctgggggcccagctcggtcggtgggtt

SEQ ID NO: 464779 - DNA, 119 bp, Homo sapiens; identical to SEQ ID NO: 350642
  chr7:121942391-121942510
  hyper
  lung vs. colorectal,prostate,non_cancer,uterine, myeloid_neoplasm

SEQ ID NO: 464780 - DNA, 227 bp, Homo sapiens; identical to SEQ ID NO: 461279
  chr7:121946146-121946373
  hyper
  lung vs. uterine,ovary,non_cancer,thyroid,prostate

SEQ ID NO: 464781 - DNA, 15 bp, Homo sapiens
  chr7:121950024-121950039
  hyper
  lung vs. ovary,bladder_and_urothelial,myeloid_neoplasm
cggttcgactgtttc

SEQ ID NO: 464782 - DNA, 148 bp, Homo sapiens; identical to SEQ ID NO: 456143
  chr7:121956311-121956459
  hyper
  lung vs. non_cancer,myeloid_neoplasm

SEQ ID NO: 464783 - DNA, 9 bp, Homo sapiens
  chr7:121957331-121957340
  hyper
  lung vs. thyroid
gagggcggc

SEQ ID NO: 464784 - DNA, 52 bp, Homo sapiens
  chr7:126891155-126891207
  hyper
cggggtgggacttgcttaggggacttaagggtttctgcaaccggcgaggggg

SEQ ID NO: 464785 - DNA, 15 bp, Homo sapiens
  chr7:127841850-127841865
  hyper
  lung vs. ovary
ccctgcctcccagac

SEQ ID NO: 464786 - DNA, 17 bp, Homo sapiens
  chr7:129421614-129421631
  hyper
  lung vs. cervical,bladder_and_urothelial
cgcctcgagcctccctg

SEQ ID NO: 464787 - DNA, 19 bp, Homo sapiens
  chr7:129423482-129423501
  hyper
  lung vs. thyroid,non_cancer,myeloid_neoplasm,renal, multiple_myeloma
tgaaaaacgcaaaaggcac

SEQ ID NO: 464788 - DNA, 170 bp, Homo sapiens; identical to SEQ ID NO: 456147
  chr7:129424378-129424548
  hyper
  lung vs. non_cancer,thyroid,myeloid_neoplasm,colorectal, melanoma,renal,bladder_and_urothelial

SEQ ID NO: 464789 - DNA, 123 bp, Homo sapiens
  chr7:131242600-131242723
  hyper
  lung vs. bladder_and_urothelial,pancreas_gallbladder, upper_gi,breast,colorectal,cervical
cgtaaactgagtttatccggtgaaagaacaaagaagttcctttcccctcccccgctcccctccttttttccacccccaaagctgcctgggagacgcagaccccaggcccgcctgaagaggagg

SEQ ID NO: 464790 - DNA, 27 bp, Homo sapiens
  chr7:149111880-149111907
  hyper
  lung vs. multiple_myeloma,cervical,renal,non_cancer
cggaaacccgcggggcttttctacacc

SEQ ID NO: 464791 - DNA, 32 bp, Homo sapiens; identical to SEQ ID NO: 350667
  chr7:149112425-149112457
  hyper
  lung vs. multiple_myeloma,cervical,renal,non_cancer

SEQ ID NO: 464792 - DNA, 15 bp, Homo sapiens
  chr7:156409835-156409850
  hyper
  lung vs. colorectal
catgccgggactgac

SEQ ID NO: 464793 - DNA, 23 bp, Homo sapiens
  chr7:156794976-156794999
  hyper
  lung vs. anorectal,renal
cggatgagggaagggacaggtcc

SEQ ID NO: 464794 - DNA, 41 bp, Homo sapiens; identical to SEQ ID NO: 350684
  chr7:156796104-156796145
  hyper
  lung vs. anorectal,non_cancer,sarcoma, bladder_and_urothelial,myeloid_neoplasm,ovary

SEQ ID NO: 464795 - DNA, 64 bp, Homo sapiens
  chr7:156796431-156796495
  hyper
  lung vs. sarcoma,anorectal,cervical
cgcccagcagctgcttctgcccggactcccagcagccgcgccccggccttggatgaggttgatt

SEQ ID NO: 464796 - DNA, 96 bp, Homo sapiens; identical to SEQ ID NO: 346951
  chr7:156799510-156799606
  hyper
  lung vs. cervical,thyroid,non_cancer,myeloid_neoplasm, prostate

SEQ ID NO: 464797 - DNA, 89 bp, Homo sapiens
  chr7:156802164-156802253
  hyper
  lung vs. colorectal
ataattcgctgcccgtctcatgcctgggggtccgggcgagtcctcgcaggccccgggcagagccgaggcggcttcgcagctcttccccc

SEQ ID NO: 464798 - DNA, 250 bp, Homo sapiens
  chr7:156802164-156802414
  hyper
  lung vs. colorectal
ataattcgctgcccgtctcatgcctgggggtccgggcgagtcctcgcaggccccgggcagagccgaggcggcttcgcagctcttcccccgctcgctgggagccaagcgcagagaggggcaggcggtgccggtggaggatgcgcgaggccctcccgccacgcgcatccacgggggccgcagggtactcacagttgaagtcgggcatcttaggcaggatcatgcccgcggtggacgcgcgcagccactggtc

SEQ ID NO: 464799 - DNA, 213 bp, Homo sapiens; identical to SEQ ID NO: 359013
  chr7:156802537-156802750
  hyper
  lung vs. colorectal

SEQ ID NO: 464800 - DNA, 106 bp, Homo sapiens; identical to SEQ ID NO: 350705
  chr8:8639980-8640086
  hyper
  lung vs. head_and_neck

SEQ ID NO: 464801 - DNA, 107 bp, Homo sapiens
  chr8:11537483-11537590
  hyper
  lung vs. pancreas_gallbladder
cgcatgatgagaagaaagaaagattgggagaagttaatcagctcaaagtcacatcgccggggtctcctgccagggggcttggaccagttgctaaaggacttcccgcc

SEQ ID NO: 464802 - DNA, 22 bp, Homo sapiens
  chr8:11538220-11538242
  hyper
  lung vs. pancreas_gallbladder
gctgcgcacggataccctgggc

SEQ ID NO: 464803 - DNA, 110 bp, Homo sapiens; identical to SEQ ID NO: 453442
  chr8:11561282-11561392
  hyper
  lung vs. liver_bileduct

SEQ ID NO: 464804 - DNA, 283 bp, Homo sapiens; identical to SEQ ID NO: 461291
  chr8:29387050-29387333
  hyper
  lung vs. breast,pancreas_gallbladder

SEQ ID NO: 464805 - DNA, 270 bp, Homo sapiens; identical to SEQ ID NO: 461292
  chr8:29387367-29387637
  hyper
  lung vs. breast,pancreas_gallbladder

SEQ ID NO: 464806 - DNA, 25 bp, Homo sapiens
  chr8:38323132-38323157
  hyper
cggcaaagacggccggcaatagcag

SEQ ID NO: 464807 - DNA, 6 bp, Homo sapiens
  chr8:55372563-55372569
  hyper
  lung vs. ovary
tgatcc

SEQ ID NO: 464808 - DNA, 152 bp, Homo sapiens; identical to SEQ ID NO: 463055
  chr8:55379013-55379165
  hyper
  lung vs. uterine,ovary,melanoma

SEQ ID NO: 464809 - DNA, 1 bp, Homo sapiens
  chr8:55380239-55380240
  hyper
  lung vs. uterine
c

SEQ ID NO: 464810 - DNA, 85 bp, Homo sapiens; identical to SEQ ID NO: 461300
  chr8:65499649-65499734
  hyper
  lung vs. bladder_and_urothelial,myeloid_neoplasm

SEQ ID NO: 464811 - DNA, 140 bp, Homo sapiens; identical to SEQ ID NO: 333501
  chr8:91014317-91014457
  hyper
  lung vs. liver_bileduct

SEQ ID NO: 464812 - DNA, 188 bp, Homo sapiens
  chr8:95246496-95246684
  hyper
  lung vs. colorectal
cgcacagctcccccatccgccctctggcgcttcagagtctggaggaatcccgagctgcgcctccctctccctgcatccctggcagagaatttcccctcccagcgcgggggagcccatccctgaggactcgggcaggtcagatgagaattggtagaaagtgaagcgccttttcctcgcgctgagggcaa

SEQ ID NO: 464813 - DNA, 420 bp, Homo sapiens; identical to SEQ ID NO: 463069
  chr8:99956867-99957287
  hyper
  lung vs. upper_gi

SEQ ID NO: 464814 - DNA, 51 bp, Homo sapiens; identical to SEQ ID NO: 345310
  chr8:99957709-99957760
  hyper
  lung vs. upper_gi

SEQ ID NO: 464815 - DNA, 81 bp, Homo sapiens
  chr8:99963508-99963589
  hyper
  lung vs. head_and_neck
cgaggtggctgcgggtctgcctccgaagttatcagtgtaatcgggcctctgtgtatgcctgcacgtgtattttcatgattg

SEQ ID NO: 464816 - DNA, 59 bp, Homo sapiens; identical to SEQ ID NO: 359210
  chr8:108509697-108509756
  hyper
  lung vs. bladder_and_urothelial,colorectal,upper_gi, cervical

SEQ ID NO: 464817 - DNA, 37 bp, Homo sapiens; identical to SEQ ID NO: 350846
  chr9:118139-118176
  hyper
  lung vs. thyroid,cervical,non_cancer

SEQ ID NO: 464818 - DNA, 28 bp, Homo sapiens
  chr9:969529-969557
  hyper
  lung vs. prostate
cgtgtgcccttcggcgggcggctgtagc

SEQ ID NO: 464819 - DNA, 356 bp, Homo sapiens
  chr9:14347752-14348108
  hyper
  lung vs. upper_gi,sarcoma
cgcggttttttttccgtgcagaaatcactacccggcgacggctcagggcggtagagggcaagtcttatctgccaaggcgggattagattctctcgccgagggtcccagtatcccgccgcccagcaagggccgagcgcgcgcgcgcgccagggagctttggagcgacgcgcgtagtttcgcgtcgcacgcggtgtctggtctccgcgcaccacgtgcgctcgcggtccttggcggggacgttggtgctagcgatccgacagagcacccaggactaggtttttgtgatgccctaacctgggcatttatgctgggggcggaacgaagtcgcccaacccaagttctccctgcaccctggg

SEQ ID NO: 464820 - DNA, 266 bp, Homo sapiens
  chr9:14348452-14348718
  hyper
  lung vs. upper_gi,sarcoma
ggtggagagaaaacaaggttatttaaagtgactcccagaacgcagctttcgttcctagactctttaggtgtcagtgcttcggctccagtttagcacggcacaggcggcccagcctttgatatttaagccaggccagcgcccgggtgaaactacctgttgggggattctgccgcctggaacccttcttcttctgcgcaatactggcagcagtgggatggctctgggggtgccacgcgaagagagagggcggaagagccgggagcagc

SEQ ID NO: 464821 - DNA, 587 bp, Homo sapiens; identical to SEQ ID NO: 359278
  chr9:14348452-14349039
  hyper

SEQ ID NO: 464822 - DNA, 15 bp, Homo sapiens
  chr9:21965786-21965801
  hyper
  lung vs. pancreas_gallbladder
cccccagcagaagtc

SEQ ID NO: 464823 - DNA, 569 bp, Homo sapiens
  chr9:27528536-27529105
  hyper
  lung vs. upper_gi
cggcctcgctggggtcgggctcctccactttcccagctgggatcccctgccggagctggcgtgggggccggggagggggaccagaggggcttccttctctccccaagccccgccagatgttggaaaggcaaacaataggggaaacgcggagaaacaaaaggccattcgccacgatctcagtcggctgcgtagagagatctctgtggggagggttaggggagagggtcaggaaagagcgcgaggggggggatcccgagagatttagagtctctggtacttgccaggcaccaggggtcggcgctttaccctcccagcaggggtctgaaggtgggaaggggcaatcaaagaaaacttgaagggttttcaccttcttccccagttcagggaaagggaggggctgggattccagatgtttgacagttgttggccccaaagttaagcgcgatttgtacggcctttacacgctccccacctccgtgaggcatcgtcagccccgggggcgacctggctgacggtgcggacttcccctacgctgccccaagccgagactcctccctcaggatcaggac

SEQ ID NO: 464824 - DNA, 182 bp, Homo sapiens; identical to SEQ ID NO: 201692
  chr9:27529157-27529339
  hyper
  lung vs. upper_gi

SEQ ID NO: 464825 - DNA, 130 bp, Homo sapiens
  chr9:27529341-27529471
  hyper
  lung vs. upper_gi
ccagaaacccaggcgccggcaggggtctgaagaggactccagccccggaagcccgtggccggcgggcagaagaccggtccgccgcctcccgcaccttcttgcacccgcgcccaggtgcgccccaaacctc

SEQ ID NO: 464826 - DNA, 129 bp, Homo sapiens
  chr9:27528976-27529105
  hyper
  lung vs. upper_gi
cgcgatttgtacggcctttacacgctccccacctccgtgaggcatcgtcagccccgggggcgacctggctgacggtgcggacttcccctacgctgccccaagccgagactcctccctcaggatcaggac

SEQ ID NO: 464827 - DNA, 182 bp, Homo sapiens; identical to SEQ ID NO: 201692
  chr9:27529157-27529339
  hyper
  lung vs. upper_gi

SEQ ID NO: 464828 - DNA, 566 bp, Homo sapiens
  chr9:27529341-27529907
  hyper
  lung vs. upper_gi
ccagaaacccaggcgccggcaggggtctgaagaggactccagccccggaagcccgtggccggcgggcagaagaccggtccgccgcctcccgcaccttcttgcacccgcgcccaggtgcgccccaaacctcgccgcccgcccgggcgagatcgggagcgagcagccaccgggctgcgccgcctcccctagcttggagcgggttcttactcaccgtggggttttacctccagcccagggcccggtcggctcccttcgccgggtcagctgcagccagcgcgaaagaaaatggtgagctcggggcaggtggggcgtcgcttgccaatccacgcaagggactctgccgccggtgcgcgaggtcccggcgagccaaccggcggacgggcgagcgcctggctccagctgcagccgccgtcgctccggagcagccccctcatgcacccagcgcgccgcgcagccggccggggctcgactgtctcgcggggacgccgagcggggacccctggcggccgcctgcggtatggcagcaccgtggagagaaaagtcgtctttgggatcatcttccctcc

SEQ ID NO: 464829 - DNA, 7 bp, Homo sapiens
  chr9:37025300-37025307
  hyper
  lung vs. ovary
cgtggca

SEQ ID NO: 464830 - DNA, 63 bp, Homo sapiens; identical to SEQ ID NO: 456188
  chr9:37034135-37034198
  hyper
  lung vs. uterine,lymphoid_neoplasm,ovary,prostate, non_cancer,anorectal,thyroid

SEQ ID NO: 464831 - DNA, 242 bp, Homo sapiens
  chr9:37035886-37036128
  hyper
  lung vs. ovary,upper_gi,colorectal
accccgggctgggggcggggggtgttggtgttttgttgttgttgttgtttccatttagagggcttgttttgtttttgtttgttttctgtgagttttcatttttccatgggatattcttttgtttcgggtgttttgcgtgttgttttttcgtgggattgattttagcgggttttgctctgtaagtcctggtctttggggtgagttttgattttgtgtaattttgtactttgtccttgtaggct

SEQ ID NO: 464832 - DNA, 238 bp, Homo sapiens; identical to SEQ ID NO: 463087
  chr9:37035890-37036128
  hyper
  lung vs. head_and_neck,uterine

SEQ ID NO: 464833 - DNA, 381 bp, Homo sapiens; identical to SEQ ID NO: 454519
  chr9:71788570-71788951
  hyper
  lung vs. head_and_neck,sarcoma,breast,cervical

SEQ ID NO: 464834 - DNA, 15 bp, Homo sapiens
  chr9:71788936-71788951
  hyper
  lung vs. sarcoma,head_and_neck
cgccgcctcccgccc

SEQ ID NO: 464835 - DNA, 45 bp, Homo sapiens; identical to SEQ ID NO: 350872
  chr9:71789757-71789802
  hyper
  lung vs. sarcoma,head_and_neck

SEQ ID NO: 464836 - DNA, 5 bp, Homo sapiens
  chr9:94183460-94183465
  hyper
  lung vs. liver_bileduct
cgcgg

SEQ ID NO: 464837 - DNA, 27 bp, Homo sapiens
  chr9:94183954-94183981
  hyper
  lung vs. liver_bileduct
acaggcctgggactcccacccgagctc

SEQ ID NO: 464838 - DNA, 279 bp, Homo sapiens
  chr9:96711697-96711976
  hyper
  lung vs. sarcoma
gagcgggcctggagcttccgttgggtctcaagggttccaccaagcaaggaagccctgagctgcccaaacacaatggcgtgcagccctctcctcttccccagtctcggggactcggtctgcctctgcgttccctgtcccggcaaggagcacagaggtgaaggcagtgacaacaactccacccctcccgcactgcagggcctggaatctggtctccctcatttgaggcccaacttccccactgacccacaggtgacccccggaccggagttcccgcatcaa

SEQ ID NO: 464839 - DNA, 3 bp, Homo sapiens
  chr9:96712005-96712008
  hyper
  lung vs. sarcoma
ctc

SEQ ID NO: 464840 - DNA, 122 bp, Homo sapiens
  chr9:96714974-96715096
  hyper
gaagctgaggggtgggaagccaccaggcacactcactattttcttccacttcatcctccgattctggtaccacgtcttcacctgcaactggctcaggcccagggactcagcaagatctattc

SEQ ID NO: 464841 - DNA, 156 bp, Homo sapiens; identical to SEQ ID NO: 461333
  chr9:96720648-96720804
  hyper
  lung vs. ovary,breast

SEQ ID NO: 464842 - DNA, 202 bp, Homo sapiens; identical to SEQ ID NO: 453506
  chr9:100610480-100610682
  hyper
  lung vs. sarcoma,multiple_myeloma

SEQ ID NO: 464843 - DNA, 202 bp, Homo sapiens; identical to SEQ ID NO: 453506
  chr9:100610480-100610682
  hyper
  lung vs. sarcoma

SEQ ID NO: 464844 - DNA, 299 bp, Homo sapiens; identical to SEQ ID NO: 333748
  chr9:110187439-110187738
  hyper
  lung vs. pancreas_gallbladder

SEQ ID NO: 464845 - DNA, 17 bp, Homo sapiens
  chr9:110399862-110399879
  hyper
  lung vs. melanoma
cgaggtcaaggtcgggg

SEQ ID NO: 464846 - DNA, 215 bp, Homo sapiens; identical to SEQ ID NO: 333771
  chr9:126759147-126759362
  hyper
  lung vs. head_and_neck

SEQ ID NO: 464847 - DNA, 250 bp, Homo sapiens; identical to SEQ ID NO: 458357
  chr9:126780315-126780565
  hyper
  lung vs. ovary

SEQ ID NO: 464848 - DNA, 204 bp, Homo sapiens
  chr9:126784854-126785058
  hyper
  lung vs. upper_gi
cgagtccaggccagtctgacccaccctccagccccaggtctctgggattgagggctgggaggtgacacagagggatgacggagacggagggctgcgcagctgccctgagaaagttcttgtgagtttgtcagaaacaaaaaacaaacaaaaaaatgccctctgtggggcgggtggaggctgtgacgcggcgcaactgcagctgca

SEQ ID NO: 464849 - DNA, 45 bp, Homo sapiens; identical to SEQ ID NO: 359418
  chr9:126785351-126785396
  hyper
  lung vs. upper_gi

SEQ ID NO: 464850 - DNA, 90 bp, Homo sapiens; identical to SEQ ID NO: 454526
  chrY:2655227-2655317
  hyper
  lung vs. breast,ovary,cervical,uterine

SEQ ID NO: 464851 - DNA, 596 bp, Homo sapiens; identical to SEQ ID NO: 345675
  chrY:2655346-2655942
  hyper
  lung vs. breast,ovary,cervical,uterine

SEQ ID NO: 464852 - DNA, 52 bp, Homo sapiens; identical to SEQ ID NO: 461343
  chrY:4869596-4869648
  hyper
  lung vs. breast,ovary

SEQ ID NO: 464853 - DNA, 49 bp, Homo sapiens; identical to SEQ ID NO: 347757
  chrY:4869714-4869763
  hyper
  lung vs. breast,ovary

SEQ ID NO: 464854 - DNA, 74 bp, Homo sapiens; identical to SEQ ID NO: 454528
  chrY:16635744-16635818
  hyper
  lung vs. breast,ovary

SEQ ID NO: 464855 - DNA, 624 bp, Homo sapiens; identical to SEQ ID NO: 454529
  chrY:16636060-16636684
  hyper
  lung vs. breast,ovary

SEQ ID NO: 464856 - DNA, 949 bp, Homo sapiens; identical to SEQ ID NO: 454530
  chrY:16636193-16637142
  hyper
  lung vs. breast,ovary

SEQ ID NO: 464857 - DNA, 4 bp, Homo sapiens
  JH636052.4:5118715-5118719
  hyper
  lung vs. multiple_myeloma
cgcc

SEQ ID NO: 464858 - DNA, 72 bp, Homo sapiens
  chr1:1974777-1974849
  hypo
  lung vs. lymphoid_neoplasm
cgcagcgcaggagtggcagggcccgtctgcagtgcaggagtggcagggcgtgtccgcggtgctgaccggttg

SEQ ID NO: 464859 - DNA, 162 bp, Homo sapiens; identical to SEQ ID NO: 362225
  chr1:1974925-1975087
  hypo
  lung vs. lymphoid_neoplasm

SEQ ID NO: 464860 - DNA, 131 bp, Homo sapiens; identical to SEQ ID NO: 375535
  chr1:2437299-2437430
  hypo

SEQ ID NO: 464861 - DNA, 644 bp, Homo sapiens; identical to SEQ ID NO: 362278
  chr1:3328625-3329269
  hypo

SEQ ID NO: 464862 - DNA, 339 bp, Homo sapiens; identical to SEQ ID NO: 336867
  chr1:4673912-4674251
  hypo
  lung vs. anorectal

SEQ ID NO: 464863 - DNA, 26 bp, Homo sapiens
  chr1:6046186-6046212
  hypo
  lung vs. pancreas_gallbladder,upper_gi,colorectal, melanoma,cervical
cgcatttgctaacagcacattttgtt

SEQ ID NO: 464864 - DNA, 121 bp, Homo sapiens; identical to SEQ ID NO: 352764
  chr1:6046277-6046398
  hypo
  lung vs. pancreas_gallbladder,upper_gi,colorectal, melanoma,cervical

SEQ ID NO: 464865 - DNA, 67 bp, Homo sapiens; identical to SEQ ID NO: 347782
  chr1:6171947-6172014
  hypo
  lung vs. lymphoid_neoplasm,renal,prostate

SEQ ID NO: 464866 - DNA, 101 bp, Homo sapiens
  chr1:6281676-6281777
  hypo
  lung vs. head_and_neck,upper_gi,colorectal, bladder_and_urothelial
cggctaacgcagcttcctggtttaggaacattttccccggtcgtatcaatcccccaggttggtaaatgaacagaagggatgaataaagcctactttttagg

SEQ ID NO: 464867 - DNA, 75 bp, Homo sapiens; identical to SEQ ID NO: 352768
  chr1:6281825-6281900
  hypo
  lung vs. head_and_neck,upper_gi,colorectal, bladder_and_urothelial

SEQ ID NO: 464868 - DNA, 162 bp, Homo sapiens; identical to SEQ ID NO: 362344
  chr1:11131899-11132061
  hypo
  lung vs. liver_bileduct

SEQ ID NO: 464869 - DNA, 64 bp, Homo sapiens; identical to SEQ ID NO: 346318
  chr1:12123950-12124014
  hypo
  lung vs. lymphoid_neoplasm

SEQ ID NO: 464870 - DNA, 93 bp, Homo sapiens; identical to SEQ ID NO: 347792
  chr1:12251958-12252051
  hypo
  lung vs. melanoma

SEQ ID NO: 464871 - DNA, 77 bp, Homo sapiens; identical to SEQ ID NO: 454554
  chr1:14125492-14125569
  hypo
  lung vs. lymphoid_neoplasm

SEQ ID NO: 464872 - DNA, 54 bp, Homo sapiens; identical to SEQ ID NO: 352807
  chr1:14125622-14125676
  hypo
  lung vs. lymphoid_neoplasm

SEQ ID NO: 464873 - DNA, 334 bp, Homo sapiens; identical to SEQ ID NO: 453548
  chr1:19676386-19676720
  hypo
  lung vs. liver_bileduct

SEQ ID NO: 464874 - DNA, 51 bp, Homo sapiens; identical to SEQ ID NO: 347798
  chr1:19676822-19676873
  hypo
  lung vs. liver_bileduct

SEQ ID NO: 464875 - DNA, 33 bp, Homo sapiens; identical to SEQ ID NO: 454089
  chr1:25255579-25255612
  hypo
  lung vs. lymphoid_neoplasm

SEQ ID NO: 464876 - DNA, 7 bp, Homo sapiens
  chr1:25255934-25255941
  hypo
  lung vs. lymphoid_neoplasm
agccaga

SEQ ID NO: 464877 - DNA, 234 bp, Homo sapiens; identical to SEQ ID NO: 461384
  chr1:27189675-27189909
  hypo
  lung vs. lymphoid_neoplasm,melanoma,sarcoma,renal

SEQ ID NO: 464878 - DNA, 196 bp, Homo sapiens; identical to SEQ ID NO: 336996
  chr1:27844793-27844989
  hypo
  lung vs. melanoma

SEQ ID NO: 464879 - DNA, 80 bp, Homo sapiens; identical to SEQ ID NO: 347804
  chr1:31863055-31863135
  hypo
  lung vs. melanoma,sarcoma

SEQ ID NO: 464880 - DNA, 83 bp, Homo sapiens; identical to SEQ ID NO: 337019
  chr1:36640437-36640520
  hypo
  lung vs. liver_bileduct

SEQ ID NO: 464881 - DNA, 144 bp, Homo sapiens; identical to SEQ ID NO: 375775
  chr1:38953154-38953298
  hypo
  lung vs. head_and_neck

SEQ ID NO: 464882 - DNA, 183 bp, Homo sapiens; identical to SEQ ID NO: 464027
  chr1:40149563-40149746
  hypo
  lung vs. head_and_neck

SEQ ID NO: 464883 - DNA, 10 bp, Homo sapiens
  chr1:40149784-40149794
  hypo
  lung vs. head_and_neck
cgtgctgcgc

SEQ ID NO: 464884 - DNA, 100 bp, Homo sapiens
  chr1:41485949-41486049
  hypo
  lung vs. liver_bileduct,head_and_neck,breast, bladder_and_urothelial,pancreas_gallbladder,ovary,cervical
cgggctgccagctccttgaggattaggtgctcctccagggccgtctgcaggcgccaggggagggaggccagggtgtccctgtggacagtcacctgcacca

SEQ ID NO: 464885 - DNA, 91 bp, Homo sapiens; identical to SEQ ID NO: 345703
  chr1:41486164-41486255
  hypo
  lung vs. liver_bileduct,head_and_neck,breast, bladder_and_urothelial,pancreas_gallbladder,ovary,cervical

SEQ ID NO: 464886 - DNA, 38 bp, Homo sapiens
  chr1:43842627-43842665
  hypo
  lung vs. pancreas_gallbladder,breast,liver_bileduct, sarcoma
cgtagagtatgccatgacaaaacaaagtctgaaggact

SEQ ID NO: 464887 - DNA, 8 bp, Homo sapiens
  chr1:43842779-43842787
  hypo
  lung vs. pancreas_gallbladder,breast,liver_bileduct, sarcoma
agacaagc

SEQ ID NO: 464888 - DNA, 60 bp, Homo sapiens; identical to SEQ ID NO: 453555
  chr1:44351032-44351092
  hypo
  lung vs. liver_bileduct

SEQ ID NO: 464889 - DNA, 141 bp, Homo sapiens; identical to SEQ ID NO: 459936
  chr1:44717932-44718073
  hypo
  lung vs. liver_bileduct

SEQ ID NO: 464890 - DNA, 138 bp, Homo sapiens; identical to SEQ ID NO: 352856
  chr1:44718164-44718302
  hypo
  lung vs. liver_bileduct

SEQ ID NO: 464891 - DNA, 560 bp, Homo sapiens
  chr1:45106068-45106628
  hypo
  lung vs. head_and_neck
cgcctgttgggaggggtgaggagaggtggcaaggagcaaggcaccttctgtcccccgtggcaactgatgggatttaatcgccttttggaacacaattgttaagctaggacagagggagtgcaggcagaaggagcaagtatcaatggttttaaacggcgtctgtctctctgcgtctctcctgacgtgaggcagtgaaacgcgttatcgaggaggcccggaaagtggctaagtgcgtttgacacacgccaactccctgcctccacactggataattgcattgtcaactgttcagcgaggtggcaggtgacactgcaggccgattgattgtcccgcatcgcagctccccagactgtcagctccccaatcgatggcgtttacacaagacaccgtaactgcatctgtaactaattccagtgtaaaactcgccggaagctgctgcccctgccctccgtgttggagagcacaggcccctggagggccccgagacgtttcctttctccctgggctctggttttgttgggagcagcaggtgaggaaatcgatgcctccttttttgtggt

SEQ ID NO: 464892 - DNA, 24 bp, Homo sapiens
  chr1:45156613-45156637
  hypo
  lung vs. lymphoid_neoplasm
cgcgcccagtgaagcttcttgaaa

SEQ ID NO: 464893 - DNA, 438 bp, Homo sapiens; identical to SEQ ID NO: 464043
  chr1:90308855-90309293
  hypo
  lung vs. pancreas_gallbladder

SEQ ID NO: 464894 - DNA, 14 bp, Homo sapiens
  chr1:109772100-109772114
  hypo
  lung vs. upper_gi
cgcggagcggataa

SEQ ID NO: 464895 - DNA, 87 bp, Homo sapiens; identical to SEQ ID NO: 337132
  chr1:110167965-110168052
  hypo
  lung vs. liver_bileduct

SEQ ID NO: 464896 - DNA, 818 bp, Homo sapiens; identical to SEQ ID NO: 330937
  chr1:113498720-113499538
  hypo
  lung vs. upper_gi

SEQ ID NO: 464897 - DNA, 118 bp, Homo sapiens; identical to SEQ ID NO: 337151
  chr1:116219361-116219479
  hypo
  lung vs. liver_bileduct

SEQ ID NO: 464898 - DNA, 109 bp, Homo sapiens; identical to SEQ ID NO: 337157
  chr1:118172998-118173107
  hypo
  lung vs. pancreas_gallbladder,head_and_neck,upper_gi, colorectal

SEQ ID NO: 464899 - DNA, 209 bp, Homo sapiens
  chr1:118173578-118173787
  hypo
  lung vs. bladder_and_urothelial,cervical
cgcccagaatctagggagctggagcctgtcgggaggcttggtttcataccattcctcacccagctcagagcaacgcaggctacctgttctggccatgactggatcacaggtctcccagctcagggcattttcaccacagcaggccatcccagggccaccttttacttaggaagtttccgaaaatgggaaatgtccctaagggaaaggca

SEQ ID NO: 464900 - DNA, 63 bp, Homo sapiens; identical to SEQ ID NO: 362529
  chr1:118173816-118173879
  hypo
  lung vs. bladder_and_urothelial,cervical

SEQ ID NO: 464901 - DNA, 369 bp, Homo sapiens; identical to SEQ ID NO: 337167
  chr1:152192964-152193333
  hypo
  lung vs. head_and_neck

SEQ ID NO: 464902 - DNA, 253 bp, Homo sapiens; identical to SEQ ID NO: 347831
  chr1:153540242-153540495
  hypo
  lung vs. breast,prostate,uterine,sarcoma

SEQ ID NO: 464903 - DNA, 193 bp, Homo sapiens; identical to SEQ ID NO: 337172
  chr1:154179803-154179996
  hypo
  lung vs. head_and_neck

SEQ ID NO: 464904 - DNA, 24 bp, Homo sapiens
  chr1:155161023-155161047
  hypo
  lung vs. head_and_neck
aaggcgggcctgttgtccggggcc

SEQ ID NO: 464905 - DNA, 3 bp, Homo sapiens
  chr1:156010521-156010524
  hypo
  lung vs. melanoma
cgt

SEQ ID NO: 464906 - DNA, 54 bp, Homo sapiens; identical to SEQ ID NO: 375920
  chr1:156010548-156010602
  hypo
  lung vs. melanoma

SEQ ID NO: 464907 - DNA, 30 bp, Homo sapiens; identical to SEQ ID NO: 464063
  chr1:156405338-156405368
  hypo
  lung vs. thyroid,myeloid_neoplasm,ovary,multiple_myeloma

SEQ ID NO: 464908 - DNA, 58 bp, Homo sapiens; identical to SEQ ID NO: 362555
  chr1:158710986-158711044
  hypo
  lung vs. lymphoid_neoplasm

SEQ ID NO: 464909 - DNA, 59 bp, Homo sapiens; identical to SEQ ID NO: 362565
  chr1:161450487-161450546
  hypo
  lung vs. melanoma

SEQ ID NO: 464910 - DNA, 629 bp, Homo sapiens; identical to SEQ ID NO: 356926
  chr1:166135586-166136215
  hypo
  lung vs. sarcoma

SEQ ID NO: 464911 - DNA, 70 bp, Homo sapiens; identical to SEQ ID NO: 453568
  chr1:171554936-171555006
  hypo
  lung vs. liver_bileduct,colorectal

SEQ ID NO: 464912 - DNA, 122 bp, Homo sapiens; identical to SEQ ID NO: 347839
  chr1:171555061-171555183
  hypo
  lung vs. liver_bileduct,colorectal

SEQ ID NO: 464913 - DNA, 12 bp, Homo sapiens
  chr1:175365936-175365948
  hypo
  lung vs. head_and_neck,cervical
ggggcaactacc

SEQ ID NO: 464914 - DNA, 181 bp, Homo sapiens; identical to SEQ ID NO: 454587
  chr1:175372314-175372495
  hypo
  lung vs. anorectal,uterine,head_and_neck, lymphoid_neoplasm

SEQ ID NO: 464915 - DNA, 145 bp, Homo sapiens; identical to SEQ ID NO: 347841
  chr1:175372572-175372717
  hypo
  lung vs. anorectal,uterine,head_and_neck, lymphoid_neoplasm

SEQ ID NO: 464916 - DNA, 153 bp, Homo sapiens; identical to SEQ ID NO: 454589
  chr1:175375048-175375201
  hypo
  lung vs. anorectal

SEQ ID NO: 464917 - DNA, 13 bp, Homo sapiens
  chr1:180925259-180925272
  hypo
  lung vs. liver_bileduct,upper_gi
cgctctctggctg

SEQ ID NO: 464918 - DNA, 3 bp, Homo sapiens
  chr1:180925402-180925405
  hypo
  lung vs. liver_bileduct,upper_gi
gct

SEQ ID NO: 464919 - DNA, 8 bp, Homo sapiens
  chr1:201797440-201797448
  hypo
  lung vs. liver_bileduct,cervical
cgtgagcc

SEQ ID NO: 464920 - DNA, 13 bp, Homo sapiens
  chr1:201797541-201797554
  hypo
  lung vs. liver_bileduct,cervical
ggccatttcccac

SEQ ID NO: 464921 - DNA, 131 bp, Homo sapiens
  chr1:202995171-202995302
  hypo
  lung vs. lymphoid_neoplasm
cgacacaattcactgaagagcatactacagatgtagtatccggatatcaagtttccccacttaaaaaatgggtgcgatcaaaggaaaagcaaggaacgggcaggagagcaagcgtgaaaggtgacaaactt

SEQ ID NO: 464922 - DNA, 17 bp, Homo sapiens
  chr1:228645891-228645908
  hypo
  lung vs. melanoma
aggcacagaagaaggac

SEQ ID NO: 464923 - DNA, 109 bp, Homo sapiens; identical to SEQ ID NO: 337365
  chr1:229606426-229606535
  hypo
  lung vs. head_and_neck

SEQ ID NO: 464924 - DNA, 464 bp, Homo sapiens; identical to SEQ ID NO: 337376
  chr1:231038126-231038590
  hypo
  lung vs. head_and_neck

SEQ ID NO: 464925 - DNA, 175 bp, Homo sapiens; identical to SEQ ID NO: 464082
  chr1:234736252-234736427
  hypo
  lung vs. pancreas_gallbladder,upper_gi

SEQ ID NO: 464926 - DNA, 318 bp, Homo sapiens
  chr1:245032200-245032518
  hypo
  lung vs. pancreas_gallbladder,cervical,head_and_neck, lymphoid_neoplasm,sarcoma,bladder_and_urothelial
tatcgtataccaattatacctccataaagctggggaggttgggggaggaagacaaaagaattcaggcctgcggggaatgatgggagtgggtaggagaggagagaggggagagaggaaaacacagatcaccagcagcctcgtgggtggttttgtaaaggactttggcttttgctttctgctatggactgaacgtttgtgtccccacaaaagtcctgtgttgaaacctaatcccccatgatattaggagctgaggcctttggaggcaacgaggtcatgagcgtggagccctcatcaatgggattagaaaatttatacaga

SEQ ID NO: 464927 - DNA, 69 bp, Homo sapiens; identical to SEQ ID NO: 347864
  chr1:245032603-245032672
  hypo
  lung vs. pancreas_gallbladder,cervical,head_and_neck, lymphoid_neoplasm,sarcoma,bladder_and_urothelial

SEQ ID NO: 464928 - DNA, 82 bp, Homo sapiens
  chr1:245986537-245986619
  hypo
  lung vs. upper_gi,colorectal
cgattgcaaaatccatttctccttctctgtccctgcttctctgcccttcccccaagctttcttgctctctgccacacgtgcg

SEQ ID NO: 464929 - DNA, 186 bp, Homo sapiens; identical to SEQ ID NO: 337434
  chr1:246324319-246324505
  hypo
  lung vs. liver_bileduct

SEQ ID NO: 464930 - DNA, 97 bp, Homo sapiens; identical to SEQ ID NO: 453579
  chr1:246330213-246330310
  hypo
  lung vs. liver_bileduct,lymphoid_neoplasm

SEQ ID NO: 464931 - DNA, 124 bp, Homo sapiens; identical to SEQ ID NO: 353025
  chr1:248074927-248075051
  hypo
  lung vs. head_and_neck,anorectal,cervical

SEQ ID NO: 464932 - DNA, 332 bp, Homo sapiens; identical to SEQ ID NO: 463175
  chr1:248099374-248099706
  hypo
  lung vs. lymphoid_neoplasm,head_and_neck,non_cancer, anorectal,renal

SEQ ID NO: 464933 - DNA, 142 bp, Homo sapiens; identical to SEQ ID NO: 453584
  chr10:851108-851250
  hypo
  lung vs. liver_bileduct

SEQ ID NO: 464934 - DNA, 175 bp, Homo sapiens; identical to SEQ ID NO: 354474
  chr10:851504-851679
  hypo
  lung vs. liver_bileduct

SEQ ID NO: 464935 - DNA, 50 bp, Homo sapiens
  chr10:1120729-1120779
  hypo
  lung vs. head_and_neck
cgtgttaggtttaactttatacatctcagatttgccagtctgaagtagtt

SEQ ID NO: 464936 - DNA, 28 bp, Homo sapiens
  chr10:1120937-1120965
  hypo
  lung vs. head_and_neck
aattcatttaaaagctttgctgagtcac

SEQ ID NO: 464937 - DNA, 102 bp, Homo sapiens
  chr10:1506151-1506253
  hypo
  lung vs. pancreas_gallbladder
cgcaaacgcaaacccccataagacgcctggacacacctgcgagagtggctgcaataaaacaaccacagagaagctgatgacagtgaatgctgacaaggatgt

SEQ ID NO: 464938 - DNA, 29 bp, Homo sapiens
  chr10:1506584-1506613
  hypo
  lung vs. pancreas_gallbladder
ggtggacacacactcccccacacacgcgc

SEQ ID NO: 464939 - DNA, 52 bp, Homo sapiens
  chr10:1558541-1558593
  hypo
  lung vs. head_and_neck
cggctttccctgctccctttcccgaggtgcagctggattcagagcttcccac

SEQ ID NO: 464940 - DNA, 46 bp, Homo sapiens; identical to SEQ ID NO: 365235
  chr10:1558836-1558882
  hypo
  lung vs. head_and_neck

SEQ ID NO: 464941 - DNA, 297 bp, Homo sapiens; identical to SEQ ID NO: 354493
  chr10:3678862-3679159
  hypo
  lung vs. melanoma,lymphoid_neoplasm

SEQ ID NO: 464942 - DNA, 52 bp, Homo sapiens; identical to SEQ ID NO: 462290
  chr10:8097537-8097589
  hypo
  lung vs. breast

SEQ ID NO: 464943 - DNA, 313 bp, Homo sapiens; identical to SEQ ID NO: 340585
  chr10:16716483-16716796
  hypo
  lung vs. head_and_neck

SEQ ID NO: 464944 - DNA, 150 bp, Homo sapiens
  chr10:22869787-22869937
  hypo
  lung vs. liver_bileduct
cgatggtaatgtctcgctttacagactcgacaggtgcagtgctctaatgcggcccgggaggctcctttgtagaatggatgagtctgccaactcctgtctgcagacactttgaagtcccaaggcagatgaggctgcaaatggaccaaacac

SEQ ID NO: 464945 - DNA, 223 bp, Homo sapiens; identical to SEQ ID NO: 340607
  chr10:24863037-24863260
  hypo
  lung vs. melanoma

SEQ ID NO: 464946 - DNA, 62 bp, Homo sapiens; identical to SEQ ID NO: 456347
  chr10:74100516-74100578
  hypo
  lung vs. upper_gi

SEQ ID NO: 464947 - DNA, 2 bp, Homo sapiens
  chr10:74100613-74100615
  hypo
  lung vs. upper_gi
ac

SEQ ID NO: 464948 - DNA, 75 bp, Homo sapiens
  chr10:76784656-76784731
  hypo
  lung vs. liver_bileduct
cgactcaaccatttaatttctcatgagctcttatgtgttatgtttggaattaatttcagaggccttttgtactaa

SEQ ID NO: 464949 - DNA, 371 bp, Homo sapiens; identical to SEQ ID NO: 340712
  chr10:99206760-99207131
  hypo

SEQ ID NO: 464950 - DNA, 233 bp, Homo sapiens; identical to SEQ ID NO: 464100
  chr10:112403994-112404227
  hypo
  lung vs. anorectal

SEQ ID NO: 464951 - DNA, 93 bp, Homo sapiens; identical to SEQ ID NO: 354593
  chr10:119807131-119807224
  hypo

SEQ ID NO: 464952 - DNA, 25 bp, Homo sapiens
  chr10:126331903-126331928
  hypo
  lung vs. liver_bileduct
cggctcggcagggccctcagcagtt

SEQ ID NO: 464953 - DNA, 185 bp, Homo sapiens; identical to SEQ ID NO: 213781
  chr10:126332086-126332271
  hypo
  lung vs. liver_bileduct

SEQ ID NO: 464954 - DNA, 142 bp, Homo sapiens
  chr10:127451818-127451960
  hypo
  lung vs. liver_bileduct,pancreas_gallbladder,upper_gi, breast,colorectal
cggtaggcattgctggtcccttacctgtctctttttcttttttaaccctagcaataacatcgaagatgacacaattctcaaaaccaacaagcacatttactcccagcttttgagagcaactgcaaataaaaccgcgactctt

SEQ ID NO: 464955 - DNA, 38 bp, Homo sapiens; identical to SEQ ID NO: 346010
  chr10:127452067-127452105
  hypo
  lung vs. liver_bileduct,pancreas_gallbladder,upper_gi, breast,colorectal

SEQ ID NO: 464956 - DNA, 20 bp, Homo sapiens
  chr10:134699327-134699347
  hypo
  lung vs. cervical
cggtgggccgtccttggcag

SEQ ID NO: 464957 - DNA, 243 bp, Homo sapiens
  chr10:134699406-134699649
  hypo
  lung vs. cervical
ggctgtggaagagcaggccgtagagcgcagcacggagcgccaggtcgtcctcagcccctgggagggagaaggaggggtgtccttggagccgcctgatccctcatcaaaggcgccctcggacctcccagactaagctgcccatcacagtgcccctgaggtggaaccgcggctacagaggtgcccaggccagcgcatgccccgcagggctgaagtgagctgtggacctgcatggcccctccagcc

SEQ ID NO: 464958 - DNA, 231 bp, Homo sapiens; identical to SEQ ID NO: 454633
  chr10:134733835-134734066
  hypo
  lung vs. anorectal,renal,lymphoid_neoplasm

SEQ ID NO: 464959 - DNA, 114 bp, Homo sapiens
  chr10:134787917-134788031
  hypo
  lung vs. lymphoid_neoplasm
cgctgcctgtgagatgaggccagatcctcgccgcccgcacctgcctctccccaactcgccctgcgcgggacaggtggacgccgcccacacctacctctcccccactcaccctgc

SEQ ID NO: 464960 - DNA, 51 bp, Homo sapiens
  chr10:134793882-134793933
  hypo
  lung vs. head_and_neck,colorectal,pancreas_gallbladder, breast,anorectal,bladder_and_urothelial,lymphoid_neoplasm, upper_gi,prostate,renal,uterine
cgagtgcctggtgagagcccggtgagtgcccggtgagtgcctggtgagtgc

SEQ ID NO: 464961 - DNA, 144 bp, Homo sapiens; identical to SEQ ID NO: 346012
  chr10:134793968-134794112
  hypo
  lung vs. head_and_neck,colorectal,pancreas_gallbladder, breast,anorectal,bladder_and_urothelial,lymphoid_neoplasm, upper_gi,prostate,renal,uterine

SEQ ID NO: 464962 - DNA, 203 bp, Homo sapiens; identical to SEQ ID NO: 453601
  chr10:134794144-134794347
  hypo
  lung vs. pancreas_gallbladder,head_and_neck,cervical, uterine,colorectal,renal,lymphoid_neoplasm,prostate

SEQ ID NO: 464963 - DNA, 558 bp, Homo sapiens
  chr10:134941895-134942453
  hypo
ggtcacctgtgtgtacttcctgggcacctacgtgcagctgcggcgccacccagggcgcaggtacgagctgcgcacacagcccgaggagcagcggcggctggcgacacccgagggcggccgtgggatccggccaggcaccccacccgcacacgatgcccccggcgcctccgtgctgcagaacgagcactcattccaggcacagctgcgcgccgccgccttcacgctgttcctgttcacggccacgtgggccttcggggcgctggcggtgtcacagggccacttcctggacatggtcttcagctgcctgtacggcgccttctgcgtgaccctgggactcttcgtgctcatccaccactgcgccaagcgtgaggacgtgtggcagtgctggtgggcatgctgcccgccccgcaaggacgcccaccccgcacttgacgccaacggggccgcgctgggccgcgccgcctgcctgcactcgccgggactgggccagccacggggcttcgcgcacccaccgggcccctgcaagatgaccaacctgcaggccgcgcagggccacgc

SEQ ID NO: 464964 - DNA, 306 bp, Homo sapiens
  chr10:134942147-134942453
  hypo
  lung vs. lymphoid_neoplasm
cggggcgctggcggtgtcacagggccacttcctggacatggtcttcagctgcctgtacggcgccttctgcgtgaccctgggactcttcgtgctcatccaccactgcgccaagcgtgaggacgtgtggcagtgctggtgggcatgctgcccgccccgcaaggacgcccaccccgcacttgacgccaacggggccgcgctgggccgcgccgcctgcctgcactcgccgggactgggccagccacggggcttcgcgcacccaccgggcccctgcaagatgaccaacctgcaggccgcgcagggccacgc

SEQ ID NO: 464965 - DNA, 201 bp, Homo sapiens
  chr10:135030373-135030574
  hypo
  lung vs. renal
cgcctgcggcagcacgatgaacctcgagggactcaggctcagggaaacgagccagtcgcgaagcacggacagtggacggctccacgtacacgaggcgcctggaggcgcaagattcacggagacaaagtagcagggtgggcgccgggggctgggagtggggcacggggagctcgtgttgaacggggaccgagtttccgtttg

SEQ ID NO: 464966 - DNA, 107 bp, Homo sapiens; identical to SEQ ID NO: 340874
  chr10:135229000-135229107
  hypo
  lung vs. liver_bileduct

SEQ ID NO: 464967 - DNA, 2 bp, Homo sapiens
  chr11:407531-407533
  hypo
  lung vs. head_and_neck
tc

SEQ ID NO: 464968 - DNA, 111 bp, Homo sapiens
  chr11:763192-763303
  hypo
  lung vs. sarcoma,lymphoid_neoplasm,melanoma
cgccctcacctgccccgccctcacctgcccccgccctcacccgcccccgccctcacccatccccgccctcaccgtccccgccctcacccgcccccgccctcacctgtcccc

SEQ ID NO: 464969 - DNA, 62 bp, Homo sapiens; identical to SEQ ID NO: 354654
  chr11:764018-764080
  hypo
  lung vs. sarcoma,lymphoid_neoplasm,melanoma

SEQ ID NO: 464970 - DNA, 103 bp, Homo sapiens
  chr11:850444-850547
  hypo
cggagtcgctgccccggccaggcgttgggtgcggttgtggggatggtcccgggaggacccaagaccgctgctccggctaggagcctggactgggcgggtgggg

SEQ ID NO: 464971 - DNA, 258 bp, Homo sapiens; identical to SEQ ID NO: 354658
  chr11:859386-859644
  hypo
  lung vs. lymphoid_neoplasm

SEQ ID NO: 464972 - DNA, 513 bp, Homo sapiens; identical to SEQ ID NO: 340902
  chr11:993208-993721
  hypo
  lung vs. upper_gi

SEQ ID NO: 464973 - DNA, 43 bp, Homo sapiens
  chr11:1008033-1008076
  hypo
  lung vs. liver_bileduct
cgtggacccgaccgtggaggggggcgcgcaggtgcagcaggtg

SEQ ID NO: 464974 - DNA, 293 bp, Homo sapiens
  chr11:1008125-1008418
  hypo
  lung vs. liver_bileduct
ttcagttcaggtaagagccgcctgtgcgccccgggccaaggggtgtgtgggcgcctgagctgtgtgcctgggctccatgactgtgcctccgtgtccttcctgaggggacccggggcgtgcgggtgctcacggtgcatggatgcggcctgagctattgctgcccccggctctgcagagcgcaggaaacaaggggaggcggagccctgggctccgggacggcaggtggcagctcccacatggggccttgctaggatctttctgggcaccatggggcccacctcatggggtggcag

SEQ ID NO: 464975 - DNA, 66 bp, Homo sapiens
  chr11:1254274-1254340
  hypo
  lung vs. melanoma
cgctacgcctacgtggtggatgcctgccagcccacttgccgcggcctgagtgaggccgacgtcacc

SEQ ID NO: 464976 - DNA, 70 bp, Homo sapiens; identical to SEQ ID NO: 354662
  chr11:1254423-1254493
  hypo
  lung vs. melanoma

SEQ ID NO: 464977 - DNA, 306 bp, Homo sapiens
  chr11:2278017-2278323
  hypo
  lung vs. lymphoid_neoplasm
cgtgtgcgtttctgcgtgtgtgtgtgtgtgtgtgtccatgcatgtgtctctatgaatatatgtgctgtatttgcatgtgtgtgtgtgtctatgtgtgcatatgtctgtgtctgtgtgtctttctgtgtgtgcggtctgtgtctgtgggtctacacgtgtatatgtgcatgtgtctgtgtgtgtcgcagtgtgttactgtgtctgcgcgtgtgtgcatgcatatgtgcaggagggagggagggctcaggccttagcagagtccctggggctctgggagtggagggcagtgaggctgaggctggtgca

SEQ ID NO: 464978 - DNA, 98 bp, Homo sapiens; identical to SEQ ID NO: 365588
  chr11:2278839-2278937
  hypo
  lung vs. lymphoid_neoplasm

SEQ ID NO: 464979 - DNA, 5 bp, Homo sapiens
  chr11:18512388-18512393
  hypo
  lung vs. head_and_neck
cgttg

SEQ ID NO: 464980 - DNA, 70 bp, Homo sapiens; identical to SEQ ID NO: 365638
  chr11:18512439-18512509
  hypo
  lung vs. head_and_neck

SEQ ID NO: 464981 - DNA, 23 bp, Homo sapiens
  chr11:34535022-34535045
  hypo
  lung vs. melanoma,cervical
cggcctgcggaggcaagcaggtc

SEQ ID NO: 464982 - DNA, 48 bp, Homo sapiens; identical to SEQ ID NO: 365647
  chr11:34535248-34535296
  hypo
  lung vs. melanoma,cervical

SEQ ID NO: 464983 - DNA, 2 bp, Homo sapiens
  chr11:46920025-46920027
  hypo
  lung vs. head_and_neck,colorectal
cg

SEQ ID NO: 464984 - DNA, 117 bp, Homo sapiens; identical to SEQ ID NO: 348489
  chr11:46920042-46920159
  hypo
  lung vs. head_and_neck,colorectal

SEQ ID NO: 464985 - DNA, 17 bp, Homo sapiens
  chr11:47358910-47358927
  hypo
  lung vs. prostate,breast,lymphoid_neoplasm,sarcoma
cggggggcaggaccagg

SEQ ID NO: 464986 - DNA, 106 bp, Homo sapiens; identical to SEQ ID NO: 348490
  chr11:47359237-47359343
  hypo
  lung vs. prostate,breast,lymphoid_neoplasm,sarcoma

SEQ ID NO: 464987 - DNA, 46 bp, Homo sapiens; identical to SEQ ID NO: 354724
  chr11:57235458-57235504
  hypo
  lung vs. liver_bileduct,pancreas_gallbladder

SEQ ID NO: 464988 - DNA, 198 bp, Homo sapiens; identical to SEQ ID NO: 341065
  chr11:60714083-60714281
  hypo
  lung vs. pancreas_gallbladder

SEQ ID NO: 464989 - DNA, 211 bp, Homo sapiens
  chr11:63849170-63849381
  hypo
  lung vs. head_and_neck
cgtgtggctgaagcctgttcctgcttgggggttggccacacagcatcccaactccaggtccagagccgagcctgacagccctcctccactgcctcctggagctgccggagagaggtccgggtccgttctccccaattcacagacatgaagactgaggccgtggttccagtggctgctcggtggtggggctggagcttggcagcatcctgca

SEQ ID NO: 464990 - DNA, 61 bp, Homo sapiens; identical to SEQ ID NO: 365695
  chr11:63849634-63849695
  hypo
  lung vs. head_and_neck

SEQ ID NO: 464991 - DNA, 298 bp, Homo sapiens
  chr11:64977165-64977463
  hypo
  lung vs. breast
cggctgtgggctgactgtacatggcttttgctgcttctcctcacccagccccaagtcgacttgccggctcggcggccatctccccttctgcacagttgcccactctcccatgactggtctaagtgatggaatttccttcttaacggccacccagcgtgatggcaatgggaagctgggcctggtggagttcaacatcctgtggaaccgcatccggaattacctggtaggttgtccccactcacctcagtcatgcaggtgcgggccgggcaggtgggaagggccgggtgactcagcctgg

SEQ ID NO: 464992 - DNA, 52 bp, Homo sapiens; identical to SEQ ID NO: 348503
  chr11:64977534-64977586
  hypo
  lung vs. breast

SEQ ID NO: 464993 - DNA, 141 bp, Homo sapiens; identical to SEQ ID NO: 348509
  chr11:66513646-66513787
  hypo
  lung vs. sarcoma,melanoma,lymphoid_neoplasm,uterine

SEQ ID NO: 464994 - DNA, 285 bp, Homo sapiens
  chr11:66633455-66633740
  hypo
  lung vs. liver_bileduct
cgcccagcagtctcttcccctgggaggcgccgcccctcctctgggcactgcctgcctccgtgtactctatgtccacttcagagcccacatgcgggtcctccctaactgccgggctgtggcaacttggcactgcagccccaggcaccaggcagaacctgtgcacaggtgagctggcatctccctctgctcgagctccgcccacctcaatgcggccggtgtccggctggaagctgcgcgcggggtcctcggtggtgacccggcactggatggcacacccgttgatgc

SEQ ID NO: 464995 - DNA, 185 bp, Homo sapiens; identical to SEQ ID NO: 348512
  chr11:66633833-66634018
  hypo
  lung vs. liver_bileduct

SEQ ID NO: 464996 - DNA, 113 bp, Homo sapiens
  chr11:67781084-67781197
  hypo
  lung vs. head_and_neck,cervical,bladder_and_urothelial, prostate,sarcoma,breast,melanoma,lymphoid_neoplasm,colorectal, uterine
cgtgatgtcatttaatcctcacaatgacaccaggtgccattagcatccccatttcacagatgaggaaaccgaggcagagaaggtgagtgatttgcccaaggtcccacaaccag

SEQ ID NO: 464997 - DNA, 133 bp, Homo sapiens; identical to SEQ ID NO: 459356
  chr11:67895663-67895796
  hypo
  lung vs. liver_bileduct

SEQ ID NO: 464998 - DNA, 139 bp, Homo sapiens
  chr11:72475539-72475678
  hypo
  lung vs. liver_bileduct,melanoma
cgcaggtgaagaaactgaggcaggccgggtcgtgggggtcaggtaagtgtccacaggcctccctagcctggcctggctcgtgccctttccatagcccccagcaggcagcactgctgcgctaagcagaagaaattacacc

SEQ ID NO: 464999 - DNA, 317 bp, Homo sapiens; identical to SEQ ID NO: 365771
  chr11:72475723-72476040
  hypo
  lung vs. liver_bileduct,melanoma

SEQ ID NO: 465000 - DNA, 366 bp, Homo sapiens; identical to SEQ ID NO: 341204
  chr11:78534109-78534475
  hypo
  lung vs. head_and_neck,bladder_and_urothelial,cervical, anorectal

SEQ ID NO: 465001 - DNA, 152 bp, Homo sapiens; identical to SEQ ID NO: 454669
  chr11:121023460-121023612
  hypo
  lung vs. breast,pancreas_gallbladder,colorectal, anorectal

SEQ ID NO: 465002 - DNA, 67 bp, Homo sapiens; identical to SEQ ID NO: 341269
  chr11:124387399-124387466
  hypo
  lung vs. head_and_neck

SEQ ID NO: 465003 - DNA, 182 bp, Homo sapiens
  chr11:129993371-129993553
  hypo
  lung vs. breast,head_and_neck,upper_gi,prostate,cervical, lymphoid_neoplasm,uterine,colorectal
cggccaccgggcctccaggctccgtccagtctcaggcctcccccagcccatcccccagctcgccagcctgtagcattttgaagcatttgacgtcactgcctctgtcctgctgacactctgaccattttcacacagctgtctgctcccaggaggcgatgacggggccctgccgggccgtgatg

SEQ ID NO: 465004 - DNA, 176 bp, Homo sapiens; identical to SEQ ID NO: 354833
  chr11:129993759-129993935
  hypo
  lung vs. breast,head_and_neck,upper_gi,prostate,cervical, lymphoid_neoplasm,uterine,colorectal

SEQ ID NO: 465005 - DNA, 38 bp, Homo sapiens
  chr11:130089793-130089831
  hypo
  lung vs. head_and_neck
cgtctgtttgccaggccttgttctaggaaccaggagta

SEQ ID NO: 465006 - DNA, 112 bp, Homo sapiens; identical to SEQ ID NO: 354837
  chr11:130089881-130089993
  hypo
  lung vs. head_and_neck

SEQ ID NO: 465007 - DNA, 67 bp, Homo sapiens; identical to SEQ ID NO: 456411
  chr11:130785392-130785459
  hypo
  lung vs. renal

SEQ ID NO: 465008 - DNA, 17 bp, Homo sapiens
  chr11:133938756-133938773
  hypo
  lung vs. melanoma
cgccaagttcattgaaa

SEQ ID NO: 465009 - DNA, 161 bp, Homo sapiens; identical to SEQ ID NO: 345407
  chr11:133939437-133939598
  hypo
  lung vs. melanoma

SEQ ID NO: 465010 - DNA, 138 bp, Homo sapiens; identical to SEQ ID NO: 341297
  chr11:134011321-134011459
  hypo
  lung vs. head_and_neck

SEQ ID NO: 465011 - DNA, 259 bp, Homo sapiens
  chr11:134458219-134458478
  hypo
  lung vs. pancreas_gallbladder,anorectal,cervical, head_and_neck
cgagtgctgcatctgcgatgtgaacctgtgctggattccctgctgagagctgcacctgtgatgtgaacctgtgctggattccgtgccgagagctgcacctgcgatgtgaacctgtgctggattccctgctgagagctgcacctgcgatgtgaacctgtgctggattccctgccacgtgctgcacctgcgatgtgaacctctgctggattccctgccgagtgctgcacctgcgatgtgaacctgtgctggattccctgcc

SEQ ID NO: 465012 - DNA, 454 bp, Homo sapiens; identical to SEQ ID NO: 341312
  chr12:1943616-1944070
  hypo
  lung vs. breast,anorectal

SEQ ID NO: 465013 - DNA, 155 bp, Homo sapiens; identical to SEQ ID NO: 341313
  chr12:1992067-1992222
  hypo
  lung vs. uterine,breast

SEQ ID NO: 465014 - DNA, 86 bp, Homo sapiens; identical to SEQ ID NO: 452813
  chr12:4377809-4377895
  hypo
  lung vs. lymphoid_neoplasm,ovary,colorectal

SEQ ID NO: 465015 - DNA, 142 bp, Homo sapiens; identical to SEQ ID NO: 452814
  chr12:4378558-4378700
  hypo
  lung vs. lymphoid_neoplasm,ovary,colorectal

SEQ ID NO: 465016 - DNA, 245 bp, Homo sapiens; identical to SEQ ID NO: 452815
  chr12:4378558-4378803
  hypo
  lung vs. lymphoid_neoplasm,colorectal,ovary,non_cancer, melanoma

SEQ ID NO: 465017 - DNA, 88 bp, Homo sapiens; identical to SEQ ID NO: 454142
  chr12:4378715-4378803
  hypo
  lung vs. colorectal,melanoma

SEQ ID NO: 465018 - DNA, 113 bp, Homo sapiens; identical to SEQ ID NO: 354864
  chr12:4734902-4735015
  hypo
  lung vs. head_and_neck,colorectal

SEQ ID NO: 465019 - DNA, 267 bp, Homo sapiens; identical to SEQ ID NO: 341348
  chr12:6344323-6344590
  hypo

SEQ ID NO: 465020 - DNA, 73 bp, Homo sapiens
  chr12:6483496-6483569
  hypo
  lung vs. sarcoma
cgcaggcaccagggaaggggcagagggactaaccgacctgtagggattgagggtgcagatggtcactgcgggg

SEQ ID NO: 465021 - DNA, 669 bp, Homo sapiens; identical to SEQ ID NO: 464136
  chr12:29301988-29302657
  hypo
  lung vs. upper_gi

SEQ ID NO: 465022 - DNA, 86 bp, Homo sapiens; identical to SEQ ID NO: 464137
  chr12:29302688-29302774
  hypo
  lung vs. upper_gi

SEQ ID NO: 465023 - DNA, 84 bp, Homo sapiens; identical to SEQ ID NO: 454680
  chr12:29373882-29373966
  hypo
  lung vs. head_and_neck

SEQ ID NO: 465024 - DNA, 18 bp, Homo sapiens
  chr12:29374085-29374103
  hypo
  lung vs. head_and_neck
cgctttacctcttagtgc

SEQ ID NO: 465025 - DNA, 3 bp, Homo sapiens
  chr12:52401537-52401540
  hypo
  lung vs. anorectal
tcc

SEQ ID NO: 465026 - DNA, 295 bp, Homo sapiens; identical to SEQ ID NO: 380073
  chr12:53685907-53686202
  hypo
  lung vs. liver_bileduct,upper_gi,head_and_neck

SEQ ID NO: 465027 - DNA, 114 bp, Homo sapiens; identical to SEQ ID NO: 341425
  chr12:54122178-54122292
  hypo
  lung vs. breast,liver_bileduct

SEQ ID NO: 465028 - DNA, 104 bp, Homo sapiens; identical to SEQ ID NO: 464141
  chr12:54393256-54393360
  hypo
  lung vs. breast

SEQ ID NO: 465029 - DNA, 185 bp, Homo sapiens; identical to SEQ ID NO: 341444
  chr12:58284105-58284290
  hypo
  lung vs. melanoma

SEQ ID NO: 465030 - DNA, 117 bp, Homo sapiens; identical to SEQ ID NO: 341466
  chr12:94145777-94145894
  hypo
  lung vs. liver_bileduct

SEQ ID NO: 465031 - DNA, 215 bp, Homo sapiens
  chr12:105392597-105392812
  hypo
  lung vs. bladder_and_urothelial
cgtgtgcttacatgggtagcagtggccactcagggtaagggggcgggctgctggtctccatgcatagtttcacaccactggcagtgttgacacaggggcagggtactggtggctgcgggactggtgccaaatgtgcgcacgtttatgctggctgcagtggctgcacagggcgcagggcaggtccactggtcactgtgcctagttttgcagctggt

SEQ ID NO: 465032 - DNA, 50 bp, Homo sapiens; identical to SEQ ID NO: 366016
  chr12:105392841-105392891
  hypo
  lung vs. bladder_and_urothelial

SEQ ID NO: 465033 - DNA, 153 bp, Homo sapiens
  chr12:109488367-109488520
  hypo
  lung vs. head_and_neck,melanoma
cggagaaagcgattgaaagggagggaaaaatcttgctggctctaatgctttataaactgtgctgtccaatacggtagctgctggccacttggggctattgagcacatgaaaagtgggtactccaaactgagaggtacttagtaccaaaaaaca

SEQ ID NO: 465034 - DNA, 368 bp, Homo sapiens
  chr12:109873137-109873505
  hypo
  lung vs. lymphoid_neoplasm
cgccgtttcagttctcgtttggatcagattctgttgttcactactagggtgtaaaaccgtgagagaccagccccttgaaattaaagtttacaaaacttcacttgtctgcgtgtctgatgttggaaagtttagcttcaaagcctgcagcctgggtgtttgctgggaatggtcaatgagaaaagttagatggggaaatgcaaaaagtaaaaaatcaaaactgcggggggagggagcgtctcttttgaaatgtaaccggtctgtcaagaactacgcttgagtcatttgagggcctgctgtgcgccaggtgaacactaagtcctttaaaccatggtctcattctgttctgagaacagacctgtaagggaggt

SEQ ID NO: 465035 - DNA, 52 bp, Homo sapiens; identical to SEQ ID NO: 460051
  chr12:111725459-111725511
  hypo
  lung vs. liver_bileduct

SEQ ID NO: 465036 - DNA, 63 bp, Homo sapiens; identical to SEQ ID NO: 215057
  chr12:111725564-111725627
  hypo
  lung vs. liver_bileduct

SEQ ID NO: 465037 - DNA, 321 bp, Homo sapiens; identical to SEQ ID NO: 455674
  chr12:111844290-111844611
  hypo
  lung vs. liver_bileduct,lymphoid_neoplasm

SEQ ID NO: 465038 - DNA, 183 bp, Homo sapiens
  chr12:112610173-112610356
  hypo
  lung vs. liver_bileduct,upper_gi
cggggcctccaggcagcggcctgggcattccccgcagccgtgcatttctgtatctgctccctggctttgttgtcactggcattaaaaaaggccccagactaattaggccacagtcctggctccctgccttgccctccctgtttcgtcagcccactcttccttgcacacctggcgcatagcagg

SEQ ID NO: 465039 - DNA, 215 bp, Homo sapiens; identical to SEQ ID NO: 366039
  chr12:112610446-112610661
  hypo
  lung vs. liver_bileduct,upper_gi

SEQ ID NO: 465040 - DNA, 292 bp, Homo sapiens; identical to SEQ ID NO: 453632
  chr12:113725566-113725858
  hypo
  lung vs. liver_bileduct

SEQ ID NO: 465041 - DNA, 555 bp, Homo sapiens
  chr12:114273212-114273767
  hypo
  lung vs. pancreas_gallbladder
cgtgagcacctgacggcaggctgtggtactcgaggaggaccaggggaggggcatgacaagggaatcacgaaaaggagaggtgtgggggaaaagctgcatctttgacactctggctgggaggcagtgggggccggggtcagtgggggctgccgggaccagggctctagcaagcaggctccttccctgctcctcgcgaggctgggagggtgactgtttgctggaggccggcgacccatggggacagccacccgtctgtgccggaagagcacttctccgggcactctgctcatagatctcccgccccagcccaacctggcttgggcaggcgggggaaggccccactgccagccactcgccatgctggtcatgtctgcgctcccagctctggaggtgaaaggtagagacgctaaccacagcccatcagtcctccccagctggaataagacaacatgggaagcagagccacgctcccagccaaataaaagcctgtttgcccagcctccctggctgtgagtgctgtaaaacacagggttctgcgcacggatttcttccata

SEQ ID NO: 465042 - DNA, 134 bp, Homo sapiens; identical to SEQ ID NO: 366049
  chr12:114273850-114273984
  hypo
  lung vs. pancreas_gallbladder

SEQ ID NO: 465043 - DNA, 73 bp, Homo sapiens; identical to SEQ ID NO: 456443
  chr12:114290596-114290669
  hypo
  lung vs. upper_gi,bladder_and_urothelial, pancreas_gallbladder

SEQ ID NO: 465044 - DNA, 397 bp, Homo sapiens; identical to SEQ ID NO: 453633
  chr12:120147746-120148143
  hypo
  lung vs. melanoma,breast,prostate,lymphoid_neoplasm, liver_bileduct,non_cancer,sarcoma,colorectal

SEQ ID NO: 465045 - DNA, 208 bp, Homo sapiens; identical to SEQ ID NO: 348569
  chr12:120148396-120148604
  hypo
  lung vs. melanoma,breast,prostate,lymphoid_neoplasm, liver_bileduct,non_cancer,sarcoma,colorectal

SEQ ID NO: 465046 - DNA, 336 bp, Homo sapiens
  chr12:120148396-120148732
  hypo
  lung vs. liver_bileduct,melanoma,lymphoid_neoplasm, sarcoma
agtttcagcagggagtttccaagcagtttcttttcataggtgaaagaaaagaaaaacagaagacatcgtgaggctgatctgtttatgaccaaaccatccagagaaaccaagagaaggttaaggccaagttattcctggaaatgctcagaaacgcacatatgctcttagctcagcccgtattttgatctgagctccaaatgcaaaatgcgagtgctattggtatctctggggcagctgttaattagcatctgagttataatttggctgggatgcagaaataagggagggtagtagacatggaaagctattctgtaataagaaataagctgaagctaa

SEQ ID NO: 465047 - DNA, 27 bp, Homo sapiens
  chr12:121667904-121667931
  hypo
  lung vs. sarcoma
ttaaaaaggaagcgctccaggccgggc

SEQ ID NO: 465048 - DNA, 704 bp, Homo sapiens; identical to SEQ ID NO: 453635
  chr12:121687598-121688302
  hypo
  lung vs. melanoma

SEQ ID NO: 465049 - DNA, 239 bp, Homo sapiens; identical to SEQ ID NO: 348574
  chr12:121688331-121688570
  hypo
  lung vs. melanoma

SEQ ID NO: 465050 - DNA, 751 bp, Homo sapiens; identical to SEQ ID NO: 334681
  chr12:122231543-122232294
  hypo
  lung vs. pancreas_gallbladder,upper_gi

SEQ ID NO: 465051 - DNA, 251 bp, Homo sapiens
  chr12:124879871-124880122
  hypo
  lung vs. head_and_neck
cgccccacccccgctccctcctgccatcgcctggaacacacagccattagcagccaccctgagcagtaattgtccagattgctgtaattcacggcagacgaacatgctgctgctcacgacattattacaaatgtcactgagcagggcctccgcgtgcacggcccccaggggacgctcactgccgtctccatgggcaggacccaggatgagctcactgtcatcactgaggacccaaccttgagatggtggga

SEQ ID NO: 465052 - DNA, 139 bp, Homo sapiens; identical to SEQ ID NO: 354991
  chr12:125102589-125102728
  hypo
  lung vs. cervical,uterine

SEQ ID NO: 465053 - DNA, 122 bp, Homo sapiens; identical to SEQ ID NO: 341613
  chr12:128247754-128247876
  hypo
  lung vs. head_and_neck

SEQ ID NO: 465054 - DNA, 29 bp, Homo sapiens
  chr12:128899673-128899702
  hypo
  lung vs. head_and_neck
cggcgccggggagaagctgccatgcctga

SEQ ID NO: 465055 - DNA, 150 bp, Homo sapiens; identical to SEQ ID NO: 354993
  chr12:128899867-128900017
  hypo
  lung vs. head_and_neck

SEQ ID NO: 465056 - DNA, 237 bp, Homo sapiens; identical to SEQ ID NO: 454705
  chr12:131271740-131271977
  hypo
  lung vs. liver_bileduct

SEQ ID NO: 465057 - DNA, 299 bp, Homo sapiens; identical to SEQ ID NO: 454706
  chr12:131272032-131272331
  hypo
  lung vs. liver_bileduct

SEQ ID NO: 465058 - DNA, 212 bp, Homo sapiens; identical to SEQ ID NO: 454707
  chr12:131272367-131272579
  hypo
  lung vs. liver_bileduct

SEQ ID NO: 465059 - DNA, 186 bp, Homo sapiens
  chr12:131418203-131418389
  hypo
  lung vs. renal,anorectal
cggggcgtccccacgtcagatccctggggtcaagcctgtccccaggatgactccccaggttttgacctgatcgctgcacccatgaggctcccggtgtccgggcgctcctcaggtccccgacacggaggcaggcttgggatgactgcaacctgctctcatgagtcacagcaggtgcctgtcgagacc

SEQ ID NO: 465060 - DNA, 62 bp, Homo sapiens; identical to SEQ ID NO: 355010
  chr12:131418430-131418492
  hypo
  lung vs. renal,anorectal

SEQ ID NO: 465061 - DNA, 504 bp, Homo sapiens; identical to SEQ ID NO: 380297
  chr12:131478681-131479185
  hypo
  lung vs. colorectal

SEQ ID NO: 465062 - DNA, 129 bp, Homo sapiens; identical to SEQ ID NO: 348587
  chr12:132222124-132222253
  hypo
  lung vs. lymphoid_neoplasm,multiple_myeloma,colorectal, prostate

SEQ ID NO: 465063 - DNA, 26 bp, Homo sapiens
  chr12:132423564-132423590
  hypo
  lung vs. melanoma
cgtgagccactatgcccggccctcca

SEQ ID NO: 465064 - DNA, 173 bp, Homo sapiens; identical to SEQ ID NO: 355019
  chr12:132423854-132424027
  hypo
  lung vs. melanoma

SEQ ID NO: 465065 - DNA, 160 bp, Homo sapiens; identical to SEQ ID NO: 458599
  chr12:132643296-132643456
  hypo
  lung vs. breast

SEQ ID NO: 465066 - DNA, 321 bp, Homo sapiens; identical to SEQ ID NO: 458600
  chr12:132643525-132643846
  hypo
  lung vs. breast

SEQ ID NO: 465067 - DNA, 92 bp, Homo sapiens; identical to SEQ ID NO: 366183
  chr12:132644008-132644100
  hypo
  lung vs. breast

SEQ ID NO: 465068 - DNA, 425 bp, Homo sapiens; identical to SEQ ID NO: 454711
  chr12:132665953-132666378
  hypo
  lung vs. colorectal

SEQ ID NO: 465069 - DNA, 86 bp, Homo sapiens; identical to SEQ ID NO: 366185
  chr12:132666502-132666588
  hypo
  lung vs. colorectal

SEQ ID NO: 465070 - DNA, 19 bp, Homo sapiens
  chr13:20392340-20392359
  hypo
  lung vs. cervical,colorectal,melanoma, pancreas_gallbladder,sarcoma,anorectal
cggtgggtgatttggggta

SEQ ID NO: 465071 - DNA, 261 bp, Homo sapiens; identical to SEQ ID NO: 355030
  chr13:20392445-20392706
  hypo
  lung vs. cervical,colorectal,melanoma, pancreas_gallbladder,sarcoma,anorectal

SEQ ID NO: 465072 - DNA, 168 bp, Homo sapiens; identical to SEQ ID NO: 462415
  chr13:20735265-20735433
  hypo
  lung vs. head_and_neck

SEQ ID NO: 465073 - DNA, 116 bp, Homo sapiens; identical to SEQ ID NO: 341718
  chr13:32983242-32983358
  hypo
  lung vs. liver_bileduct,melanoma

SEQ ID NO: 465074 - DNA, 23 bp, Homo sapiens
  chr13:46661423-46661446
  hypo
  lung vs. liver_bileduct
gcagcagccgctctagatgggcc

SEQ ID NO: 465075 - DNA, 82 bp, Homo sapiens; identical to SEQ ID NO: 341741
  chr13:52493838-52493920
  hypo
  lung vs. melanoma,renal,liver_bileduct

SEQ ID NO: 465076 - DNA, 9 bp, Homo sapiens
  chr13:95888846-95888855
  hypo
  lung vs. head_and_neck
cgcgtgcgc

SEQ ID NO: 465077 - DNA, 73 bp, Homo sapiens; identical to SEQ ID NO: 355060
  chr13:96409644-96409717
  hypo
  lung vs. pancreas_gallbladder,liver_bileduct

SEQ ID NO: 465078 - DNA, 141 bp, Homo sapiens; identical to SEQ ID NO: 341802
  chr13:112786406-112786547
  hypo
  lung vs. lymphoid_neoplasm

SEQ ID NO: 465079 - DNA, 35 bp, Homo sapiens
  chr13:113350364-113350399
  hypo
  lung vs. liver_bileduct,head_and_neck
cgtctcggctgacggctgcgtggccttggcaagtt

SEQ ID NO: 465080 - DNA, 647 bp, Homo sapiens; identical to SEQ ID NO: 366287
  chr13:113350643-113351290
  hypo
  lung vs. liver_bileduct,head_and_neck

SEQ ID NO: 465081 - DNA, 234 bp, Homo sapiens; identical to SEQ ID NO: 456475
  chr13:113400167-113400401
  hypo
  lung vs. liver_bileduct

SEQ ID NO: 465082 - DNA, 101 bp, Homo sapiens; identical to SEQ ID NO: 366292
  chr13:113400733-113400834
  hypo
  lung vs. liver_bileduct

SEQ ID NO: 465083 - DNA, 134 bp, Homo sapiens
  chr13:113424750-113424884
  hypo
  lung vs. liver_bileduct,pancreas_gallbladder
cgttaccatgagtgtgacgagagtggggagaaccagtggagcttctgatcctgtcccagcagatgccagtggctcggaccaaggaggacagagggatgggcgtgcccacgtgaagcctcaccccagaccccaga

SEQ ID NO: 465084 - DNA, 68 bp, Homo sapiens; identical to SEQ ID NO: 355086
  chr13:113424935-113425003
  hypo
  lung vs. liver_bileduct,pancreas_gallbladder

SEQ ID NO: 465085 - DNA, 288 bp, Homo sapiens; identical to SEQ ID NO: 366302
  chr13:113667314-113667602
  hypo
  lung vs. liver_bileduct

SEQ ID NO: 465086 - DNA, 45 bp, Homo sapiens; identical to SEQ ID NO: 454739
  chr13:113985425-113985470
  hypo
  lung vs. colorectal,cervical,melanoma

SEQ ID NO: 465087 - DNA, 131 bp, Homo sapiens
  chr13:114107410-114107541
  hypo
  lung vs. liver_bileduct
cggtatcaggtaacaccatccgctgaaggaccgcactgccttcaaagctctcggaggcttactgggagaactcgagcagccagtgttccctccagcccgcacaccggagcgcggtgggcccagcctacctg

SEQ ID NO: 465088 - DNA, 70 bp, Homo sapiens
  chr13:114108040-114108110
  hypo
  lung vs. liver_bileduct
ggggctcctctcgctgtccctggaaggagtgcgcacacttccccgtgtgtggcgtggggtgatgcgggag

SEQ ID NO: 465089 - DNA, 1 bp, Homo sapiens
  chr13:114108168-114108169
  hypo
  lung vs. liver_bileduct
c

SEQ ID NO: 465090 - DNA, 39 bp, Homo sapiens; identical to SEQ ID NO: 454743
  chr13:114188365-114188404
  hypo
  lung vs. liver_bileduct

SEQ ID NO: 465091 - DNA, 162 bp, Homo sapiens
  chr13:114271763-114271925
  hypo
  lung vs. melanoma
cgctcacctgcagaaccgttcacctgcagagcccttcacctgcagaaccgttcacctgcagagcccttcacctgcagaaccattcacctgcagagccgctcacctgcagaacccttcacctgcagagccgctcacctgcagagcccttcacctgcagaaccc

SEQ ID NO: 465092 - DNA, 932 bp, Homo sapiens; identical to SEQ ID NO: 366323
  chr13:114283923-114284855
  hypo
  lung vs. upper_gi

SEQ ID NO: 465093 - DNA, 206 bp, Homo sapiens; identical to SEQ ID NO: 348620
  chr13:114302352-114302558
  hypo
  lung vs. bladder_and_urothelial,lymphoid_neoplasm

SEQ ID NO: 465094 - DNA, 115 bp, Homo sapiens; identical to SEQ ID NO: 341851
  chr13:114302660-114302775
  hypo
  lung vs. liver_bileduct,upper_gi,colorectal

SEQ ID NO: 465095 - DNA, 284 bp, Homo sapiens; identical to SEQ ID NO: 366328
  chr13:114303512-114303796
  hypo
  lung vs. liver_bileduct,pancreas_gallbladder

SEQ ID NO: 465096 - DNA, 28 bp, Homo sapiens
  chr13:114305093-114305121
  hypo
  lung vs. melanoma,sarcoma,lymphoid_neoplasm, liver_bileduct,renal
ctgggaggcggcttgcttgtctgtactc

SEQ ID NO: 465097 - DNA, 4 bp, Homo sapiens
  chr13:114750972-114750976
  hypo
  lung vs. melanoma,head_and_neck
cgga

SEQ ID NO: 465098 - DNA, 308 bp, Homo sapiens
  chr13:114751053-114751361
  hypo
  lung vs. melanoma,head_and_neck
ccgtccagggcaggcacgggagtggcactcactggcttccatatttcgtcttcttgaacttgtccctcttatactgggcgtgctcctgctccaaagccccaaccccagcgatgacttgctttagcgtcttgtaggtctcctgggggtcgtcaatgacgaacgtcgaatactcctcctgctccgggccgtcatacacagatttgctcccacaggcctctgtggagggcggaggggtcagcgcagggcaggagcccaggccaccggccccgtctccacacagctgcgtcgctgcaggccccacccacagt

SEQ ID NO: 465099 - DNA, 2 bp, Homo sapiens
  chr13:114780539-114780541
  hypo
  lung vs. lymphoid_neoplasm
cg

SEQ ID NO: 465100 - DNA, 5 bp, Homo sapiens
  chr13:114961716-114961721
  hypo
  lung vs. breast,cervical,sarcoma,colorectal, head_and_neck,melanoma
cggat

SEQ ID NO: 465101 - DNA, 297 bp, Homo sapiens; identical to SEQ ID NO: 456486
  chr14:55765714-55766011
  hypo
  lung vs. liver_bileduct,melanoma,cervical,upper_gi, pancreas_gallbladder,lymphoid_neoplasm,head_and_neck,colorectal, anorectal,prostate,renal,bladder_and_urothelial, multiple_myeloma

SEQ ID NO: 465102 - DNA, 55 bp, Homo sapiens; identical to SEQ ID NO: 346085
  chr14:55766084-55766139
  hypo
  lung vs. liver_bileduct,melanoma,cervical,upper_gi, pancreas_gallbladder,lymphoid_neoplasm,head_and_neck,colorectal, anorectal,prostate,renal,bladder_and_urothelial, multiple_myeloma

SEQ ID NO: 465103 - DNA, 144 bp, Homo sapiens; identical to SEQ ID NO: 360441
  chr14:57265912-57266056
  hypo
  lung vs. multiple_myeloma,bladder_and_urothelial

SEQ ID NO: 465104 - DNA, 19 bp, Homo sapiens
  chr14:59014429-59014448
  hypo
  lung vs. pancreas_gallbladder
cgcaaagcataaagcacgt

SEQ ID NO: 465105 - DNA, 98 bp, Homo sapiens; identical to SEQ ID NO: 380564
  chr14:59014477-59014575
  hypo
  lung vs. pancreas_gallbladder

SEQ ID NO: 465106 - DNA, 30 bp, Homo sapiens; identical to SEQ ID NO: 460715
  chr14:60974092-60974122
  hypo
  lung vs. bladder_and_urothelial,multiple_myeloma

SEQ ID NO: 465107 - DNA, 277 bp, Homo sapiens; identical to SEQ ID NO: 460716
  chr14:60974092-60974369
  hypo
  lung vs. bladder_and_urothelial

SEQ ID NO: 465108 - DNA, 72 bp, Homo sapiens
  chr14:69245863-69245935
  hypo
  lung vs. breast
cgtgggctcttagaagctatgacacctgtaccaatagaaaaatcatccattcagtaggtaagtgcctgctga

SEQ ID NO: 465109 - DNA, 15 bp, Homo sapiens
  chr14:69245974-69245989
  hypo
  lung vs. breast
caggaggctgggcgc

SEQ ID NO: 465110 - DNA, 139 bp, Homo sapiens
  chr14:73146636-73146775
  hypo
  lung vs. breast,cervical,lymphoid_neoplasm,renal,uterine, pancreas_gallbladder,colorectal
cgacgtgccttccctgcagaatcaggagcaagcctcagctggaggccactgccacagcctgctacctcggcctagcctttaatgagggctgcgggaggagggagaggcgggctggggagacaaggcgcctgcgaggagc

SEQ ID NO: 465111 - DNA, 100 bp, Homo sapiens
  chr14:73147150-73147250
  hypo
cggggaagcagacagtagggcccgctccccacaggaccctccaatcgtcagagccctcgacggcagagaactcgctctccccacaggccatcttgccacc

SEQ ID NO: 465112 - DNA, 48 bp, Homo sapiens; identical to SEQ ID NO: 355141
  chr14:73167899-73167947
  hypo
  lung vs. breast,anorectal,renal,uterine,colorectal

SEQ ID NO: 465113 - DNA, 13 bp, Homo sapiens
  chr14:73175210-73175223
  hypo
  lung vs. renal,breast,lymphoid_neoplasm
gcctgaaggccgc

SEQ ID NO: 465114 - DNA, 148 bp, Homo sapiens; identical to SEQ ID NO: 355142
  chr14:73238412-73238560
  hypo

SEQ ID NO: 465115 - DNA, 16 bp, Homo sapiens
  chr14:73302728-73302744
  hypo
  lung vs. breast,uterine
accacacgggtgcctc

SEQ ID NO: 465116 - DNA, 67 bp, Homo sapiens; identical to SEQ ID NO: 366426
  chr14:89657793-89657860
  hypo
  lung vs. lymphoid_neoplasm

SEQ ID NO: 465117 - DNA, 166 bp, Homo sapiens
  chr14:89895069-89895235
  hypo
  lung vs. liver_bileduct
cgcagcagacgtcagagagacctcagcgcaggggtccaagcacctggccaaggcaccctgcgcaggcctccacgccccacgagtgcctgcagaggctacctgaggaccaaggtgggcatgccacggtgtcctggacttctggatggaggccagtcccagggagtga

SEQ ID NO: 465118 - DNA, 486 bp, Homo sapiens; identical to SEQ ID NO: 457545
  chr14:90085312-90085798
  hypo
  lung vs. upper_gi

SEQ ID NO: 465119 - DNA, 153 bp, Homo sapiens; identical to SEQ ID NO: 366432
  chr14:90754255-90754408
  hypo
  lung vs. head_and_neck

SEQ ID NO: 465120 - DNA, 136 bp, Homo sapiens; identical to SEQ ID NO: 341990
  chr14:90871545-90871681
  hypo
  lung vs. breast

SEQ ID NO: 465121 - DNA, 98 bp, Homo sapiens
  chr14:91691066-91691164
  hypo
  lung vs. pancreas_gallbladder,head_and_neck,upper_gi
cggagtggcgtctcgggcatcgtgggcatggaggtggatgggctgcccttccacaacacccacgccgagatgatccagaagctggtggacgtcaccac

SEQ ID NO: 465122 - DNA, 160 bp, Homo sapiens; identical to SEQ ID NO: 454771
  chr14:93154728-93154888
  hypo
  lung vs. breast,melanoma,lymphoid_neoplasm

SEQ ID NO: 465123 - DNA, 70 bp, Homo sapiens; identical to SEQ ID NO: 355170
  chr14:94603670-94603740
  hypo
  lung vs. liver_bileduct,pancreas_gallbladder,upper_gi, head_and_neck,cervical

SEQ ID NO: 465124 - DNA, 11 bp, Homo sapiens
  chr14:100148278-100148289
  hypo
  lung vs. renal
cgcacgcagac

SEQ ID NO: 465125 - DNA, 64 bp, Homo sapiens; identical to SEQ ID NO: 464213
  chr14:100613205-100613269
  hypo

SEQ ID NO: 465126 - DNA, 206 bp, Homo sapiens; identical to SEQ ID NO: 456496
  chr14:100749240-100749446
  hypo
  lung vs. liver_bileduct,colorectal

SEQ ID NO: 465127 - DNA, 137 bp, Homo sapiens; identical to SEQ ID NO: 355178
  chr14:100749475-100749612
  hypo
  lung vs. liver_bileduct,colorectal

SEQ ID NO: 465128 - DNA, 21 bp, Homo sapiens
  chr14:101250330-101250351
  hypo
  lung vs. breast,pancreas_gallbladder
caggctgcatgatgtcatttc

SEQ ID NO: 465129 - DNA, 265 bp, Homo sapiens; identical to SEQ ID NO: 366474
  chr14:102467362-102467627
  hypo
  lung vs. head_and_neck

SEQ ID NO: 465130 - DNA, 17 bp, Homo sapiens
  chr14:102682061-102682078
  hypo
  lung vs. upper_gi
cgtgaggttgtcctgct

SEQ ID NO: 465131 - DNA, 37 bp, Homo sapiens
  chr14:103977769-103977806
  hypo
  lung vs. liver_bileduct
cgggacgctcacagcccgcccccaggacctgtggggg

SEQ ID NO: 465132 - DNA, 89 bp, Homo sapiens
  chr14:103977835-103977924
  hypo
  lung vs. liver_bileduct
ctccgcgtgcacatgggcctccttaccaccctggcagtctcctcctcttggaagttttaactattcaagactcaatggccaggcgcggc

SEQ ID NO: 465133 - DNA, 281 bp, Homo sapiens
  chr14:104194172-104194453
  hypo
  lung vs. head_and_neck
cggcagtgcgcggagtgcgccctcgtgtccctcaaggaggcggagttctacgacaagcagctcaaagtgctcctgagcggtaaggacgggtgtcctgcacagtcccgcgcgctccgccagccggctcctcgtgtctgtggcgatgctgtgggctgtgcacggggcgttctgcttctctgacgttctctcgccctccctcccttccccgttttcttctggattcgtttagaagcggttatagagccttcccttcttttcagaggcggaatgtcgtctaaaat

SEQ ID NO: 465134 - DNA, 205 bp, Homo sapiens
  chr14:104194491-104194696
  hypo
  lung vs. head_and_neck
aggggaggccctgggcccaggcagcaccttcctccttcccccgggtggaacccggcgccggcgctcgggcgtttgcaaccactgtggctcctcggaggggccggagacctttgcccaatagcacgatgcagacccggttttgagccatctctggggacctggtgtgggagaagggcattctccaggggcatagggtgtgcctccc

SEQ ID NO: 465135 - DNA, 90 bp, Homo sapiens; identical to SEQ ID NO: 355204
  chr14:104194750-104194840
  hypo
  lung vs. head_and_neck

SEQ ID NO: 465136 - DNA, 140 bp, Homo sapiens; identical to SEQ ID NO: 454790
  chr14:104641166-104641306
  hypo

SEQ ID NO: 465137 - DNA, 423 bp, Homo sapiens
  chr14:105689521-105689944
  hypo
  lung vs. breast,lymphoid_neoplasm,liver_bileduct, prostate
cgtctcaaaaacaacaaaaaaagacatacacacttgcctttcacataacccagcaatttcactcctcagcaattgacccaaaaggaaatcaacgtccacacaaggacttgtacacgagtgttcacgagcgcatctgaaacagcctcaaacgtgcaatgtcctctaacagatgaatggctacacaccctcagcgtgctgaaggactaccgactgccacacaatacaaacgaacaaaccattgatgcgtgactcaacacacaccctcagcgtgctgaaggactaccgactgccacgccacaacacaaatgagcaaaccattgatgcgtgactcaacataattacactgtgaaaaaagccgaagggaaaaacatatactatgtgatcctactcctacggaattctacagaatacaactaatttatc

SEQ ID NO: 465138 - DNA, 174 bp, Homo sapiens; identical to SEQ ID NO: 456510
  chr14:105739056-105739230
  hypo
  lung vs. melanoma

SEQ ID NO: 465139 - DNA, 418 bp, Homo sapiens; identical to SEQ ID NO: 342118
  chr15:22927774-22928192
  hypo
  lung vs. liver_bileduct

SEQ ID NO: 465140 - DNA, 286 bp, Homo sapiens
  chr15:31220905-31221191
  hypo
  lung vs. liver_bileduct
cgtggctcacgcccacctgggcaccgtgtgtccacagccagcagaaaccatctctgttacggtcctttgggtcatccacaggtcaagatgataacttattttaaaaatctgagtaatagaatttaagatgtaagtatgtgaagttttaaactttaatttagcctccaccttacatttagacctttcgtataaagtaccatcagcatcagccctcccgagcacctgccgtgtcgcaggcactgtgccaaggagctcacagacatgggcacatctgcctgttcagagg

SEQ ID NO: 465141 - DNA, 94 bp, Homo sapiens; identical to SEQ ID NO: 380772
  chr15:31221220-31221314
  hypo
  lung vs. liver_bileduct

SEQ ID NO: 465142 - DNA, 74 bp, Homo sapiens; identical to SEQ ID NO: 342139
  chr15:31731229-31731303
  hypo
  lung vs. liver_bileduct

SEQ ID NO: 465143 - DNA, 234 bp, Homo sapiens; identical to SEQ ID NO: 355246
  chr15:43020360-43020594
  hypo
  lung vs. pancreas_gallbladder,head_and_neck,upper_gi, liver_bileduct

SEQ ID NO: 465144 - DNA, 205 bp, Homo sapiens; identical to SEQ ID NO: 360624
  chr15:45479833-45480038
  hypo
  lung vs. ovary

SEQ ID NO: 465145 - DNA, 144 bp, Homo sapiens
  chr15:48666272-48666416
  hypo
  lung vs. breast
cgccatgcttgcttttcccccactacctccctcctcctccccatttctccccagacagattgtgaagtctctttgcttggtccactccctgcctgtctccaatcctctgattgcttcaccttcccccggctgccattatctgtc

SEQ ID NO: 465146 - DNA, 35 bp, Homo sapiens; identical to SEQ ID NO: 464227
  chr15:60288752-60288787
  hypo
  lung vs. colorectal

SEQ ID NO: 465147 - DNA, 129 bp, Homo sapiens; identical to SEQ ID NO: 342192
  chr15:61931851-61931980
  hypo
  lung vs. pancreas_gallbladder

SEQ ID NO: 465148 - DNA, 351 bp, Homo sapiens; identical to SEQ ID NO: 452903
  chr15:63795501-63795852
  hypo
  lung vs. upper_gi,liver_bileduct,pancreas_gallbladder, colorectal,bladder_and_urothelial

SEQ ID NO: 465149 - DNA, 338 bp, Homo sapiens; identical to SEQ ID NO: 347348
  chr15:63795894-63796232
  hypo
  lung vs. upper_gi,liver_bileduct,pancreas_gallbladder, colorectal,bladder_and_urothelial

SEQ ID NO: 465150 - DNA, 1 bp, Homo sapiens
  chr15:67545486-67545487
  hypo
  lung vs. lymphoid_neoplasm,sarcoma
c

SEQ ID NO: 465151 - DNA, 1 bp, Homo sapiens
  chr15:78596272-78596273
  hypo
  lung vs. lymphoid_neoplasm
c

SEQ ID NO: 465152 - DNA, 247 bp, Homo sapiens; identical to SEQ ID NO: 342318
  chr15:101938625-101938872
  hypo
  lung vs. liver_bileduct

SEQ ID NO: 465153 - DNA, 180 bp, Homo sapiens
  chr16:142447-142627
  hypo
  lung vs. upper_gi,breast,colorectal,prostate
cgtagcacttgcacggcaagcccccaaaaccaaggagaagcaggtggcagtgctgagggctctcagatcagaaccaacagccaggcaggtagtgcctatccactacacacctgccactctgggctccttgagcttctgtgactcacctcctgcacagcgggggccaggggattcctaaat

SEQ ID NO: 465154 - DNA, 9 bp, Homo sapiens
  chr16:323599-323608
  hypo
  lung vs. melanoma
agcccctcc

SEQ ID NO: 465155 - DNA, 101 bp, Homo sapiens; identical to SEQ ID NO: 454819
  chr16:410895-410996
  hypo
  lung vs. renal,lymphoid_neoplasm

SEQ ID NO: 465156 - DNA, 111 bp, Homo sapiens; identical to SEQ ID NO: 346109
  chr16:411606-411717
  hypo
  lung vs. renal,lymphoid_neoplasm

SEQ ID NO: 465157 - DNA, 151 bp, Homo sapiens; identical to SEQ ID NO: 454821
  chr16:611800-611951
  hypo
  lung vs. prostate,lymphoid_neoplasm,breast,renal,thyroid, myeloid_neoplasm

SEQ ID NO: 465158 - DNA, 83 bp, Homo sapiens; identical to SEQ ID NO: 355329
  chr16:612320-612403
  hypo
  lung vs. prostate,lymphoid_neoplasm,breast,renal,thyroid, myeloid_neoplasm

SEQ ID NO: 465159 - DNA, 5 bp, Homo sapiens
  chr16:666708-666713
  hypo
  lung vs. liver_bileduct,head_and_neck, bladder_and_urothelial,melanoma,lymphoid_neoplasm,cervical, anorectal,renal,breast,pancreas_gallbladder,uterine,sarcoma, upper_gi,ovary
cgaga

SEQ ID NO: 465160 - DNA, 78 bp, Homo sapiens
  chr16:667407-667485
  hypo
  lung vs. liver_bileduct,head_and_neck, bladder_and_urothelial,melanoma,lymphoid_neoplasm,cervical, anorectal,renal,breast,pancreas_gallbladder,uterine,sarcoma, upper_gi,ovary
agaatggattttactccaacaggaaaaagacagtctgggacactgtgtccctagagatcgcggctcccctcctgcccc

SEQ ID NO: 465161 - DNA, 3 bp, Homo sapiens
  chr16:667874-667877
  hypo
  lung vs. liver_bileduct,pancreas_gallbladder, bladder_and_urothelial,upper_gi,colorectal,melanoma
cgt

SEQ ID NO: 465162 - DNA, 200 bp, Homo sapiens; identical to SEQ ID NO: 346112
  chr16:668074-668274
  hypo
  lung vs. liver_bileduct,pancreas_gallbladder, bladder_and_urothelial,upper_gi,colorectal,melanoma

SEQ ID NO: 465163 - DNA, 71 bp, Homo sapiens
  chr16:677367-677438
  hypo
  lung vs. head_and_neck,colorectal
cgggccatcgtctcctgcacccccgtgcacctcatcgacaagcttccactgcccgtcaccatcaagagcca

SEQ ID NO: 465164 - DNA, 20 bp, Homo sapiens
  chr16:677467-677487
  hypo
  lung vs. head_and_neck,colorectal
tgaacgcggtcatgatgcac

SEQ ID NO: 465165 - DNA, 35 bp, Homo sapiens
  chr16:677803-677838
  hypo
  lung vs. breast,colorectal,bladder_and_urothelial, upper_gi,liver_bileduct,lymphoid_neoplasm,pancreas_gallbladder
cgggaggagggggcgcggctgggctgctggtgctt

SEQ ID NO: 465166 - DNA, 64 bp, Homo sapiens
  chr16:677909-677973
  hypo
  lung vs. breast,colorectal,bladder_and_urothelial, upper_gi,liver_bileduct,lymphoid_neoplasm,pancreas_gallbladder
gcctttcttatttatatagagaacacttcacttttttgtacatttttaaggggccttcagggaa

SEQ ID NO: 465167 - DNA, 106 bp, Homo sapiens; identical to SEQ ID NO: 348690
  chr16:678084-678190
  hypo
  lung vs. breast,colorectal,bladder_and_urothelial, upper_gi,liver_bileduct,lymphoid_neoplasm,pancreas_gallbladder

SEQ ID NO: 465168 - DNA, 341 bp, Homo sapiens; identical to SEQ ID NO: 355339
  chr16:810054-810395
  hypo
  lung vs. melanoma,lymphoid_neoplasm,renal,prostate

SEQ ID NO: 465169 - DNA, 26 bp, Homo sapiens
  chr16:943646-943672
  hypo
  lung vs. breast
aggtgggacttgggcagagaggctgc

SEQ ID NO: 465170 - DNA, 259 bp, Homo sapiens
  chr16:981471-981730
  hypo
  lung vs. head_and_neck
cgcacacgcggctcggatgagctgaggaacgcacgcacaaactgcattctcccaggccgtcccgaacgaggccacaggaaaggagcctccccagaggtctcagatcaggaagcctgaccttccagtgcctttggtctaggtgttctgaggcccagcacccggagtcatacctcagtaactggcagctctatgttctccaagatcagggaagggaagacagttcaaagacgcatggctgctcggaaggcagggagagcac

SEQ ID NO: 465171 - DNA, 227 bp, Homo sapiens
  chr16:981843-982070
  hypo
  lung vs. head_and_neck
ggaaaacattaacattaatgagtcaacaattcgcttctgagtccctacaattaccacctgctaccgaagaatcagttagaatgtatgacgctcacctgaaaacacccagggagacacaaacgcagaagactgacttccctgggctgggagcgcaagcgcagcccccgacggcggccacacaggctcacgtcccaccccccatgcagaccccgttgcttttgcttcag

SEQ ID NO: 465172 - DNA, 278 bp, Homo sapiens; identical to SEQ ID NO: 355343
  chr16:982099-982377
  hypo
  lung vs. head_and_neck

SEQ ID NO: 465173 - DNA, 21 bp, Homo sapiens
  chr16:1218140-1218161
  hypo
  lung vs. renal
agggcggcctctggtgccccc

SEQ ID NO: 465174 - DNA, 37 bp, Homo sapiens
  chr16:1407334-1407371
  hypo
  lung vs. lymphoid_neoplasm
cgggccagcaccccagaggtctcagtggcattagcct

SEQ ID NO: 465175 - DNA, 13 bp, Homo sapiens
  chr16:1407518-1407531
  hypo
  lung vs. lymphoid_neoplasm
gtgtcgctgtgtc

SEQ ID NO: 465176 - DNA, 195 bp, Homo sapiens; identical to SEQ ID NO: 456532
  chr16:1730112-1730307
  hypo
  lung vs. melanoma

SEQ ID NO: 465177 - DNA, 105 bp, Homo sapiens; identical to SEQ ID NO: 346116
  chr16:1730761-1730866
  hypo
  lung vs. melanoma

SEQ ID NO: 465178 - DNA, 1 bp, Homo sapiens
  chr16:2029207-2029208
  hypo
  lung vs. melanoma,lymphoid_neoplasm,sarcoma,renal, prostate,multiple_myeloma,uterine
c

SEQ ID NO: 465179 - DNA, 48 bp, Homo sapiens; identical to SEQ ID NO: 345484
  chr16:2042503-2042551
  hypo
  lung vs. non_cancer,anorectal,thyroid,myeloid_neoplasm, head_and_neck,cervical

SEQ ID NO: 465180 - DNA, 97 bp, Homo sapiens; identical to SEQ ID NO: 462498
  chr16:2042503-2042600
  hypo
  lung vs. head_and_neck

SEQ ID NO: 465181 - DNA, 226 bp, Homo sapiens; identical to SEQ ID NO: 360772
  chr16:2042617-2042843
  hypo
  lung vs. head_and_neck

SEQ ID NO: 465182 - DNA, 68 bp, Homo sapiens
  chr16:2106533-2106601
  hypo
  lung vs. upper_gi
cggggagaggtggcagcgcaggctgaaggaggtgggaaggaagcctgggtgtcctctcctgtggggag

SEQ ID NO: 465183 - DNA, 63 bp, Homo sapiens
  chr16:2106641-2106704
  hypo
  lung vs. upper_gi
caggtctccctgcaggtgctggacgccgtggtctgctacaactgcctgccggctgagagcctc

SEQ ID NO: 465184 - DNA, 23 bp, Homo sapiens
  chr16:2106732-2106755
  hypo
  lung vs. upper_gi
ccatcaacgtcaaggagctctgc

SEQ ID NO: 465185 - DNA, 389 bp, Homo sapiens; identical to SEQ ID NO: 453689
  chr16:2280815-2281204
  hypo
  lung vs. colorectal,breast,upper_gi,pancreas_gallbladder, liver_bileduct

SEQ ID NO: 465186 - DNA, 238 bp, Homo sapiens; identical to SEQ ID NO: 453690
  chr16:2281402-2281640
  hypo
  lung vs. colorectal,breast,upper_gi,pancreas_gallbladder, liver_bileduct

SEQ ID NO: 465187 - DNA, 61 bp, Homo sapiens; identical to SEQ ID NO: 346128
  chr16:2281702-2281763
  hypo
  lung vs. colorectal,breast,upper_gi,pancreas_gallbladder, liver_bileduct

SEQ ID NO: 465188 - DNA, 41 bp, Homo sapiens
  chr16:2497839-2497880
  hypo
  lung vs. head_and_neck
cgctgggctctcattggccactgacatcttgtctttttggc

SEQ ID NO: 465189 - DNA, 76 bp, Homo sapiens; identical to SEQ ID NO: 366800
  chr16:2498053-2498129
  hypo
  lung vs. head_and_neck

SEQ ID NO: 465190 - DNA, 39 bp, Homo sapiens
  chr16:2531031-2531070
  hypo
  lung vs. melanoma
cgctgtctctatcccttctgaggctaaggcttcctcaca

SEQ ID NO: 465191 - DNA, 34 bp, Homo sapiens
  chr16:2531177-2531211
  hypo
  lung vs. melanoma
ccatgcctctgtactcctctgcactcaggtacct

SEQ ID NO: 465192 - DNA, 42 bp, Homo sapiens; identical to SEQ ID NO: 381073
  chr16:2531240-2531282
  hypo
  lung vs. melanoma

SEQ ID NO: 465193 - DNA, 395 bp, Homo sapiens
  chr16:2540434-2540829
  hypo
  lung vs. head_and_neck
cgagcagcgattcgctcggaccccagaggccacaggaagatggcttcccccacaggaggcaccctcacagggccctgctggcactgtctgccttgggctgcctgaacccggagagagagtgggatagactgttcatggggtgtcacccttatgtcacctgcaccccaccctgtcagtccagagtgaggctcaacccacaggggttgcttgggaactgttgcccgtgaggagttgggtgttattatcggctccgctctgcagacatggcaaccgcaggttagggaagatgcacggcttgtccgcatttcaagcaaacaagtggcagagctggactttgtggccaggcctgtctaactgcaaagctgccccgtttccacagtagcccctgcctcccc

SEQ ID NO: 465194 - DNA, 60 bp, Homo sapiens; identical to SEQ ID NO: 346131
  chr16:2540933-2540993
  hypo
  lung vs. head_and_neck

SEQ ID NO: 465195 - DNA, 50 bp, Homo sapiens; identical to SEQ ID NO: 454827
  chr16:2770043-2770093
  hypo
  lung vs. melanoma,renal,sarcoma

SEQ ID NO: 465196 - DNA, 48 bp, Homo sapiens; identical to SEQ ID NO: 454828
  chr16:2849309-2849357
  hypo
  lung vs. head_and_neck

SEQ ID NO: 465197 - DNA, 17 bp, Homo sapiens
  chr16:2849623-2849640
  hypo
  lung vs. head_and_neck
cctctacccctgttccc

SEQ ID NO: 465198 - DNA, 53 bp, Homo sapiens
  chr16:3139033-3139086
  hypo
  lung vs. breast,sarcoma,renal,bladder_and_urothelial, pancreas_gallbladder,cervical,lymphoid_neoplasm,prostate
cgctgtggaggaccccgggtaggtggcgcagggcgcggctggcggaaggcggg

SEQ ID NO: 465199 - DNA, 608 bp, Homo sapiens; identical to SEQ ID NO: 348722
  chr16:3139367-3139975
  hypo
  lung vs. breast,sarcoma,renal,bladder_and_urothelial, pancreas_gallbladder,cervical,lymphoid_neoplasm,prostate

SEQ ID NO: 465200 - DNA, 204 bp, Homo sapiens
  chr16:3696491-3696695
  hypo
  lung vs. sarcoma,lymphoid_neoplasm,melanoma,cervical, uterine
cgggtgtaggggttgggtggggagaggatgtcctctgaaaaggtgacatttaagctgaaactggaatgacaagaaggccccagctctgcaggcagagcggaaggctcagagcttagaatcacgtaggtcatggaaagcattggatttcgtgttagggacaatgagaaactggtgacagattttaagtaggggaataaagagatc

SEQ ID NO: 465201 - DNA, 62 bp, Homo sapiens; identical to SEQ ID NO: 348724
  chr16:3696802-3696864
  hypo
  lung vs. sarcoma,lymphoid_neoplasm,melanoma,cervical, uterine

SEQ ID NO: 465202 - DNA, 3 bp, Homo sapiens
  chr16:4395355-4395358
  hypo
cgt

SEQ ID NO: 465203 - DNA, 161 bp, Homo sapiens; identical to SEQ ID NO: 456550
  chr16:4845976-4846137
  hypo
  lung vs. melanoma,sarcoma,renal

SEQ ID NO: 465204 - DNA, 167 bp, Homo sapiens
  chr16:4931957-4932124
  hypo
  lung vs. colorectal
cgtaccattgcgcgtgcagctggagcagaataccctcatttttaggaatctagtgatgcctcttgcctcagggaaacgtttctttgatggggagtttgagatttcttttccttgtttatgctttatttgtggtaatgaaagagcgaatgactgaacagccatggcaa

SEQ ID NO: 465205 - DNA, 126 bp, Homo sapiens; identical to SEQ ID NO: 366846
  chr16:4932153-4932279
  hypo
  lung vs. colorectal

SEQ ID NO: 465206 - DNA, 147 bp, Homo sapiens; identical to SEQ ID NO: 456554
  chr16:12132253-12132400
  hypo
  lung vs. colorectal

SEQ ID NO: 465207 - DNA, 376 bp, Homo sapiens; identical to SEQ ID NO: 355427
  chr16:12132450-12132826
  hypo
  lung vs. colorectal

SEQ ID NO: 465208 - DNA, 10 bp, Homo sapiens
  chr16:23846783-23846793
  hypo
  lung vs. non_cancer,myeloid_neoplasm,thyroid,melanoma
cgctcctccc

SEQ ID NO: 465209 - DNA, 713 bp, Homo sapiens; identical to SEQ ID NO: 342529
  chr16:24837143-24837856
  hypo
  lung vs. liver_bileduct,colorectal,upper_gi

SEQ ID NO: 465210 - DNA, 24 bp, Homo sapiens
  chr16:28878657-28878681
  hypo
  lung vs. liver_bileduct
cggccccgactcagcatcccctgc

SEQ ID NO: 465211 - DNA, 31 bp, Homo sapiens; identical to SEQ ID NO: 456564
  chr16:29153254-29153285
  hypo
  lung vs. melanoma

SEQ ID NO: 465212 - DNA, 55 bp, Homo sapiens; identical to SEQ ID NO: 456565
  chr16:29153320-29153375
  hypo
  lung vs. melanoma

SEQ ID NO: 465213 - DNA, 173 bp, Homo sapiens; identical to SEQ ID NO: 342548
  chr16:29857096-29857269
  hypo
  lung vs. pancreas_gallbladder

SEQ ID NO: 465214 - DNA, 61 bp, Homo sapiens; identical to SEQ ID NO: 458681
  chr16:30017168-30017229
  hypo
  lung vs. lymphoid_neoplasm,sarcoma

SEQ ID NO: 465215 - DNA, 42 bp, Homo sapiens; identical to SEQ ID NO: 366899
  chr16:30017858-30017900
  hypo
  lung vs. lymphoid_neoplasm,sarcoma

SEQ ID NO: 465216 - DNA, 76 bp, Homo sapiens
  chr16:30354637-30354713
  hypo
  lung vs. upper_gi,pancreas_gallbladder,colorectal, melanoma,sarcoma
cgatgccaccaaggcatcaggtgagtgccagctggggctcgaggactttctcctctccgctccctgttctgggagc

SEQ ID NO: 465217 - DNA, 70 bp, Homo sapiens; identical to SEQ ID NO: 355447
  chr16:30354742-30354812
  hypo
  lung vs. upper_gi,pancreas_gallbladder,colorectal, melanoma,sarcoma

SEQ ID NO: 465218 - DNA, 240 bp, Homo sapiens; identical to SEQ ID NO: 342561
  chr16:30991726-30991966
  hypo
  lung vs. liver_bileduct

SEQ ID NO: 465219 - DNA, 201 bp, Homo sapiens; identical to SEQ ID NO: 456569
  chr16:31138407-31138608
  hypo
  lung vs. liver_bileduct,upper_gi,melanoma,colorectal, bladder_and_urothelial

SEQ ID NO: 465220 - DNA, 11 bp, Homo sapiens
  chr16:48642138-48642149
  hypo
  lung vs. sarcoma,melanoma
ctcctgatctc

SEQ ID NO: 465221 - DNA, 257 bp, Homo sapiens; identical to SEQ ID NO: 366919
  chr16:53563654-53563911
  hypo
  lung vs. anorectal

SEQ ID NO: 465222 - DNA, 887 bp, Homo sapiens
  chr16:58030214-58031101
  hypo
  lung vs. upper_gi,head_and_neck,liver_bileduct, pancreas_gallbladder
cgcccgcactgcccgctggtgccaggagtacgagcggcacaccctctccctgcctcatacccctgcgtcctcactcccgaggtctcagaacaccgagctgggtggggcccttggtgcaaggcagctgtgaggagctaggctgcgcgaggcctgctgggcccacggcgccgactcaggtcaggctggtaggggccacagccgcagagtcagggcaggcaggcggctacctggtaggcgccctccgctgccgcggcggcggcactgtgctgcgcgctgtgctcctgcaacaaggccacgtctaggaagcgctccccgcaccatacacacttgaactgctgctcgcgggcgtgcacgccctggtgcttgttgagatgctcccgctgcttgaaggccttgtcgcagttggggcacttgtagggcttctcgcctgtgtgtacccgccggtgccgctgcaggtctgacgcgtacttgaagcgtttctcgcagtctgggcacttgagtggcttctcgcgggccggatcgcagcggtgctgcacgaactcggaagaggagaagaagcggcgttcgcaaagcgtgcagcgcaggggcttctctgccgccgcacagtgggccagctggtgcttctgcagggccgacgcgcgcttgtaggccttgttgcacacagggcacttgaagggccgctcggccgcgccgggcaggcacttgtgccgcagcagctcggcagattggtcaaagcctttctggcacacggggcacttgaagagagtctcgagggtgtgcacgtgctggtggtagagcaggtggctgggctgcccaaagcccttctcacataggccgcatttgaagggctcctcggtcttgtgtgtgcgccggtggcgcatcagtgc

SEQ ID NO: 465223 - DNA, 876 bp, Homo sapiens
  chr16:58030638-58031514
  hypo
  lung vs. head_and_neck,liver_bileduct,upper_gi, pancreas_gallbladder
cgcctgtgtgtacccgccggtgccgctgcaggtctgacgcgtacttgaagcgtttctcgcagtctgggcacttgagtggcttctcgcgggccggatcgcagcggtgctgcacgaactcggaagaggagaagaagcggcgttcgcaaagcgtgcagcgcaggggcttctctgccgccgcacagtgggccagctggtgcttctgcagggccgacgcgcgcttgtaggccttgttgcacacagggcacttgaagggccgctcggccgcgccgggcaggcacttgtgccgcagcagctcggcagattggtcaaagcctttctggcacacggggcacttgaagagagtctcgagggtgtgcacgtgctggtggtagagcaggtggctgggctgcccaaagcccttctcacataggccgcatttgaagggctcctcggtcttgtgtgtgcgccggtggcgcatcagtgcgtactgctgcttgaagcccatggggcacaggtcgcacttgaagggccgctcggcgctgtgtgtgcgctcatgctgccgcaggtccgagggccgcttgaaggccttctggcactcgccgcagcggaagggccgctccccacttggcgtgcacgggtgctgcagcagctccgacgactccttgaaatgcaactcgcacacgttgcagcggaacaggtggtgctcgcccgagtgcgcgtacatgtggcgcaccaggtgagagcggtgcttgaaggtcttctcgcagactgcgcacttgtagggccgctcggagctgtgcgtgcgcttgtggtgcaccaggtgcgacgactggctgaagcttttgtcacacagcgtgcacttgtagggcttctcaccggtgtggatccgctcatgcc

SEQ ID NO: 465224 - DNA, 65 bp, Homo sapiens
  chr16:67241539-67241604
  hypo
  lung vs. lymphoid_neoplasm
cgaagcgggactggacacaggacacctggggcagctgggcttggaagcgtctgacggcggccatg

SEQ ID NO: 465225 - DNA, 218 bp, Homo sapiens
  chr16:69352349-69352567
  hypo
  lung vs. head_and_neck
tttgctgggggggtcctgaagtgagctgctgagagcattggcccaaatgtccctgaagtacttgcttgagtcacacggcactgttaagccaggaaggcttcgttccttaaccagtgtgcaggcagcggagcctggacttgctgggagcacctctgtgctccaggctgaagggccagcttgtgactttccgtctcccttcccagcagtgacagtgacag

SEQ ID NO: 465226 - DNA, 378 bp, Homo sapiens; identical to SEQ ID NO: 366957
  chr16:69352596-69352974
  hypo
  lung vs. head_and_neck

SEQ ID NO: 465227 - DNA, 364 bp, Homo sapiens; identical to SEQ ID NO: 342631
  chr16:70754664-70755028
  hypo
  lung vs. liver_bileduct,upper_gi,head_and_neck

SEQ ID NO: 465228 - DNA, 234 bp, Homo sapiens; identical to SEQ ID NO: 342643
  chr16:74908874-74909108
  hypo
  lung vs. sarcoma

SEQ ID NO: 465229 - DNA, 205 bp, Homo sapiens; identical to SEQ ID NO: 457590
  chr16:77247511-77247716
  hypo
  lung vs. lymphoid_neoplasm

SEQ ID NO: 465230 - DNA, 78 bp, Homo sapiens; identical to SEQ ID NO: 456577
  chr16:81632835-81632913
  hypo
  lung vs. melanoma,lymphoid_neoplasm,colorectal,renal

SEQ ID NO: 465231 - DNA, 108 bp, Homo sapiens; identical to SEQ ID NO: 342671
  chr16:81688971-81689079
  hypo
  lung vs. head_and_neck

SEQ ID NO: 465232 - DNA, 385 bp, Homo sapiens; identical to SEQ ID NO: 342674
  chr16:81703552-81703937
  hypo
  lung vs. upper_gi,liver_bileduct

SEQ ID NO: 465233 - DNA, 97 bp, Homo sapiens
  chr16:84483346-84483443
  hypo
cgtgggtggcagctgcttttgtcatggttgatacgaccaagccattcagtagctccctgttcttgtcacatcacgcctctgctgacgaaatggctca

SEQ ID NO: 465234 - DNA, 251 bp, Homo sapiens; identical to SEQ ID NO: 367003
  chr16:84483472-84483723
  hypo

SEQ ID NO: 465235 - DNA, 52 bp, Homo sapiens; identical to SEQ ID NO: 460133
  chr16:85485696-85485748
  hypo

SEQ ID NO: 465236 - DNA, 91 bp, Homo sapiens; identical to SEQ ID NO: 381338
  chr16:85485855-85485946
  hypo

SEQ ID NO: 465237 - DNA, 50 bp, Homo sapiens
  chr16:85517169-85517219
  hypo
  lung vs. head_and_neck,renal,breast,cervical,sarcoma, anorectal
cgatgcccaggcccccggccactgtctccgccctcttggtaggccctgtg

SEQ ID NO: 465238 - DNA, 137 bp, Homo sapiens; identical to SEQ ID NO: 355510
  chr16:85517620-85517757
  hypo
  lung vs. head_and_neck,renal,breast,cervical,sarcoma, anorectal

SEQ ID NO: 465239 - DNA, 67 bp, Homo sapiens
  chr16:85617682-85617749
  hypo
  lung vs. liver_bileduct
cgcatggggacggggacacaggctcgccagctgcacagcccgcagactggccttgggtctttgtgtg

SEQ ID NO: 465240 - DNA, 143 bp, Homo sapiens; identical to SEQ ID NO: 342702
  chr16:85618063-85618206
  hypo
  lung vs. liver_bileduct

SEQ ID NO: 465241 - DNA, 357 bp, Homo sapiens; identical to SEQ ID NO: 454853
  chr16:85673482-85673839
  hypo

SEQ ID NO: 465242 - DNA, 238 bp, Homo sapiens; identical to SEQ ID NO: 454854
  chr16:85673886-85674124
  hypo

SEQ ID NO: 465243 - DNA, 140 bp, Homo sapiens; identical to SEQ ID NO: 355517
  chr16:85674334-85674474
  hypo

SEQ ID NO: 465244 - DNA, 178 bp, Homo sapiens; identical to SEQ ID NO: 452923
  chr16:85932121-85932299
  hypo
  lung vs. colorectal,upper_gi,lymphoid_neoplasm, pancreas_gallbladder,thyroid,non_cancer

SEQ ID NO: 465245 - DNA, 199 bp, Homo sapiens; identical to SEQ ID NO: 342730
  chr16:87776441-87776640
  hypo
  lung vs. upper_gi

SEQ ID NO: 465246 - DNA, 184 bp, Homo sapiens; identical to SEQ ID NO: 367056
  chr16:88512691-88512875
  hypo
  lung vs. renal,prostate

SEQ ID NO: 465247 - DNA, 518 bp, Homo sapiens
  chr16:88792758-88793276
  hypo
  lung vs. pancreas_gallbladder
cgcggcgctgcagcagcaggaagaagaagcagacgctgtcccagatgatgccagcctcctccacaggcagcaggcagtcctggtctctgtccatcatctccttggctgcaaggcaggcaccggcaagggtcaggcccagggcccaggagcagggggcttccccacgccctcccccgccaccgtcctggccactcacggtcatagtagcccttgacggtgcatacaaggctgaagagctggatgacccagcagaagccggtctgcatctgctccacgaagacgcaggccaggagctgggggagagcagggtcagcggggccagcggggccccagggcggtgggtgcgggggggccggaggctcaccgacagcatgttcttggagatgatgacggtgacgttgtacagaatgaggcagtcccacagcacgaggcgggcccgtgtgtccctctgcagcagggccgtgccgaagagcagcaggtagaagcaggccagcaggtagcccagcccgaagatgctg

SEQ ID NO: 465248 - DNA, 29 bp, Homo sapiens
  chr16:88793673-88793702
  hypo
  lung vs. pancreas_gallbladder
tcccaccccaggcctgtcggcgtgcagcc

SEQ ID NO: 465249 - DNA, 58 bp, Homo sapiens
  chr16:88793218-88793276
  hypo
  lung vs. pancreas_gallbladder
cgtgccgaagagcagcaggtagaagcaggccagcaggtagcccagcccgaagatgctg

SEQ ID NO: 465250 - DNA, 340 bp, Homo sapiens
  chr16:88793673-88794013
  hypo
  lung vs. pancreas_gallbladder
tcccaccccaggcctgtcggcgtgcagccgctgggagcggacacacgtctgcctgggtgagtggccgggtgtccctgggggagccccggtgtgagggcatctgcacaagggctgccgtgcacacaggctgaggtctgcgtgcgtgcgtgcgaggtcagggcctgcaggccgccatgtgcctgaccacacctccgcccgtgcacgcctgtgtgcacacttgtgagcagatttgggggcgtgaatgtactctgagggtcctctgcagaggcgggggtggtggggggcactcactgatgaggttggtggagttgggggcccggaagaaatcaggcaggtacag

SEQ ID NO: 465251 - DNA, 395 bp, Homo sapiens
  chr16:88797394-88797789
  hypo
  lung vs. head_and_neck
cgcccctgagccggccacgtgcacaaatgtgactccccatctcagaccgcagggtgctgtgtgccttgagcagacctgcagcaccaggacagccacgcaaatccagtctcacggcgtcagcaacgctaccggcctccctccggaacttcccaagagacaggagaggcgggggcggcttagacccaagacaagagactagagcaaacatcagaccagatcccgtctgaaaaccaaatggccacaaagaagggtgctgaggccggggctgtttgaatgcagaggacacgtttgacgatggcactgccaggagacgggaccacgggtgtggggctgtgggctcagacaccctcacccaggagacgcatgctcgaggcagcacttgggtgtgaggcatc

SEQ ID NO: 465252 - DNA, 2 bp, Homo sapiens
  chr16:88797818-88797820
  hypo
  lung vs. head_and_neck
ac

SEQ ID NO: 465253 - DNA, 91 bp, Homo sapiens; identical to SEQ ID NO: 456599
  chr16:89220237-89220328
  hypo
  lung vs. melanoma,renal

SEQ ID NO: 465254 - DNA, 79 bp, Homo sapiens; identical to SEQ ID NO: 454865
  chr16:89254530-89254609
  hypo
  lung vs. renal

SEQ ID NO: 465255 - DNA, 144 bp, Homo sapiens; identical to SEQ ID NO: 355552
  chr16:89254764-89254908
  hypo
  lung vs. renal

SEQ ID NO: 465256 - DNA, 336 bp, Homo sapiens; identical to SEQ ID NO: 342788
  chr16:89260413-89260749
  hypo
  lung vs. pancreas_gallbladder

SEQ ID NO: 465257 - DNA, 265 bp, Homo sapiens; identical to SEQ ID NO: 342791
  chr16:89357476-89357741
  hypo
  lung vs. liver_bileduct

SEQ ID NO: 465258 - DNA, 46 bp, Homo sapiens
  chr16:89763790-89763836
  hypo
  lung vs. head_and_neck
cgctgtagccacaagcgccgctgggcgtcgccaagcagcacacgca

SEQ ID NO: 465259 - DNA, 823 bp, Homo sapiens; identical to SEQ ID NO: 367102
  chr16:89763872-89764695
  hypo
  lung vs. head_and_neck

SEQ ID NO: 465260 - DNA, 4 bp, Homo sapiens
  chr16:89883921-89883925
  hypo
cggc

SEQ ID NO: 465261 - DNA, 3 bp, Homo sapiens
  chr16:89884344-89884347
  hypo
gcc

SEQ ID NO: 465262 - DNA, 394 bp, Homo sapiens
  chr16:89971731-89972125
  hypo
  lung vs. liver_bileduct,upper_gi
cgggtgcctcgggctggagtggtgccttcgggtcttgcagtgtttccacatgagctgtgagatgatgacgagtctctcacagcagcatcttgggagtaaagaaatctggcagagacgagaaagagtctcctgtcctgtgtgtgaacacttcggaggctcatgccctaatatgctgcaactgacaggcatccccttgctgttcttgtctcgtttgtctgcgcccttggccctgtgctagttctgtgcatcagcaccgtggctctgtgcagtggtgtggccaggctcaggaccgcctgggagtggtgcccatttgcatctccacagtgaagtctgtgtgccgcggacatgaggtgtgcccgggggtgcccaagaggcgctggtgcccccagccgct

SEQ ID NO: 465263 - DNA, 273 bp, Homo sapiens
  chr16:89972235-89972508
  hypo
  lung vs. liver_bileduct,upper_gi
accagtgcctgtgcctgtagccgtagcagtgacgatggtgacacacccaggtgtcccttcatggagatgaactcagtgacttcccacaagaagccactggctacggctctcatcgttcttgttctttggatgaagaggctgagtcactggccatgtggctgggattggtccccagaggctccccagccgcaggccagggaccagccatggtgcctctgctcgagagtaaagtgtacagtttttgcagccaccagagatgcagcgagatgcctc

SEQ ID NO: 465264 - DNA, 104 bp, Homo sapiens
  chr16:89972021-89972125
  hypo
  lung vs. head_and_neck,liver_bileduct
cgcctgggagtggtgcccatttgcatctccacagtgaagtctgtgtgccgcggacatgaggtgtgcccgggggtgcccaagaggcgctggtgcccccagccgct

SEQ ID NO: 465265 - DNA, 441 bp, Homo sapiens
  chr16:89972235-89972676
  hypo
  lung vs. head_and_neck,liver_bileduct
accagtgcctgtgcctgtagccgtagcagtgacgatggtgacacacccaggtgtcccttcatggagatgaactcagtgacttcccacaagaagccactggctacggctctcatcgttcttgttctttggatgaagaggctgagtcactggccatgtggctgggattggtccccagaggctccccagccgcaggccagggaccagccatggtgcctctgctcgagagtaaagtgtacagtttttgcagccaccagagatgcagcgagatgcctcgtgctgggtgggggtgggggccgaggctccatggcggttaccatttcatttgctgtgctttatctgctgtgccttgtttctccccggccctaggcggaaggtgctctaccagcgtgcacccaggaatatccaccgccatgtgatcctctctgagatcaaggaagccgt

SEQ ID NO: 465266 - DNA, 197 bp, Homo sapiens
  chr16:89972802-89972999
  hypo
  lung vs. head_and_neck,liver_bileduct
cccagccccgccacggcaggggcagggtctagtgcagagggctcctcctttcctggcagcccgggttcggatgcttgttgttttgagagagaaatcctttggggctcagagcacaagctgagtcgtcaccgtggtgagctgctccatccgtggtcttgtgagcgcgtggtgcggctgctgggggattctctgtagtc

SEQ ID NO: 465267 - DNA, 147 bp, Homo sapiens
  chr16:89972529-89972676
  hypo
  lung vs. liver_bileduct
cgaggctccatggcggttaccatttcatttgctgtgctttatctgctgtgccttgtttctccccggccctaggcggaaggtgctctaccagcgtgcacccaggaatatccaccgccatgtgatcctctctgagatcaaggaagccgt

SEQ ID NO: 465268 - DNA, 482 bp, Homo sapiens; identical to SEQ ID NO: 355559
  chr16:89972802-89973284
  hypo
  lung vs. liver_bileduct

SEQ ID NO: 465269 - DNA, 366 bp, Homo sapiens; identical to SEQ ID NO: 342836
  chr17:2291792-2292158
  hypo
  lung vs. upper_gi

SEQ ID NO: 465270 - DNA, 156 bp, Homo sapiens; identical to SEQ ID NO: 346157
  chr17:7369222-7369378
  hypo
  lung vs. liver_bileduct

SEQ ID NO: 465271 - DNA, 104 bp, Homo sapiens; identical to SEQ ID NO: 355601
  chr17:16282523-16282627
  hypo
  lung vs. melanoma,lymphoid_neoplasm,sarcoma

SEQ ID NO: 465272 - DNA, 209 bp, Homo sapiens; identical to SEQ ID NO: 342899
  chr17:16923475-16923684
  hypo
  lung vs. melanoma,colorectal

SEQ ID NO: 465273 - DNA, 203 bp, Homo sapiens; identical to SEQ ID NO: 342900
  chr17:17031200-17031403
  hypo
  lung vs. pancreas_gallbladder

SEQ ID NO: 465274 - DNA, 125 bp, Homo sapiens; identical to SEQ ID NO: 453733
  chr17:38179119-38179244
  hypo
  lung vs. liver_bileduct,lymphoid_neoplasm,renal

SEQ ID NO: 465275 - DNA, 125 bp, Homo sapiens; identical to SEQ ID NO: 453734
  chr17:38179273-38179398
  hypo
  lung vs. liver_bileduct,lymphoid_neoplasm,renal

SEQ ID NO: 465276 - DNA, 133 bp, Homo sapiens; identical to SEQ ID NO: 367237
  chr17:38179430-38179563
  hypo
  lung vs. liver_bileduct,lymphoid_neoplasm,renal

SEQ ID NO: 465277 - DNA, 37 bp, Homo sapiens; identical to SEQ ID NO: 455770
  chr17:40332770-40332807
  hypo
  lung vs. bladder_and_urothelial

SEQ ID NO: 465278 - DNA, 5 bp, Homo sapiens
  chr17:42331622-42331627
  hypo
  lung vs. lymphoid_neoplasm
cgtga

SEQ ID NO: 465279 - DNA, 182 bp, Homo sapiens; identical to SEQ ID NO: 455779
  chr17:46659093-46659275
  hypo
  lung vs. bladder_and_urothelial,cervical

SEQ ID NO: 465280 - DNA, 46 bp, Homo sapiens; identical to SEQ ID NO: 455780
  chr17:46659384-46659430
  hypo
  lung vs. bladder_and_urothelial,cervical

SEQ ID NO: 465281 - DNA, 64 bp, Homo sapiens; identical to SEQ ID NO: 460782
  chr17:46687527-46687591
  hypo
  lung vs. ovary,colorectal

SEQ ID NO: 465282 - DNA, 170 bp, Homo sapiens; identical to SEQ ID NO: 351973
  chr17:46724200-46724370
  hypo
  lung vs. colorectal

SEQ ID NO: 465283 - DNA, 25 bp, Homo sapiens
  chr17:49229457-49229482
  hypo
  lung vs. lymphoid_neoplasm,renal,melanoma
cgcgggaagctgagtcacgagaatc

SEQ ID NO: 465284 - DNA, 446 bp, Homo sapiens; identical to SEQ ID NO: 343032
  chr17:55644506-55644952
  hypo
  lung vs. upper_gi

SEQ ID NO: 465285 - DNA, 112 bp, Homo sapiens; identical to SEQ ID NO: 454237
  chr17:61777761-61777873
  hypo
  lung vs. cervical,anorectal,sarcoma,head_and_neck

SEQ ID NO: 465286 - DNA, 76 bp, Homo sapiens; identical to SEQ ID NO: 345537
  chr17:61778423-61778499
  hypo
  lung vs. cervical,anorectal,sarcoma,head_and_neck

SEQ ID NO: 465287 - DNA, 5 bp, Homo sapiens
  chr17:64751169-64751174
  hypo
  lung vs. melanoma
cgctc

SEQ ID NO: 465288 - DNA, 416 bp, Homo sapiens; identical to SEQ ID NO: 367315
  chr17:64751203-64751619
  hypo
  lung vs. melanoma

SEQ ID NO: 465289 - DNA, 294 bp, Homo sapiens
  chr17:66420425-66420719
  hypo
  lung vs. upper_gi,liver_bileduct,pancreas_gallbladder, colorectal
cgctgcgaccgacccgcagagccgatgtgggaaatcacaaaacaacagccccagccctgcatgcagggccccaccgcagctttgttttctaagccaaatgtgctcactagagggttccacggatctgcgggagaaagaagccagacctgcactccatccttttacaattggaagctcaatggacacaaaacaatgatcaggagaagtttccataacaaagcctaatggacattgtttcagtgcccaagtggcagctcctctctggctctaggagctgatgctccaagtcttggc

SEQ ID NO: 465290 - DNA, 29 bp, Homo sapiens
  chr17:66434420-66434449
  hypo
  lung vs. colorectal,pancreas_gallbladder,upper_gi
cctggccccagccttagaagaggccactc

SEQ ID NO: 465291 - DNA, 308 bp, Homo sapiens; identical to SEQ ID NO: 343084
  chr17:71548553-71548861
  hypo
  lung vs. head_and_neck,breast,upper_gi,anorectal, pancreas_gallbladder,colorectal,bladder_and_urothelial, lymphoid_neoplasm,cervical

SEQ ID NO: 465292 - DNA, 398 bp, Homo sapiens; identical to SEQ ID NO: 343085
  chr17:71744668-71745066
  hypo
  lung vs. head_and_neck

SEQ ID NO: 465293 - DNA, 5 bp, Homo sapiens
  chr17:73585938-73585943
  hypo
  lung vs. liver_bileduct,lymphoid_neoplasm
cgcgg

SEQ ID NO: 465294 - DNA, 193 bp, Homo sapiens; identical to SEQ ID NO: 454901
  chr17:73615737-73615930
  hypo
  lung vs. cervical,melanoma,prostate,renal,breast, colorectal

SEQ ID NO: 465295 - DNA, 109 bp, Homo sapiens; identical to SEQ ID NO: 348835
  chr17:73616587-73616696
  hypo
  lung vs. cervical,melanoma,prostate,renal,breast, colorectal

SEQ ID NO: 465296 - DNA, 2 bp, Homo sapiens
  chr17:73635994-73635996
  hypo
  lung vs. sarcoma,lymphoid_neoplasm,melanoma, multiple_myeloma
cg

SEQ ID NO: 465297 - DNA, 119 bp, Homo sapiens
  chr17:74390245-74390364
  hypo
  lung vs. sarcoma,breast,melanoma,prostate, multiple_myeloma
cgcttggctgctctcaggatcgcttggctgctctcaggatccctgctctttcttttcttactcccttccttccaggacagggccagaactggggcctcagactcagattcagagtctag

SEQ ID NO: 465298 - DNA, 182 bp, Homo sapiens; identical to SEQ ID NO: 348837
  chr17:74390459-74390641
  hypo
  lung vs. sarcoma,breast,melanoma,prostate, multiple_myeloma

SEQ ID NO: 465299 - DNA, 148 bp, Homo sapiens; identical to SEQ ID NO: 343148
  chr17:76034983-76035131
  hypo
  lung vs. colorectal,breast

SEQ ID NO: 465300 - DNA, 478 bp, Homo sapiens; identical to SEQ ID NO: 343153
  chr17:76215753-76216231
  hypo
  lung vs. pancreas_gallbladder,colorectal,melanoma, sarcoma,lymphoid_neoplasm,renal

SEQ ID NO: 465301 - DNA, 404 bp, Homo sapiens; identical to SEQ ID NO: 464313
  chr17:77778031-77778435
  hypo
  lung vs. cervical

SEQ ID NO: 465302 - DNA, 42 bp, Homo sapiens; identical to SEQ ID NO: 464314
  chr17:77788305-77788347
  hypo
  lung vs. breast

SEQ ID NO: 465303 - DNA, 234 bp, Homo sapiens; identical to SEQ ID NO: 464315
  chr17:77788400-77788634
  hypo
  lung vs. breast

SEQ ID NO: 465304 - DNA, 188 bp, Homo sapiens; identical to SEQ ID NO: 367411
  chr17:77825812-77826000
  hypo
  lung vs. melanoma,sarcoma,renal,lymphoid_neoplasm

SEQ ID NO: 465305 - DNA, 117 bp, Homo sapiens; identical to SEQ ID NO: 456644
  chr17:78143796-78143913
  hypo
  lung vs. lymphoid_neoplasm,melanoma,sarcoma

SEQ ID NO: 465306 - DNA, 26 bp, Homo sapiens
  chr17:78587649-78587675
  hypo
  lung vs. head_and_neck,pancreas_gallbladder, liver_bileduct,bladder_and_urothelial,ovary
cgggctgggccgcgtgttctggataa

SEQ ID NO: 465307 - DNA, 557 bp, Homo sapiens; identical to SEQ ID NO: 343201
  chr17:78611023-78611580
  hypo
  lung vs. liver_bileduct

SEQ ID NO: 465308 - DNA, 1 bp, Homo sapiens
  chr17:78667873-78667874
  hypo
c

SEQ ID NO: 465309 - DNA, 273 bp, Homo sapiens; identical to SEQ ID NO: 367428
  chr17:78668243-78668516
  hypo

SEQ ID NO: 465310 - DNA, 45 bp, Homo sapiens
  chr17:79093912-79093957
  hypo
  lung vs. lymphoid_neoplasm
cggccgccaggagccgcggccgctcccaccccttcctgcgggagc

SEQ ID NO: 465311 - DNA, 279 bp, Homo sapiens; identical to SEQ ID NO: 454915
  chr17:79913166-79913445
  hypo
  lung vs. melanoma,breast

SEQ ID NO: 465312 - DNA, 4 bp, Homo sapiens
  chr17:80294440-80294444
  hypo
  lung vs. pancreas_gallbladder
cgtg

SEQ ID NO: 465313 - DNA, 520 bp, Homo sapiens; identical to SEQ ID NO: 367468
  chr17:80294473-80294993
  hypo
  lung vs. pancreas_gallbladder

SEQ ID NO: 465314 - DNA, 33 bp, Homo sapiens; identical to SEQ ID NO: 453753
  chr17:80797632-80797665
  hypo
  lung vs. lymphoid_neoplasm,liver_bileduct,melanoma, sarcoma,colorectal,renal,pancreas_gallbladder

SEQ ID NO: 465315 - DNA, 94 bp, Homo sapiens; identical to SEQ ID NO: 343300
  chr18:3119830-3119924
  hypo

SEQ ID NO: 465316 - DNA, 789 bp, Homo sapiens; identical to SEQ ID NO: 355808
  chr18:8659297-8660086
  hypo
  lung vs. bladder_and_urothelial,pancreas_gallbladder, colorectal,melanoma

SEQ ID NO: 465317 - DNA, 81 bp, Homo sapiens; identical to SEQ ID NO: 343325
  chr18:9514129-9514210
  hypo
  lung vs. lymphoid_neoplasm

SEQ ID NO: 465318 - DNA, 66 bp, Homo sapiens
  chr18:9547721-9547787
  hypo
  lung vs. liver_bileduct,pancreas_gallbladder,colorectal, upper_gi,breast,cervical,ovary
cgtggcgaatgcccactgaacctcggctctcatggaagcaggaaagacaccgagattcaagccttc

SEQ ID NO: 465319 - DNA, 176 bp, Homo sapiens; identical to SEQ ID NO: 348874
  chr18:9547816-9547992
  hypo
  lung vs. liver_bileduct,pancreas_gallbladder,colorectal, upper_gi,breast,cervical,ovary

SEQ ID NO: 465320 - DNA, 311 bp, Homo sapiens; identical to SEQ ID NO: 458751
  chr18:20911034-20911345
  hypo
  lung vs. melanoma,renal,sarcoma,liver_bileduct

SEQ ID NO: 465321 - DNA, 141 bp, Homo sapiens
  chr18:47285293-47285434
  hypo
  lung vs. liver_bileduct
cgcccggccagtggtatttgtttttaatcaccacacagagctattgtgaggaccaaataaagaaatggatgtgaaggcgtgctgcgaactgcgccatgtggggtgttttctcattgttcaggtagcattcagcgtgaggcc

SEQ ID NO: 465322 - DNA, 115 bp, Homo sapiens; identical to SEQ ID NO: 346183
  chr18:55850987-55851102
  hypo
  lung vs. liver_bileduct,melanoma,upper_gi, pancreas_gallbladder,sarcoma,bladder_and_urothelial,ovary, colorectal,renal,lymphoid_neoplasm,uterine

SEQ ID NO: 465323 - DNA, 128 bp, Homo sapiens
  chr18:72347372-72347500
  hypo
  lung vs. head_and_neck
cggccacatgagaaatgagcaggccagtgtggaggagcttccggagggaggggccacctttaaatgtgtcaagtgcacagagccctttgattctgaacagaatttatttttacatattaaaggacagc

SEQ ID NO: 465324 - DNA, 74 bp, Homo sapiens; identical to SEQ ID NO: 355856
  chr18:72347576-72347650
  hypo
  lung vs. head_and_neck

SEQ ID NO: 465325 - DNA, 133 bp, Homo sapiens; identical to SEQ ID NO: 454945
  chr18:74113780-74113913
  hypo
  lung vs. liver_bileduct,pancreas_gallbladder

SEQ ID NO: 465326 - DNA, 61 bp, Homo sapiens; identical to SEQ ID NO: 454946
  chr18:74113942-74114003
  hypo
  lung vs. liver_bileduct,pancreas_gallbladder

SEQ ID NO: 465327 - DNA, 162 bp, Homo sapiens; identical to SEQ ID NO: 343478
  chr18:77076178-77076340
  hypo
  lung vs. head_and_neck

SEQ ID NO: 465328 - DNA, 161 bp, Homo sapiens
  chr18:77508739-77508900
  hypo
  lung vs. liver_bileduct
cgacagagtcatgatcagaggcctttagagtcatcattatcatgtctgtgtgtgagccgtgactgcctgggagccgtgtctgcctgggagccgtgactgcacatgagccgtgtctgtgtgtgagccgttctgtgtgtttgccgtgtctgtgtgtttgccgt

SEQ ID NO: 465329 - DNA, 399 bp, Homo sapiens
  chr18:77508946-77509345
  hypo
  lung vs. liver_bileduct
gcacagggctctccagcgggagctgaggtggtcccttccgtgggctcggttcaggtcctgtggcaccctgccaagttatgctggcgtttctgaaggtgtgtcctgctgtcaacagcactctgggtgtttttgtcggccttgtgaggggaacatatttctaaacctcaaacagagagtcacagctggcatttcccattctttgccatcctcttgctgccattagaactctgccacggatggcttcctcgcttgattttagaaagaaaagaattgttggaactggttcttgcacctctcgccctccccctcctctccctgcttgccccagggtcccgcctggctctcgtctgccccgtcttcactttcggtcggggcccctgcccctgcccctgctctgct

SEQ ID NO: 465330 - DNA, 315 bp, Homo sapiens
  chr18:77509030-77509345
  hypo
  lung vs. upper_gi
cgtttctgaaggtgtgtcctgctgtcaacagcactctgggtgtttttgtcggccttgtgaggggaacatatttctaaacctcaaacagagagtcacagctggcatttcccattctttgccatcctcttgctgccattagaactctgccacggatggcttcctcgcttgattttagaaagaaaagaattgttggaactggttcttgcacctctcgccctccccctcctctccctgcttgccccagggtcccgcctggctctcgtctgccccgtcttcactttcggtcggggcccctgcccctgcccctgctctgct

SEQ ID NO: 465331 - DNA, 116 bp, Homo sapiens; identical to SEQ ID NO: 346189
  chr18:77509679-77509795
  hypo
  lung vs. upper_gi

SEQ ID NO: 465332 - DNA, 268 bp, Homo sapiens; identical to SEQ ID NO: 343497
  chr18:77535504-77535772
  hypo

SEQ ID NO: 465333 - DNA, 113 bp, Homo sapiens; identical to SEQ ID NO: 343505
  chr18:77616298-77616411
  hypo
  lung vs. melanoma,renal,sarcoma,pancreas_gallbladder

SEQ ID NO: 465334 - DNA, 54 bp, Homo sapiens; identical to SEQ ID NO: 355909
  chr19:403809-403863
  hypo
  lung vs. renal,lymphoid_neoplasm

SEQ ID NO: 465335 - DNA, 99 bp, Homo sapiens; identical to SEQ ID NO: 454948
  chr19:549193-549292
  hypo
  lung vs. renal

SEQ ID NO: 465336 - DNA, 2 bp, Homo sapiens
  chr19:550028-550030
  hypo
  lung vs. renal
ac

SEQ ID NO: 465337 - DNA, 413 bp, Homo sapiens; identical to SEQ ID NO: 382203
  chr19:871003-871416
  hypo
  lung vs. head_and_neck

SEQ ID NO: 465338 - DNA, 159 bp, Homo sapiens; identical to SEQ ID NO: 453776
  chr19:883424-883583
  hypo
  lung vs. melanoma,sarcoma,prostate,lymphoid_neoplasm, head_and_neck,multiple_myeloma,renal,myeloid_neoplasm, non_cancer,uterine,colorectal,breast

SEQ ID NO: 465339 - DNA, 45 bp, Homo sapiens; identical to SEQ ID NO: 453777
  chr19:884311-884356
  hypo
  lung vs. melanoma,sarcoma,prostate,lymphoid_neoplasm, head_and_neck,multiple_myeloma,renal,myeloid_neoplasm, non_cancer,uterine,colorectal,breast

SEQ ID NO: 465340 - DNA, 544 bp, Homo sapiens; identical to SEQ ID NO: 346191
  chr19:884311-884855
  hypo
  lung vs. melanoma,sarcoma,lymphoid_neoplasm,prostate, renal,head_and_neck,myeloid_neoplasm,non_cancer,uterine, multiple_myeloma,colorectal,breast

SEQ ID NO: 465341 - DNA, 62 bp, Homo sapiens
  chr19:891455-891517
  hypo
  lung vs. melanoma
cgggagacgcagcggagggtctgcgctggcccaggtgagtgatgatgggggcagcaagtgga

SEQ ID NO: 465342 - DNA, 229 bp, Homo sapiens; identical to SEQ ID NO: 456692
  chr19:1004547-1004776
  hypo
  lung vs. renal,lymphoid_neoplasm

SEQ ID NO: 465343 - DNA, 279 bp, Homo sapiens; identical to SEQ ID NO: 218770
  chr19:1005441-1005720
  hypo
  lung vs. renal,lymphoid_neoplasm

SEQ ID NO: 465344 - DNA, 10 bp, Homo sapiens
  chr19:1030023-1030033
  hypo
  lung vs. liver_bileduct,head_and_neck,melanoma
cgtttatctc

SEQ ID NO: 465345 - DNA, 128 bp, Homo sapiens; identical to SEQ ID NO: 367734
  chr19:1030225-1030353
  hypo
  lung vs. liver_bileduct,head_and_neck,melanoma

SEQ ID NO: 465346 - DNA, 339 bp, Homo sapiens; identical to SEQ ID NO: 456696
  chr19:1166870-1167209
  hypo
  lung vs. colorectal,upper_gi

SEQ ID NO: 465347 - DNA, 6 bp, Homo sapiens
  chr19:1357664-1357670
  hypo
  lung vs. upper_gi
cgacgc

SEQ ID NO: 465348 - DNA, 59 bp, Homo sapiens
  chr19:1496674-1496733
  hypo
  lung vs. lymphoid_neoplasm
gtaaccgctgtggggagataggagctgtgtgtgtgtgtgtgtgcgcgcgcgcgcgcgtg

SEQ ID NO: 465349 - DNA, 12 bp, Homo sapiens
  chr19:1496884-1496896
  hypo
  lung vs. lymphoid_neoplasm
gtgtgtgcccac

SEQ ID NO: 465350 - DNA, 228 bp, Homo sapiens
  chr19:1577427-1577655
  hypo
  lung vs. liver_bileduct
cgaggcaggggggccggctggcagtggagcattctggcagcgccgggcgaccaagtcccgactggcagcggctggagtttggttttcagaagcgaaggctggcgttggcacacagggaaggctgcccgatgacgtgcctcgactgtgttacatttactgaaggagagcggcctcctgggcatgccactcaggcacggtgaggctctgtggcaccaccagccgcatggc

SEQ ID NO: 465351 - DNA, 548 bp, Homo sapiens
  chr19:1577687-1578235
  hypo
  lung vs. liver_bileduct
ccacagcagaccagagtcccgtcctcacgctgcacagtgggtgatgtgagtttcaaaactacgcctccagaccgagaaaccctcccagctgtcagcaagccgtggcgccgagctgccgggcacctgctggctgctctccagtctcaaggagctgggacagcgggcatggggaggagctggcctcgagcccaaaggtcgtagggagccaggcagggcccaggagcacccggcacttcccgaagccggactctgtagaggacgagcgtggagggtctttcgggtgggggcagccccagctgtgtgccccgaggccccgggaagtggggacgggccgaggagggagccaggagcacggccttcctcctgggtgtctccaaggctgggcttcgccgccgagcctggttcacgtggggccgaggaccgcgtctgcaggcggctccagcaggcagcacgggctctcggcagggcctctggaaaggacagggagggctggctttagcgactccacgggacggggacgcttgggctcttctagggagatgggaagc

SEQ ID NO: 465352 - DNA, 233 bp, Homo sapiens; identical to SEQ ID NO: 453785
  chr19:1978023-1978256
  hypo
  lung vs. liver_bileduct

SEQ ID NO: 465353 - DNA, 116 bp, Homo sapiens; identical to SEQ ID NO: 345560
  chr19:1979018-1979134
  hypo
  lung vs. liver_bileduct,lymphoid_neoplasm

SEQ ID NO: 465354 - DNA, 728 bp, Homo sapiens; identical to SEQ ID NO: 335895
  chr19:2164931-2165659
  hypo
  lung vs. upper_gi

SEQ ID NO: 465355 - DNA, 64 bp, Homo sapiens
  chr19:2360648-2360712
  hypo
  lung vs. cervical,sarcoma
cgcaggtgcggcgtgtagatgcggcaggggttgtgtggacgcaggtgtggtgtgtagatgcggc

SEQ ID NO: 465356 - DNA, 61 bp, Homo sapiens
  chr19:3747832-3747893
  hypo
  lung vs. liver_bileduct
cggcctggccgacagctccgctgacctcagctgcgacagccgcgttaacagcgactacgag

SEQ ID NO: 465357 - DNA, 98 bp, Homo sapiens; identical to SEQ ID NO: 367809
  chr19:3748020-3748118
  hypo
  lung vs. liver_bileduct

SEQ ID NO: 465358 - DNA, 93 bp, Homo sapiens
  chr19:3777982-3778075
  hypo
  lung vs. renal
cgtctttatcgggcgatcatccttcgcaggtctggggtgtccacgggccgcccagagccccctacgtgggccagcccctgctgtgggcaccag

SEQ ID NO: 465359 - DNA, 109 bp, Homo sapiens; identical to SEQ ID NO: 382309
  chr19:3778417-3778526
  hypo
  lung vs. renal

SEQ ID NO: 465360 - DNA, 1 bp, Homo sapiens
  chr19:3778991-3778992
  hypo
  lung vs. anorectal
c

SEQ ID NO: 465361 - DNA, 371 bp, Homo sapiens; identical to SEQ ID NO: 367841
  chr19:5037624-5037995
  hypo
  lung vs. upper_gi

SEQ ID NO: 465362 - DNA, 12 bp, Homo sapiens
  chr19:5759620-5759632
  hypo
  lung vs. melanoma
cgggcgcctata

SEQ ID NO: 465363 - DNA, 3 bp, Homo sapiens
  chr19:5759811-5759814
  hypo
  lung vs. melanoma
cgc

SEQ ID NO: 465364 - DNA, 764 bp, Homo sapiens; identical to SEQ ID NO: 461749
  chr19:8576026-8576790
  hypo
  lung vs. liver_bileduct

SEQ ID NO: 465365 - DNA, 61 bp, Homo sapiens; identical to SEQ ID NO: 461750
  chr19:10370250-10370311
  hypo
  lung vs. sarcoma,melanoma,prostate,uterine,colorectal

SEQ ID NO: 465366 - DNA, 88 bp, Homo sapiens; identical to SEQ ID NO: 348939
  chr19:10370575-10370663
  hypo
  lung vs. sarcoma,melanoma,prostate,uterine,colorectal

SEQ ID NO: 465367 - DNA, 39 bp, Homo sapiens; identical to SEQ ID NO: 452979
  chr19:10616220-10616259
  hypo
  lung vs. pancreas_gallbladder

SEQ ID NO: 465368 - DNA, 116 bp, Homo sapiens; identical to SEQ ID NO: 452980
  chr19:10691764-10691880
  hypo
  lung vs. melanoma,lymphoid_neoplasm

SEQ ID NO: 465369 - DNA, 109 bp, Homo sapiens; identical to SEQ ID NO: 343746
  chr19:10949233-10949342
  hypo

SEQ ID NO: 465370 - DNA, 177 bp, Homo sapiens; identical to SEQ ID NO: 356025
  chr19:11003087-11003264
  hypo
  lung vs. liver_bileduct,lymphoid_neoplasm,melanoma,renal

SEQ ID NO: 465371 - DNA, 385 bp, Homo sapiens; identical to SEQ ID NO: 356027
  chr19:11030249-11030634
  hypo
  lung vs. head_and_neck,liver_bileduct,anorectal,breast

SEQ ID NO: 465372 - DNA, 348 bp, Homo sapiens
  chr19:11128636-11128984
  hypo
  lung vs. melanoma
cgcaaggctgctgagcctctgctccccacgcttcttcaggaactctccccagccttcaccacagccatgcgtccttctgtctattggctgtgccgcctggttggctgtggcttccagcggggctggagatgggttcatggtggacacagcacctccctcgtggagctgcttgggggcaaaccacgagtagtccctgggactccagcttcgagccctgtctttacggaccaccccgtctagactttctgagtggcttccctcccccactgaaaactccctgccccagagttcctcccagagcccgtcccctttgggactcagctttattaccgcctccaccctctcctc

SEQ ID NO: 465373 - DNA, 59 bp, Homo sapiens; identical to SEQ ID NO: 367932
  chr19:11285272-11285331
  hypo
  lung vs. upper_gi

SEQ ID NO: 465374 - DNA, 19 bp, Homo sapiens
  chr19:15292612-15292631
  hypo
  lung vs. liver_bileduct
ctgcggacaggaggaaggc

SEQ ID NO: 465375 - DNA, 163 bp, Homo sapiens; identical to SEQ ID NO: 367989
  chr19:17362459-17362622
  hypo
  lung vs. liver_bileduct

SEQ ID NO: 465376 - DNA, 67 bp, Homo sapiens; identical to SEQ ID NO: 343830
  chr19:17397256-17397323
  hypo
  lung vs. uterine

SEQ ID NO: 465377 - DNA, 240 bp, Homo sapiens; identical to SEQ ID NO: 462619
  chr19:17716539-17716779
  hypo
  lung vs. uterine

SEQ ID NO: 465378 - DNA, 6 bp, Homo sapiens
  chr19:17717524-17717530
  hypo
  lung vs. uterine
ccgcac

SEQ ID NO: 465379 - DNA, 3 bp, Homo sapiens
  chr19:18807947-18807950
  hypo
  lung vs. liver_bileduct,melanoma
cga

SEQ ID NO: 465380 - DNA, 160 bp, Homo sapiens; identical to SEQ ID NO: 356079
  chr19:18808024-18808184
  hypo
  lung vs. liver_bileduct,melanoma

SEQ ID NO: 465381 - DNA, 196 bp, Homo sapiens; identical to SEQ ID NO: 343884
  chr19:29993099-29993295
  hypo

SEQ ID NO: 465382 - DNA, 132 bp, Homo sapiens
  chr19:30186010-30186142
  hypo
  lung vs. colorectal,lymphoid_neoplasm
cgccacccagacaccgaacacccagacacctaacacacagacacctgacacccagacacctggacacctgacacccggacacccagactacctgacacccggacacctggacacccgatcacccagacacct

SEQ ID NO: 465383 - DNA, 75 bp, Homo sapiens; identical to SEQ ID NO: 368040
  chr19:30186240-30186315
  hypo
  lung vs. colorectal,lymphoid_neoplasm

SEQ ID NO: 465384 - DNA, 66 bp, Homo sapiens
  chr19:31217770-31217836
  hypo
  lung vs. head_and_neck
cgctgctgagcgcttaacgacaaccagccttctccccagaaccggctgtgagcacagctaagaata

SEQ ID NO: 465385 - DNA, 75 bp, Homo sapiens; identical to SEQ ID NO: 382602
  chr19:31217914-31217989
  hypo
  lung vs. head_and_neck

SEQ ID NO: 465386 - DNA, 184 bp, Homo sapiens; identical to SEQ ID NO: 343895
  chr19:31640397-31640581
  hypo

SEQ ID NO: 465387 - DNA, 137 bp, Homo sapiens
  chr19:32083463-32083600
  hypo
  lung vs. head_and_neck
cgcttgccggggagtcctgctgccttccgaggtgtgaagggaaggcatgcactgtgcatatgctgtaccatacagttttgcctacaactgcttgtagcttcattgtagctgtgaatgctccgttcctctccttttca

SEQ ID NO: 465388 - DNA, 32 bp, Homo sapiens; identical to SEQ ID NO: 368053
  chr19:32083759-32083791
  hypo
  lung vs. head_and_neck

SEQ ID NO: 465389 - DNA, 93 bp, Homo sapiens; identical to SEQ ID NO: 343900
  chr19:32198266-32198359
  hypo
  lung vs. head_and_neck

SEQ ID NO: 465390 - DNA, 1 bp, Homo sapiens
  chr19:32364683-32364684
  hypo
  lung vs. head_and_neck
c

SEQ ID NO: 465391 - DNA, 58 bp, Homo sapiens; identical to SEQ ID NO: 356122
  chr19:36222534-36222592
  hypo
  lung vs. melanoma,sarcoma

SEQ ID NO: 465392 - DNA, 73 bp, Homo sapiens
  chr19:38828044-38828117
  hypo
  lung vs. bladder_and_urothelial
cgagagtggtgtgagcgacagcttctttgagcaagagcccgtggacacagtgagcagcttgtttcacatgctg

SEQ ID NO: 465393 - DNA, 57 bp, Homo sapiens; identical to SEQ ID NO: 453811
  chr19:39329516-39329573
  hypo
  lung vs. lymphoid_neoplasm

SEQ ID NO: 465394 - DNA, 207 bp, Homo sapiens; identical to SEQ ID NO: 343985
  chr19:41921100-41921307
  hypo
  lung vs. bladder_and_urothelial

SEQ ID NO: 465395 - DNA, 157 bp, Homo sapiens; identical to SEQ ID NO: 356149
  chr19:42408960-42409117
  hypo
  lung vs. melanoma,cervical,head_and_neck, lymphoid_neoplasm

SEQ ID NO: 465396 - DNA, 72 bp, Homo sapiens
  chr19:42906796-42906868
  hypo
  lung vs. head_and_neck,pancreas_gallbladder
cgggtgccagcagcggcgacatgaaggggttcttgactatgggtgaggagtagaggggcatctgtgtggcac

SEQ ID NO: 465397 - DNA, 157 bp, Homo sapiens; identical to SEQ ID NO: 348982
  chr19:42906913-42907070
  hypo
  lung vs. head_and_neck,pancreas_gallbladder

SEQ ID NO: 465398 - DNA, 127 bp, Homo sapiens; identical to SEQ ID NO: 462646
  chr19:42927599-42927726
  hypo
  lung vs. pancreas_gallbladder,anorectal, bladder_and_urothelial

SEQ ID NO: 465399 - DNA, 75 bp, Homo sapiens; identical to SEQ ID NO: 356167
  chr19:45810267-45810342
  hypo
  lung vs. lymphoid_neoplasm,melanoma,renal

SEQ ID NO: 465400 - DNA, 24 bp, Homo sapiens
  chr19:46404499-46404523
  hypo
  lung vs. melanoma,colorectal
cgcaggcacacagcctactctgaa

SEQ ID NO: 465401 - DNA, 242 bp, Homo sapiens; identical to SEQ ID NO: 336199
  chr19:48229040-48229282
  hypo
  lung vs. upper_gi

SEQ ID NO: 465402 - DNA, 122 bp, Homo sapiens
  chr19:50129561-50129683
  hypo
  lung vs. cervical,melanoma
cgttctcgcccccgccccaccccctgctcccactaccctttgtctcttgctctttcttgggcttctgtacaactcaacttgtatacactgtgtacacacaaccagccaaacgaaaacccaac

SEQ ID NO: 465403 - DNA, 30 bp, Homo sapiens
  chr19:50129741-50129771
  hypo
  lung vs. cervical,melanoma
cagtggtagcaggggcagaggttctggaac

SEQ ID NO: 465404 - DNA, 3 bp, Homo sapiens
  chr19:50297019-50297022
  hypo
  lung vs. head_and_neck
cga

SEQ ID NO: 465405 - DNA, 81 bp, Homo sapiens; identical to SEQ ID NO: 368192
  chr19:50297054-50297135
  hypo
  lung vs. head_and_neck

SEQ ID NO: 465406 - DNA, 78 bp, Homo sapiens; identical to SEQ ID NO: 356193
  chr19:50320125-50320203
  hypo
  lung vs. melanoma

SEQ ID NO: 465407 - DNA, 159 bp, Homo sapiens
  chr19:50352994-50353153
  hypo
  lung vs. sarcoma,cervical
cgggagcccctgggcaggaaaacatggacaggcctacgggttcttctgccatttcactggccactcctccgtgtcctttgctggttgcttctcattgtcgtgactgctaaagggatgagtgtcccagtctctttgtgagctcatccagtctccattcaa

SEQ ID NO: 465408 - DNA, 67 bp, Homo sapiens; identical to SEQ ID NO: 348994
  chr19:50365162-50365229
  hypo
  lung vs. melanoma

SEQ ID NO: 465409 - DNA, 77 bp, Homo sapiens; identical to SEQ ID NO: 336229
  chr19:51111319-51111396
  hypo
  lung vs. ovary

SEQ ID NO: 465410 - DNA, 108 bp, Homo sapiens; identical to SEQ ID NO: 344106
  chr19:55976235-55976343
  hypo
  lung vs. liver_bileduct

SEQ ID NO: 465411 - DNA, 146 bp, Homo sapiens; identical to SEQ ID NO: 455031
  chr19:56688223-56688369
  hypo
  lung vs. head_and_neck

SEQ ID NO: 465412 - DNA, 13 bp, Homo sapiens
  chr19:56688479-56688492
  hypo
  lung vs. head_and_neck
ggctcctccctcc

SEQ ID NO: 465413 - DNA, 461 bp, Homo sapiens; identical to SEQ ID NO: 344127
  chr19:57181884-57182345
  hypo

SEQ ID NO: 465414 - DNA, 9 bp, Homo sapiens
  chr19:58874823-58874832
  hypo
  lung vs. lymphoid_neoplasm
cgagactcc

SEQ ID NO: 465415 - DNA, 1 bp, Homo sapiens
  chr19:58952140-58952141
  hypo
  lung vs. sarcoma
c

SEQ ID NO: 465416 - DNA, 54 bp, Homo sapiens; identical to SEQ ID NO: 456800
  chr19:58964127-58964181
  hypo
  lung vs. liver_bileduct,pancreas_gallbladder,melanoma

SEQ ID NO: 465417 - DNA, 295 bp, Homo sapiens; identical to SEQ ID NO: 337457
  chr2:364121-364416
  hypo
  lung vs. anorectal

SEQ ID NO: 465418 - DNA, 161 bp, Homo sapiens; identical to SEQ ID NO: 337460
  chr2:817641-817802
  hypo
  lung vs. cervical

SEQ ID NO: 465419 - DNA, 116 bp, Homo sapiens; identical to SEQ ID NO: 353042
  chr2:2193566-2193682
  hypo
  lung vs. head_and_neck

SEQ ID NO: 465420 - DNA, 98 bp, Homo sapiens; identical to SEQ ID NO: 463593
  chr2:2854244-2854342
  hypo
  lung vs. uterine,lymphoid_neoplasm,pancreas_gallbladder

SEQ ID NO: 465421 - DNA, 160 bp, Homo sapiens; identical to SEQ ID NO: 353046
  chr2:2854463-2854623
  hypo
  lung vs. uterine,lymphoid_neoplasm,pancreas_gallbladder

SEQ ID NO: 465422 - DNA, 93 bp, Homo sapiens; identical to SEQ ID NO: 337493
  chr2:3372645-3372738
  hypo
  lung vs. head_and_neck,bladder_and_urothelial

SEQ ID NO: 465423 - DNA, 147 bp, Homo sapiens
  chr2:8870193-8870340
  hypo
  lung vs. breast
cgcatctactctcctaacagctcaggacagccccgtcacactactgccagccctggtgactcactttgttggcaatttttaaagccctcttcattatgtacttcctactcttcagaacctctgtgataagcaatacccctgccatac

SEQ ID NO: 465424 - DNA, 60 bp, Homo sapiens; identical to SEQ ID NO: 458848
  chr2:8978298-8978358
  hypo
  lung vs. melanoma

SEQ ID NO: 465425 - DNA, 327 bp, Homo sapiens; identical to SEQ ID NO: 455046
  chr2:10153562-10153889
  hypo
  lung vs. breast

SEQ ID NO: 465426 - DNA, 19 bp, Homo sapiens
  chr2:10154188-10154207
  hypo
  lung vs. breast
gacaggcgtgcatatgagc

SEQ ID NO: 465427 - DNA, 63 bp, Homo sapiens; identical to SEQ ID NO: 455051
  chr2:10156251-10156314
  hypo
  lung vs. sarcoma,lymphoid_neoplasm

SEQ ID NO: 465428 - DNA, 28 bp, Homo sapiens
  chr2:10306818-10306846
  hypo
  lung vs. ovary
cgccctgttccctatggcgcaccagctg

SEQ ID NO: 465429 - DNA, 158 bp, Homo sapiens; identical to SEQ ID NO: 362825
  chr2:10306915-10307073
  hypo
  lung vs. ovary

SEQ ID NO: 465430 - DNA, 178 bp, Homo sapiens; identical to SEQ ID NO: 345000
  chr2:10588876-10589054
  hypo
  lung vs. pancreas_gallbladder

SEQ ID NO: 465431 - DNA, 117 bp, Homo sapiens; identical to SEQ ID NO: 455869
  chr2:10589056-10589173
  hypo
  lung vs. pancreas_gallbladder

SEQ ID NO: 465432 - DNA, 285 bp, Homo sapiens; identical to SEQ ID NO: 376272
  chr2:23547040-23547325
  hypo
  lung vs. pancreas_gallbladder

SEQ ID NO: 465433 - DNA, 38 bp, Homo sapiens; identical to SEQ ID NO: 454314
  chr2:30453530-30453568
  hypo
  lung vs. ovary,myeloid_neoplasm,non_cancer,uterine, thyroid

SEQ ID NO: 465434 - DNA, 395 bp, Homo sapiens; identical to SEQ ID NO: 345010
  chr2:43452443-43452838
  hypo
  lung vs. upper_gi,pancreas_gallbladder,liver_bileduct, melanoma,colorectal,breast,ovary,uterine

SEQ ID NO: 465435 - DNA, 42 bp, Homo sapiens
  chr2:55289053-55289095
  hypo
  lung vs. breast,head_and_neck,ovary,colorectal,uterine, pancreas_gallbladder,upper_gi,lymphoid_neoplasm,sarcoma,renal, prostate,cervical
cgagaccctagcaaggcaaacacacaaaaacggctggacgtt

SEQ ID NO: 465436 - DNA, 8 bp, Homo sapiens
  chr2:55289274-55289282
  hypo
  lung vs. breast,head_and_neck,ovary,colorectal,uterine, pancreas_gallbladder,upper_gi,lymphoid_neoplasm,sarcoma,renal, prostate,cervical
cttccagc

SEQ ID NO: 465437 - DNA, 2 bp, Homo sapiens
  chr2:64836206-64836208
  hypo
  lung vs. pancreas_gallbladder
cg

SEQ ID NO: 465438 - DNA, 20 bp, Homo sapiens
  chr2:73493622-73493642
  hypo
cgcccccacctccacggccc

SEQ ID NO: 465439 - DNA, 84 bp, Homo sapiens; identical to SEQ ID NO: 376345
  chr2:73493671-73493755
  hypo

SEQ ID NO: 465440 - DNA, 236 bp, Homo sapiens; identical to SEQ ID NO: 453103
  chr2:74781700-74781936
  hypo
  lung vs. upper_gi,colorectal,pancreas_gallbladder

SEQ ID NO: 465441 - DNA, 75 bp, Homo sapiens; identical to SEQ ID NO: 455074
  chr2:85819578-85819653
  hypo
  lung vs. melanoma,prostate,breast

SEQ ID NO: 465442 - DNA, 275 bp, Homo sapiens; identical to SEQ ID NO: 376387
  chr2:99136317-99136592
  hypo
  lung vs. upper_gi

SEQ ID NO: 465443 - DNA, 97 bp, Homo sapiens; identical to SEQ ID NO: 453106
  chr2:105468467-105468564
  hypo
  lung vs. melanoma

SEQ ID NO: 465444 - DNA, 387 bp, Homo sapiens
  chr2:107459644-107460031
  hypo
cgtccgcacgcgcgcgcggctccgcagctggcacagcagctgtgccctgctcagcccggcctcccgcttcccgcggaagcgcaccccgtgcttgttggcggtcaggtaatccttcatcgccttctgcaggcgcgggttcagcattttggaagagacgttccccttccagagccggtacaggaaggccctggacatggaggagtacagcctgtcgccgtcgtcgccctcctccaacacgtggctccttctctgcctccggtgcctcttcttcacccgcctcctctggacctgtgcagccggaaaagccccctcccgtgggcctggctccccgggggaagggaatcccaatgtcccctgagtgtggctgtgccaccctggctgaccagc

SEQ ID NO: 465445 - DNA, 382 bp, Homo sapiens; identical to SEQ ID NO: 459587
  chr2:127413347-127413729
  hypo
  lung vs. sarcoma,lymphoid_neoplasm,anorectal

SEQ ID NO: 465446 - DNA, 53 bp, Homo sapiens; identical to SEQ ID NO: 459588
  chr2:127413676-127413729
  hypo
  lung vs. sarcoma,melanoma,anorectal,lymphoid_neoplasm

SEQ ID NO: 465447 - DNA, 255 bp, Homo sapiens; identical to SEQ ID NO: 349581
  chr2:127414108-127414363
  hypo
  lung vs. sarcoma,melanoma,anorectal,lymphoid_neoplasm

SEQ ID NO: 465448 - DNA, 98 bp, Homo sapiens; identical to SEQ ID NO: 455078
  chr2:127428888-127428986
  hypo
  lung vs. sarcoma,lymphoid_neoplasm,anorectal,breast, uterine,melanoma,cervical,head_and_neck

SEQ ID NO: 465449 - DNA, 244 bp, Homo sapiens; identical to SEQ ID NO: 353173
  chr2:127435291-127435535
  hypo
  lung vs. sarcoma,renal,lymphoid_neoplasm, multiple_myeloma

SEQ ID NO: 465450 - DNA, 108 bp, Homo sapiens
  chr2:127438526-127438634
  hypo
  lung vs. lymphoid_neoplasm,melanoma,sarcoma
cgggcaggtcagggcggcgggaagggaccttaacagaccttctagtcggcgactttgaagattcttcaagacaatagccagttctgaagattcatccccgtttcttca

SEQ ID NO: 465451 - DNA, 199 bp, Homo sapiens
  chr2:128583664-128583863
  hypo
  lung vs. lymphoid_neoplasm,liver_bileduct,melanoma, sarcoma,ovary,anorectal,uterine,colorectal,breast
cgaaagtgctgggattacaggtgtgagccgctgcgcgtcaccaccaatccattttctccaggacctctctctgtgcagagagctcttctctttcacctattaaacttccactctgaacctcactctttgtatatccgcatcctagtgttctgtggctttagacaaggaacctcgagtatttacccaagacgatgatatc

SEQ ID NO: 465452 - DNA, 10 bp, Homo sapiens
  chr2:130948153-130948163
  hypo
  lung vs. liver_bileduct
caaggggggc

SEQ ID NO: 465453 - DNA, 51 bp, Homo sapiens; identical to SEQ ID NO: 453124
  chr2:149632592-149632643
  hypo
  lung vs. ovary

SEQ ID NO: 465454 - DNA, 9 bp, Homo sapiens
  chr2:160760627-160760636
  hypo
  lung vs. upper_gi
cgggaatcg

SEQ ID NO: 465455 - DNA, 51 bp, Homo sapiens
  chr2:172411075-172411126
  hypo
cgtaaatacgcttggccttctgatcctggtgttcggggccctcattttttg

SEQ ID NO: 465456 - DNA, 325 bp, Homo sapiens; identical to SEQ ID NO: 453144
  chr2:219232221-219232546
  hypo
  lung vs. pancreas_gallbladder

SEQ ID NO: 465457 - DNA, 32 bp, Homo sapiens; identical to SEQ ID NO: 357453
  chr2:219232859-219232891
  hypo
  lung vs. pancreas_gallbladder

SEQ ID NO: 465458 - DNA, 337 bp, Homo sapiens; identical to SEQ ID NO: 337887
  chr2:227841945-227842282
  hypo
  lung vs. liver_bileduct

SEQ ID NO: 465459 - DNA, 92 bp, Homo sapiens
  chr2:230795444-230795536
  hypo
  lung vs. liver_bileduct
cgacagtgagatgccgtctcaaaacaaaaacaaaagagagatgctttaccccttcgccactgcacctgagaacctcagcccagctcagctgt

SEQ ID NO: 465460 - DNA, 105 bp, Homo sapiens; identical to SEQ ID NO: 464464
  chr2:232479181-232479286
  hypo
  lung vs. upper_gi,pancreas_gallbladder

SEQ ID NO: 465461 - DNA, 227 bp, Homo sapiens; identical to SEQ ID NO: 349701
  chr2:232479454-232479681
  hypo
  lung vs. upper_gi,pancreas_gallbladder

SEQ ID NO: 465462 - DNA, 216 bp, Homo sapiens; identical to SEQ ID NO: 337911
  chr2:236452983-236453199
  hypo
  lung vs. liver_bileduct

SEQ ID NO: 465463 - DNA, 49 bp, Homo sapiens; identical to SEQ ID NO: 363148
  chr2:240169135-240169184
  hypo
  lung vs. breast

SEQ ID NO: 465464 - DNA, 142 bp, Homo sapiens
  chr2:240213554-240213696
  hypo
  lung vs. liver_bileduct
cgggagccgccgattacatttgcatgaaaatagaacctttgtttgcaagagttcccgctccagtggatccctcctttgtctgcagcacagcaactgatggggcaggatgctggtgtgtgcacacagcccagctcaggacagc

SEQ ID NO: 465465 - DNA, 31 bp, Homo sapiens; identical to SEQ ID NO: 353259
  chr2:240213811-240213842
  hypo
  lung vs. liver_bileduct

SEQ ID NO: 465466 - DNA, 209 bp, Homo sapiens; identical to SEQ ID NO: 353265
  chr2:241157300-241157509
  hypo
  lung vs. melanoma,sarcoma

SEQ ID NO: 465467 - DNA, 131 bp, Homo sapiens; identical to SEQ ID NO: 337989
  chr2:242277184-242277315
  hypo
  lung vs. liver_bileduct

SEQ ID NO: 465468 - DNA, 241 bp, Homo sapiens; identical to SEQ ID NO: 345785
  chr2:242436503-242436744
  hypo
  lung vs. liver_bileduct

SEQ ID NO: 465469 - DNA, 146 bp, Homo sapiens
  chr2:242523762-242523908
  hypo
  lung vs. lymphoid_neoplasm,prostate,anorectal,breast
cgctttggaaaacaaacatcagcagataaaaaaaaaatgtacagcctacgcaagtgataatattcaaaatcctcagccataaaaataaaggccttttatttggtttttctatgccagtacagaaacatctggacaacactcttgag

SEQ ID NO: 465470 - DNA, 223 bp, Homo sapiens
  chr2:242524147-242524370
  hypo
  lung vs. lymphoid_neoplasm,prostate,anorectal,breast
ggagaatggaacaaagatagcttagttttatcttcaaaagattcaatcaatgcctgtgcgcccactgcatgccacacactcatcacgggctgtgagccaggcagtggccctgccagaggagggtagacacacagcccagggcccctgggcatgtcacaatccaggtgcccttcagctgcctccagaagaccaccaggggaacacagggattgtttatttagaa

SEQ ID NO: 465471 - DNA, 47 bp, Homo sapiens; identical to SEQ ID NO: 461832
  chr2:242554503-242554550
  hypo
  lung vs. liver_bileduct

SEQ ID NO: 465472 - DNA, 54 bp, Homo sapiens; identical to SEQ ID NO: 347965
  chr2:242554624-242554678
  hypo
  lung vs. liver_bileduct

SEQ ID NO: 465473 - DNA, 373 bp, Homo sapiens; identical to SEQ ID NO: 337997
  chr2:242572260-242572633
  hypo
  lung vs. upper_gi

SEQ ID NO: 465474 - DNA, 73 bp, Homo sapiens
  chr2:242713983-242714056
  hypo
  lung vs. lymphoid_neoplasm
cgcccgcctgcagtgtcggctgaagagggtaacgtgcgtgcgccccggctgctcccggctgctcccggctgct

SEQ ID NO: 465475 - DNA, 57 bp, Homo sapiens; identical to SEQ ID NO: 376696
  chr2:242714085-242714142
  hypo
  lung vs. lymphoid_neoplasm

SEQ ID NO: 465476 - DNA, 93 bp, Homo sapiens; identical to SEQ ID NO: 356232
  chr20:400189-400282
  hypo
  lung vs. melanoma

SEQ ID NO: 465477 - DNA, 102 bp, Homo sapiens
  chr20:400915-401017
  hypo
  lung vs. sarcoma,melanoma
cgccttagccctaccccgcccccatcgtgacacacgcactaatgacacagacattgatccccgagtgctccccattctgatctcacccctggccccacctgc

SEQ ID NO: 465478 - DNA, 226 bp, Homo sapiens; identical to SEQ ID NO: 453871
  chr20:20376606-20376832
  hypo
  lung vs. breast,colorectal,melanoma,pancreas_gallbladder, sarcoma,uterine,lymphoid_neoplasm,upper_gi,renal,liver_bileduct

SEQ ID NO: 465479 - DNA, 219 bp, Homo sapiens; identical to SEQ ID NO: 453872
  chr20:20376973-20377192
  hypo
  lung vs. breast,colorectal,melanoma,pancreas_gallbladder, sarcoma,uterine,lymphoid_neoplasm,upper_gi,renal,liver_bileduct

SEQ ID NO: 465480 - DNA, 68 bp, Homo sapiens
  chr20:25223074-25223142
  hypo
  lung vs. head_and_neck
cgaaattgaccagcacagatctgccagtggcgttgctgggatcccagagagattttccctccgcacct

SEQ ID NO: 465481 - DNA, 116 bp, Homo sapiens; identical to SEQ ID NO: 368294
  chr20:29873935-29874051
  hypo
  lung vs. anorectal

SEQ ID NO: 465482 - DNA, 78 bp, Homo sapiens; identical to SEQ ID NO: 368296
  chr20:30153987-30154065
  hypo
  lung vs. melanoma

SEQ ID NO: 465483 - DNA, 32 bp, Homo sapiens
  chr20:32677630-32677662
  hypo
  lung vs. liver_bileduct
cgcactgtaggaaatagagtcgtgtgtccttc

SEQ ID NO: 465484 - DNA, 205 bp, Homo sapiens; identical to SEQ ID NO: 368318
  chr20:32677691-32677896
  hypo
  lung vs. liver_bileduct

SEQ ID NO: 465485 - DNA, 100 bp, Homo sapiens; identical to SEQ ID NO: 352489
  chr20:37303401-37303501
  hypo
  lung vs. ovary

SEQ ID NO: 465486 - DNA, 55 bp, Homo sapiens; identical to SEQ ID NO: 368349
  chr20:42833281-42833336
  hypo
  lung vs. lymphoid_neoplasm

SEQ ID NO: 465487 - DNA, 455 bp, Homo sapiens; identical to SEQ ID NO: 344262
  chr20:46234984-46235439
  hypo
  lung vs. pancreas_gallbladder

SEQ ID NO: 465488 - DNA, 167 bp, Homo sapiens; identical to SEQ ID NO: 455111
  chr20:46365433-46365600
  hypo
  lung vs. pancreas_gallbladder

SEQ ID NO: 465489 - DNA, 125 bp, Homo sapiens; identical to SEQ ID NO: 368358
  chr20:46365635-46365760
  hypo
  lung vs. pancreas_gallbladder

SEQ ID NO: 465490 - DNA, 2 bp, Homo sapiens
  chr20:46823362-46823364
  hypo
cg

SEQ ID NO: 465491 - DNA, 93 bp, Homo sapiens; identical to SEQ ID NO: 356291
  chr20:46823583-46823676
  hypo

SEQ ID NO: 465492 - DNA, 158 bp, Homo sapiens; identical to SEQ ID NO: 344282
  chr20:49178954-49179112
  hypo
  lung vs. upper_gi,head_and_neck

SEQ ID NO: 465493 - DNA, 242 bp, Homo sapiens; identical to SEQ ID NO: 356304
  chr20:49206898-49207140
  hypo
  lung vs. head_and_neck,liver_bileduct, pancreas_gallbladder

SEQ ID NO: 465494 - DNA, 174 bp, Homo sapiens; identical to SEQ ID NO: 344302
  chr20:52374073-52374247
  hypo
  lung vs. liver_bileduct

SEQ ID NO: 465495 - DNA, 226 bp, Homo sapiens; identical to SEQ ID NO: 344308
  chr20:56001391-56001617
  hypo
  lung vs. liver_bileduct

SEQ ID NO: 465496 - DNA, 91 bp, Homo sapiens; identical to SEQ ID NO: 356315
  chr20:56772299-56772390
  hypo
  lung vs. melanoma,sarcoma,breast

SEQ ID NO: 465497 - DNA, 3 bp, Homo sapiens
  chr20:60485014-60485017
  hypo
cgt

SEQ ID NO: 465498 - DNA, 242 bp, Homo sapiens; identical to SEQ ID NO: 368427
  chr20:60485425-60485667
  hypo

SEQ ID NO: 465499 - DNA, 128 bp, Homo sapiens; identical to SEQ ID NO: 368439
  chr20:60756218-60756346
  hypo
  lung vs. head_and_neck,pancreas_gallbladder

SEQ ID NO: 465500 - DNA, 579 bp, Homo sapiens
  chr20:60855793-60856372
  hypo
  lung vs. pancreas_gallbladder
cgtgtgtgtttcgtgaggtggcctttcttttgacgacttcacaggaaagccatttgtctttgttcagtcttctttgattgcttattaacttgtcttgacatttaagtagaaagctttgtagatgctacaaaggaaagaagaagtacatttcaaacgcatgctaaatacacagcctccgtcgcaggggcttcaaagcagcgtgctgctctcccgcgggtgccggttgctgtgacccagccccgcctggtcgttgcgtcttgggtcacgtcgtgtcttggcttttctggactctcactgcttgttttctggtgtcttcacagacataatgaagcctacacctggaccaaccccacctgctgcgtccacaacgtcatcatcgggaagctgtggatagagcagtatgggacagtggagattttaaaccacaggtgacagcaccccaccgttgggtgagagcgcgaggctccgggtggggatgggcgagccggggagcgtgagcatccgtgctcctggtgggttttagctcagcctcacgagctgctgccgtgtccccgccagcccaggcatagcagctgccta

SEQ ID NO: 465501 - DNA, 260 bp, Homo sapiens
  chr20:60856401-60856661
  hypo
  lung vs. pancreas_gallbladder
atgctcctcgttcaagacctcgtttttcgtcacggttgttactttaaggctttgagctatgctgaagagctgtgtcattgccaggtgcagcgcagtggccgtccacggccgttggccactgtctaggcttgaatgccctattcctggaagctcatgactggtgggctttgccttttcaccactttagtgaggtataatcgatgcatcataagactcgcccattctgaatggacacttaagtgatttttagtaaattgacc

SEQ ID NO: 465502 - DNA, 202 bp, Homo sapiens
  chr20:60856170-60856372
  hypo
  lung vs. pancreas_gallbladder
cgggaagctgtggatagagcagtatgggacagtggagattttaaaccacaggtgacagcaccccaccgttgggtgagagcgcgaggctccgggtggggatgggcgagccggggagcgtgagcatccgtgctcctggtgggttttagctcagcctcacgagctgctgccgtgtccccgccagcccaggcatagcagctgccta

SEQ ID NO: 465503 - DNA, 462 bp, Homo sapiens
  chr20:60856401-60856863
  hypo
  lung vs. pancreas_gallbladder
atgctcctcgttcaagacctcgtttttcgtcacggttgttactttaaggctttgagctatgctgaagagctgtgtcattgccaggtgcagcgcagtggccgtccacggccgttggccactgtctaggcttgaatgccctattcctggaagctcatgactggtgggctttgccttttcaccactttagtgaggtataatcgatgcatcataagactcgcccattctgaatggacacttaagtgatttttagtaaattgaccgaatcatggagccgtccccacagcccatttcaaacacttccatcgccccaaaggcccaccacacccatttgcagtcaccccccgcctgccccaggggcctccaccgcgcttctcctgttacagagttaccctttccggctgtttgctgtcttgcagcagaaacctgtgtttgtttttctcacagaactggacataagtgtgt

SEQ ID NO: 465504 - DNA, 148 bp, Homo sapiens; identical to SEQ ID NO: 368446
  chr20:60856892-60857040
  hypo
  lung vs. pancreas_gallbladder

SEQ ID NO: 465505 - DNA, 105 bp, Homo sapiens
  chr20:60976568-60976673
  hypo
  lung vs. liver_bileduct
cgccccgggccccacagagaggtgtcggtgtgtccggcagacatggagaggatcacgcatgtgcagatgtaccaccttacgcctagctggaagcagcacacacgc

SEQ ID NO: 465506 - DNA, 121 bp, Homo sapiens; identical to SEQ ID NO: 383077
  chr20:60976778-60976899
  hypo
  lung vs. liver_bileduct

SEQ ID NO: 465507 - DNA, 212 bp, Homo sapiens; identical to SEQ ID NO: 456877
  chr20:60984130-60984342
  hypo

SEQ ID NO: 465508 - DNA, 21 bp, Homo sapiens
  chr20:61506536-61506557
  hypo
  lung vs. lymphoid_neoplasm
gtgaattcatcggggagcccc

SEQ ID NO: 465509 - DNA, 62 bp, Homo sapiens
  chr20:61527423-61527485
  hypo
  lung vs. pancreas_gallbladder,head_and_neck
cgccagtgcaacaatacgtgggcggcagaaggatcacagaggagaaagaaacgtcttagctt

SEQ ID NO: 465510 - DNA, 54 bp, Homo sapiens; identical to SEQ ID NO: 383093
  chr20:61527514-61527568
  hypo
  lung vs. pancreas_gallbladder,head_and_neck

SEQ ID NO: 465511 - DNA, 56 bp, Homo sapiens
  chr20:61527972-61528028
  hypo
  lung vs. pancreas_gallbladder,liver_bileduct,upper_gi
cgtcctggggctggcgaggccattggaacagaaggtaccactggcttccttacggc

SEQ ID NO: 465512 - DNA, 124 bp, Homo sapiens; identical to SEQ ID NO: 368465
  chr20:61528147-61528271
  hypo
  lung vs. pancreas_gallbladder,liver_bileduct,upper_gi

SEQ ID NO: 465513 - DNA, 46 bp, Homo sapiens; identical to SEQ ID NO: 356349
  chr20:61974409-61974455
  hypo
  lung vs. lymphoid_neoplasm

SEQ ID NO: 465514 - DNA, 234 bp, Homo sapiens; identical to SEQ ID NO: 456881
  chr20:62031374-62031608
  hypo
  lung vs. anorectal

SEQ ID NO: 465515 - DNA, 7 bp, Homo sapiens
  chr20:62046195-62046202
  hypo
  lung vs. anorectal
cgtggcc

SEQ ID NO: 465516 - DNA, 58 bp, Homo sapiens; identical to SEQ ID NO: 455130
  chr21:19274771-19274829
  hypo
  lung vs. lymphoid_neoplasm

SEQ ID NO: 465517 - DNA, 214 bp, Homo sapiens; identical to SEQ ID NO: 383216
  chr21:43546440-43546654
  hypo
  lung vs. upper_gi

SEQ ID NO: 465518 - DNA, 166 bp, Homo sapiens
  chr21:44837213-44837379
  hypo
  lung vs. bladder_and_urothelial,breast
tcacccacccagggactttaaaggacacgcccgcctgctgcacccccatggctcagcacctaggacctacgccccacacatctccctggctgggagcgggggtgtgcactgggctacagagaggagggaaccacttagcagatgaggttcctcgaggagataacct

SEQ ID NO: 465519 - DNA, 15 bp, Homo sapiens
  chr21:44866930-44866945
  hypo
  lung vs. renal
gtgccaggcacctgc

SEQ ID NO: 465520 - DNA, 52 bp, Homo sapiens
  chr21:45352895-45352947
  hypo
  lung vs. liver_bileduct
cgctctctctccctcacagcgtgccaggtgccttttctctgcgttctcgtca

SEQ ID NO: 465521 - DNA, 501 bp, Homo sapiens
  chr21:45353002-45353503
  hypo
  lung vs. liver_bileduct
cctccctgtggcttcgatttgcttctccctgatggttaataatgccgaacagctcttcgttaacctgctggctgtcggtgtggctccttctgaggcacagccgttcgggtcctttgctgtttgctttcttgctattgagtctgagcccctttaccctgtggatgctgggcctgcatcgggcatgtggtctgcagggttttctctcccttgcgggtcgtctctttaccctgtcgttccctttgtcatgcagaagctgtttagtttgccgtaatcccagtggtctatgtttgcttttgtcgtgtatcttttttaaagctctgccatctgttttctccatggggaaaggtttgggaatatcgatgatgtcatcatactcctggctgcttcttgacattttccatgcccagcattgttctcagtgcgccccgggggtctttggttctccatagcctgctggcgtccatgtgtttttattctttctttatggttgaggaaactgag

SEQ ID NO: 465522 - DNA, 85 bp, Homo sapiens; identical to SEQ ID NO: 368589
  chr21:45353564-45353649
  hypo
  lung vs. liver_bileduct

SEQ ID NO: 465523 - DNA, 105 bp, Homo sapiens; identical to SEQ ID NO: 344539
  chr21:45499846-45499951
  hypo
  lung vs. liver_bileduct

SEQ ID NO: 465524 - DNA, 9 bp, Homo sapiens
  chr21:45516603-45516612
  hypo
  lung vs. liver_bileduct
ctgctgctc

SEQ ID NO: 465525 - DNA, 15 bp, Homo sapiens
  chr21:46036558-46036573
  hypo
  lung vs. colorectal
cgagaccctgccctg

SEQ ID NO: 465526 - DNA, 21 bp, Homo sapiens
  chr21:46206052-46206073
  hypo
  lung vs. bladder_and_urothelial,liver_bileduct
cgccactctgggcccctgcag

SEQ ID NO: 465527 - DNA, 97 bp, Homo sapiens; identical to SEQ ID NO: 368608
  chr21:46206226-46206323
  hypo
  lung vs. bladder_and_urothelial,liver_bileduct

SEQ ID NO: 465528 - DNA, 11 bp, Homo sapiens
  chr21:47425511-47425522
  hypo
  lung vs. melanoma,breast
cggggtgcacg

SEQ ID NO: 465529 - DNA, 19 bp, Homo sapiens
  chr21:47602441-47602460
  hypo
  lung vs. liver_bileduct
cgcatcagggagctggccg

SEQ ID NO: 465530 - DNA, 384 bp, Homo sapiens; identical to SEQ ID NO: 349095
  chr21:47602705-47603089
  hypo
  lung vs. liver_bileduct

SEQ ID NO: 465531 - DNA, 276 bp, Homo sapiens; identical to SEQ ID NO: 344643
  chr21:47640150-47640426
  hypo
  lung vs. head_and_neck,liver_bileduct

SEQ ID NO: 465532 - DNA, 45 bp, Homo sapiens; identical to SEQ ID NO: 461886
  chr22:18328049-18328094
  hypo
  lung vs. melanoma,upper_gi,colorectal,uterine

SEQ ID NO: 465533 - DNA, 426 bp, Homo sapiens; identical to SEQ ID NO: 368703
  chr22:18619428-18619854
  hypo
  lung vs. pancreas_gallbladder

SEQ ID NO: 465534 - DNA, 130 bp, Homo sapiens; identical to SEQ ID NO: 454357
  chr22:19706042-19706172
  hypo
  lung vs. anorectal,ovary

SEQ ID NO: 465535 - DNA, 176 bp, Homo sapiens; identical to SEQ ID NO: 461887
  chr22:19771495-19771671
  hypo
  lung vs. pancreas_gallbladder

SEQ ID NO: 465536 - DNA, 218 bp, Homo sapiens; identical to SEQ ID NO: 356483
  chr22:19771889-19772107
  hypo
  lung vs. pancreas_gallbladder

SEQ ID NO: 465537 - DNA, 10 bp, Homo sapiens
  chr22:21154023-21154033
  hypo
  lung vs. renal,sarcoma,lymphoid_neoplasm,melanoma
tgggtccacc

SEQ ID NO: 465538 - DNA, 98 bp, Homo sapiens
  chr22:22057979-22058077
  hypo
  lung vs. breast,colorectal,pancreas_gallbladder, anorectal
cgcgtttcagaaactcccggcggggggatggtgggttctttcaggacccctaaagacccaggtgattctacacagggcactgtgtaggtgccatccag

SEQ ID NO: 465539 - DNA, 117 bp, Homo sapiens
  chr22:23437460-23437577
  hypo
  lung vs. pancreas_gallbladder
cggaggcggggggctgcagggagcacaccagcgaccggccctccaaccctccagccactcagcaacatcgccacagcaaccagcaaccagacggcagcagccgaggcaaacacaagc

SEQ ID NO: 465540 - DNA, 74 bp, Homo sapiens; identical to SEQ ID NO: 356498
  chr22:23437631-23437705
  hypo
  lung vs. pancreas_gallbladder

SEQ ID NO: 465541 - DNA, 90 bp, Homo sapiens; identical to SEQ ID NO: 368727
  chr22:23453477-23453567
  hypo
  lung vs. breast

SEQ ID NO: 465542 - DNA, 8 bp, Homo sapiens
  chr22:29446643-29446651
  hypo
  lung vs. liver_bileduct,melanoma
gagccagc

SEQ ID NO: 465543 - DNA, 199 bp, Homo sapiens; identical to SEQ ID NO: 362054
  chr22:29876679-29876878
  hypo
  lung vs. sarcoma

SEQ ID NO: 465544 - DNA, 269 bp, Homo sapiens; identical to SEQ ID NO: 356530
  chr22:35848670-35848939
  hypo
  lung vs. lymphoid_neoplasm,renal

SEQ ID NO: 465545 - DNA, 127 bp, Homo sapiens; identical to SEQ ID NO: 344749
  chr22:36519474-36519601
  hypo
  lung vs. cervical

SEQ ID NO: 465546 - DNA, 59 bp, Homo sapiens; identical to SEQ ID NO: 344793
  chr22:42033751-42033810
  hypo
  lung vs. head_and_neck,upper_gi

SEQ ID NO: 465547 - DNA, 107 bp, Homo sapiens; identical to SEQ ID NO: 458979
  chr22:42995599-42995706
  hypo
  lung vs. liver_bileduct

SEQ ID NO: 465548 - DNA, 151 bp, Homo sapiens; identical to SEQ ID NO: 344799
  chr22:43000061-43000212
  hypo
  lung vs. upper_gi,head_and_neck

SEQ ID NO: 465549 - DNA, 39 bp, Homo sapiens; identical to SEQ ID NO: 368825
  chr22:43434578-43434617
  hypo
  lung vs. pancreas_gallbladder

SEQ ID NO: 465550 - DNA, 734 bp, Homo sapiens; identical to SEQ ID NO: 456938
  chr22:45592910-45593644
  hypo
  lung vs. liver_bileduct

SEQ ID NO: 465551 - DNA, 404 bp, Homo sapiens; identical to SEQ ID NO: 453908
  chr22:45593240-45593644
  hypo
  lung vs. liver_bileduct

SEQ ID NO: 465552 - DNA, 258 bp, Homo sapiens; identical to SEQ ID NO: 346288
  chr22:45593715-45593973
  hypo
  lung vs. liver_bileduct

SEQ ID NO: 465553 - DNA, 114 bp, Homo sapiens
  chr22:46929512-46929626
  hypo
  lung vs. lymphoid_neoplasm
cggccactcaccagacacagacacctccatgagcgcctccagcggccggttgttgtccaggtcgcggctgagctgcagttcgcccgtggcggggtccagcagcaacaggcgcag

SEQ ID NO: 465554 - DNA, 204 bp, Homo sapiens; identical to SEQ ID NO: 458988
  chr22:46929718-46929922
  hypo
  lung vs. lymphoid_neoplasm

SEQ ID NO: 465555 - DNA, 228 bp, Homo sapiens; identical to SEQ ID NO: 383564
  chr22:46930034-46930262
  hypo
  lung vs. lymphoid_neoplasm

SEQ ID NO: 465556 - DNA, 850 bp, Homo sapiens; identical to SEQ ID NO: 344838
  chr22:47197347-47198197
  hypo
  lung vs. liver_bileduct,head_and_neck, pancreas_gallbladder,upper_gi,cervical,ovary

SEQ ID NO: 465557 - DNA, 183 bp, Homo sapiens; identical to SEQ ID NO: 368869
  chr22:47525924-47526107
  hypo
  lung vs. melanoma

SEQ ID NO: 465558 - DNA, 235 bp, Homo sapiens; identical to SEQ ID NO: 456947
  chr22:48027392-48027627
  hypo
  lung vs. lymphoid_neoplasm

SEQ ID NO: 465559 - DNA, 22 bp, Homo sapiens
  chr22:48027655-48027677
  hypo
  lung vs. lymphoid_neoplasm
gtgtcagtgtgcgtgtgcatgg

SEQ ID NO: 465560 - DNA, 41 bp, Homo sapiens; identical to SEQ ID NO: 368872
  chr22:48027786-48027827
  hypo
  lung vs. lymphoid_neoplasm

SEQ ID NO: 465561 - DNA, 59 bp, Homo sapiens; identical to SEQ ID NO: 453192
  chr22:50170525-50170584
  hypo
  lung vs. ovary

SEQ ID NO: 465562 - DNA, 160 bp, Homo sapiens; identical to SEQ ID NO: 356591
  chr22:50170790-50170950
  hypo
  lung vs. ovary

SEQ ID NO: 465563 - DNA, 153 bp, Homo sapiens; identical to SEQ ID NO: 356600
  chr22:50899708-50899861
  hypo
  lung vs. liver_bileduct

SEQ ID NO: 465564 - DNA, 210 bp, Homo sapiens
  chr22:50944156-50944366
  hypo
  lung vs. liver_bileduct
cgtccagcagcgcagtggtaagcaccagcgtcatcaggttgaagaagttgtagttgccggtgatgataatcaggacctgcagcagcacctgggggcggcccgctctcagtgctcccggagactgacgcctggccccgtggcaggcacccacctccaccctgcagggtgcatccctctgctacaaggccttcccaacagcggttgccagct

SEQ ID NO: 465565 - DNA, 103 bp, Homo sapiens; identical to SEQ ID NO: 356604
  chr22:50944716-50944819
  hypo
  lung vs. liver_bileduct

SEQ ID NO: 465566 - DNA, 58 bp, Homo sapiens; identical to SEQ ID NO: 338023
  chr3:10011425-10011483
  hypo
  lung vs. liver_bileduct

SEQ ID NO: 465567 - DNA, 166 bp, Homo sapiens; identical to SEQ ID NO: 455197
  chr3:11581157-11581323
  hypo
  lung vs. head_and_neck

SEQ ID NO: 465568 - DNA, 79 bp, Homo sapiens
  chr3:15123770-15123849
  hypo
  lung vs. liver_bileduct,head_and_neck,upper_gi, colorectal
cgaacaacttcccaaagcattctccagaatctgcaggagtgtacataacaaacagccaaatctgcctaagaaattagac

SEQ ID NO: 465569 - DNA, 42 bp, Homo sapiens; identical to SEQ ID NO: 345790
  chr3:15123992-15124034
  hypo
  lung vs. liver_bileduct,head_and_neck,upper_gi, colorectal

SEQ ID NO: 465570 - DNA, 243 bp, Homo sapiens; identical to SEQ ID NO: 331723
  chr3:30648808-30649051
  hypo
  lung vs. upper_gi

SEQ ID NO: 465571 - DNA, 138 bp, Homo sapiens; identical to SEQ ID NO: 357614
  chr3:51990500-51990638
  hypo
  lung vs. head_and_neck

SEQ ID NO: 465572 - DNA, 552 bp, Homo sapiens
  chr3:52899918-52900470
  hypo
  lung vs. liver_bileduct
cggtggggggacacaaaccgtcacatgctttacacgttgtctaaccttcctgctctcacctactgtacacatggctccattttctttcattagaggctacatggcatcccacagtgtggctgtgccatctcatttactctatgagctgctgccgcgaatgtccctgccatgtgctacctctgcctgtgtgggcccatatctgaggggcagattcctagaggcacacttgctacatcaaaagctatgtgcggcttattctgtggcgccgctctccacagaggctgtgccaactcacactcccactaatagcacgagtacccattcccacattcttgccagcatggtgtactagcaaaccttctcactctgacaatttgatcgctgaagaggctgtctcagcacggctgcggcgtgcacccatcaggccacttgggtgccagggcacctgcggggcttgccaccgtctaccgccttgaggggcctggcagggctcccagtcccaccccatctcacctgctctctcctctcggacatgagcccagagcccctcct

SEQ ID NO: 465573 - DNA, 216 bp, Homo sapiens
  chr3:52900499-52900715
  hypo
  lung vs. liver_bileduct
ataccagggtgtggtggtgctcactctcccagaagtttgggcagtgctactggtgccacacaataggacagcaattatggatgactcaactctacctgtcgacttcacacagcacccaggtcaccgactgctcacttaacgctatgttgtttggttttccacacgccactctcacttggcatgtggagggcggggaccaggcacccagctcgactg

SEQ ID NO: 465574 - DNA, 438 bp, Homo sapiens; identical to SEQ ID NO: 345099
  chr3:124773932-124774370
  hypo
  lung vs. upper_gi,liver_bileduct,pancreas_gallbladder, cervical

SEQ ID NO: 465575 - DNA, 216 bp, Homo sapiens; identical to SEQ ID NO: 338193
  chr3:130424529-130424745
  hypo

SEQ ID NO: 465576 - DNA, 197 bp, Homo sapiens; identical to SEQ ID NO: 464525
  chr3:132756116-132756313
  hypo
  lung vs. pancreas_gallbladder,lymphoid_neoplasm,melanoma, anorectal

SEQ ID NO: 465577 - DNA, 39 bp, Homo sapiens; identical to SEQ ID NO: 346591
  chr3:132756477-132756516
  hypo
  lung vs. pancreas_gallbladder,lymphoid_neoplasm,melanoma, anorectal

SEQ ID NO: 465578 - DNA, 13 bp, Homo sapiens
  chr3:138679565-138679578
  hypo
  lung vs. thyroid,myeloid_neoplasm,anorectal
cgggcacagacgc

SEQ ID NO: 465579 - DNA, 10 bp, Homo sapiens
  chr3:158176360-158176370
  hypo
  lung vs. colorectal
acagttagcc

SEQ ID NO: 465580 - DNA, 54 bp, Homo sapiens; identical to SEQ ID NO: 345815
  chr3:169540679-169540733
  hypo
  lung vs. sarcoma,renal,melanoma,prostate,non_cancer, lymphoid_neoplasm,thyroid

SEQ ID NO: 465581 - DNA, 140 bp, Homo sapiens; identical to SEQ ID NO: 338263
  chr3:183419820-183419960
  hypo
  lung vs. liver_bileduct,upper_gi,pancreas_gallbladder, colorectal

SEQ ID NO: 465582 - DNA, 131 bp, Homo sapiens; identical to SEQ ID NO: 363404
  chr3:184059893-184060024
  hypo
  lung vs. lymphoid_neoplasm

SEQ ID NO: 465583 - DNA, 393 bp, Homo sapiens; identical to SEQ ID NO: 338281
  chr3:185360808-185361201
  hypo
  lung vs. melanoma

SEQ ID NO: 465584 - DNA, 380 bp, Homo sapiens; identical to SEQ ID NO: 454390
  chr3:187456733-187457113
  hypo
  lung vs. pancreas_gallbladder

SEQ ID NO: 465585 - DNA, 154 bp, Homo sapiens; identical to SEQ ID NO: 455246
  chr3:193922622-193922776
  hypo
  lung vs. renal,colorectal

SEQ ID NO: 465586 - DNA, 324 bp, Homo sapiens; identical to SEQ ID NO: 338308
  chr3:194048948-194049272
  hypo
  lung vs. prostate,lymphoid_neoplasm

SEQ ID NO: 465587 - DNA, 23 bp, Homo sapiens
  chr3:194374282-194374305
  hypo
  lung vs. liver_bileduct
cgacggagatggaaaggtgaaca

SEQ ID NO: 465588 - DNA, 11 bp, Homo sapiens
  chr3:194374356-194374367
  hypo
  lung vs. liver_bileduct
tcgagggtggc

SEQ ID NO: 465589 - DNA, 363 bp, Homo sapiens
  chr3:195536308-195536671
  hypo
  lung vs. melanoma,bladder_and_urothelial
cgcccttggtgactgcttttcctgccaaggccctggtcatgcccggtcagatgtgtgggtgccatctcccagccacgaccatctcctctcctggcccagctccacttggtccccttagcgacgcaaaggactcagcgctccacgacatgcctagcttcttcgggtcgtcatggagacgcccttgcacaccaacagtccttcactccttctccgggtcacgcccccgtgcttttccacgcccaccccaggtcttgcccctctgcgctcctctccacagaccccacttcctggctccacatggagctgagtgtccagctggtacccagcacatttgggctcagctttaaatcacagatttggaaa

SEQ ID NO: 465590 - DNA, 284 bp, Homo sapiens; identical to SEQ ID NO: 353430
  chr3:196728448-196728732
  hypo
  lung vs. melanoma,colorectal,breast,uterine

SEQ ID NO: 465591 - DNA, 44 bp, Homo sapiens; identical to SEQ ID NO: 455258
  chr4:628787-628831
  hypo
  lung vs. anorectal

SEQ ID NO: 465592 - DNA, 87 bp, Homo sapiens
  chr4:628950-629037
  hypo
  lung vs. anorectal
ttctgtgctgcgcgtccacctccttacctgcctgcccgcctgcccgcgtgttctgtgctgcgtgtccacctccttacctgcctgccc

SEQ ID NO: 465593 - DNA, 44 bp, Homo sapiens; identical to SEQ ID NO: 455258
  chr4:628787-628831
  hypo
  lung vs. anorectal

SEQ ID NO: 465594 - DNA, 421 bp, Homo sapiens; identical to SEQ ID NO: 455259
  chr4:628950-629371
  hypo
  lung vs. anorectal

SEQ ID NO: 465595 - DNA, 27 bp, Homo sapiens
  chr4:629407-629434
  hypo
  lung vs. anorectal
tgggctccacgtgctcatctgcacatc

SEQ ID NO: 465596 - DNA, 2 bp, Homo sapiens
  chr4:650837-650839
  hypo
  lung vs. lymphoid_neoplasm
cg

SEQ ID NO: 465597 - DNA, 22 bp, Homo sapiens
  chr4:651348-651370
  hypo
  lung vs. lymphoid_neoplasm
ccaggggtcacccaggggtctc

SEQ ID NO: 465598 - DNA, 128 bp, Homo sapiens
  chr4:955057-955185
  hypo
  lung vs. liver_bileduct
cgggagaggccagccgagcagggaccagggacgcccaccctggacctggccctggggcgggagaggccagccgggctcagcggggaccggggacgcccaccctggacctggccctggggcgggagagg

SEQ ID NO: 465599 - DNA, 256 bp, Homo sapiens
  chr4:955544-955800
  hypo
  lung vs. liver_bileduct
cggatctgcttgtgcaggctccgagagtgactgatcttctgcagccccacccgcacgtacacacccttgttgtgcagcctgcaggacggggcaggtcacccatcaccaggggaagccctaccccgccttaggcagcctccgggttccggcccctctgcctgttcctgctgggggacctgagggaggtatgccgttgacaggtggtagcccctgcggctccggtacctgcttgtgaacttgccaggctcctcttccc

SEQ ID NO: 465600 - DNA, 308 bp, Homo sapiens; identical to SEQ ID NO: 453954
  chr4:955544-955852
  hypo
  lung vs. uterine,breast

SEQ ID NO: 465601 - DNA, 24 bp, Homo sapiens
  chr4:955828-955852
  hypo
  lung vs. breast
cgcgtcgatgccaatgccacagta

SEQ ID NO: 465602 - DNA, 53 bp, Homo sapiens; identical to SEQ ID NO: 353458
  chr4:1338812-1338865
  hypo
  lung vs. melanoma,ovary,uterine,sarcoma, lymphoid_neoplasm,cervical

SEQ ID NO: 465603 - DNA, 473 bp, Homo sapiens; identical to SEQ ID NO: 363493
  chr4:1556847-1557320
  hypo
  lung vs. lymphoid_neoplasm,renal

SEQ ID NO: 465604 - DNA, 140 bp, Homo sapiens; identical to SEQ ID NO: 456993
  chr4:1807117-1807257
  hypo
  lung vs. liver_bileduct

SEQ ID NO: 465605 - DNA, 79 bp, Homo sapiens; identical to SEQ ID NO: 456995
  chr4:1827219-1827298
  hypo
  lung vs. pancreas_gallbladder,liver_bileduct,upper_gi

SEQ ID NO: 465606 - DNA, 10 bp, Homo sapiens
  chr4:1827327-1827337
  hypo
  lung vs. pancreas_gallbladder,liver_bileduct,upper_gi
cccagggccc

SEQ ID NO: 465607 - DNA, 63 bp, Homo sapiens; identical to SEQ ID NO: 338394
  chr4:1960880-1960943
  hypo
  lung vs. upper_gi

SEQ ID NO: 465608 - DNA, 300 bp, Homo sapiens
  chr4:1977126-1977426
  hypo
  lung vs. melanoma,liver_bileduct
ggtaaggctgtggcgccctccttccccccaggctctgtgttggcattttgcactcctggagacctgtgtcccccgtgaacagcggcttcctccaggctggcttgttgccgggacaggtgggagcaagttccctgctgtgggctggggaggatggctctcaacaaaggccagtggttaagagttcctcactgaacgtgtttcctggggctgccagaacaatgcctcacagacgcgtggtttcgcagttctgggtgtgggcagggccgtgcgccctctgaaggttccttgggaggctctttc

SEQ ID NO: 465609 - DNA, 56 bp, Homo sapiens; identical to SEQ ID NO: 363505
  chr4:1977525-1977581
  hypo
  lung vs. melanoma,liver_bileduct

SEQ ID NO: 465610 - DNA, 82 bp, Homo sapiens; identical to SEQ ID NO: 363511
  chr4:2459899-2459981
  hypo
  lung vs. lymphoid_neoplasm,renal

SEQ ID NO: 465611 - DNA, 55 bp, Homo sapiens; identical to SEQ ID NO: 353470
  chr4:2926396-2926451
  hypo
  lung vs. liver_bileduct,melanoma,sarcoma, bladder_and_urothelial

SEQ ID NO: 465612 - DNA, 3 bp, Homo sapiens
  chr4:2932837-2932840
  hypo
  lung vs. head_and_neck
cgc

SEQ ID NO: 465613 - DNA, 103 bp, Homo sapiens; identical to SEQ ID NO: 457003
  chr4:3217005-3217108
  hypo
  lung vs. liver_bileduct

SEQ ID NO: 465614 - DNA, 56 bp, Homo sapiens; identical to SEQ ID NO: 345832
  chr4:3217154-3217210
  hypo
  lung vs. liver_bileduct

SEQ ID NO: 465615 - DNA, 222 bp, Homo sapiens; identical to SEQ ID NO: 455269
  chr4:3446222-3446444
  hypo
  lung vs. renal,prostate

SEQ ID NO: 465616 - DNA, 110 bp, Homo sapiens; identical to SEQ ID NO: 455270
  chr4:3446334-3446444
  hypo
  lung vs. prostate,renal

SEQ ID NO: 465617 - DNA, 68 bp, Homo sapiens; identical to SEQ ID NO: 353477
  chr4:3447170-3447238
  hypo
  lung vs. prostate,renal

SEQ ID NO: 465618 - DNA, 23 bp, Homo sapiens
  chr4:6748324-6748347
  hypo
  lung vs. lymphoid_neoplasm
cgtccaccggcaaaggacaatgg

SEQ ID NO: 465619 - DNA, 102 bp, Homo sapiens; identical to SEQ ID NO: 377112
  chr4:7035978-7036080
  hypo
  lung vs. head_and_neck

SEQ ID NO: 465620 - DNA, 81 bp, Homo sapiens; identical to SEQ ID NO: 377144
  chr4:40910486-40910567
  hypo
  lung vs. melanoma

SEQ ID NO: 465621 - DNA, 28 bp, Homo sapiens
  chr4:83323708-83323736
  hypo
  lung vs. head_and_neck,bladder_and_urothelial, pancreas_gallbladder,breast,colorectal
cggcggggggcagcgggagcagtagttc

SEQ ID NO: 465622 - DNA, 233 bp, Homo sapiens; identical to SEQ ID NO: 461074
  chr4:111543735-111543968
  hypo
  lung vs. colorectal

SEQ ID NO: 465623 - DNA, 61 bp, Homo sapiens; identical to SEQ ID NO: 461075
  chr4:111543907-111543968
  hypo
  lung vs. colorectal

SEQ ID NO: 465624 - DNA, 229 bp, Homo sapiens; identical to SEQ ID NO: 464557
  chr4:113438278-113438507
  hypo
  lung vs. bladder_and_urothelial

SEQ ID NO: 465625 - DNA, 132 bp, Homo sapiens; identical to SEQ ID NO: 338541
  chr4:130168471-130168603
  hypo
  lung vs. head_and_neck

SEQ ID NO: 465626 - DNA, 17 bp, Homo sapiens
  chr4:153918932-153918949
  hypo
  lung vs. colorectal
cggtgcatccctgaggc

SEQ ID NO: 465627 - DNA, 373 bp, Homo sapiens; identical to SEQ ID NO: 363621
  chr4:153943334-153943707
  hypo
  lung vs. liver_bileduct

SEQ ID NO: 465628 - DNA, 155 bp, Homo sapiens; identical to SEQ ID NO: 338571
  chr4:184278181-184278336
  hypo
  lung vs. sarcoma

SEQ ID NO: 465629 - DNA, 368 bp, Homo sapiens; identical to SEQ ID NO: 338593
  chr5:476496-476864
  hypo
  lung vs. pancreas_gallbladder,liver_bileduct

SEQ ID NO: 465630 - DNA, 88 bp, Homo sapiens
  chr5:490615-490703
  hypo
  lung vs. pancreas_gallbladder
cggggaccattgtgacgtggccacagagccacggagtgtgcccggctctcaaaggagcggccctgacggccagactgatcacaggcta

SEQ ID NO: 465631 - DNA, 458 bp, Homo sapiens; identical to SEQ ID NO: 464564
  chr5:490766-491224
  hypo
  lung vs. pancreas_gallbladder

SEQ ID NO: 465632 - DNA, 12 bp, Homo sapiens
  chr5:1073469-1073481
  hypo
  lung vs. breast,liver_bileduct
cggctctggacg

SEQ ID NO: 465633 - DNA, 431 bp, Homo sapiens; identical to SEQ ID NO: 453970
  chr5:1074389-1074820
  hypo
  lung vs. liver_bileduct,breast

SEQ ID NO: 465634 - DNA, 62 bp, Homo sapiens
  chr5:2225378-2225440
  hypo
  lung vs. lymphoid_neoplasm,pancreas_gallbladder,cervical, bladder_and_urothelial,breast
cgcaggtgcacagcaagggagccgagtttcctccagcgcttgaaaaaaaagtgtttactttg

SEQ ID NO: 465635 - DNA, 133 bp, Homo sapiens; identical to SEQ ID NO: 353586
  chr5:2225469-2225602
  hypo
  lung vs. lymphoid_neoplasm,pancreas_gallbladder,cervical, bladder_and_urothelial,breast

SEQ ID NO: 465636 - DNA, 23 bp, Homo sapiens
  chr5:2261209-2261232
  hypo
  lung vs. anorectal
cggaaagcctgctctccgggtgg

SEQ ID NO: 465637 - DNA, 298 bp, Homo sapiens; identical to SEQ ID NO: 463781
  chr5:2261313-2261611
  hypo
  lung vs. anorectal

SEQ ID NO: 465638 - DNA, 155 bp, Homo sapiens; identical to SEQ ID NO: 338679
  chr5:2524957-2525112
  hypo
  lung vs. head_and_neck

SEQ ID NO: 465639 - DNA, 48 bp, Homo sapiens
  chr5:2547115-2547163
  hypo
  lung vs. head_and_neck
cggtgttagtgcccaccagcctccccggtcaccctgttagcccagact

SEQ ID NO: 465640 - DNA, 128 bp, Homo sapiens; identical to SEQ ID NO: 363728
  chr5:2547192-2547320
  hypo
  lung vs. head_and_neck

SEQ ID NO: 465641 - DNA, 37 bp, Homo sapiens; identical to SEQ ID NO: 463786
  chr5:3221011-3221048
  hypo
  lung vs. head_and_neck

SEQ ID NO: 465642 - DNA, 142 bp, Homo sapiens; identical to SEQ ID NO: 353590
  chr5:3221181-3221323
  hypo
  lung vs. head_and_neck

SEQ ID NO: 465643 - DNA, 52 bp, Homo sapiens
  chr5:3324702-3324754
  hypo
  lung vs. anorectal,lymphoid_neoplasm,renal,prostate, non_cancer,bladder_and_urothelial
cggcgcggtggggctgggtcccaggctggctccccgccctccctcctactgt

SEQ ID NO: 465644 - DNA, 283 bp, Homo sapiens; identical to SEQ ID NO: 348078
  chr5:3325333-3325616
  hypo
  lung vs. anorectal,lymphoid_neoplasm,renal,prostate, non_cancer,bladder_and_urothelial

SEQ ID NO: 465645 - DNA, 208 bp, Homo sapiens; identical to SEQ ID NO: 353598
  chr5:3932149-3932357
  hypo

SEQ ID NO: 465646 - DNA, 158 bp, Homo sapiens; identical to SEQ ID NO: 338697
  chr5:9497496-9497654
  hypo
  lung vs. head_and_neck

SEQ ID NO: 465647 - DNA, 125 bp, Homo sapiens; identical to SEQ ID NO: 363746
  chr5:10479713-10479838
  hypo
  lung vs. breast,melanoma

SEQ ID NO: 465648 - DNA, 171 bp, Homo sapiens; identical to SEQ ID NO: 456015
  chr5:10564301-10564472
  hypo
  lung vs. lymphoid_neoplasm,ovary

SEQ ID NO: 465649 - DNA, 53 bp, Homo sapiens; identical to SEQ ID NO: 453291
  chr5:75698192-75698245
  hypo
  lung vs. upper_gi,colorectal

SEQ ID NO: 465650 - DNA, 916 bp, Homo sapiens; identical to SEQ ID NO: 453292
  chr5:75698274-75699190
  hypo
  lung vs. upper_gi,colorectal

SEQ ID NO: 465651 - DNA, 267 bp, Homo sapiens; identical to SEQ ID NO: 453294
  chr5:75699193-75699460
  hypo
  lung vs. upper_gi

SEQ ID NO: 465652 - DNA, 19 bp, Homo sapiens
  chr5:75700173-75700192
  hypo
  lung vs. upper_gi
ccagattaacaccaaccac

SEQ ID NO: 465653 - DNA, 38 bp, Homo sapiens; identical to SEQ ID NO: 456033
  chr5:77268330-77268368
  hypo
  lung vs. ovary,thyroid,myeloid_neoplasm,uterine

SEQ ID NO: 465654 - DNA, 78 bp, Homo sapiens; identical to SEQ ID NO: 338753
  chr5:79097441-79097519
  hypo
  lung vs. pancreas_gallbladder

SEQ ID NO: 465655 - DNA, 32 bp, Homo sapiens
  chr5:142625544-142625576
  hypo
  lung vs. anorectal,lymphoid_neoplasm
cggtcatgccaagtctcagtgccccctccgct

SEQ ID NO: 465656 - DNA, 14 bp, Homo sapiens
  chr5:149810914-149810928
  hypo
  lung vs. melanoma,breast
ccaatgatgctgac

SEQ ID NO: 465657 - DNA, 143 bp, Homo sapiens; identical to SEQ ID NO: 464637
  chr5:172665306-172665449
  hypo
  lung vs. ovary

SEQ ID NO: 465658 - DNA, 297 bp, Homo sapiens; identical to SEQ ID NO: 358315
  chr5:172665949-172666246
  hypo
  lung vs. ovary

SEQ ID NO: 465659 - DNA, 121 bp, Homo sapiens; identical to SEQ ID NO: 338907
  chr5:179023553-179023674
  hypo
  lung vs. liver_bileduct,upper_gi,breast, pancreas_gallbladder,lymphoid_neoplasm

SEQ ID NO: 465660 - DNA, 97 bp, Homo sapiens
  chr6:1726588-1726685
  hypo
  lung vs. head_and_neck
cgcatttgcccagccagccagccaaatgtggccacgcactgggtggccagagagtccttaccacttcagttggccggtagtacttgagatccacagt

SEQ ID NO: 465661 - DNA, 48 bp, Homo sapiens; identical to SEQ ID NO: 363947
  chr6:1726859-1726907
  hypo
  lung vs. head_and_neck

SEQ ID NO: 465662 - DNA, 155 bp, Homo sapiens; identical to SEQ ID NO: 338934
  chr6:2108917-2109072
  hypo
  lung vs. liver_bileduct

SEQ ID NO: 465663 - DNA, 37 bp, Homo sapiens; identical to SEQ ID NO: 345876
  chr6:4910947-4910984
  hypo
  lung vs. bladder_and_urothelial,liver_bileduct,upper_gi, pancreas_gallbladder,cervical,colorectal,melanoma, lymphoid_neoplasm

SEQ ID NO: 465664 - DNA, 144 bp, Homo sapiens; identical to SEQ ID NO: 338987
  chr6:13386531-13386675
  hypo
  lung vs. liver_bileduct,head_and_neck

SEQ ID NO: 465665 - DNA, 5 bp, Homo sapiens
  chr6:18036015-18036020
  hypo
  lung vs. pancreas_gallbladder
tgagc

SEQ ID NO: 465666 - DNA, 162 bp, Homo sapiens; identical to SEQ ID NO: 338999
  chr6:21202340-21202502
  hypo
  lung vs. upper_gi,liver_bileduct

SEQ ID NO: 465667 - DNA, 413 bp, Homo sapiens
  chr6:25726863-25727276
  hypo
  lung vs. head_and_neck,pancreas_gallbladder
cgtctacccaatcagaaagtcgtactagaatcgcctcatttgcattcacgccacttcccattgtccaatcagattttggataccgaacgcggcgtttgagggccgtgcctataaataccgcatctttcatcctccagttctgtttgtttacttggcgagacttggagctgaggtcatttggagctgtttaatactgaagagctgttgagcactggaaagtgctgtgtaaccctggaaaagaaccgtgtaacgctgcagaagtgtgtggtagctatgccggaggtgtcatctaaaggtgctaccatttccaagaagggctttaagaaagctgtcgttaagacccagaaaaaggaaggcaaaaagcgcaagaggacccgtaaggagagttattctatttacatctacaaagtgct

SEQ ID NO: 465668 - DNA, 255 bp, Homo sapiens; identical to SEQ ID NO: 353756
  chr6:25727391-25727646
  hypo
  lung vs. head_and_neck,pancreas_gallbladder

SEQ ID NO: 465669 - DNA, 214 bp, Homo sapiens; identical to SEQ ID NO: 464663
  chr6:26198924-26199138
  hypo
  lung vs. bladder_and_urothelial,head_and_neck,upper_gi, cervical,melanoma,colorectal,uterine,anorectal,breast, liver_bileduct,prostate,ovary

SEQ ID NO: 465670 - DNA, 16 bp, Homo sapiens
  chr6:26199167-26199183
  hypo
  lung vs. bladder_and_urothelial,head_and_neck,upper_gi, cervical,melanoma,colorectal,uterine,anorectal,breast, liver_bileduct,prostate,ovary
tgactttacccagcaa

SEQ ID NO: 465671 - DNA, 16 bp, Homo sapiens
  chr6:26199167-26199183
  hypo
  lung vs. head_and_neck,bladder_and_urothelial,upper_gi, cervical,colorectal,melanoma,anorectal,uterine,breast,prostate, liver_bileduct,ovary
tgactttacccagcaa

SEQ ID NO: 465672 - DNA, 2 bp, Homo sapiens
  chr6:26199878-26199880
  hypo
  lung vs. head_and_neck,bladder_and_urothelial,upper_gi, cervical,colorectal,melanoma,anorectal,uterine,breast,prostate, liver_bileduct,ovary
gc

SEQ ID NO: 465673 - DNA, 126 bp, Homo sapiens; identical to SEQ ID NO: 464676
  chr6:26241269-26241395
  hypo
  lung vs. sarcoma

SEQ ID NO: 465674 - DNA, 481 bp, Homo sapiens
  chr6:35454062-35454543
  hypo
  lung vs. renal
cgagcccggcttgtttatgaggaggagcgcggaggaggatccagacacacaggcttgcgcgcccagactcgcccggccagcggctggcggcctccgacgtcaccaaaccggttgggtgagagggcagagagcagggggaagggccgcagtcccgcccgcgccccccggcacgcaccgtacatcttgccctcgtctgacaggatgatcttccgccggccgcagggcgggtagatggccagggcctcctggaagctctgctcgatgtccgggctccacacgccctccgcatcgttgtccagccccttgtccaggccctcgggcccatcctcccgggcctccccggggctgctgctggcgttccagctgttggacgctattgtgctggttgctctgggctctgggcctgagcccactgggcggctgagcctgggggacagacagacaggaactgggaccagggtcctcctcgaccacagcaatc

SEQ ID NO: 465675 - DNA, 245 bp, Homo sapiens; identical to SEQ ID NO: 377687
  chr6:35454589-35454834
  hypo
  lung vs. renal

SEQ ID NO: 465676 - DNA, 314 bp, Homo sapiens; identical to SEQ ID NO: 455328
  chr6:37023826-37024140
  hypo
  lung vs. melanoma,sarcoma,renal

SEQ ID NO: 465677 - DNA, 90 bp, Homo sapiens; identical to SEQ ID NO: 353769
  chr6:37275483-37275573
  hypo
  lung vs. upper_gi,liver_bileduct,colorectal, pancreas_gallbladder,lymphoid_neoplasm

SEQ ID NO: 465678 - DNA, 154 bp, Homo sapiens; identical to SEQ ID NO: 464700
  chr6:41339068-41339222
  hypo
  lung vs. bladder_and_urothelial

SEQ ID NO: 465679 - DNA, 312 bp, Homo sapiens; identical to SEQ ID NO: 339048
  chr6:41620850-41621162
  hypo
  lung vs. head_and_neck

SEQ ID NO: 465680 - DNA, 57 bp, Homo sapiens; identical to SEQ ID NO: 364043
  chr6:43478745-43478802
  hypo
  lung vs. lymphoid_neoplasm

SEQ ID NO: 465681 - DNA, 132 bp, Homo sapiens; identical to SEQ ID NO: 348169
  chr6:136556331-136556463
  hypo
  lung vs. upper_gi,liver_bileduct,colorectal,ovary, anorectal,renal

SEQ ID NO: 465682 - DNA, 16 bp, Homo sapiens
  chr6:152623493-152623509
  hypo
  lung vs. uterine,bladder_and_urothelial,liver_bileduct, lymphoid_neoplasm,breast,cervical,head_and_neck,ovary,prostate, anorectal,sarcoma,renal,multiple_myeloma,pancreas_gallbladder, non_cancer,melanoma,myeloid_neoplasm,thyroid,colorectal
ggaatcatgaacttcc

SEQ ID NO: 465683 - DNA, 55 bp, Homo sapiens; identical to SEQ ID NO: 353843
  chr6:157478478-157478533
  hypo
  lung vs. head_and_neck

SEQ ID NO: 465684 - DNA, 693 bp, Homo sapiens; identical to SEQ ID NO: 339166
  chr6:158024060-158024753
  hypo
  lung vs. liver_bileduct,head_and_neck

SEQ ID NO: 465685 - DNA, 139 bp, Homo sapiens; identical to SEQ ID NO: 455346
  chr6:158093637-158093776
  hypo
  lung vs. breast,melanoma

SEQ ID NO: 465686 - DNA, 172 bp, Homo sapiens; identical to SEQ ID NO: 348175
  chr6:158094082-158094254
  hypo
  lung vs. breast,melanoma

SEQ ID NO: 465687 - DNA, 175 bp, Homo sapiens; identical to SEQ ID NO: 339174
  chr6:159076962-159077137
  hypo
  lung vs. head_and_neck

SEQ ID NO: 465688 - DNA, 245 bp, Homo sapiens; identical to SEQ ID NO: 364210
  chr7:818254-818499
  hypo
  lung vs. liver_bileduct,pancreas_gallbladder,upper_gi

SEQ ID NO: 465689 - DNA, 92 bp, Homo sapiens; identical to SEQ ID NO: 462064
  chr7:1029909-1030001
  hypo
  lung vs. liver_bileduct

SEQ ID NO: 465690 - DNA, 124 bp, Homo sapiens; identical to SEQ ID NO: 455366
  chr7:1308164-1308288
  hypo
  lung vs. anorectal

SEQ ID NO: 465691 - DNA, 298 bp, Homo sapiens
  chr7:1615093-1615391
  hypo
  lung vs. pancreas_gallbladder
cgcagaattgagagtcgagcacgtcgctttgttttctgccaaacttagccaagctccggtcttaaaatcttttcgttcctagcgtgaggctttctgtctttgttgcaaatattgaaacctgccacgtcacctcttgcactatttgtttagttctttaagaaatgaaaccttaatccatgtacaatttctaaaagcctttatttcaatattttaagaagttatttcccctggcaaagaagccgccctgttgcccggtgtggagctcgatgacaaagctcatcagcctgagtggaagctc

SEQ ID NO: 465692 - DNA, 113 bp, Homo sapiens; identical to SEQ ID NO: 364236
  chr7:1615444-1615557
  hypo
  lung vs. pancreas_gallbladder

SEQ ID NO: 465693 - DNA, 421 bp, Homo sapiens; identical to SEQ ID NO: 353892
  chr7:1641978-1642399
  hypo
  lung vs. sarcoma,renal,lymphoid_neoplasm,prostate

SEQ ID NO: 465694 - DNA, 474 bp, Homo sapiens
  chr7:1714474-1714948
  hypo
  lung vs. sarcoma
cgggcgggaaacatccttcggcccgggccagcccagccatcaccaggtccactgtgtttgctagagcccccaattcaatctctgaattttaaagatagggacactgaggcgcagacagggcagtggccgcaagccactgaggcttgcaggcagtggtatctgggctcagccctgctcccatgctgggctccccacacctcatatccgggctcagctgggagagtgccctggccttaccgacggggacccggcagcccacggcgtggaggtgaaccagcttgtctgggaagccacattccacccctgtgcacccccaggccctctgtggcccactaccccctctaggaccccaccccacagaagcgcatctctctgctgtccgccccactccagtggtaacttctgtcagagggcttgtcacagagtgctgaccgcgctgagagcttctcaccagcgctggacatgtggccaggt

SEQ ID NO: 465695 - DNA, 36 bp, Homo sapiens
  chr7:1733131-1733167
  hypo
  lung vs. melanoma,anorectal
cgatgtgtggtgtggggcgtgacccacttcctggtg

SEQ ID NO: 465696 - DNA, 171 bp, Homo sapiens; identical to SEQ ID NO: 364247
  chr7:2006407-2006578
  hypo
  lung vs. upper_gi,liver_bileduct,head_and_neck

SEQ ID NO: 465697 - DNA, 295 bp, Homo sapiens
  chr7:2163000-2163295
  hypo
  lung vs. head_and_neck,liver_bileduct
cgctacagcttggagacattgcgggagggctcccagcaagcgaaactgggctggggtgcaggacggagagagggcgctggtgaggccctggtcctgtgtgtgagggcggctgacacccggtgggctctgtttgcgcttgagctggtgacggtagggtttccttccctgtcaagcaggagagcaccccagtccacccagggagcacccaggaggagccagccccgccaagggcacgcatgggaggcgtcaatccgctggagggcagcagccctcaagcgaggactcacggggacat

SEQ ID NO: 465698 - DNA, 375 bp, Homo sapiens; identical to SEQ ID NO: 377996
  chr7:2163467-2163842
  hypo
  lung vs. head_and_neck,liver_bileduct

SEQ ID NO: 465699 - DNA, 404 bp, Homo sapiens
  chr7:2196807-2197211
  hypo
  lung vs. liver_bileduct,bladder_and_urothelial, lymphoid_neoplasm
cgtcttcaaaagagtgctaagtaatacaatattttaagaatagaaatcaatagtaagaaggcgatgggaacactgttgtggggaggcctggctccactgaccactccagcagtgcaggtcaccgtgatcaggaagcggtaatgatggaacaaatcacagcactcagagggctcctccccttcatgttaccatttgagctccccaccatgcaagtccacacctcacatgcgtaagaacccgcaaaaactaagagactgagaagagaaaagcagcacagcatgctcccgacacggaagacgctgcccatctgggaggagtgggagagccggtcccctacagtctctgctcagtgcagcacaggcccagggccctgggacacagggcagagggtgtctgaaagagga

SEQ ID NO: 465700 - DNA, 28 bp, Homo sapiens
  chr7:2232864-2232892
  hypo
  lung vs. lymphoid_neoplasm,melanoma
cggcccaagccacgccccagcatactca

SEQ ID NO: 465701 - DNA, 237 bp, Homo sapiens; identical to SEQ ID NO: 457097
  chr7:2233056-2233293
  hypo
  lung vs. lymphoid_neoplasm,melanoma

SEQ ID NO: 465702 - DNA, 137 bp, Homo sapiens
  chr7:2237982-2238119
  hypo
  lung vs. pancreas_gallbladder,head_and_neck,upper_gi, liver_bileduct,bladder_and_urothelial,colorectal,breast
cgcctttgcttctgccagccactcacgctctccacaggctgcagccaggtacacaccccccttcaagcaacaaaaccactgcctgagcacctggcctgctctaagcccagggctgagacaagggggagccagccaca

SEQ ID NO: 465703 - DNA, 242 bp, Homo sapiens; identical to SEQ ID NO: 339340
  chr7:2448743-2448985
  hypo
  lung vs. liver_bileduct

SEQ ID NO: 465704 - DNA, 469 bp, Homo sapiens; identical to SEQ ID NO: 457098
  chr7:2472811-2473280
  hypo
  lung vs. liver_bileduct,pancreas_gallbladder, head_and_neck,melanoma,sarcoma,upper_gi

SEQ ID NO: 465705 - DNA, 60 bp, Homo sapiens; identical to SEQ ID NO: 457099
  chr7:2473220-2473280
  hypo
  lung vs. liver_bileduct,head_and_neck, pancreas_gallbladder,sarcoma,melanoma,anorectal,renal,upper_gi, lymphoid_neoplasm

SEQ ID NO: 465706 - DNA, 328 bp, Homo sapiens; identical to SEQ ID NO: 345896
  chr7:2473779-2474107
  hypo
  lung vs. liver_bileduct,head_and_neck, pancreas_gallbladder,sarcoma,melanoma,anorectal,renal,upper_gi, lymphoid_neoplasm

SEQ ID NO: 465707 - DNA, 171 bp, Homo sapiens; identical to SEQ ID NO: 364271
  chr7:2566658-2566829
  hypo
  lung vs. sarcoma

SEQ ID NO: 465708 - DNA, 44 bp, Homo sapiens; identical to SEQ ID NO: 463850
  chr7:3283455-3283499
  hypo
  lung vs. lymphoid_neoplasm,breast

SEQ ID NO: 465709 - DNA, 189 bp, Homo sapiens
  chr7:4751238-4751427
  hypo
  lung vs. head_and_neck
cggcattgtgtggatgggcggtagtgagaataattactaagggcgtcataccctctcgtatctgcatcacccataaggggtgggcagtggtgctgccgtgtcttgtcaggaggccagctctgtgtcacccaccaggctgggctcagccacaagtcggcaacgtagtgcctccagggcagatgccacgga

SEQ ID NO: 465710 - DNA, 299 bp, Homo sapiens; identical to SEQ ID NO: 378035
  chr7:4751607-4751906
  hypo
  lung vs. head_and_neck

SEQ ID NO: 465711 - DNA, 28 bp, Homo sapiens
  chr7:5262406-5262434
  hypo
  lung vs. melanoma,bladder_and_urothelial
cgagcatttctagcccggctgggtcacc

SEQ ID NO: 465712 - DNA, 344 bp, Homo sapiens; identical to SEQ ID NO: 364296
  chr7:5262623-5262967
  hypo
  lung vs. melanoma,bladder_and_urothelial

SEQ ID NO: 465713 - DNA, 122 bp, Homo sapiens; identical to SEQ ID NO: 339382
  chr7:6034958-6035080
  hypo
  lung vs. lymphoid_neoplasm

SEQ ID NO: 465714 - DNA, 68 bp, Homo sapiens
  chr7:6060523-6060591
  hypo
  lung vs. lymphoid_neoplasm
cgagctcttacctataaaactgctaacacctgagacttaacgggaaaagataaacacagctgctgatc

SEQ ID NO: 465715 - DNA, 105 bp, Homo sapiens
  chr7:6060612-6060717
  hypo
  lung vs. lymphoid_neoplasm
acaagaacgctttttctggattaattccattgatgccttgtccttgaagtcaggatgtaccttgccagtaaggtacacctttttaaagttcttcaatgctgcagg

SEQ ID NO: 465716 - DNA, 71 bp, Homo sapiens; identical to SEQ ID NO: 353928
  chr7:6060772-6060843
  hypo
  lung vs. lymphoid_neoplasm

SEQ ID NO: 465717 - DNA, 3 bp, Homo sapiens
  chr7:6124618-6124621
  hypo
  lung vs. sarcoma,lymphoid_neoplasm,breast,prostate, uterine,melanoma,renal,non_cancer,ovary
cga

SEQ ID NO: 465718 - DNA, 521 bp, Homo sapiens; identical to SEQ ID NO: 339388
  chr7:6207763-6208284
  hypo
  lung vs. pancreas_gallbladder

SEQ ID NO: 465719 - DNA, 108 bp, Homo sapiens; identical to SEQ ID NO: 455377
  chr7:6443719-6443827
  hypo
  lung vs. ovary

SEQ ID NO: 465720 - DNA, 101 bp, Homo sapiens; identical to SEQ ID NO: 455378
  chr7:6443856-6443957
  hypo
  lung vs. ovary

SEQ ID NO: 465721 - DNA, 61 bp, Homo sapiens; identical to SEQ ID NO: 455379
  chr7:6443990-6444051
  hypo
  lung vs. ovary

SEQ ID NO: 465722 - DNA, 3 bp, Homo sapiens
  chr7:6525091-6525094
  hypo
  lung vs. lymphoid_neoplasm,sarcoma,renal,melanoma, multiple_myeloma
ttc

SEQ ID NO: 465723 - DNA, 210 bp, Homo sapiens; identical to SEQ ID NO: 457105
  chr7:7605822-7606032
  hypo
  lung vs. sarcoma,melanoma,lymphoid_neoplasm, multiple_myeloma

SEQ ID NO: 465724 - DNA, 142 bp, Homo sapiens; identical to SEQ ID NO: 345270
  chr7:27136790-27136932
  hypo
  lung vs. head_and_neck,bladder_and_urothelial,anorectal, prostate,lymphoid_neoplasm,sarcoma,ovary,renal,non_cancer, melanoma,uterine,multiple_myeloma,cervical

SEQ ID NO: 465725 - DNA, 126 bp, Homo sapiens; identical to SEQ ID NO: 339438
  chr7:27831654-27831780
  hypo
  lung vs. liver_bileduct

SEQ ID NO: 465726 - DNA, 94 bp, Homo sapiens; identical to SEQ ID NO: 339446
  chr7:30205901-30205995
  hypo
  lung vs. lymphoid_neoplasm

SEQ ID NO: 465727 - DNA, 123 bp, Homo sapiens; identical to SEQ ID NO: 339451
  chr7:30675617-30675740
  hypo
  lung vs. upper_gi

SEQ ID NO: 465728 - DNA, 7 bp, Homo sapiens
  chr7:37487365-37487372
  hypo
  lung vs. lymphoid_neoplasm,uterine,ovary
cgctcgc

SEQ ID NO: 465729 - DNA, 259 bp, Homo sapiens; identical to SEQ ID NO: 364371
  chr7:42237185-42237444
  hypo
  lung vs. head_and_neck

SEQ ID NO: 465730 - DNA, 190 bp, Homo sapiens; identical to SEQ ID NO: 364378
  chr7:44431034-44431224
  hypo
  lung vs. liver_bileduct,upper_gi,pancreas_gallbladder, head_and_neck

SEQ ID NO: 465731 - DNA, 95 bp, Homo sapiens; identical to SEQ ID NO: 353982
  chr7:50251628-50251723
  hypo
  lung vs. anorectal,cervical

SEQ ID NO: 465732 - DNA, 102 bp, Homo sapiens; identical to SEQ ID NO: 345274
  chr7:50344738-50344840
  hypo
  lung vs. anorectal

SEQ ID NO: 465733 - DNA, 88 bp, Homo sapiens
  chr7:55506201-55506289
  hypo
  lung vs. head_and_neck,sarcoma,anorectal
cggtaaccatgacaccaaagtcaacactcggagaaagtgaagaggctggcaggtgaataagtgtggacagggcgcctcacagagcagg

SEQ ID NO: 465734 - DNA, 103 bp, Homo sapiens
  chr7:57247618-57247721
  hypo
  lung vs. head_and_neck
cgtcggttgtccaaatcggcagggaagctccagaggccacccagctccttgggctcccgcgacggactctccttggggtacagcatcccgccttgcagtgcca

SEQ ID NO: 465735 - DNA, 158 bp, Homo sapiens; identical to SEQ ID NO: 378185
  chr7:57247887-57248045
  hypo
  lung vs. head_and_neck

SEQ ID NO: 465736 - DNA, 54 bp, Homo sapiens; identical to SEQ ID NO: 463875
  chr7:63652630-63652684
  hypo
  lung vs. head_and_neck

SEQ ID NO: 465737 - DNA, 122 bp, Homo sapiens; identical to SEQ ID NO: 364412
  chr7:63652839-63652961
  hypo
  lung vs. head_and_neck

SEQ ID NO: 465738 - DNA, 51 bp, Homo sapiens; identical to SEQ ID NO: 346909
  chr7:65037711-65037762
  hypo
  lung vs. uterine,non_cancer,bladder_and_urothelial, multiple_myeloma,thyroid,prostate,myeloid_neoplasm,cervical, anorectal,ovary,renal,sarcoma

SEQ ID NO: 465739 - DNA, 164 bp, Homo sapiens; identical to SEQ ID NO: 463879
  chr7:77324199-77324363
  hypo

SEQ ID NO: 465740 - DNA, 1 bp, Homo sapiens
  chr7:97797696-97797697
  hypo
  lung vs. renal
c

SEQ ID NO: 465741 - DNA, 47 bp, Homo sapiens; identical to SEQ ID NO: 354015
  chr7:98966410-98966457
  hypo
  lung vs. melanoma,liver_bileduct,lymphoid_neoplasm, bladder_and_urothelial,sarcoma

SEQ ID NO: 465742 - DNA, 75 bp, Homo sapiens
  chr7:100838060-100838135
  hypo
  lung vs. pancreas_gallbladder
cgtgagccaccgcgcccagcctcagctgtgttcttaactctatttttccttcactggggatggtaccatttcccc

SEQ ID NO: 465743 - DNA, 465 bp, Homo sapiens; identical to SEQ ID NO: 339593
  chr7:105254063-105254528
  hypo
  lung vs. head_and_neck,pancreas_gallbladder, liver_bileduct

SEQ ID NO: 465744 - DNA, 32 bp, Homo sapiens; identical to SEQ ID NO: 460502
  chr7:105279344-105279376
  hypo
  lung vs. liver_bileduct,lymphoid_neoplasm,melanoma

SEQ ID NO: 465745 - DNA, 75 bp, Homo sapiens; identical to SEQ ID NO: 339595
  chr7:105280248-105280323
  hypo
  lung vs. liver_bileduct

SEQ ID NO: 465746 - DNA, 52 bp, Homo sapiens; identical to SEQ ID NO: 464784
  chr7:126891155-126891207
  hypo

SEQ ID NO: 465747 - DNA, 47 bp, Homo sapiens; identical to SEQ ID NO: 457143
  chr7:129330248-129330295
  hypo
  lung vs. pancreas_gallbladder,melanoma,upper_gi, bladder_and_urothelial,lymphoid_neoplasm,sarcoma,liver_bileduct, colorectal

SEQ ID NO: 465748 - DNA, 89 bp, Homo sapiens; identical to SEQ ID NO: 348249
  chr7:129330351-129330440
  hypo
  lung vs. pancreas_gallbladder,melanoma,upper_gi, bladder_and_urothelial,lymphoid_neoplasm,sarcoma,liver_bileduct, colorectal

SEQ ID NO: 465749 - DNA, 177 bp, Homo sapiens; identical to SEQ ID NO: 348251
  chr7:129483449-129483626
  hypo
  lung vs. upper_gi,liver_bileduct,pancreas_gallbladder, sarcoma,renal,prostate,colorectal,breast

SEQ ID NO: 465750 - DNA, 32 bp, Homo sapiens; identical to SEQ ID NO: 460507
  chr7:140156493-140156525
  hypo
  lung vs. breast,pancreas_gallbladder,lymphoid_neoplasm, upper_gi,cervical,prostate,melanoma

SEQ ID NO: 465751 - DNA, 341 bp, Homo sapiens
  chr7:150758626-150758967
  hypo
  lung vs. bladder_and_urothelial,cervical,head_and_neck, prostate,lymphoid_neoplasm,uterine
cgaggctccgttgtctgcctgggccttcactcccctctttccccagctcattatcactccctccctcatctttgttgctttctctccgggcctgggccttgactcctttctccctcatttttcttgcggcctttcccacctcctctctcctcctccctctactcagcctctcggcccttttcggcccccctcgcctcagtcctctcctgtctccttgttcttctcttttcttcctataaataactctcctctgtgctgtggctgccgctaagggccactctgaggcccttcatactccaggaggatccccagcagcgcagcctgcgcgtggtggctcctgc

SEQ ID NO: 465752 - DNA, 148 bp, Homo sapiens; identical to SEQ ID NO: 348269
  chr7:150774065-150774213
  hypo
  lung vs. head_and_neck

SEQ ID NO: 465753 - DNA, 18 bp, Homo sapiens
  chr7:150774308-150774326
  hypo
  lung vs. head_and_neck
cgcacagcaggaagtctg

SEQ ID NO: 465754 - DNA, 347 bp, Homo sapiens; identical to SEQ ID NO: 457156
  chr7:150774358-150774705
  hypo
  lung vs. head_and_neck

SEQ ID NO: 465755 - DNA, 22 bp, Homo sapiens
  chr7:150774857-150774879
  hypo
  lung vs. head_and_neck
tgaggggtgcctgtggggaggc

SEQ ID NO: 465756 - DNA, 1 bp, Homo sapiens
  chr7:155581242-155581243
  hypo
  lung vs. lymphoid_neoplasm,prostate,non_cancer,breast
c

SEQ ID NO: 465757 - DNA, 39 bp, Homo sapiens; identical to SEQ ID NO: 345928
  chr7:155581980-155582019
  hypo
  lung vs. lymphoid_neoplasm,prostate,non_cancer,breast

SEQ ID NO: 465758 - DNA, 89 bp, Homo sapiens; identical to SEQ ID NO: 464797
  chr7:156802164-156802253
  hypo
  lung vs. colorectal

SEQ ID NO: 465759 - DNA, 250 bp, Homo sapiens; identical to SEQ ID NO: 464798
  chr7:156802164-156802414
  hypo
  lung vs. colorectal

SEQ ID NO: 465760 - DNA, 213 bp, Homo sapiens; identical to SEQ ID NO: 359013
  chr7:156802537-156802750
  hypo
  lung vs. colorectal

SEQ ID NO: 465761 - DNA, 42 bp, Homo sapiens; identical to SEQ ID NO: 455419
  chr7:157262486-157262528
  hypo
  lung vs. lymphoid_neoplasm

SEQ ID NO: 465762 - DNA, 215 bp, Homo sapiens; identical to SEQ ID NO: 354106
  chr7:157263471-157263686
  hypo
  lung vs. lymphoid_neoplasm

SEQ ID NO: 465763 - DNA, 141 bp, Homo sapiens; identical to SEQ ID NO: 339731
  chr7:157281193-157281334
  hypo
  lung vs. breast

SEQ ID NO: 465764 - DNA, 76 bp, Homo sapiens
  chr7:157448328-157448404
  hypo
  lung vs. head_and_neck
cgtctccagtgcgggaaacagcacagccaggcacggtcacccaccaggacgacgcctacggcctggagatccagga

SEQ ID NO: 465765 - DNA, 39 bp, Homo sapiens; identical to SEQ ID NO: 364592
  chr7:157448526-157448565
  hypo
  lung vs. head_and_neck

SEQ ID NO: 465766 - DNA, 203 bp, Homo sapiens; identical to SEQ ID NO: 339758
  chr7:157642963-157643166
  hypo
  lung vs. head_and_neck

SEQ ID NO: 465767 - DNA, 145 bp, Homo sapiens; identical to SEQ ID NO: 339765
  chr7:157744287-157744432
  hypo
  lung vs. pancreas_gallbladder

SEQ ID NO: 465768 - DNA, 75 bp, Homo sapiens
  chr7:157877353-157877428
  hypo
  lung vs. pancreas_gallbladder
cgcccatccacacccacgacgcccatccacacccaccacgcccatccacacccacgacactcatccacacccacg

SEQ ID NO: 465769 - DNA, 4 bp, Homo sapiens
  chr7:157877607-157877611
  hypo
  lung vs. pancreas_gallbladder
ccac

SEQ ID NO: 465770 - DNA, 241 bp, Homo sapiens; identical to SEQ ID NO: 339771
  chr7:157919964-157920205
  hypo
  lung vs. pancreas_gallbladder

SEQ ID NO: 465771 - DNA, 143 bp, Homo sapiens; identical to SEQ ID NO: 463935
  chr7:158039908-158040051
  hypo
  lung vs. pancreas_gallbladder,colorectal

SEQ ID NO: 465772 - DNA, 471 bp, Homo sapiens; identical to SEQ ID NO: 462111
  chr7:158066479-158066950
  hypo
  lung vs. cervical

SEQ ID NO: 465773 - DNA, 219 bp, Homo sapiens; identical to SEQ ID NO: 348289
  chr7:158067069-158067288
  hypo
  lung vs. cervical

SEQ ID NO: 465774 - DNA, 340 bp, Homo sapiens; identical to SEQ ID NO: 339797
  chr7:158552753-158553093
  hypo
  lung vs. upper_gi

SEQ ID NO: 465775 - DNA, 21 bp, Homo sapiens
  chr8:644615-644636
  hypo
  lung vs. head_and_neck
cgacagtcacaggcaccacgc

SEQ ID NO: 465776 - DNA, 366 bp, Homo sapiens; identical to SEQ ID NO: 364647
  chr8:644802-645168
  hypo
  lung vs. head_and_neck

SEQ ID NO: 465777 - DNA, 233 bp, Homo sapiens; identical to SEQ ID NO: 354148
  chr8:1078113-1078346
  hypo
  lung vs. head_and_neck

SEQ ID NO: 465778 - DNA, 439 bp, Homo sapiens; identical to SEQ ID NO: 463947
  chr8:1132651-1133090
  hypo
  lung vs. head_and_neck

SEQ ID NO: 465779 - DNA, 106 bp, Homo sapiens; identical to SEQ ID NO: 350705
  chr8:8639980-8640086
  hypo
  lung vs. head_and_neck

SEQ ID NO: 465780 - DNA, 125 bp, Homo sapiens; identical to SEQ ID NO: 459174
  chr8:8748226-8748351
  hypo
  lung vs. bladder_and_urothelial,melanoma,breast

SEQ ID NO: 465781 - DNA, 85 bp, Homo sapiens; identical to SEQ ID NO: 459175
  chr8:8749088-8749173
  hypo
  lung vs. bladder_and_urothelial,melanoma,breast

SEQ ID NO: 465782 - DNA, 533 bp, Homo sapiens; identical to SEQ ID NO: 354155
  chr8:8749088-8749621
  hypo
  lung vs. melanoma,breast,bladder_and_urothelial

SEQ ID NO: 465783 - DNA, 197 bp, Homo sapiens; identical to SEQ ID NO: 454027
  chr8:23423722-23423919
  hypo
  lung vs. liver_bileduct,melanoma,renal,lymphoid_neoplasm

SEQ ID NO: 465784 - DNA, 106 bp, Homo sapiens; identical to SEQ ID NO: 339867
  chr8:26267649-26267755
  hypo
  lung vs. lymphoid_neoplasm,melanoma,renal,sarcoma

SEQ ID NO: 465785 - DNA, 139 bp, Homo sapiens
  chr8:28938419-28938558
  hypo
  lung vs. liver_bileduct,colorectal
cgcactcgaatagcgtcttctaactccattctcttcaaatccactttccaaactacagctggagggagctttccgaaaaacaaaagtgaccatgtcccatgtcgctcgccaccttgcagctgccagggtttcccactgc

SEQ ID NO: 465786 - DNA, 136 bp, Homo sapiens; identical to SEQ ID NO: 212229
  chr8:28938587-28938723
  hypo
  lung vs. liver_bileduct,colorectal

SEQ ID NO: 465787 - DNA, 18 bp, Homo sapiens
  chr8:42147521-42147539
  hypo
  lung vs. colorectal
cattgcggttggccaccc

SEQ ID NO: 465788 - DNA, 410 bp, Homo sapiens; identical to SEQ ID NO: 339898
  chr8:48292766-48293176
  hypo
  lung vs. lymphoid_neoplasm,melanoma

SEQ ID NO: 465789 - DNA, 21 bp, Homo sapiens
  chr8:49609208-49609229
  hypo
  lung vs. lymphoid_neoplasm,melanoma
tgcacatggctctcaggctcc

SEQ ID NO: 465790 - DNA, 256 bp, Homo sapiens; identical to SEQ ID NO: 339913
  chr8:50313987-50314243
  hypo
  lung vs. head_and_neck,anorectal,lymphoid_neoplasm, cervical,pancreas_gallbladder

SEQ ID NO: 465791 - DNA, 6 bp, Homo sapiens
  chr8:55372563-55372569
  hypo
  lung vs. ovary
tgatcc

SEQ ID NO: 465792 - DNA, 34 bp, Homo sapiens
  chr8:82903010-82903044
  hypo
  lung vs. anorectal
cgctttacgtattcaagcctcagcaatggcagac

SEQ ID NO: 465793 - DNA, 1 bp, Homo sapiens
  chr8:82903133-82903134
  hypo
  lung vs. anorectal
c

SEQ ID NO: 465794 - DNA, 2 bp, Homo sapiens
  chr8:90913515-90913517
  hypo
cg

SEQ ID NO: 465795 - DNA, 420 bp, Homo sapiens; identical to SEQ ID NO: 463069
  chr8:99956867-99957287
  hypo
  lung vs. upper_gi

SEQ ID NO: 465796 - DNA, 448 bp, Homo sapiens; identical to SEQ ID NO: 354219
  chr8:100796506-100796954
  hypo
  lung vs. pancreas_gallbladder

SEQ ID NO: 465797 - DNA, 163 bp, Homo sapiens
  chr8:102039330-102039493
  hypo
  lung vs. head_and_neck,lymphoid_neoplasm
cgcttgctacatgcacagatctccttgaccctgcagccaatgcctcggtcagccagtgcacctgtactgtctctcctcttgggatagggtccctctccatcaggtacaatatatgggaaatcgaggggtggcctttgtcccagctgtcttagtcaccgcattc

SEQ ID NO: 465798 - DNA, 44 bp, Homo sapiens; identical to SEQ ID NO: 454049
  chr8:126044399-126044443
  hypo
  lung vs. colorectal,melanoma

SEQ ID NO: 465799 - DNA, 30 bp, Homo sapiens; identical to SEQ ID NO: 454050
  chr8:126044563-126044593
  hypo
  lung vs. colorectal,melanoma

SEQ ID NO: 465800 - DNA, 631 bp, Homo sapiens; identical to SEQ ID NO: 455454
  chr8:128871653-128872284
  hypo
  lung vs. ovary,colorectal,sarcoma,uterine

SEQ ID NO: 465801 - DNA, 191 bp, Homo sapiens; identical to SEQ ID NO: 345946
  chr8:128872459-128872650
  hypo
  lung vs. ovary,colorectal,sarcoma,uterine

SEQ ID NO: 465802 - DNA, 62 bp, Homo sapiens; identical to SEQ ID NO: 457194
  chr8:128888848-128888910
  hypo
  lung vs. melanoma,colorectal,lymphoid_neoplasm

SEQ ID NO: 465803 - DNA, 43 bp, Homo sapiens; identical to SEQ ID NO: 345948
  chr8:128889422-128889465
  hypo
  lung vs. melanoma,colorectal,lymphoid_neoplasm

SEQ ID NO: 465804 - DNA, 86 bp, Homo sapiens
  chr8:128931048-128931134
  hypo
  lung vs. head_and_neck
cgctgcattcttttctaaccacccaagagataagttgaacccccactcgtagcaacctggccacttgtctgtttagtcagccctgg

SEQ ID NO: 465805 - DNA, 142 bp, Homo sapiens; identical to SEQ ID NO: 364809
  chr8:128931261-128931403
  hypo
  lung vs. head_and_neck

SEQ ID NO: 465806 - DNA, 147 bp, Homo sapiens; identical to SEQ ID NO: 354246
  chr8:140963396-140963543
  hypo
  lung vs. melanoma

SEQ ID NO: 465807 - DNA, 46 bp, Homo sapiens; identical to SEQ ID NO: 354251
  chr8:141159949-141159995
  hypo
  lung vs. melanoma,uterine,lymphoid_neoplasm,prostate, ovary,anorectal

SEQ ID NO: 465808 - DNA, 191 bp, Homo sapiens
  chr8:142242748-142242939
  hypo
  lung vs. upper_gi
cgggaacacagacattcagtggctcccaggtgagcgctcaccagctgcaacgggaacacagacattcagtggctcaacacagacattcagtggctcccaggtgagcactcacaagctgcaacgggaacacacacactcagtggctcccaggtgagcgctcgcgagctgcaacgggaacacacgcactcaat

SEQ ID NO: 465809 - DNA, 89 bp, Homo sapiens; identical to SEQ ID NO: 460536
  chr8:142243860-142243949
  hypo
  lung vs. lymphoid_neoplasm

SEQ ID NO: 465810 - DNA, 66 bp, Homo sapiens; identical to SEQ ID NO: 354264
  chr8:142244214-142244280
  hypo
  lung vs. lymphoid_neoplasm

SEQ ID NO: 465811 - DNA, 204 bp, Homo sapiens; identical to SEQ ID NO: 340078
  chr8:142248320-142248524
  hypo
  lung vs. upper_gi,colorectal

SEQ ID NO: 465812 - DNA, 68 bp, Homo sapiens; identical to SEQ ID NO: 345958
  chr8:143558643-143558711
  hypo
  lung vs. pancreas_gallbladder

SEQ ID NO: 465813 - DNA, 42 bp, Homo sapiens
  chr8:144292304-144292346
  hypo
  lung vs. prostate
cgcaccatcccaggtggcaccttctgtaggggctggaccaga

SEQ ID NO: 465814 - DNA, 254 bp, Homo sapiens; identical to SEQ ID NO: 364886
  chr8:144292470-144292724
  hypo
  lung vs. prostate

SEQ ID NO: 465815 - DNA, 12 bp, Homo sapiens
  chr8:144675988-144676000
  hypo
  lung vs. upper_gi
cgtccgagccca

SEQ ID NO: 465816 - DNA, 88 bp, Homo sapiens; identical to SEQ ID NO: 345961
  chr8:144676118-144676206
  hypo
  lung vs. upper_gi

SEQ ID NO: 465817 - DNA, 6 bp, Homo sapiens
  chr8:145745116-145745122
  hypo
  lung vs. liver_bileduct
cgcttg

SEQ ID NO: 465818 - DNA, 72 bp, Homo sapiens; identical to SEQ ID NO: 378802
  chr8:145745207-145745279
  hypo
  lung vs. liver_bileduct

SEQ ID NO: 465819 - DNA, 42 bp, Homo sapiens
  chr8:145758485-145758527
  hypo
  lung vs. ovary,breast
cggcgcccggggttgccgtggcacctgaagatgccctctgtc

SEQ ID NO: 465820 - DNA, 36 bp, Homo sapiens; identical to SEQ ID NO: 364914
  chr8:145758692-145758728
  hypo
  lung vs. ovary,breast

SEQ ID NO: 465821 - DNA, 569 bp, Homo sapiens; identical to SEQ ID NO: 464823
  chr9:27528536-27529105
  hypo
  lung vs. upper_gi

SEQ ID NO: 465822 - DNA, 182 bp, Homo sapiens; identical to SEQ ID NO: 201692
  chr9:27529157-27529339
  hypo
  lung vs. upper_gi

SEQ ID NO: 465823 - DNA, 130 bp, Homo sapiens; identical to SEQ ID NO: 464825
  chr9:27529341-27529471
  hypo
  lung vs. upper_gi

SEQ ID NO: 465824 - DNA, 129 bp, Homo sapiens; identical to SEQ ID NO: 464826
  chr9:27528976-27529105
  hypo
  lung vs. upper_gi

SEQ ID NO: 465825 - DNA, 182 bp, Homo sapiens; identical to SEQ ID NO: 201692
  chr9:27529157-27529339
  hypo
  lung vs. upper_gi

SEQ ID NO: 465826 - DNA, 566 bp, Homo sapiens; identical to SEQ ID NO: 464828
  chr9:27529341-27529907
  hypo
  lung vs. upper_gi

SEQ ID NO: 465827 - DNA, 242 bp, Homo sapiens; identical to SEQ ID NO: 464831
  chr9:37035886-37036128
  hypo
  lung vs. ovary,upper_gi,colorectal

SEQ ID NO: 465828 - DNA, 238 bp, Homo sapiens; identical to SEQ ID NO: 463087
  chr9:37035890-37036128
  hypo
  lung vs. head_and_neck,uterine

SEQ ID NO: 465829 - DNA, 381 bp, Homo sapiens; identical to SEQ ID NO: 454519
  chr9:71788570-71788951
  hypo
  lung vs. head_and_neck,sarcoma,breast,cervical

SEQ ID NO: 465830 - DNA, 36 bp, Homo sapiens; identical to SEQ ID NO: 455476
  chr9:80833898-80833934
  hypo
  lung vs. upper_gi,pancreas_gallbladder

SEQ ID NO: 465831 - DNA, 182 bp, Homo sapiens; identical to SEQ ID NO: 364964
  chr9:80834011-80834193
  hypo
  lung vs. upper_gi,pancreas_gallbladder

SEQ ID NO: 465832 - DNA, 42 bp, Homo sapiens; identical to SEQ ID NO: 340223
  chr9:82275758-82275800
  hypo

SEQ ID NO: 465833 - DNA, 27 bp, Homo sapiens
  chr9:94183954-94183981
  hypo
  lung vs. liver_bileduct
acaggcctgggactcccacccgagctc

SEQ ID NO: 465834 - DNA, 281 bp, Homo sapiens
  chr9:96573430-96573711
  hypo
  lung vs. pancreas_gallbladder,bladder_and_urothelial, head_and_neck,breast
cgtggtacagtcactccctgctttgtaaagcgctgctgggtctcctgggaaacagcagcgtgcctggcactacgcaaggcccgcacagctgcgccgttgttgtcaccagccgcagttcccaggttgcacatgcctagagaaggtgttggcgggacgcggttgcgcctctgacttcctttaattccgacttctacttgcgtcgttgtgtaggcgtctgagggccacctgacgtcgtctagtgtctccacgccttgacacttgtctattgaaatgcatctttt

SEQ ID NO: 465835 - DNA, 274 bp, Homo sapiens
  chr9:116059825-116060099
  hypo
  lung vs. pancreas_gallbladder,upper_gi
cgtagtcaccatacccagcagcaaccgaaaaaggtttggtttcttgtctgggaacagcactcaccccacaccccaaaggaactgcttggtccaaaagatggagaatatgagcaacagagtgacactgaggatgacggccatcaggtaggcaaagatgcggaactgagggttgcggaaacactccctcaaagagtggtggctggggatgaggatgggcgtagacacggtggcagaggccgtgtctgggggcggcccagtctggcccccaggctgg

SEQ ID NO: 465836 - DNA, 631 bp, Homo sapiens; identical to SEQ ID NO: 345967
  chr9:116060128-116060759
  hypo
  lung vs. pancreas_gallbladder,upper_gi

SEQ ID NO: 465837 - DNA, 126 bp, Homo sapiens; identical to SEQ ID NO: 340300
  chr9:123176142-123176268
  hypo
  lung vs. upper_gi,lymphoid_neoplasm,breast

SEQ ID NO: 465838 - DNA, 138 bp, Homo sapiens; identical to SEQ ID NO: 454062
  chr9:126348901-126349039
  hypo
  lung vs. liver_bileduct,pancreas_gallbladder

SEQ ID NO: 465839 - DNA, 41 bp, Homo sapiens; identical to SEQ ID NO: 454063
  chr9:126349104-126349145
  hypo
  lung vs. liver_bileduct,pancreas_gallbladder

SEQ ID NO: 465840 - DNA, 126 bp, Homo sapiens
  chr9:128759727-128759853
  hypo
  lung vs. melanoma
cgggctcagctgccttccctgccatgtgtcgtgtagttgttttcagcacataagctgtcaacgagcgttctttggagatacttgaactggagtggcccaggggcttttcgcctttccgtaagcctg

SEQ ID NO: 465841 - DNA, 83 bp, Homo sapiens; identical to SEQ ID NO: 340338
  chr9:131675071-131675154
  hypo
  lung vs. breast

SEQ ID NO: 465842 - DNA, 553 bp, Homo sapiens; identical to SEQ ID NO: 365099
  chr9:135513114-135513667
  hypo
  lung vs. ovary,sarcoma,lymphoid_neoplasm

SEQ ID NO: 465843 - DNA, 96 bp, Homo sapiens
  chr9:135767923-135768019
  hypo
  lung vs. liver_bileduct,pancreas_gallbladder
cgcaggaggtgggcggcaccccatctcaccaaggtcctggccgggtcttcgctctgcccaaaccctcctccagcctgtgcaggcctcctcccacct

SEQ ID NO: 465844 - DNA, 33 bp, Homo sapiens; identical to SEQ ID NO: 348382
  chr9:135865230-135865263
  hypo
  lung vs. anorectal,renal,prostate,cervical,breast, pancreas_gallbladder,non_cancer,myeloid_neoplasm

SEQ ID NO: 465845 - DNA, 51 bp, Homo sapiens; identical to SEQ ID NO: 354417
  chr9:138661962-138662013
  hypo
  lung vs. renal,lymphoid_neoplasm

SEQ ID NO: 465846 - DNA, 14 bp, Homo sapiens
  chr9:138780573-138780587
  hypo
  lung vs. liver_bileduct
cggaaataattcca

SEQ ID NO: 465847 - DNA, 166 bp, Homo sapiens; identical to SEQ ID NO: 379076
  chr9:138780870-138781036
  hypo
  lung vs. liver_bileduct

SEQ ID NO: 465848 - DNA, 265 bp, Homo sapiens; identical to SEQ ID NO: 454066
  chr9:139110897-139111162
  hypo
  lung vs. liver_bileduct

SEQ ID NO: 465849 - DNA, 81 bp, Homo sapiens; identical to SEQ ID NO: 345985
  chr9:139111384-139111465
  hypo
  lung vs. liver_bileduct

SEQ ID NO: 465850 - DNA, 483 bp, Homo sapiens
  chr9:139902492-139902975
  hypo
  lung vs. upper_gi
cgccccggccctcctgcaggctgggcctggacgcagggtctccccacgagctccctctgtgtctgggctctcccgggcctccgtctgccgagtctgggggccactgagtctacatcggtcccctgttccccggctctggtcccctctgccccacccttgctctgtgcccctcaaagactctagcaagtctggaccatgcagttacgtctctccaggcctatctgcaagtgtccctcgcccactctgcccccttgacctctggacagcaagcatcctggggccagttctcccccgaccccacccgcggctggagccaccaggcagcctgggtccagtgggcagagccctggacagccatgagagcagcctgctcacccgctcctcctcgaagctgatgaggccctcgtcctccgtgtccaggtcctcgggctcgtctgccacaagtgcccggagctccgtgggggcagaccggggccggagcag

SEQ ID NO: 465851 - DNA, 195 bp, Homo sapiens; identical to SEQ ID NO: 365172
  chr9:139903035-139903230
  hypo
  lung vs. upper_gi

SEQ ID NO: 465852 - DNA, 159 bp, Homo sapiens; identical to SEQ ID NO: 354445
  chr9:139904532-139904691
  hypo
  lung vs. liver_bileduct

SEQ ID NO: 465853 - DNA, 54 bp, Homo sapiens
  chr9:140041698-140041752
  hypo
  lung vs. pancreas_gallbladder,breast
cgccacacacacacctggacacgtactcaggtgcgctcctcacacacacacctg

SEQ ID NO: 465854 - DNA, 24 bp, Homo sapiens
  chr9:140041849-140041873
  hypo
  lung vs. pancreas_gallbladder,breast
acacacatgcacacacgcacacac

SEQ ID NO: 465855 - DNA, 309 bp, Homo sapiens
  chr9:140389001-140389310
  hypo
  lung vs. breast
cgcgccctcacctgctctgcgccctcacctgctccgcaccctcacctgcgccctgccctcacctgctccgtgacctcatccactccgcaccctcacctgctccgcgccctcacctgtgccctgccctcacctgctccatgacctcatccactctgtgccttcacctgctctgcgccctcaccagctccgcaccctcacctgcgccctgccctcacctgctccgtgacctcatccactccgcaccctcacctgcgccctgccctcacctgctccgtgacctcatccactctgcaccctcacctgcgccct

SEQ ID NO: 465856 - DNA, 120 bp, Homo sapiens; identical to SEQ ID NO: 365195
  chr9:140389523-140389643
  hypo
  lung vs. breast

SEQ ID NO: 465857 - DNA, 241 bp, Homo sapiens
  chr9:140396742-140396983
  hypo
  lung vs. lymphoid_neoplasm
tcaggtgtgtaaacccccagtccacagtgatgatgaaataaaaataagaagccccacccagcatctttggaaaatgatcgaaaaacaaaccattaaacttcccaaaccctgacggtgaagggggtgaaggcagctcccccccaaaagagaaatgacatcacatgtcgccaaaagtttgtcaaacaggagggagaaagagatggaggaggatgagaagaatctgagcagccacatatccagc

SEQ ID NO: 465858 - DNA, 201 bp, Homo sapiens; identical to SEQ ID NO: 365198
  chr9:140397203-140397404
  hypo
  lung vs. lymphoid_neoplasm

SEQ ID NO: 465859 - DNA, 184 bp, Homo sapiens
  chr9:140400692-140400876
  hypo
cggcatctgcctcaatggctctgtgacccaccagctacaggttttctccgcagcttaaacccacacggtgccttcaacatttctgggcactgataaaggtagcccggtcggtacctaaaacacggaaggaaaccagccctggtcctgagccaaattcctcaaaccttgccatgcgtgccacacc

SEQ ID NO: 465860 - DNA, 517 bp, Homo sapiens
  chr9:140400905-140401422
  hypo
agagcaccctttctcttgctgtccatctcagggatgctgccgccctctgtatgtgagctcccctaacgggtgccctgggccgtcacgctggtgctttgggcttggctctttgcagtcccagccccatctcagaggttcgctcttcgcagtccagccccatcttggagggagggggttgaggcaccccctccaaagagctcccctgttgctgcttttgggcggcctcgggctgagcgggatgaagcagtgtgcacccttttacagcctgccctcagcattacacatcactacacacacagcgtatctgacctctggaccagctgctgtggattctgaggaagggtgcacgctttgcacgacggggtcacgcacttccaggcacagatccagcccttcgtgtgcagctgcgcatgcgagcgagtcatctgcactgcggtttcccatccatactggaattcgcaacacccatttctcagcggaatacagaggaaccgcgcagacactaaccgcagacaca

SEQ ID NO: 465861 - DNA, 2 bp, Homo sapiens
  chr9:140401590-140401592
  hypo
ac

SEQ ID NO: 465862 - DNA, 306 bp, Homo sapiens; identical to SEQ ID NO: 340492
  chr9:140692095-140692401
  hypo
  lung vs. liver_bileduct,head_and_neck

SEQ ID NO: 465863 - DNA, 134 bp, Homo sapiens; identical to SEQ ID NO: 462191
  chr9:140707377-140707511
  hypo
  lung vs. liver_bileduct,pancreas_gallbladder,upper_gi

SEQ ID NO: 465864 - DNA, 58 bp, Homo sapiens; identical to SEQ ID NO: 354465
  chr9:140707900-140707958
  hypo
  lung vs. liver_bileduct,pancreas_gallbladder,upper_gi

SEQ ID NO: 465865 - DNA, 480 bp, Homo sapiens; identical to SEQ ID NO: 454075
  chr9:140708213-140708693
  hypo
  lung vs. upper_gi,colorectal,breast,liver_bileduct

SEQ ID NO: 465866 - DNA, 216 bp, Homo sapiens; identical to SEQ ID NO: 454076
  chr9:140708771-140708987
  hypo
  lung vs. upper_gi,colorectal,breast,liver_bileduct

SEQ ID NO: 465867 - DNA, 624 bp, Homo sapiens; identical to SEQ ID NO: 454529
  chrY:16636060-16636684
  hypo
  lung vs. breast,ovary

SEQ ID NO: 465868 - DNA, 949 bp, Homo sapiens; identical to SEQ ID NO: 454530
  chrY:16636193-16637142
  hypo
  lung vs. breast,ovary

SEQ ID NO: 465869 - DNA, 1 bp, Homo sapiens
  chrY:22918423-22918424
  hypo
  lung vs. breast,ovary
c

SEQ ID NO: 465870 - DNA, 122 bp, Homo sapiens; identical to SEQ ID NO: 346299
  chrY:22918582-22918704
  hypo
  lung vs. breast,ovary

SEQ ID NO: 465871 - DNA, 126 bp, Homo sapiens
  NW_001839646.1_1-5206:1401-1527
  hypo
  lung vs. anorectal
cgctccatggtggcagctgggaggctgcaggggcacgggcgtgccagcgagggtggcgcggaggcgcagaggatgcaagccaccgaagggatgtcaggaatggacgttgcacgggcccagtgtttc

SEQ ID NO: 465872 - DNA, 60 bp, Homo sapiens; identical to SEQ ID NO: 452707
  AC241851.2_88-34049:15074-15134
  hyper
  lymphoid_neoplasm vs. non_cancer,prostate

SEQ ID NO: 465873 - DNA, 43 bp, Homo sapiens; identical to SEQ ID NO: 362192
  AC241851.2_88-34049:15553-15596
  hyper
  lymphoid_neoplasm vs. non_cancer,prostate

SEQ ID NO: 465874 - DNA, 29 bp, Homo sapiens
  chr1:935127-935156
  hyper
  lymphoid_neoplasm vs. head_and_neck
tacgcgctcggcgccgcttctccatgacc

SEQ ID NO: 465875 - DNA, 132 bp, Homo sapiens
  chr1:8085554-8085686
  hyper
  lymphoid_neoplasm vs. liver_bileduct
cggcattaccatcgtcgctgtgagattaggcagagggagcggggctgaccgccagagaaccggtaccaaccaccgcaagcaatcgccgagcctcccaccccagctttcaagacaggatttacgggtacacgg

SEQ ID NO: 465876 - DNA, 378 bp, Homo sapiens
  chr1:8085715-8086093
  hyper
  lymphoid_neoplasm vs. liver_bileduct
acaaataaaaaaaaaatcaaacaagcccccaggcccgaagacgctcatccccgccgggcaaccccgcgagcgcaggctgcgggacgaggaccttcatgctcgccgctcccgaacccccgtccgctcctgcggtcccggtgctgcggggacgtatcccgggcgctcgggtgcatggccccggccagccgaggggccgcgcgacgaccacagccggcgtggagaaggcggcgggcgccggcacttcgcggcgtccccaggcccgggctgcgccgccggggagggtcccgctctccacacctcaatggggagaagcccgcgagcgaccggccggcctctccctccatcccagagactccgcgtcgcggcgaccctccccgc

SEQ ID NO: 465877 - DNA, 27 bp, Homo sapiens
  chr1:8086401-8086428
  hyper
  lymphoid_neoplasm vs. liver_bileduct
cataggccgccgggccgtgaggtcgcc

SEQ ID NO: 465878 - DNA, 164 bp, Homo sapiens
  chr1:8085929-8086093
  hyper
  lymphoid_neoplasm vs. liver_bileduct, pancreas_gallbladder,ovary,renal,colorectal,lung,prostate, cervical,upper_gi,uterine,non_cancer
cgtggagaaggcggcgggcgccggcacttcgcggcgtccccaggcccgggctgcgccgccggggagggtcccgctctccacacctcaatggggagaagcccgcgagcgaccggccggcctctccctccatcccagagactccgcgtcgcggcgaccctccccgc

SEQ ID NO: 465879 - DNA, 401 bp, Homo sapiens; identical to SEQ ID NO: 349167
  chr1:8086401-8086802
  hyper
  lymphoid_neoplasm vs. liver_bileduct, pancreas_gallbladder,ovary,renal,colorectal,lung,prostate, cervical,upper_gi,uterine,non_cancer

SEQ ID NO: 465880 - DNA, 260 bp, Homo sapiens
  chr1:10057121-10057381
  hyper
  lymphoid_neoplasm vs. head_and_neck
cgcgcggtgggcagagccaggagcaccgggctgaggcggccgggagcgcagcggcttctaggggtgagtgggacccacgcggccccacctgctcctcccgcgcgcggccccacccccctgccccgccccgcctggtttataggtcccggcccgagcctccggccgcccgccgggtttgtcccgcgatccccgaccatgcccgccgacctcagcggtacttggaccctgctcagcagcgacaacttcgagggctacatgct

SEQ ID NO: 465881 - DNA, 485 bp, Homo sapiens; identical to SEQ ID NO: 356663
  chr1:10057622-10058107
  hyper
  lymphoid_neoplasm vs. head_and_neck

SEQ ID NO: 465882 - DNA, 508 bp, Homo sapiens
  chr1:15250613-15251121
  hyper
cgcgggactgagagccgttcccacgtgagaggctccgcggccgaattcctcgcgtgcagcaggcgcggaccgcccggcgtccggccggactgagagccctggtccggcgcgcgccgccggccgggcgggaggcgggggcgggctcggctgcgccccgatgcggcggcgacctccgggtctgtgagcccggcgcgcgccgtcggagcccctcgcgcagccgctggtagcgtccccccgggcacccggcatgcgggcggccgactcgggctcgtgggagcgcgtccgccagctcgcggcgcagggcgagccggcgccttcctgcggggcgggggccgggcccgcgcggcccccgggacccgcagcctgcgagcagtgcgtggacgcggcggggcccggcgatcggccccgcgccggggttccccgggtccgagcggatggcgactgcagccagcccggtaggtgcgcgcggggcggggcggggcgggcggcgcggacacaggcccaggag

SEQ ID NO: 465883 - DNA, 106 bp, Homo sapiens
  chr1:15251274-15251380
  hyper
tcgggggctgcaccggggggccaggaccgcgcttgccggagccaggcgatcccgcggcgcctggagacccagctccgggctggaccccgcgtctgctgggggaagc

SEQ ID NO: 465884 - DNA, 231 bp, Homo sapiens
  chr1:15250890-15251121
  hyper
  lymphoid_neoplasm vs. head_and_neck
cgcgtccgccagctcgcggcgcagggcgagccggcgccttcctgcggggcgggggccgggcccgcgcggcccccgggacccgcagcctgcgagcagtgcgtggacgcggcggggcccggcgatcggccccgcgccggggttccccgggtccgagcggatggcgactgcagccagcccggtaggtgcgcgcggggcggggcggggcgggcggcgcggacacaggcccaggag

SEQ ID NO: 465885 - DNA, 226 bp, Homo sapiens
  chr1:15251274-15251500
  hyper
  lymphoid_neoplasm vs. head_and_neck
tcgggggctgcaccggggggccaggaccgcgcttgccggagccaggcgatcccgcggcgcctggagacccagctccgggctggaccccgcgtctgctgggggaagcgtgggaaaggggccagccctgcgcgaagttggttcggccccctgggaccgcacctgtgagccatgtggcggcccccgcggagtgccgaggggagcccccttcaccgccgcccctccgagg

SEQ ID NO: 465886 - DNA, 80 bp, Homo sapiens; identical to SEQ ID NO: 369011
  chr1:15251580-15251660
  hyper
  lymphoid_neoplasm vs. head_and_neck

SEQ ID NO: 465887 - DNA, 796 bp, Homo sapiens
  chr1:15478897-15479693
  hyper
  lymphoid_neoplasm vs. pancreas_gallbladder
cgtggacaccatatgtacccatgaattccgcctttggaagtgaacttgattgcagcctattttcgtctggaggcggtggattcccggtaggaggcgccttcagtcctcggctcgatcctgtgacgccagccagctgcctatcggcttctcagtgtttgaacttcaaagggctggacgctcacccaagaaggggaccccggcctgacctctctcggaattcaaaaaaatctaaggctcagagagggaatgggagctggctcttccctctgtgtttagcatccacgttttttggcggtctggctgaaaccagcccaccctagttcgggcgccagagcaacgcagttccgagggcagatctccaaggggcggaggcagagccgcgggtgagaggcttccgcgccgacttcgggtttgcactccccggagccagaactccgtggcggctccgggcctccgtggatccgagcagagactggctgcccgcctgccactcgcaggctgggaaaacgccagccggtgcctcgccgggaaagttctcggcaaagctggggatgagccctcagcagggcaggctcccggtgcagcgcgcccccatccattgcccgcgcgcaagaacccggaatgggccccacctgggccgggactcgggcgtgcgatcccgagggcgccctggggaccacgcatcgggtggggaccctggccgagggcgtgagctgactcagtttttaaaaactcgcttcctccttccctacttgtgccggtcactcacctcgctgggaaccagcccagggcagaa

SEQ ID NO: 465888 - DNA, 35 bp, Homo sapiens
  chr1:15479777-15479812
  hyper
  lymphoid_neoplasm vs. pancreas_gallbladder
tgcctcggcgtctgcgcctggtgtgggaggaaagc

SEQ ID NO: 465889 - DNA, 361 bp, Homo sapiens
  chr1:15479332-15479693
  hyper
  lymphoid_neoplasm vs. pancreas_gallbladder
cgtggcggctccgggcctccgtggatccgagcagagactggctgcccgcctgccactcgcaggctgggaaaacgccagccggtgcctcgccgggaaagttctcggcaaagctggggatgagccctcagcagggcaggctcccggtgcagcgcgcccccatccattgcccgcgcgcaagaacccggaatgggccccacctgggccgggactcgggcgtgcgatcccgagggcgccctggggaccacgcatcgggtggggaccctggccgagggcgtgagctgactcagtttttaaaaactcgcttcctccttccctacttgtgccggtcactcacctcgctgggaaccagcccagggcagaa

SEQ ID NO: 465890 - DNA, 334 bp, Homo sapiens
  chr1:15479777-15480111
  hyper
  lymphoid_neoplasm vs. pancreas_gallbladder
tgcctcggcgtctgcgcctggtgtgggaggaaagcgggtctcccagctccacttaaacccctaaaacctgggacttctagcttgagacattccccgaccaccacccgtcacacacacgcgcgtgcgcgcacacacgcatgcacaccgattctctgggccctagggaggaggggggatcagggctctattttctcccgaccccctcttatccaactcggctggcaagggttggggagaacttaggcccagcccccggcacacgctcagcgcgctccagcggcatacgctggggagtgggtgcccgcctcgctcagctgcgatccctcgcctcggg

SEQ ID NO: 465891 - DNA, 88 bp, Homo sapiens
  chr1:15480226-15480314
  hyper
  lymphoid_neoplasm vs. pancreas_gallbladder
gcacgccggcgctcccaggccgcgcttcctgcgtccccaacccggtccctgagagggcagtgcgccctctccaccactgcgttccctc

SEQ ID NO: 465892 - DNA, 240 bp, Homo sapiens
  chr1:15479871-15480111
  hyper
  lymphoid_neoplasm vs. anorectal,pancreas_gallbladder, lung
cgaccaccacccgtcacacacacgcgcgtgcgcgcacacacgcatgcacaccgattctctgggccctagggaggaggggggatcagggctctattttctcccgaccccctcttatccaactcggctggcaagggttggggagaacttaggcccagcccccggcacacgctcagcgcgctccagcggcatacgctggggagtgggtgcccgcctcgctcagctgcgatccctcgcctcggg

SEQ ID NO: 465893 - DNA, 368 bp, Homo sapiens
  chr1:15480226-15480594
  hyper
  lymphoid_neoplasm vs. anorectal,pancreas_gallbladder, lung
gcacgccggcgctcccaggccgcgcttcctgcgtccccaacccggtccctgagagggcagtgcgccctctccaccactgcgttccctcggctaagaatcccccgaaccccagccccgcgatcgcggcgcccaccgaggaggccgcccgggtggggcgcgggggtcgcgaagcccgcagtcccggaccgcccagccgagacggagccggacccgccgcctcccgggtgagtctcagccgccgcgccttgcgcccgctgcttcccgcggcgcgctgtcggttccccacagggccgtgtaagggggccgaggcccgtttgggtctcctgtccgtccgtctgtccgccgagcgcttcccgcctggggtcgac

SEQ ID NO: 465894 - DNA, 239 bp, Homo sapiens
  chr1:15573761-15574000
  hyper
  lymphoid_neoplasm vs. cervical,colorectal, pancreas_gallbladder,thyroid,breast,uterine
ggtgccgggtgcgagctggagactccgcgggagcgcggccgggaggcttcgccccggagctggcccgacgcctcccgagctggcagggctctcggcggaggtcggagcgtgggcttcctcctcccgccaggtgagtgcggcgcgggaaggggtggcgggccgagaccggggaccggaaggggcggcccagcgaggactagccctggcaggaggaggggtggctccccggccccatcctc

SEQ ID NO: 465895 - DNA, 73 bp, Homo sapiens; identical to SEQ ID NO: 356677
  chr1:15574029-15574102
  hyper
  lymphoid_neoplasm vs. cervical,colorectal, pancreas_gallbladder,thyroid,breast,uterine

SEQ ID NO: 465896 - DNA, 210 bp, Homo sapiens; identical to SEQ ID NO: 455507
  chr1:19043143-19043353
  hyper
  lymphoid_neoplasm vs. multiple_myeloma

SEQ ID NO: 465897 - DNA, 259 bp, Homo sapiens
  chr1:20810336-20810595
  hyper
  lymphoid_neoplasm vs. liver_bileduct
cgcggtgaaacagctccatcctccgtccctgccaggggtcccttccctgctttcctctgaaccacccaccaccctctatcctccagcctgcgtcccagctccattctgagaaaaggaaacagagggcgccaacccagccgctcctgctgcagccagggcgcgcactggcccgcgtcctccccgcaccaggcgcactaatttagacagaaatgtctggagctgggataggagagggagccaaagtctttgggtctcggga

SEQ ID NO: 465898 - DNA, 260 bp, Homo sapiens
  chr1:20810930-20811190
  hyper
  lymphoid_neoplasm vs. liver_bileduct
gtctctgtctctccctgtctaaggtgtcggtcgcccttattgtttcggcggcttctgcgtcctccccaaacgcgcgtcctcggctctgtctctcccgcttcagctcccctctcgggagctttgtctcggtctctgccaccctcggtctcccgcgtaccccctcccctccatccctgcgtctcagtctctctctgcagccgtcggtccccctcattgtccccgcgtctctggagctcctctcggagcctctctgcgtctcc

SEQ ID NO: 465899 - DNA, 68 bp, Homo sapiens
  chr1:20811219-20811287
  hyper
  lymphoid_neoplasm vs. liver_bileduct
cggatcgcccaggcctggcaaaccccctcccaagccaagtaacaatgaaaagcccgtgcgacccgaac

SEQ ID NO: 465900 - DNA, 3 bp, Homo sapiens
  chr1:26372112-26372115
  hyper
  lymphoid_neoplasm vs. pancreas_gallbladder, bladder_and_urothelial
cgg

SEQ ID NO: 465901 - DNA, 392 bp, Homo sapiens
  chr1:26372144-26372536
  hyper
  lymphoid_neoplasm vs. pancreas_gallbladder, bladder_and_urothelial
atctgggctgcgccccaagggagagacggtccttgggccacagcccattatcttcgttccctcacctcaccccacccctcctgcatggtcccagctcaagccgcagccaaaaccaaccactgctaggatggcaaatgcggaggtgcgtcggctgccgccaaaattcccgcccgtccccaggctctcgccttaccggattgccggcctggcgtccaacagatgctgcttctccttggcctccatgcagtcccgcgccgagtcccggcagccgcgcagccgccccgccgagtgcgccctgaaagttgcgcgcgggactccgggtggcgctcacccacctgccccgagggccccgcgaggtgcgctcactccggcccggctcctgcggcccctga

SEQ ID NO: 465902 - DNA, 299 bp, Homo sapiens; identical to SEQ ID NO: 356704
  chr1:26372565-26372864
  hyper
  lymphoid_neoplasm vs. pancreas_gallbladder, bladder_and_urothelial

SEQ ID NO: 465903 - DNA, 29 bp, Homo sapiens
  chr1:33896040-33896069
  hyper
  lymphoid_neoplasm vs. head_and_neck,breast
cgctgtcacgccgcggctggggagcgggc

SEQ ID NO: 465904 - DNA, 639 bp, Homo sapiens
  chr1:33896186-33896825
  hyper
  lymphoid_neoplasm vs. head_and_neck,breast
ggtccccggagaaagcgagtcactgacgggaccttggcccgttcccgttccggttcccgttcccggcaagcctcggccccaggctctccgcagccctcctcgctgcgcgttcccggcccgggggcgccgcgctctgccggtcgccggccgggactgcgggctcccagcgcgggccccacgccgcggaccaggggtcaggccgcctgccgcccgcctgtccgtgcccatggcaatgccccgccccgcgcggcccgtcccggccgagcgctccggcccgaccgtgacagctgggtgcccaaagggttaagccggcagcgcggcggccggtgtcccccgcgcgctgcccgtcagccgcgagctggccccagcgcgcacgcgcccgcccgttacctgcggtcgcctccgcgctcctcctccacctggccgctctctcccgggggccgcccctcagcccgccccctcggctcggcgccgcgcaccctgctggctgctcggacgctgcccgcggaggaggggcgagggcgctattaccatatattagcataccagcgcgcgtcacgtggccgctccagccaatggtcaccctagaagggcggggattgggcggaacacgccttagtgctgctcccagcctgaacc

SEQ ID NO: 465905 - DNA, 225 bp, Homo sapiens; identical to SEQ ID NO: 457259
  chr1:34629913-34630138
  hyper
  lymphoid_neoplasm vs. sarcoma

SEQ ID NO: 465906 - DNA, 64 bp, Homo sapiens
  chr1:34630074-34630138
  hyper
  lymphoid_neoplasm vs. myeloid_neoplasm
cggttcctctccagcccccaggaccagcgtgcctggcagaatcaggagccgggggagtagggct

SEQ ID NO: 465907 - DNA, 2 bp, Homo sapiens
  chr1:35246876-35246878
  hyper
  lymphoid_neoplasm vs. lung
cg

SEQ ID NO: 465908 - DNA, 355 bp, Homo sapiens; identical to SEQ ID NO: 369078
  chr1:35247173-35247528
  hyper
  lymphoid_neoplasm vs. lung

SEQ ID NO: 465909 - DNA, 132 bp, Homo sapiens; identical to SEQ ID NO: 356740
  chr1:40158183-40158315
  hyper
  lymphoid_neoplasm vs. anorectal

SEQ ID NO: 465910 - DNA, 561 bp, Homo sapiens; identical to SEQ ID NO: 330811
  chr1:48175235-48175796
  hyper
  lymphoid_neoplasm vs. colorectal

SEQ ID NO: 465911 - DNA, 422 bp, Homo sapiens
  chr1:48462497-48462919
  hyper
  lymphoid_neoplasm vs. multiple_myeloma,uterine
ggcggcgcccctcagcggggcggggagcccccagttgggcacggagtttcctctggagcacggggctccagccgcaggatgctgggcgccctctggggcgtggctgactgtccctgtcggacctgggggtttctctggggccgggctccgtctgttggaagagggagaccctctagggctgggcccctcccccgggcgctcaacctcgctggccgagcccccgggtgctgagggcgtgttggggtccgggggcgcgcggggtcccggagctgcgtcgcggtccaggggcgcgcggggttcctggggcagaaccgagaacccggggtgcgcaagggtcccggggttatgctgggcacccggggcacgcaagggtcccaggggtgcgcggcgctccaggaggcgcgcagtgggacaagtgcggc

SEQ ID NO: 465912 - DNA, 677 bp, Homo sapiens; identical to SEQ ID NO: 356759
  chr1:48462497-48463174
  hyper
  lymphoid_neoplasm vs. renal

SEQ ID NO: 465913 - DNA, 38 bp, Homo sapiens; identical to SEQ ID NO: 330814
  chr1:48463421-48463459
  hyper
  lymphoid_neoplasm vs. liver_bileduct

SEQ ID NO: 465914 - DNA, 836 bp, Homo sapiens; identical to SEQ ID NO: 330816
  chr1:48937304-48938140
  hyper
  lymphoid_neoplasm vs. thyroid,sarcoma

SEQ ID NO: 465915 - DNA, 355 bp, Homo sapiens
  chr1:55505162-55505517
  hyper
  lymphoid_neoplasm vs. liver_bileduct, pancreas_gallbladder
tggtggcgtgatctgcgcgccccaggcgtcaagcacccacaccctagaaggtttccgcagcgacgtcgaggcgctcatggttgcaggcgggcgccgccgttcagttcagggtctgagcctggaggagtgagccaggcagtgagactggctcgggcgggccgggacgcgtcgttgcagcagcggctcccagctcccagccaggattccgcgcgccccttcacgcgccctgctcctgaacttcagctcctgcacagtcctccccaccgcaaggctcaaggcgccgccggcgtggaccgcgcacggcctctaggtctcctcgccaggacagcaacctctcccctggccctcatgggca

SEQ ID NO: 465916 - DNA, 50 bp, Homo sapiens; identical to SEQ ID NO: 278445
  chr1:55505559-55505609
  hyper
  lymphoid_neoplasm vs. liver_bileduct, pancreas_gallbladder

SEQ ID NO: 465917 - DNA, 121 bp, Homo sapiens
  chr1:57110528-57110649
  hyper
cgctcccgacatgcgaggcccgtctcttcttccagtttgacttccaagtctttccattccctaggatcgggccccagtctcaccccctattttcacccccttcggttttcctcagaaaggg

SEQ ID NO: 465918 - DNA, 169 bp, Homo sapiens
  chr1:57110714-57110883
  hyper
cggaccccgcgcatctggcgcagcccctcccgcactcccgcccagcgccccgcgtccccggcccccgctgtcgctgcttcgggttccgccgcaggagcctctcactcccgggagcgggcgcctcgcgctccctccctcggccccgccccgcccgccgctcgcccgttgc

SEQ ID NO: 465919 - DNA, 13 bp, Homo sapiens
  chr1:57111498-57111511
  hyper
cgttctgcgaggc

SEQ ID NO: 465920 - DNA, 206 bp, Homo sapiens
  chr1:62784150-62784356
  hyper
  lymphoid_neoplasm vs. multiple_myeloma,anorectal
cgccctcggcggcgtctagagcactcggagctgccccattgcctccgcccaaggtcgcggcccaaagggagccctggaaagttcagccaggggccgaggagtgccagggttggcactacggggagacttttgcgacaggagagagactaagagctcgattccaggtagcagtgggagcccgcggcaaagaacgcccagtcccgcag

SEQ ID NO: 465921 - DNA, 225 bp, Homo sapiens
  chr1:62784646-62784871
  hyper
  lymphoid_neoplasm vs. multiple_myeloma,anorectal
tgggcgaggcgggtggcagaggcaagaggagagtggtcgagcgccggggccaacactcgggtcgcgcagggcgggtgttgaacaccccagcagacgcactgcgggggactggggtcgcagagtcccttaccttggcgagctgcggaagtcctgcgcgaggcggcccgcggtgcacggggccggggcagctaggcgcacaccccggcttcggagcgcacgcaacct

SEQ ID NO: 465922 - DNA, 394 bp, Homo sapiens
  chr1:65774903-65775297
  hyper
  lymphoid_neoplasm vs. uterine,lung,cervical,anorectal, colorectal
cctcccaacccacgtcgtagtagtcccctcccccgaccaccccgccccgtttcccttcaacccccctcctcacgaacctcccctcccttcctacctccctttccttccctccccgcgggccagcggctttggcgctgccctgctgcgcggcggggcgacgcggcgacacctataggattgcttccgggcactcctcagccaggaggtgctggcctggggcccggagctcggcagggccgggcggctccgcggcgttggcccagaggacgcgcgcccccgcccggccgcgtctccttccctccctccctcctcccggcgccccgagccgagctcagcccagggcggcggcttcgcctcgcccggcgaagcttctctccggtggccgctccttctt

SEQ ID NO: 465923 - DNA, 446 bp, Homo sapiens; identical to SEQ ID NO: 349257
  chr1:65775326-65775772
  hyper
  lymphoid_neoplasm vs. uterine,lung,cervical,anorectal, colorectal

SEQ ID NO: 465924 - DNA, 713 bp, Homo sapiens; identical to SEQ ID NO: 369162
  chr1:68298601-68299314
  hyper
  lymphoid_neoplasm vs. head_and_neck

SEQ ID NO: 465925 - DNA, 143 bp, Homo sapiens
  chr1:82266277-82266420
  hyper
  lymphoid_neoplasm vs. ovary,pancreas_gallbladder
cgagccgctggtcatccccctgcgctcagcctcggagcgccgcgcttcgcggcgctctcccaaatactcttcacccactccagaaataaaataaatgtttttaaagtgcatgtgtgtggacaggatggagagcgcgcgccggc

SEQ ID NO: 465926 - DNA, 327 bp, Homo sapiens
  chr1:82266440-82266767
  hyper
  lymphoid_neoplasm vs. ovary,pancreas_gallbladder
cgcgcagtgagtggagtttgggggtgggctaggggttagcggttgaatgggtgtgttaatggggggagctggaggcagagctcggggacctgggggtagggggagcgcgaaccgactgggaggggagagaaggggaggggcgcgagctggcgcaggccgcctccggggcgcgttccacggccgtgcgcgcgcgtccctcgccgccaccgccgcccggacagccctgcggccgccccgccggcggagccggggccggcctggtcctcgggcggctgcttggccaccgccaccgccgtccgaagggctcgagcccgtaagtatcccctt

SEQ ID NO: 465927 - DNA, 296 bp, Homo sapiens
  chr1:82266855-82267151
  hyper
  lymphoid_neoplasm vs. ovary,pancreas_gallbladder
gattatctgctccacgttttgtacttagctgcctgtaatcttcttttgagtttgcccgagccccttgctggaaaactcaggagggagagatttgtcctttgacgctgtacacgctagtatgtttatatgattagcccaactggcggggagggcggatttgggggaaggaggaggaggaggctggaggtgactccagttcagacctcgcggagagtctgtgtcaggacttcgcattcccccgtctctctctctctccctctcgctccctctcactctctctccgctcacacacacgc

SEQ ID NO: 465928 - DNA, 51 bp, Homo sapiens; identical to SEQ ID NO: 356811
  chr1:82267185-82267236
  hyper
  lymphoid_neoplasm vs. ovary,pancreas_gallbladder

SEQ ID NO: 465929 - DNA, 370 bp, Homo sapiens
  chr1:82267247-82267617
  hyper
cggctactccttgcttccccgagcccgagtctgcgccgccagccttccttggggcagcggccaccgctcagccccggccgggagatccgaaatgtgaggaggggtcgccgccgcctcccgccccaggccgcagggtcggcgcgagggatgctattccggccgggcgctcggggggctgaggggcttcgcctgacaaactgagttggcctcgcgcccccggcgccctcccgcccgtcgcttcgaagggactcccaagtctgcgcacctctgtcaggcttttgcttccaccacccctttcgctctgattcccgatttttttttcctaagggagcgtgcggtctgggggtgtgtgcgtgtgtgtgaaagacct

SEQ ID NO: 465930 - DNA, 19 bp, Homo sapiens
  chr1:82267660-82267679
  hyper
ttaaccccaggagccgccc

SEQ ID NO: 465931 - DNA, 150 bp, Homo sapiens
  chr1:82267739-82267889
  hyper
cgccgtgtccggccggggagctgcggcgctgcctcccgcgcggactcggcggccgaggacccgctcgcggccggcctcggccctctccggccggggtagccgctgccctccgcgcctgtccccgcgcggcccccacgccagacggccctc

SEQ ID NO: 465932 - DNA, 202 bp, Homo sapiens
  chr1:85358969-85359171
  hyper
  lymphoid_neoplasm vs. multiple_myeloma
ttcccactggagagcgtccccaacctgcaaggccgcgagctgcgctcaaaggggcccgtgcgagccgcgggagggcagcgctcttgcagacgcgttcctgcctgggatcgtccccaggtgggtggtcggccggccccgagagggaaaagcgcccactaaaggaccgctagtacccacaagcctcacggagccatacctcgga

SEQ ID NO: 465933 - DNA, 61 bp, Homo sapiens; identical to SEQ ID NO: 455537
  chr1:91185065-91185126
  hyper
  lymphoid_neoplasm vs. multiple_myeloma

SEQ ID NO: 465934 - DNA, 502 bp, Homo sapiens
  chr1:94702434-94702936
  hyper
  lymphoid_neoplasm vs. anorectal,breast, pancreas_gallbladder,uterine,upper_gi,melanoma,ovary,colorectal, liver_bileduct,sarcoma,renal
cgggaatagaatccaggcaagaacacagacccatagtgatcaggagcacggattccggagcaaaagcgcctgggtttaggtcctgacgctgccaaccactagtctgtgtgcttgggcaggtttttaacctcggtttccccgtgtgaaccgagtcgaacaatcatggagtgttctgaacattaaaagagttaaaatgtgcaaaggcttcagaacagcaggcggacccgttgtacgcgctgtgtgctaactttaattacgatcgtcaccgtctgctcccggccaccgctggcgtcctccccagctcgtccgcgcctccctcgccgggcgcgcccctagccccggccggacccttcccgtggactccagtcctggctcgaggacacccgtccctagcgcagcctgccaccgcttccactcggggccgccccgcgggcctcccggaccctggacggcaattcgcgggcgctcgcgcgggcaaccccagcccggagccacgaccgcc

SEQ ID NO: 465935 - DNA, 89 bp, Homo sapiens
  chr1:94702990-94703079
  hyper
  lymphoid_neoplasm vs. anorectal,breast, pancreas_gallbladder,uterine,upper_gi,melanoma,ovary,colorectal, liver_bileduct,sarcoma,renal
gccggacgcggacgcccgccccacacctacggccgccgccaccgccgagggctggagctcgctgcccccatcccccacggcctgcggac

SEQ ID NO: 465936 - DNA, 95 bp, Homo sapiens; identical to SEQ ID NO: 346356
  chr1:94703103-94703198
  hyper
  lymphoid_neoplasm vs. anorectal,breast, pancreas_gallbladder,uterine,upper_gi,melanoma,ovary,colorectal, liver_bileduct,sarcoma,renal

SEQ ID NO: 465937 - DNA, 199 bp, Homo sapiens
  chr1:94702737-94702936
  hyper
  lymphoid_neoplasm vs. pancreas_gallbladder,ovary, cervical,liver_bileduct,anorectal,upper_gi,uterine,breast
cgtccgcgcctccctcgccgggcgcgcccctagccccggccggacccttcccgtggactccagtcctggctcgaggacacccgtccctagcgcagcctgccaccgcttccactcggggccgccccgcgggcctcccggaccctggacggcaattcgcgggcgctcgcgcgggcaaccccagcccggagccacgaccgcc

SEQ ID NO: 465938 - DNA, 89 bp, Homo sapiens; identical to SEQ ID NO: 465935
  chr1:94702990-94703079
  hyper
  lymphoid_neoplasm vs. pancreas_gallbladder,ovary, cervical,liver_bileduct,anorectal,upper_gi,uterine,breast

SEQ ID NO: 465939 - DNA, 222 bp, Homo sapiens
  chr1:94703103-94703325
  hyper
  lymphoid_neoplasm vs. pancreas_gallbladder,ovary, cervical,liver_bileduct,anorectal,upper_gi,uterine,breast
cgcagccgcagccacagccacaggcaccaccaccactgcagccgccaccgcccctgcagctaccgccacggccgcaccgcccgcccgccagccccgccccctggagcccagcccattggcccgcgctcccgggggcggggccggcgaccgcggcaggtacgggaggcaactagctcgcgcgcagaacgcgaccgtcagttgcgcgcggccggacgctgtccc

SEQ ID NO: 465940 - DNA, 157 bp, Homo sapiens; identical to SEQ ID NO: 356839
  chr1:94703357-94703514
  hyper
  lymphoid_neoplasm vs. pancreas_gallbladder,ovary, cervical,liver_bileduct,anorectal,upper_gi,uterine,breast

SEQ ID NO: 465941 - DNA, 283 bp, Homo sapiens; identical to SEQ ID NO: 349287
  chr1:94713022-94713305
  hyper
  lymphoid_neoplasm vs. liver_bileduct,lung,breast, colorectal,anorectal,head_and_neck,uterine

SEQ ID NO: 465942 - DNA, 657 bp, Homo sapiens; identical to SEQ ID NO: 330909
  chr1:95285602-95286259
  hyper
  lymphoid_neoplasm vs. pancreas_gallbladder

SEQ ID NO: 465943 - DNA, 760 bp, Homo sapiens
  chr1:99126872-99127632
  hyper
  lymphoid_neoplasm vs. renal,liver_bileduct,sarcoma, upper_gi,anorectal,thyroid,non_cancer,lung,colorectal,ovary, breast,head_and_neck,prostate
cgggtgccttccagcctcgctgtggatcccgcgaagtggacggttcgcttcgtggcttcttcccagaccccgccactgcggaaaccgtcactcggtggcccccgactgggtcaatgcgaggacgcccacctcctacctttgagtctctcctcttctccagggtacagccaaccctttctccaacgtagccggagtccgagagtcccagttccgcccctccagcccgccccaggccaggtggggatgcgcccggcccgggccagcgctggtcccggcagttccgcgtctgcgcagcgggcgaggggctggagcggggccggccggggaggtgcaggagacgtgggagccaatgggcacgctcgggggagccgggctggcggcggcggtggcggccggctgggcgcgcactctcgggatggagggcgagcgccgggcatcgcaggcgccctcctcgggcctcccggccgggggcgccaacggggagagcccggggggcggcgccccctttccgggcagcagtggctcttccgccctgctgcaggcggaggtgctggatctggacgaggacgaggacgacctggaggtgttcagcaaggtgagggcggcggcggcgagtcccgggaaacttccaaggcaactccgggcgttgccagcattgcgccgacggctgcctctggcgcgcttgccctcccggggcggtggctctgagctggggacgagtgaggtcccccgggctgctggaccccgcctgccagctctg

SEQ ID NO: 465944 - DNA, 5 bp, Homo sapiens
  chr1:99127671-99127676
  hyper
  lymphoid_neoplasm vs. renal,liver_bileduct,sarcoma, upper_gi,anorectal,thyroid,non_cancer,lung,colorectal,ovary, breast,head_and_neck,prostate
cagcc

SEQ ID NO: 465945 - DNA, 443 bp, Homo sapiens
  chr1:99127189-99127632
  hyper
  lymphoid_neoplasm vs. upper_gi,renal,sarcoma, liver_bileduct,lung,non_cancer,anorectal,prostate,ovary, colorectal,breast,thyroid,uterine,bladder_and_urothelial
cggccggggaggtgcaggagacgtgggagccaatgggcacgctcgggggagccgggctggcggcggcggtggcggccggctgggcgcgcactctcgggatggagggcgagcgccgggcatcgcaggcgccctcctcgggcctcccggccgggggcgccaacggggagagcccggggggcggcgccccctttccgggcagcagtggctcttccgccctgctgcaggcggaggtgctggatctggacgaggacgaggacgacctggaggtgttcagcaaggtgagggcggcggcggcgagtcccgggaaacttccaaggcaactccgggcgttgccagcattgcgccgacggctgcctctggcgcgcttgccctcccggggcggtggctctgagctggggacgagtgaggtcccccgggctgctggaccccgcctgccagctctg

SEQ ID NO: 465946 - DNA, 325 bp, Homo sapiens; identical to SEQ ID NO: 344965
  chr1:99127671-99127996
  hyper
  lymphoid_neoplasm vs. upper_gi,renal,sarcoma, liver_bileduct,lung,non_cancer,anorectal,prostate,ovary, colorectal,breast,thyroid,uterine,bladder_and_urothelial

SEQ ID NO: 465947 - DNA, 112 bp, Homo sapiens
  chr1:110008905-110009017
  hyper
  lymphoid_neoplasm vs. lung
cggcgctgggcagtttgcaatccaggaaaatagggaaggataaacctgaagcctgtgcgtccaggtgcgcctggctagggtttccgacggccgcggtgtctcggtggggacc

SEQ ID NO: 465948 - DNA, 490 bp, Homo sapiens
  chr1:110009094-110009584
  hyper
  lymphoid_neoplasm vs. lung
cctttaaggtgcccggcgagcggagaaagggagcagagggggcgggaggagggttcgggagcgcacgccacgtgacccggcggccaagttcgctgcgagtttgacagaagtttgaatccgagtcgggggctttctgctgccggcggggcaccgcggcggccgcagcctctgagagcacgaacagcagcgcccccgcgtcccagccagccagccagccagactggactccggcccaccgacggccgctcgcgctccggccccgctcgcctgctctgccccggacctgcagctccccgctcccccgccgtgtccgccgcctcccggccagagagccaagccaccacgccgcgcccagcgctcgccgcgccagcatgtcctcgaccgagagcgccggccgcacggcggacaagtcgccgcgccagcaggtagtccctgcgcgcccaggactctcacccgcccctctccacctagatgtcgggctgcacactta

SEQ ID NO: 465949 - DNA, 156 bp, Homo sapiens
  chr1:112532952-112533108
  hyper
  lymphoid_neoplasm vs. head_and_neck
cggagtgtaccgacgcgggtgtgagcgcgtgtgccagcgagggtgggcacgggggtgagcgtggcaaggtgagctgggtttgggggtgggggaggagcagggagtacggcgtgagcgtaagttcgggggcgtgtgtggctggggacccacggagag

SEQ ID NO: 465950 - DNA, 700 bp, Homo sapiens
  chr1:113932580-113933280
  hyper
  lymphoid_neoplasm vs. upper_gi,liver_bileduct,lung,ovary, cervical,breast,head_and_neck
cggaacctcggccggctcaggactccgcacgttgtcttccaatctaagcacaccggcccctctctgcgccccgcacaggctcagaggctccgcccgcgtctccgcctaactcgccggccacgcccccacttcggggagctcggtccctctcggattcgagttttcctcggctccagccgccgcgcagagggcctctcccggccctgcgacctacagccccttccactcccctgcccctcctctgcgccctccctcactctccaaacttcttttttccaccctctctaaacttcagtcattctagtgcccgcctcctccactcgcaccgaccaaccagtggtccccattctcgttggcggtccgcctcctgcccgccgggggccaatccctggcgcgagagtccagggccggggctcgttcccaagcgcccagcctgtgacggcagcgcgccgggcgccgcgcggcgggagggggcggggctctggatgagggatgggcgagggccgggggaagggaaaagggaggaggaggaggttgcggctggtttgaaagcggcagtttcctggcagcttgggcaggcgttggtctccgcgctacagctccgcagcggccacgatcgatcccgcgacgggtctacgcgcgcttctgcgcgccccccacggatttttcccgttcccggctcttcccccttcacctcccc

SEQ ID NO: 465951 - DNA, 264 bp, Homo sapiens; identical to SEQ ID NO: 349309
  chr1:113933305-113933569
  hyper
  lymphoid_neoplasm vs. upper_gi,liver_bileduct,lung,ovary, cervical,breast,head_and_neck

SEQ ID NO: 465952 - DNA, 203 bp, Homo sapiens
  chr1:113933077-113933280
  hyper
  lymphoid_neoplasm vs. liver_bileduct
cgagggccgggggaagggaaaagggaggaggaggaggttgcggctggtttgaaagcggcagtttcctggcagcttgggcaggcgttggtctccgcgctacagctccgcagcggccacgatcgatcccgcgacgggtctacgcgcgcttctgcgcgccccccacggatttttcccgttcccggctcttcccccttcacctcccc

SEQ ID NO: 465953 - DNA, 764 bp, Homo sapiens; identical to SEQ ID NO: 369243
  chr1:113933305-113934069
  hyper
  lymphoid_neoplasm vs. liver_bileduct

SEQ ID NO: 465954 - DNA, 795 bp, Homo sapiens; identical to SEQ ID NO: 346366
  chr1:116184428-116185223
  hyper
  lymphoid_neoplasm vs. upper_gi,cervical, pancreas_gallbladder,melanoma,lung,colorectal,breast,sarcoma, ovary,bladder_and_urothelial

SEQ ID NO: 465955 - DNA, 811 bp, Homo sapiens
  chr1:116184749-116185560
  hyper
  lymphoid_neoplasm vs. lung,cervical,colorectal,sarcoma, upper_gi,melanoma,bladder_and_urothelial,pancreas_gallbladder
cggggcagaccgttggctgggagacgcccccacctcggaccccgcgtgcccctgcgccctcctcccgcattcgccccgccggacttcgaccccgggtggccggctcccgcctcgggccgggggctccctcccctcctccggagcgctccgggtagtgcttcctctgactccactcttctccccatgcgttgcgcccctcctggccctgccgtgcgatctccgccgcaccccactccttggggtcccggggttccctgctcacacctcggacgtccctttctccccgggctggcctttggagtgcgccccttcggtgcgcgtgccggggcggcgggcaggccggcagggagtggccgagcgttggaggcaccgggcggctgcagcagccgtgcagggcgggagccgggcgcgcaccggggttcccacccctggcggggctcgacccgggcgccgcctggcccttcgccaggaaccgggacagagctggtctgtgtgcacacctcgctcacaaaaaattgagccggccctggaggcctggggggcgagtccggttgcgcctcggagagcgcaacaggcaggtaggagtttactttcaaaaacgccggggtggagcagaggcgcctggcgggtctctgcccaaggtgtccctgctggaggaaatctcaccgcgccggggcagccttcgccaccggcaggacctcatttccttctgcagtctttgaactgccccaagcatcgcgcctagagaagtgtgaagctttataaaaatttaaacgcgtccgtggtggcggcagcagtggggcggagccgc

SEQ ID NO: 465956 - DNA, 99 bp, Homo sapiens
  chr1:116370923-116371022
  hyper
  lymphoid_neoplasm vs. multiple_myeloma
cgtggccgcgatcccacctgcggcgtccgcgtccgcccgctctccctgaggtctgcaccctgagaggaggggcgagcgagccaacttggggcagggatc

SEQ ID NO: 465957 - DNA, 204 bp, Homo sapiens; identical to SEQ ID NO: 369248
  chr1:116381944-116382148
  hyper
  lymphoid_neoplasm vs. uterine,non_cancer,sarcoma

SEQ ID NO: 465958 - DNA, 201 bp, Homo sapiens
  chr1:117452644-117452845
  hyper
  lymphoid_neoplasm vs. liver_bileduct,upper_gi,colorectal, head_and_neck,breast,lung,pancreas_gallbladder,renal
cggagccaggggcgcacgtacgccccagcgctgggatttatcggctcgcgaggagagcggagcaggcgcgcggcccaggcggaggagcgccgactctggagcagccggagctggaagaggaggaggaggagaggcggcggggaaggaggaggagggggagagtcgctcccgccgggcgagcatggggcgcctggcctcgag

SEQ ID NO: 465959 - DNA, 219 bp, Homo sapiens; identical to SEQ ID NO: 349315
  chr1:117453203-117453422
  hyper
  lymphoid_neoplasm vs. liver_bileduct,upper_gi,colorectal, head_and_neck,breast,lung,pancreas_gallbladder,renal

SEQ ID NO: 465960 - DNA, 147 bp, Homo sapiens
  chr1:156646447-156646594
  hyper
  lymphoid_neoplasm vs. cervical
cgacgtctccatgtgtgccacgcgctcctggtagccgcgcactgccccgcgccacgcctcgcccagtcgccttgccagctcctctacctccggggccggcgcgggaggcccgcggggcggcgcggggcagcggggggcacaggcagc

SEQ ID NO: 465961 - DNA, 403 bp, Homo sapiens; identical to SEQ ID NO: 356897
  chr1:156646856-156647259
  hyper
  lymphoid_neoplasm vs. cervical

SEQ ID NO: 465962 - DNA, 903 bp, Homo sapiens; identical to SEQ ID NO: 331011
  chr1:162039148-162040051
  hyper
  lymphoid_neoplasm vs. upper_gi

SEQ ID NO: 465963 - DNA, 104 bp, Homo sapiens
  chr1:165204594-165204698
  hyper
  lymphoid_neoplasm vs. prostate,myeloid_neoplasm, non_cancer
ccaggggactctccctttcagcacaagcgctcacacgtgcgctcgcgcggacacacacacacacactcacactcacacacaaataaatccccagcacctgcctc

SEQ ID NO: 465964 - DNA, 94 bp, Homo sapiens
  chr1:165204732-165204826
  hyper
  lymphoid_neoplasm vs. prostate,myeloid_neoplasm, non_cancer
cggctccgccagcggagagcctttggatttaccgtggcattacttttaattaactctgcggcgcggcgcggggagcgcagggtgggccctaatc

SEQ ID NO: 465965 - DNA, 1 bp, Homo sapiens
  chr1:165204697-165204698
  hyper
  lymphoid_neoplasm vs. melanoma,prostate,sarcoma,uterine, ovary,myeloid_neoplasm,thyroid,non_cancer
c

SEQ ID NO: 465966 - DNA, 94 bp, Homo sapiens; identical to SEQ ID NO: 465964
  chr1:165204732-165204826
  hyper
  lymphoid_neoplasm vs. melanoma,prostate,sarcoma,uterine, ovary,myeloid_neoplasm,thyroid,non_cancer

SEQ ID NO: 465967 - DNA, 87 bp, Homo sapiens; identical to SEQ ID NO: 349348
  chr1:165205366-165205453
  hyper
  lymphoid_neoplasm vs. melanoma,prostate,sarcoma,uterine, ovary,myeloid_neoplasm,thyroid,non_cancer

SEQ ID NO: 465968 - DNA, 9 bp, Homo sapiens
  chr1:170633373-170633382
  hyper
  lymphoid_neoplasm vs. uterine,sarcoma,myeloid_neoplasm
cgggcacgt

SEQ ID NO: 465969 - DNA, 256 bp, Homo sapiens
  chr1:170633637-170633893
  hyper
  lymphoid_neoplasm vs. uterine,sarcoma,myeloid_neoplasm
gggacagagggcggggacccgtgtagggcagctagagcccgtccgcggccagaaagacaaggtcctgggaccaggagaggtgatggcagacttcaaaggaagggccagtcacaggggaaaccagatgagaaaagcgggtctcggccgagggcatagccaaggaggacgctggagagaggctccaaggtccggggacactccgaggccctgcggtctcaggcagggactctgtccgcggcggactctctttacttcg

SEQ ID NO: 465970 - DNA, 694 bp, Homo sapiens
  chr1:178062419-178063113
  hyper
  lymphoid_neoplasm vs. head_and_neck,liver_bileduct
cgcggacagggcgcagggcgcagaccctgtgcatatcccagaatcccggacccactgccactccactctgggaaggaagaaggcgctcccccttgggtgactgtaagataaagcagcttcttcgatctctttgtccaataagaaagaaacgttggcccataaagaaagaaagaaacaaataaataggaaaggtgtgagaaggaagggaagctcctttcttttctgtttaaatttcccgcacccttttacctccccgccttctcaaacggtctttactttgagcagcagagacccggaccgctcaatacccggctatccctgggagggtacttggaaagtaggcgggacaggccggatgaataattcggtgtccgacttttcctgcctgcggcgcagtccctccccggcttcgttactcgagtgcacacgcggccgggctctcggccctcgattgcttcagcctatcaccctgggatgccgcctgccgctgccgccgccgccgccgccgccaccgccaccgccaccgccaccgccaccgccgtggctgccgggtttgtgggatccgccgcggagcaggagccagagctgtggccggagctgtggcctgagagtcagggggcgggcaggctcattccagaagtgggggccgaggacaggcgggctagaacccggggccaccgccccctacccctcc

SEQ ID NO: 465971 - DNA, 219 bp, Homo sapiens
  chr1:178063150-178063369
  hyper
  lymphoid_neoplasm vs. head_and_neck,liver_bileduct
ggcggcggcgggagccggtcagagggggcggcccctggcggcgacgcccccaagcccagccctgcccggccccgctccatccccagccagagcctggtctgaccgcgagagacgccggcggggctgaagaaggcggctccgaggaggtgggagggcgagcctcccctcccgggttcttctgcgtcctctcccgggagggacccacacacacctgagccc

SEQ ID NO: 465972 - DNA, 216 bp, Homo sapiens
  chr1:178062897-178063113
  hyper
  lymphoid_neoplasm vs. pancreas_gallbladder,head_and_neck, liver_bileduct,colorectal,bladder_and_urothelial
cgcctgccgctgccgccgccgccgccgccgccaccgccaccgccaccgccaccgccaccgccgtggctgccgggtttgtgggatccgccgcggagcaggagccagagctgtggccggagctgtggcctgagagtcagggggcgggcaggctcattccagaagtgggggccgaggacaggcgggctagaacccggggccaccgccccctacccctcc

SEQ ID NO: 465973 - DNA, 476 bp, Homo sapiens
  chr1:178063150-178063626
  hyper
  lymphoid_neoplasm vs. pancreas_gallbladder,head_and_neck, liver_bileduct,colorectal,bladder_and_urothelial
ggcggcggcgggagccggtcagagggggcggcccctggcggcgacgcccccaagcccagccctgcccggccccgctccatccccagccagagcctggtctgaccgcgagagacgccggcggggctgaagaaggcggctccgaggaggtgggagggcgagcctcccctcccgggttcttctgcgtcctctcccgggagggacccacacacacctgagcccggacccacccttggtcggggccacgctggatcctcctcccggcctgggtcccgcccgccgactgcaggtgggctgcatcgcccgagcctcgggcagtgggcgacggggaaggaggtgagaggtgtccgcgccggctgccgctcgggtccctgccctcgctgcgcgctctcctcctccccttaccgcaggcagggcgcggagccgcgcgccagcccgccccgaagccgccgcctcgtccccctcccgcctcggggcac

SEQ ID NO: 465974 - DNA, 112 bp, Homo sapiens; identical to SEQ ID NO: 356942
  chr1:178063733-178063845
  hyper
  lymphoid_neoplasm vs. pancreas_gallbladder,head_and_neck, liver_bileduct,colorectal,bladder_and_urothelial

SEQ ID NO: 465975 - DNA, 43 bp, Homo sapiens
  chr1:201252452-201252495
  hyper
  lymphoid_neoplasm vs. head_and_neck
cgagcaggaaggcgcccagcgtcccacacaggggactcgcagc

SEQ ID NO: 465976 - DNA, 134 bp, Homo sapiens; identical to SEQ ID NO: 356971
  chr1:201252816-201252950
  hyper
  lymphoid_neoplasm vs. head_and_neck

SEQ ID NO: 465977 - DNA, 207 bp, Homo sapiens
  chr1:201368376-201368583
  hyper
  lymphoid_neoplasm vs. liver_bileduct,multiple_myeloma, pancreas_gallbladder,colorectal
cggctccctccggcgctcacctggacagcgcggaccagtccttcctgctgacagccatgctgcaggagccccgcgtggccgcccgcgccccgccggccgccgcctcacctggcgcccctccccttccagcccaggtgggatcacatggccgcttatctcacccccgcgcgccccggccgcgctccgatttgccgacccgggaatggc

SEQ ID NO: 465978 - DNA, 122 bp, Homo sapiens
  chr1:201368727-201368849
  hyper
  lymphoid_neoplasm vs. liver_bileduct,multiple_myeloma, pancreas_gallbladder,colorectal
ctgcccggggcgagggcgggagacttcctgctcagaaccagtccgaccagcttggcgctgggacgcctccccgcgctgtgccgcggcccggggtgccgaggagctgggctgggggcggggac

SEQ ID NO: 465979 - DNA, 375 bp, Homo sapiens
  chr1:204042250-204042625
  hyper
  lymphoid_neoplasm vs. head_and_neck,colorectal,upper_gi, uterine
cgcagcagcgagccgcgagcgcccttctccagtcccggcttggaactgaactgtgtgagcacgggtcctggaacccgggcccagaaccggcgagcccaggtctgagcccagagctcagcggtcagcctcgtaggccctgactcggaatcgagccgaggcgctgaggttggagccggagagcgtgagagccgaagagcagggagggcgggccggctgcgcgtccgacgagtcgcagagcaggaccgcggaaggcagggagacggccgcaagcccagggcagagggcagagggcagagagcggcctggctcggcggagagggcgccgcccggccggaaccaagctcgccgcccgggacggcgggccccgtggggcgc

SEQ ID NO: 465980 - DNA, 245 bp, Homo sapiens
  chr1:204042692-204042937
  hyper
  lymphoid_neoplasm vs. head_and_neck,colorectal,upper_gi, uterine
cccagcctccccaacccggcccgcccgccgcgtcgcgggggcatgtgagcgggaagcctaggctgccagccgcgaggaccgcacggaggaggagcaggagcgcggagccgcgagccccgagccccgagcccggcgcctggctgagtagtaagtgcacccctccccgccatgatcgcgccgtcgcgcccatttccccagctctctgaagtttgacacttgcgcccctacgtttctgggcacccacc

SEQ ID NO: 465981 - DNA, 75 bp, Homo sapiens; identical to SEQ ID NO: 349384
  chr1:204042966-204043041
  hyper
  lymphoid_neoplasm vs. head_and_neck,colorectal,upper_gi, uterine

SEQ ID NO: 465982 - DNA, 358 bp, Homo sapiens
  chr1:204654218-204654576
  hyper
  lymphoid_neoplasm vs. pancreas_gallbladder
agtctccggctcccccgcaggcgtctcggcggaaggcagcggccggccctcctctggcccccacccgggtcaggcggagctgcggtgccggggcaggagccaggagccctgaggcggctgctccggccgctcccgccgcgtacgcctcggccacgccagcgacctcggtgtccacgattccccggcggcggcggcgctgcccaggtcagccccgaagctgcacactcaccccgtgggcgccgggcaccgtctgccgtctgctgcccgcgcggccgcgctccgctcgccttccgcccggggccgggctggggacgctggtccgcgccctcccgccgcgcgcgccgtctgcacaggccgg

SEQ ID NO: 465983 - DNA, 73 bp, Homo sapiens; identical to SEQ ID NO: 349386
  chr1:204654769-204654842
  hyper
  lymphoid_neoplasm vs. pancreas_gallbladder

SEQ ID NO: 465984 - DNA, 234 bp, Homo sapiens
  chr1:214724215-214724449
  hyper
  lymphoid_neoplasm vs. bladder_and_urothelial, pancreas_gallbladder,prostate,upper_gi,head_and_neck, liver_bileduct,sarcoma,ovary,colorectal,anorectal,breast, cervical
cgttcccaaaacgcagaagggaatggagagaggggaccagggtgtgggtttaaccacaaactccccagactgcgctcaccttccagctcgctcccgggaccagctttgcgcctcaccgcgggcagctcccaccgcgagataacacccctgcggcccggccaccccgcgccccaggctgccctgccaggcgtcccggggcgccaatcgcaagttggcgttgccagcgtctgccca

SEQ ID NO: 465985 - DNA, 45 bp, Homo sapiens
  chr1:214724487-214724532
  hyper
  lymphoid_neoplasm vs. bladder_and_urothelial, pancreas_gallbladder,prostate,upper_gi,head_and_neck, liver_bileduct,sarcoma,ovary,colorectal,anorectal,breast, cervical
caacctcgggcccaactcccggcttggacggggcttacctgctta

SEQ ID NO: 465986 - DNA, 183 bp, Homo sapiens
  chr1:214724561-214724744
  hyper
  lymphoid_neoplasm vs. bladder_and_urothelial, pancreas_gallbladder,prostate,upper_gi,head_and_neck, liver_bileduct,sarcoma,ovary,colorectal,anorectal,breast, cervical
cgcggaaaggctgtccttcgcggcggcggagccgattccccacggaattgattccagtgactggcggaggaggggcgaagggaaggagccgcaggaggcgaaaggggagggaggtttccgccgcgatcccggcgcgagagtccgagcagaggcgcaccgggggagaaaaggagaaaaacctaa

SEQ ID NO: 465987 - DNA, 207 bp, Homo sapiens; identical to SEQ ID NO: 346397
  chr1:214724786-214724993
  hyper
  lymphoid_neoplasm vs. bladder_and_urothelial, pancreas_gallbladder,prostate,upper_gi,head_and_neck, liver_bileduct,sarcoma,ovary,colorectal,anorectal,breast, cervical

SEQ ID NO: 465988 - DNA, 17 bp, Homo sapiens
  chr1:214724515-214724532
  hyper
  lymphoid_neoplasm vs. bladder_and_urothelial, liver_bileduct
cggggcttacctgctta

SEQ ID NO: 465989 - DNA, 183 bp, Homo sapiens; identical to SEQ ID NO: 465986
  chr1:214724561-214724744
  hyper
  lymphoid_neoplasm vs. bladder_and_urothelial, liver_bileduct

SEQ ID NO: 465990 - DNA, 428 bp, Homo sapiens
  chr1:214724786-214725214
  hyper
  lymphoid_neoplasm vs. bladder_and_urothelial, liver_bileduct
agctgggaggggaaggagcgccagtggccacttgatgtctgtctagggctccccgaggacctgagccaggagagcaggcggctgagcccggagaagcacagcaacctgcccccgagtctgcgcccgctgcgctcactccgccgagaaaaagttggaaagaactttgaggggccgggagagccagagcggcaggaaatgcgagcggccgggagaggagggaggaaggggccgtgcgagtgggaggggacggagcaggcgccggcggccacggctcccccaccccagagccgggctccgcggccctgggggccgggaggcggagggagcgctgggcgcgcggccgggggcggggaggaatgcggcccgggagggcgcgcgccgggggcgccgcgggcgcgcgctgaaacgtggagccccagctcccgagc

SEQ ID NO: 465991 - DNA, 199 bp, Homo sapiens
  chr1:214725015-214725214
  hyper
  lymphoid_neoplasm vs. upper_gi,head_and_neck,prostate, colorectal,pancreas_gallbladder,ovary,cervical,lung,uterine, renal,bladder_and_urothelial,multiple_myeloma
cgtgcgagtgggaggggacggagcaggcgccggcggccacggctcccccaccccagagccgggctccgcggccctgggggccgggaggcggagggagcgctgggcgcgcggccgggggcggggaggaatgcggcccgggagggcgcgcgccgggggcgccgcgggcgcgcgctgaaacgtggagccccagctcccgagc

SEQ ID NO: 465992 - DNA, 239 bp, Homo sapiens; identical to SEQ ID NO: 349397
  chr1:214725561-214725800
  hyper
  lymphoid_neoplasm vs. upper_gi,head_and_neck,prostate, colorectal,pancreas_gallbladder,ovary,cervical,lung,uterine, renal,bladder_and_urothelial,multiple_myeloma

SEQ ID NO: 465993 - DNA, 14 bp, Homo sapiens
  chr1:215256971-215256985
  hyper
  lymphoid_neoplasm vs. multiple_myeloma
tcccgccggtgccc

SEQ ID NO: 465994 - DNA, 592 bp, Homo sapiens; identical to SEQ ID NO: 331107
  chr1:216774207-216774799
  hyper
  lymphoid_neoplasm vs. liver_bileduct

SEQ ID NO: 465995 - DNA, 134 bp, Homo sapiens
  chr1:220863507-220863641
  hyper
  lymphoid_neoplasm vs. cervical,pancreas_gallbladder, breast,bladder_and_urothelial,anorectal,uterine,colorectal, renal,non_cancer
cgcgccgtagtctgcacagtttggccggcaggtgggatgaagggcggggctggcggagcgcgcccgccgcctggtaggccagttcggagcggagccaacgctatcccgggccccacggccagggggcgctgcgg

SEQ ID NO: 465996 - DNA, 28 bp, Homo sapiens
  chr1:220864193-220864221
  hyper
  lymphoid_neoplasm vs. cervical,pancreas_gallbladder, breast,bladder_and_urothelial,anorectal,uterine,colorectal, renal,non_cancer
gccggagggaagccgcgagttgcgagtc

SEQ ID NO: 465997 - DNA, 199 bp, Homo sapiens
  chr1:220921368-220921567
  hyper
  lymphoid_neoplasm vs. liver_bileduct,renal
cgacctgccagaaaaagtcgttcccaaatgtttgtaaatcctccgttgggcaacccgccttcacgttctgcggtgatcttgtcgagcgactaagcgtgcagtattagcagagaagggggtggcagagtgctggcgctgaaggtcatgttgcatgggtaactgtcgtgttgtaggggcggggaagagggaggagacactg

SEQ ID NO: 465998 - DNA, 115 bp, Homo sapiens; identical to SEQ ID NO: 349404
  chr1:220922060-220922175
  hyper
  lymphoid_neoplasm vs. liver_bileduct,renal

SEQ ID NO: 465999 - DNA, 7 bp, Homo sapiens
  chr1:225117220-225117227
  hyper
  lymphoid_neoplasm vs. liver_bileduct,uterine,prostate, ovary,breast,renal
cgtcggt

SEQ ID NO: 466000 - DNA, 99 bp, Homo sapiens; identical to SEQ ID NO: 197977
  chr1:225117651-225117750
  hyper
  lymphoid_neoplasm vs. liver_bileduct,uterine,prostate, ovary,breast,renal

SEQ ID NO: 466001 - DNA, 65 bp, Homo sapiens
  chr1:225117752-225117817
  hyper
  lymphoid_neoplasm vs. liver_bileduct,uterine,prostate, ovary,breast,renal
tagccccgaccgcaggagctctcaacgcgaggttcttcttagttgctctccctcaggcaggccgc

SEQ ID NO: 466002 - DNA, 261 bp, Homo sapiens
  chr1:227505256-227505517
  hyper
  lymphoid_neoplasm vs. upper_gi,pancreas_gallbladder, colorectal
cgtgcaacgtaatcctgaaacgaatccggttgcatcattaatgaataaagtccgatttgcatcagcaattcacttcccgggaagaagaaaaacagaaaagggaggaaaaaaacagaatgcatagaagggggagggaaaaccaaaaatgttgctgcaaatcctcccaaccaccacttggataatgcatcagcggcaatttctccagcgggaaagggagggggcgaggtccctgaagcagcccctcggctcggagcacgccaa

SEQ ID NO: 466003 - DNA, 154 bp, Homo sapiens
  chr1:227505859-227506013
  hyper
  lymphoid_neoplasm vs. upper_gi,pancreas_gallbladder, colorectal
ggtgcttctctgaattcaaaggacacaagcagcagcagctgcggcggcggcgcgggcggctctggcagctacttctcccccttcttcacacccctgggctaagggcatctttccacagcgaggagggaggcggcccggcgcaggaggaggggtc

SEQ ID NO: 466004 - DNA, 212 bp, Homo sapiens; identical to SEQ ID NO: 349418
  chr1:227506042-227506254
  hyper
  lymphoid_neoplasm vs. upper_gi,pancreas_gallbladder, colorectal

SEQ ID NO: 466005 - DNA, 17 bp, Homo sapiens
  chr1:228645891-228645908
  hyper
  lymphoid_neoplasm vs. melanoma
aggcacagaagaaggac

SEQ ID NO: 466006 - DNA, 2 bp, Homo sapiens
  chr1:228646850-228646852
  hyper
  lymphoid_neoplasm vs. cervical,anorectal
cg

SEQ ID NO: 466007 - DNA, 254 bp, Homo sapiens
  chr1:228646941-228647195
  hyper
  lymphoid_neoplasm vs. cervical,anorectal
ttggcgtgcgccgtgcaggtgaggagtgcgggtcacctccccccaaaagaccctgtgccaacctccccaaccctacccgccccccatgggcgaggccagacgtggcgcaagaccacgggctctgaggccatgggtgttgtcactttcccctggcggtggtgcctggctctgcatttgcttaagacttttccatccctgcctggaccagacagacatgtttagatttaagcaatgaacattccgggaggatattt

SEQ ID NO: 466008 - DNA, 117 bp, Homo sapiens; identical to SEQ ID NO: 279362
  chr1:228647317-228647434
  hyper
  lymphoid_neoplasm vs. cervical,anorectal

SEQ ID NO: 466009 - DNA, 98 bp, Homo sapiens
  chr1:228870708-228870806
  hyper
  lymphoid_neoplasm vs. uterine,melanoma,lung, liver_bileduct,breast,ovary,prostate,anorectal,thyroid, non_cancer,myeloid_neoplasm,colorectal,pancreas_gallbladder, upper_gi,bladder_and_urothelial
cgatcagctgcagttagacttaaggaaaaaagctgtctgttaattcaatctcattcgcaggacaggcctccaggacacttcatttttccccctgggtg

SEQ ID NO: 466010 - DNA, 329 bp, Homo sapiens
  chr1:228870899-228871228
  hyper
  lymphoid_neoplasm vs. uterine,melanoma,lung, liver_bileduct,breast,ovary,prostate,anorectal,thyroid, non_cancer,myeloid_neoplasm,colorectal,pancreas_gallbladder, upper_gi,bladder_and_urothelial
cagtcgcgcggtggtcaccctcttgggagctggggaggaggctgcggaggctggcccggctccttcgggcgtcgcttcccggaccgggtgcgcggggtcccccggaacgtgtgttccaggtcctcccgcgccagtgttcgcagtccccgcctggtcgcggcggcgcctcgggcgcgggtgcaggcgcgcggcgcgcaggcggggggcgctgtggtcttggcgcggggaccgagccgctcggccagacccgcctcttttccctccccgccagcccgcccgcctgcccgccccccacgcgtcgtgtcgccgggaagccgggcggagacaga

SEQ ID NO: 466011 - DNA, 245 bp, Homo sapiens
  chr1:228870983-228871228
  hyper
  lymphoid_neoplasm vs. pancreas_gallbladder, bladder_and_urothelial,lung,prostate,uterine,upper_gi, colorectal,liver_bileduct,non_cancer,ovary,breast,sarcoma,renal, anorectal
cgggtgcgcggggtcccccggaacgtgtgttccaggtcctcccgcgccagtgttcgcagtccccgcctggtcgcggcggcgcctcgggcgcgggtgcaggcgcgcggcgcgcaggcggggggcgctgtggtcttggcgcggggaccgagccgctcggccagacccgcctcttttccctccccgccagcccgcccgcctgcccgccccccacgcgtcgtgtcgccgggaagccgggcggagacaga

SEQ ID NO: 466012 - DNA, 270 bp, Homo sapiens
  chr1:228871596-228871866
  hyper
  lymphoid_neoplasm vs. pancreas_gallbladder, bladder_and_urothelial,lung,prostate,uterine,upper_gi, colorectal,liver_bileduct,non_cancer,ovary,breast,sarcoma,renal, anorectal
ggggggccgggggcgtgcggggggtgccgaggggcgcggcgtcaagtgcgtgctggtcggcgacggcgcggtgggcaagacgagcctggtggtgagctacaccaccaacggctaccccaccgagtacatccctactgccttcgacaacttctccggtgagctggccggggggccggggccgggggcgcgtggccgcggtccacccaggggaaggaaggtggcgcgagggtcgcgaggttcccaagggggctgcagggccccgggcgcggc

SEQ ID NO: 466013 - DNA, 270 bp, Homo sapiens; identical to SEQ ID NO: 466012
  chr1:228871596-228871866
  hyper
  lymphoid_neoplasm vs. liver_bileduct, pancreas_gallbladder,upper_gi,colorectal

SEQ ID NO: 466014 - DNA, 252 bp, Homo sapiens; identical to SEQ ID NO: 349424
  chr1:228872003-228872255
  hyper
  lymphoid_neoplasm vs. liver_bileduct, pancreas_gallbladder,upper_gi,colorectal

SEQ ID NO: 466015 - DNA, 165 bp, Homo sapiens; identical to SEQ ID NO: 346410
  chr1:230561973-230562138
  hyper
  lymphoid_neoplasm vs. ovary

SEQ ID NO: 466016 - DNA, 618 bp, Homo sapiens; identical to SEQ ID NO: 357042
  chr1:230561973-230562591
  hyper
  lymphoid_neoplasm vs. renal,uterine

SEQ ID NO: 466017 - DNA, 156 bp, Homo sapiens
  chr1:232765040-232765196
  hyper
  lymphoid_neoplasm vs. renal,pancreas_gallbladder,breast, prostate
cgggaagacccggagaggcccaggagctggcaaagtgggaagaaaggtcgcggtgagtgagaagagcgctcgccggaggctcccggtcttacaaagagggatccgtcccggtgagggcgcgcgctccgggcgcaccccctctagaaggggaattag

SEQ ID NO: 466018 - DNA, 15 bp, Homo sapiens
  chr1:232765301-232765316
  hyper
  lymphoid_neoplasm vs. renal,pancreas_gallbladder,breast, prostate
ctggagaagaccctc

SEQ ID NO: 466019 - DNA, 163 bp, Homo sapiens
  chr1:232765375-232765538
  hyper
  lymphoid_neoplasm vs. renal,pancreas_gallbladder,breast, prostate
aacaggcggcggcggctcctcttccagccggggatcgggagcgcgggcgcatctgcgtctacaagccggaccctgcgccgcgaccctcgcacccccgcgcccctcgcacccctcgccgccgtcagccccccaaagcgccccgaagggcatccccttccccttc

SEQ ID NO: 466020 - DNA, 411 bp, Homo sapiens; identical to SEQ ID NO: 349432
  chr1:232765595-232766006
  hyper
  lymphoid_neoplasm vs. renal,pancreas_gallbladder,breast, prostate

SEQ ID NO: 466021 - DNA, 323 bp, Homo sapiens
  chr1:233749409-233749732
  hyper
  lymphoid_neoplasm vs. liver_bileduct
cgcgcgcgaacacacacacacacacacgcacacgccgcgcgcggtcagctagagtttggctactggacccaggaagggagggagcgggaggagctggtggctgtcgggtcggggtctgggcgccaccgagcgcccgccccacctctggagtgcgcagaaggcggtgcgtcccgggccccggcagcccagcccaggcgctctggccaagtttgcgcgcggtctccgctgactctcgggttacctgagccggcaaccacgtcagcgccacatcatctgggctttttatattgcaaggaaacaggaaaagaaggaagaaaaacatc

SEQ ID NO: 466022 - DNA, 315 bp, Homo sapiens
  chr1:233749768-233750083
  hyper
  lymphoid_neoplasm vs. liver_bileduct
cggaggagcggggcgggcgggcgcgcgggggagcgggcggcgggcgggagccaggcccgggcgggggcgggggcggcggggccagaagaggcggcgggccgcgctccggccggtctgcggcgttggccttggcggcggcggtggagaagatgctgcagtccctggccggcagctcgtgcgtgcgcctggtggagcggcaccgctcggcctggtgcttcggcttcctggtgctgggctacttgctctacctggtcttcggcgcagtggtcttctcctcggtggagctgccctatgaggacctgctgcgccaggagc

SEQ ID NO: 466023 - DNA, 282 bp, Homo sapiens
  chr1:233749801-233750083
  hyper
  lymphoid_neoplasm vs. upper_gi,pancreas_gallbladder, cervical,liver_bileduct,bladder_and_urothelial
cgggcggcgggcgggagccaggcccgggcgggggcgggggcggcggggccagaagaggcggcgggccgcgctccggccggtctgcggcgttggccttggcggcggcggtggagaagatgctgcagtccctggccggcagctcgtgcgtgcgcctggtggagcggcaccgctcggcctggtgcttcggcttcctggtgctgggctacttgctctacctggtcttcggcgcagtggtcttctcctcggtggagctgccctatgaggacctgctgcgccaggagc

SEQ ID NO: 466024 - DNA, 181 bp, Homo sapiens; identical to SEQ ID NO: 349434
  chr1:233750511-233750692
  hyper
  lymphoid_neoplasm vs. upper_gi,pancreas_gallbladder, cervical,liver_bileduct,bladder_and_urothelial

SEQ ID NO: 466025 - DNA, 98 bp, Homo sapiens; identical to SEQ ID NO: 349438
  chr1:236850212-236850310
  hyper
  lymphoid_neoplasm vs. thyroid

SEQ ID NO: 466026 - DNA, 4 bp, Homo sapiens
  chr1:237205156-237205160
  hyper
  lymphoid_neoplasm vs. sarcoma
cgtg

SEQ ID NO: 466027 - DNA, 37 bp, Homo sapiens
  chr1:237205188-237205225
  hyper
  lymphoid_neoplasm vs. sarcoma
cctagcccagtccaggaggaaggggcgtcgtgccggc

SEQ ID NO: 466028 - DNA, 1 bp, Homo sapiens
  chr1:240257029-240257030
  hyper
  lymphoid_neoplasm vs. multiple_myeloma
c

SEQ ID NO: 466029 - DNA, 239 bp, Homo sapiens
  chr10:734738-734977
  hyper
  lymphoid_neoplasm vs. bladder_and_urothelial
cgagaggaccaggacggcaaggccggagcccggcccggggggaggttgacgattccgcccagccctccccgcgcagcgcccgcgaacaatgggggtgggatcccccgggccgcgccaggaccgctgcacggcctgagccaccagagatcgaacccggggtccaacgacaagtttcgcattgaaatctggccgggcgttccaggccgaacccgccagcgaggaggtggcgcgcaccgcgc

SEQ ID NO: 466030 - DNA, 176 bp, Homo sapiens
  chr10:735049-735225
  hyper
  lymphoid_neoplasm vs. bladder_and_urothelial
ctgcgtccccgcgcggcgcccaggccccacagacacccccagggcgcggggggatcgcggccccacaaacatcccagggcgcgggggatcgcggccccacaaacacccccagagcgcgaggggatcccaggccccacagacacccccagggcgcggggaatcgcggccccacaaac

SEQ ID NO: 466031 - DNA, 439 bp, Homo sapiens
  chr10:735245-735684
  hyper
  lymphoid_neoplasm vs. bladder_and_urothelial
cgcggcctcacaaacgtccctagggcgcggggtctgggggtccgggggacgcgcacgctccgggctggggtcgcacctccccctccgggcccggcccccgccccgccgcaggccccgcgcccccagccctccgcgcgcggccctccccggtgacagcgcggcccggcccggggcgggggcccggttaccttccgacagctccagctccagctcggccaggcgcgcccgcacctccaggggcagcgccatgccctccaggctgcggtccgccatgctccgcgggcgccgcgccccgcacggcctcctctttgttcgcaggcggaggtctcggcggctcctcgcgcccggcggaaccgcaccgaggaggaggcggcggcgcgggcgcgggaggcgggcggcgggcgcgcagggacctccctcccctcggcgcctcctcagc

SEQ ID NO: 466032 - DNA, 25 bp, Homo sapiens
  chr10:735200-735225
  hyper
  lymphoid_neoplasm vs. prostate,sarcoma,anorectal, upper_gi,pancreas_gallbladder,liver_bileduct,thyroid,colorectal, lung,head_and_neck,renal,melanoma
cgcggggaatcgcggccccacaaac

SEQ ID NO: 466033 - DNA, 884 bp, Homo sapiens; identical to SEQ ID NO: 350974
  chr10:735245-736129
  hyper
  lymphoid_neoplasm vs. prostate,sarcoma,anorectal, upper_gi,pancreas_gallbladder,liver_bileduct,thyroid,colorectal, lung,head_and_neck,renal,melanoma

SEQ ID NO: 466034 - DNA, 107 bp, Homo sapiens
  chr10:7708304-7708411
  hyper
  lymphoid_neoplasm vs. uterine
tcgtgttctcccggttttcaggtgggaaaagctgaggctcccaggagtctagaactcctctcatattgcctttctccctggatcaactgggaatgatgataacagca

SEQ ID NO: 466035 - DNA, 169 bp, Homo sapiens
  chr10:8092278-8092447
  hyper
  lymphoid_neoplasm vs. cervical
ggctgccggcaaagctctggcccccggcctgcgacgtgcagaccgcggggccgcggacccggctggtgcggggtactggcgccggcctcgacacctttggcctccacttcctccccagactcacagcgacagcggccgcttcacaccgtttttattgaccgatcgcagc

SEQ ID NO: 466036 - DNA, 245 bp, Homo sapiens
  chr10:8092535-8092780
  hyper
  lymphoid_neoplasm vs. cervical
ggcctttggtgtcgctccccgccccccagccccgcagattcccggcttcttttctgtctgcgcggccgggaccgcccaggcaggcgccggggctccggggctccggggggagggactcggcggctcggctcggctccgcttctttcttctgcctgcaaatatttgctgcctcgctggaaatccgacgatttcgcgcgcgctctgcttgcaaagtctttaagtaaacacgctcaaatgaccgcccc

SEQ ID NO: 466037 - DNA, 163 bp, Homo sapiens
  chr10:8092284-8092447
  hyper
  lymphoid_neoplasm vs. sarcoma,cervical,thyroid, pancreas_gallbladder,breast,upper_gi
cggcaaagctctggcccccggcctgcgacgtgcagaccgcggggccgcggacccggctggtgcggggtactggcgccggcctcgacacctttggcctccacttcctccccagactcacagcgacagcggccgcttcacaccgtttttattgaccgatcgcagc

SEQ ID NO: 466038 - DNA, 602 bp, Homo sapiens; identical to SEQ ID NO: 350985
  chr10:8092535-8093137
  hyper
  lymphoid_neoplasm vs. sarcoma,cervical,thyroid, pancreas_gallbladder,breast,upper_gi

SEQ ID NO: 466039 - DNA, 42 bp, Homo sapiens; identical to SEQ ID NO: 350990
  chr10:11060746-11060788
  hyper
  lymphoid_neoplasm vs. thyroid,sarcoma,colorectal, non_cancer,uterine,myeloid_neoplasm

SEQ ID NO: 466040 - DNA, 71 bp, Homo sapiens
  chr10:20104635-20104706
  hyper
  lymphoid_neoplasm vs. breast
cgaaggggcgagctgtggttaaccctttcgtgcccagggagaccccgccagggtcggggcggggcgcgatc

SEQ ID NO: 466041 - DNA, 695 bp, Homo sapiens
  chr10:20104724-20105419
  hyper
  lymphoid_neoplasm vs. breast
cgaaggcggcccgggagccaggtgggtgtggggcgcagttggcggagctgcccagggcgtgcgagcaggctgcgaggatggcgccccggcggcgcggaggtaccgccccgcgctcccccgatagctccccggcctgtcccctctccccgcgctctggggcagccggctgcctggggcgcacggggctggagtggccctctccctccccttcgctaggctcccccggcttaatctgttggccgcgactcctcagccagccccgaggaaagtgcagccattggacaggtctgtgcgggctgccggtttcagggaggaaggtgggagaagcctggaggagcgaaggggagggcggagggaggagggaggagggtgcggcggcagatctggcaaattgcgagctgccttccctcctcaaagtgtggagaaggagcgcgggggagcgtggcgacggcagcgcctcctccgccaccaaactcctggggctccgcgggggcttggggccacctcctcctgagcccggaggaaccctctcccgataggttccagcgtgactccctcccactccacccttttcctttcttcttcctcttttttttttttttttttaaacacatttttttcctggcttcggacctcagactgctgcagccctaaccttcccagggctcagctctttggagctgcccattcctccg

SEQ ID NO: 466042 - DNA, 297 bp, Homo sapiens
  chr10:20106155-20106452
  hyper
  lymphoid_neoplasm vs. head_and_neck
cgcagctgaagacctctctggcactctcgtgctccctaccctctccccccaacatcacctatctgcccttgggaaacttattgcagttgcttttcggctaaacttaggcttcccaaatggggaaagagggttatcaagagaaggacgccggggactaggggttttcttgaggctttcgggcttacttcacctgggcggcagggggtggtactgtctccccaaagtagcccagggagggcttcagtgtgagagcaaagcttcttccgtggatacatctcctaggacctggcatctcca

SEQ ID NO: 466043 - DNA, 234 bp, Homo sapiens
  chr10:20106694-20106928
  hyper
  lymphoid_neoplasm vs. head_and_neck
caggtgggaaaggtggaggcgggctcgcctctggagacctacccctgctcccattgtcctccgcctgccagcttcacagacaggcctgaacgcgcagagagttccttggagtgccctgattttgtccccgagagggcccccaacctccgcatcctcttagtggctgtcctggcaggtgcgcgtcctgcggggagttgcgccccgggggctatcgccgagcgggagctgcctcct

SEQ ID NO: 466044 - DNA, 235 bp, Homo sapiens
  chr10:21462299-21462534
  hyper
  lymphoid_neoplasm vs. colorectal
gcgggcggatctgtggggcggggggcgggggtattgtggaacacgagtggaggtggagggggcgcggctcgccgaagtgcccccctgggtgcccagcctggtccctccggggtccggggctgcgcaccgccgtgcgccctccgcagaggctctgccgatgtcgcaccgccccgcaccgcgacaaaagcccttcccggttccaacatcacaatcgccaagcgtggtctctgacact

SEQ ID NO: 466045 - DNA, 12 bp, Homo sapiens
  chr10:21462607-21462619
  hyper
  lymphoid_neoplasm vs. colorectal
tttccatcccag

SEQ ID NO: 466046 - DNA, 300 bp, Homo sapiens
  chr10:21462671-21462971
  hyper
  lymphoid_neoplasm vs. colorectal
ggcccggcgccccctcgctcaccttatccaggcagttgactttctcggtgggatacacgacttttccgcaacgggcgcactgggggttcatgatcgcggttcccgggggcggcggcggcggcggctgctggctcccaggagccgctgtgacatcccccggcgagccccgcaccgcctcctggcaggcgggagggctgcgggcggcgggcgccgggtagggagtcggcgccgggccacgggtgagtgcacggggagggcgacggggcctggcgcctggggccggccgcgctctcgggctcg

SEQ ID NO: 466047 - DNA, 268 bp, Homo sapiens; identical to SEQ ID NO: 372349
  chr10:21463023-21463291
  hyper
  lymphoid_neoplasm vs. colorectal

SEQ ID NO: 466048 - DNA, 628 bp, Homo sapiens
  chr10:25463893-25464521
  hyper
  lymphoid_neoplasm vs. melanoma
gccgggaggcgggaacgacctgcggcgggtgagactatggagcagcgtcttcggcggccgcggcggcagcagcagcagcagcttctgaacgcgcctcaatgagagcggcggtggcggcagccgggccgagagacggactcgggctgactccagccgctgggagcgcgaggccatgtaacccgctcggctccaggctgcgaggtgcgtaatccccagccggcccctcgcgcagcgggcacggccagcgctgccacaggtgacttgatttctgcgacggtagcttagccacccggggccaatctcgaaacattcttattttcaagtcctttggactgggtgccatctggagaagggggaagactcctcgaaaaagtctgactgttgagaaactgacgatccaaatttaaaaagtgattcccccccctcccgttccctcctcttctctctgggaggcagatgggagccatggcttaccccttactcctctgcctcctgcttgctcagctgggattgggagctgttggcgccagccgcgacccccaaggacggccggattcccctcgagagaggaccccgaaggggaagccgcacgcccagcagccgggtcgagcctctgcctcggactcct

SEQ ID NO: 466049 - DNA, 187 bp, Homo sapiens
  chr10:25464915-25465102
  hyper
  lymphoid_neoplasm vs. multiple_myeloma
ggtcttcctccaggccacgcgcgaggagagccgcatcctgctccaagacctgtcctcctccgcaccccacctggccaacgccactctggagaccgagtggttccacggcctccggcgcaagtggaggccccacttacaccgccgcggccccaatcaggggccccggggcctgggccacagctggcgg

SEQ ID NO: 466050 - DNA, 64 bp, Homo sapiens; identical to SEQ ID NO: 372361
  chr10:25465600-25465664
  hyper
  lymphoid_neoplasm vs. multiple_myeloma

SEQ ID NO: 466051 - DNA, 210 bp, Homo sapiens
  chr10:28031105-28031315
  hyper
  lymphoid_neoplasm vs. myeloid_neoplasm
catcatgtaaggtaaaaagacctcaggaaaagcacattcaaagggggaggaggcagaggcagccaggagcctggagcgtggcctggggcgctgcgctccctcacgggtccgggaggtgtcgcgcgcggccgccagcgagcccagccgctccccgaggcttgcgcgcctgcgccggagcctcctgggtttctgcctctttaaacactttga

SEQ ID NO: 466052 - DNA, 116 bp, Homo sapiens
  chr10:28032744-28032860
  hyper
  lymphoid_neoplasm vs. prostate,uterine,thyroid
cagtttgaatctgggagaggcatactccggactgcggagcgcgaccggcgtgaggccgcgcgtggttcttcaatcacagcagaagactaaagcctctaggaaccccaactcggggc

SEQ ID NO: 466053 - DNA, 209 bp, Homo sapiens
  chr10:28032744-28032953
  hyper
  lymphoid_neoplasm vs. ovary,myeloid_neoplasm,prostate
cagtttgaatctgggagaggcatactccggactgcggagcgcgaccggcgtgaggccgcgcgtggttcttcaatcacagcagaagactaaagcctctaggaaccccaactcggggcgtcaggaggggttggatggaagggaagatttggggtaatgtgccaaccgtatccacaagaccccccagctcatgagtcccaggccataccggg

SEQ ID NO: 466054 - DNA, 46 bp, Homo sapiens
  chr10:28032907-28032953
  hyper
  lymphoid_neoplasm vs. prostate,sarcoma,breast,ovary, cervical
cgtatccacaagaccccccagctcatgagtcccaggccataccggg

SEQ ID NO: 466055 - DNA, 79 bp, Homo sapiens
  chr10:30024003-30024082
  hyper
  lymphoid_neoplasm vs. liver_bileduct,sarcoma,lung,breast, pancreas_gallbladder,renal,uterine,anorectal,non_cancer, myeloid_neoplasm,colorectal,bladder_and_urothelial,upper_gi, ovary,prostate,cervical
cgccttctggagctccactcggggtgccagggactgctggctgtcacccggggactaaaccactcccttcggggagccc

SEQ ID NO: 466056 - DNA, 37 bp, Homo sapiens
  chr10:30024793-30024830
  hyper
  lymphoid_neoplasm vs. liver_bileduct,sarcoma,lung,breast, pancreas_gallbladder,renal,uterine,anorectal,non_cancer, myeloid_neoplasm,colorectal,bladder_and_urothelial,upper_gi, ovary,prostate,cervical
cgcggggagcgggtccccgctcgggatgattcacttc

SEQ ID NO: 466057 - DNA, 508 bp, Homo sapiens; identical to SEQ ID NO: 345351
  chr10:30024793-30025301
  hyper
  lymphoid_neoplasm vs. sarcoma,liver_bileduct, myeloid_neoplasm,bladder_and_urothelial,pancreas_gallbladder, renal,lung,breast,uterine,ovary,colorectal,non_cancer,cervical, prostate,head_and_neck,thyroid,anorectal

SEQ ID NO: 466058 - DNA, 680 bp, Homo sapiens
  chr10:30024848-30025528
  hyper
  lymphoid_neoplasm vs. sarcoma,anorectal,lung, myeloid_neoplasm,pancreas_gallbladder,colorectal,breast,uterine, liver_bileduct,renal,non_cancer
cgcgcgtccccaccccttgcgacccgcgcggcggccgggagctggcgccctctgctgggccaccaggcgggagcaccctcggactgggcaaggatcgggcggagagggtggggacacagaggggggccaagcacaagcacccctgcctctctcaacgcgggcaccccttcccaaaacaggggccagtgcgcggggaccacgctgggacgactctcgggggaagcaccagagctgtccccacgccccaggacacgaactcgcgcccggagccgaccccctccacggccagcgggtccagccgcgtcctcggaggtggcccaaggaaaccgcgatgaatcggcataagcacgtcctatcttaaaacaccggaaaggcagattttactttgtttggaaactaagtttgtgtcctgtgtctcagtagctctcagggtggtggcagtcacgcccccccggtcccagggctgggaagatgcttgggctagcccccgctgcagccccggagatgcggggctttaggatcccaggggctggaggccagggccgccctatcgctctcccggccgggggtgtggctgtccaactcgctctgtcgcccgagtgaactcttccagcaggttggcctctcaggctgtcccctgaggacctgagcgaaactctggaggggaccaggaagaaggg

SEQ ID NO: 466059 - DNA, 192 bp, Homo sapiens
  chr10:30025336-30025528
  hyper
  lymphoid_neoplasm vs. pancreas_gallbladder,breast, upper_gi
cgctgcagccccggagatgcggggctttaggatcccaggggctggaggccagggccgccctatcgctctcccggccgggggtgtggctgtccaactcgctctgtcgcccgagtgaactcttccagcaggttggcctctcaggctgtcccctgaggacctgagcgaaactctggaggggaccaggaagaaggg

SEQ ID NO: 466060 - DNA, 586 bp, Homo sapiens; identical to SEQ ID NO: 372379
  chr10:33623220-33623806
  hyper
  lymphoid_neoplasm vs. pancreas_gallbladder

SEQ ID NO: 466061 - DNA, 216 bp, Homo sapiens
  chr10:33623838-33624054
  hyper
  lymphoid_neoplasm vs. liver_bileduct
cgcctcccctcctgcggcctccccccactccggagcccttccctcgcttcctcccgcccctctccccgcttgggctcgcctgtaattgcctgacaggagactgggaggaacaactttccctccgagtgctctccccgtccgtctgtctgtctttcccagagaccctgcagggatctccgcgggaaggaaggcgctgggagtctgcgccccggtcgc

SEQ ID NO: 466062 - DNA, 46 bp, Homo sapiens
  chr10:33624447-33624493
  hyper
  lymphoid_neoplasm vs. liver_bileduct
cgaagacagaccgcctgggcgggcgaggccgggctgcagccccacg

SEQ ID NO: 466063 - DNA, 139 bp, Homo sapiens
  chr10:33624560-33624699
  hyper
  lymphoid_neoplasm vs. liver_bileduct
ttcccgagatttggtgcccgttcctctggggcagagggaacaccggagggtgggaggtgctgcgccttccaagcaggggggcaatcgccgcccgaccccgcccaaccttgtctgggagcccaggtgctagggaggggtg

SEQ ID NO: 466064 - DNA, 46 bp, Homo sapiens; identical to SEQ ID NO: 466062
  chr10:33624447-33624493
  hyper
  lymphoid_neoplasm vs. liver_bileduct

SEQ ID NO: 466065 - DNA, 139 bp, Homo sapiens; identical to SEQ ID NO: 466063
  chr10:33624560-33624699
  hyper
  lymphoid_neoplasm vs. liver_bileduct

SEQ ID NO: 466066 - DNA, 448 bp, Homo sapiens
  chr10:33624841-33625289
  hyper
  lymphoid_neoplasm vs. liver_bileduct
tgccacccccacttcccacagcggctcgtgcccccagcccgctggatgccccccaggcccgtccccgagggttttccgagaagtgctgcaggaagcgtttgtagatgcgaaaagcaaggacatttctgggaagaaacaggttgcggtcaccgatcaggccccggagaagggtcagtgcccacggggcacctcccagggagtttgtgggtaaggtgaaaaggtcacacgcctcctggggattggcgtctacacacacagccaaagtacagcctgattcctacctggcacaaatagctggccaaagggaggtaggaatgctggcaaggagactctggtcaaaggttttggcggaagaaaaaggggcgggcagggagaaagcccaaggcgcgcgggccccaggccaggactgcgcgctcgcgactcgggctgggagcagtgacgtgcgccc

SEQ ID NO: 466067 - DNA, 256 bp, Homo sapiens; identical to SEQ ID NO: 202043
  chr10:33625870-33626126
  hyper
  lymphoid_neoplasm vs. multiple_myeloma

SEQ ID NO: 466068 - DNA, 63 bp, Homo sapiens
  chr10:35102985-35103048
  hyper
  lymphoid_neoplasm vs. multiple_myeloma,lung,melanoma, ovary,liver_bileduct,upper_gi,head_and_neck
cggccccgcagcccagccacatggaaccagcccgggataggtaggagctgaggtcctcgcagg

SEQ ID NO: 466069 - DNA, 404 bp, Homo sapiens
  chr10:35103079-35103483
  hyper
  lymphoid_neoplasm vs. multiple_myeloma,lung,melanoma, ovary,liver_bileduct,upper_gi,head_and_neck
tgtgctttccagagcccagcaagtgggatcagctcagtaaatgctcgcaagcgagtgccaagtgccagcggtggccctcccgggaacgcctccccgaccccaagccggcgactccccaaaccctgcagcccccggacgcgacgggccgcccctgccggcccctaccagcaggggacatggaggaaaagccccccgccgctgttccgcccccgcccgagtaagggagaggaggcagaaggctcgcaacccgcctctgtcggaagggcagtcacgaaactctcctcacaccaaaagttcccagtccccggcctgtgcccccggggcctgggagccgggaaaggcctggggctggatttcccggcctgcgccccccgcgcgctggctcggggcttggctgggtctgc

SEQ ID NO: 466070 - DNA, 233 bp, Homo sapiens
  chr10:35103534-35103767
  hyper
  lymphoid_neoplasm vs. multiple_myeloma,lung,melanoma, ovary,liver_bileduct,upper_gi,head_and_neck
cccgcgctaccgaggccggagctcccgggcggagggtgagggcgggggccgcgggacccggctgggtgtcccagaggctgcgccccggcccgcgcagagaactttggcgcccgcagtccggggcggggggcgcccgcgaggcccgaccggccgcactttccctttccccgcctccctgcgcctctcctcccccttccaggaagcgccatattgatcccggcgccgtccccgcc

SEQ ID NO: 466071 - DNA, 211 bp, Homo sapiens
  chr10:35103272-35103483
  hyper
  lymphoid_neoplasm vs. renal,lung,prostate,ovary,upper_gi, cervical,liver_bileduct,breast,uterine
cgccgctgttccgcccccgcccgagtaagggagaggaggcagaaggctcgcaacccgcctctgtcggaagggcagtcacgaaactctcctcacaccaaaagttcccagtccccggcctgtgcccccggggcctgggagccgggaaaggcctggggctggatttcccggcctgcgccccccgcgcgctggctcggggcttggctgggtctgc

SEQ ID NO: 466072 - DNA, 545 bp, Homo sapiens
  chr10:35103534-35104079
  hyper
  lymphoid_neoplasm vs. renal,lung,prostate,ovary,upper_gi, cervical,liver_bileduct,breast,uterine
cccgcgctaccgaggccggagctcccgggcggagggtgagggcgggggccgcgggacccggctgggtgtcccagaggctgcgccccggcccgcgcagagaactttggcgcccgcagtccggggcggggggcgcccgcgaggcccgaccggccgcactttccctttccccgcctccctgcgcctctcctcccccttccaggaagcgccatattgatcccggcgccgtccccgccgccgccccctccccgcccgcgcccccggcccctcaccttggcgatggccttccggtagcgggtcaccgcctgctggatgaggctgaaaactttcatgtggccgtccccgcacggcacgaccacccgggtccgtccgaagcacacggtcactttcatgccgccgccgccgcgggcgggcccgcgcccctcgccgagcgcagccggagcagccgaggccgggaccgaggacgctgggcgcggaggagccgctggggactcgggcgcgcgggcggctaggggcgcgggcaggcggcggcgacgccggggggccgc

SEQ ID NO: 466073 - DNA, 148 bp, Homo sapiens
  chr10:35104117-35104265
  hyper
  lymphoid_neoplasm vs. renal,lung,prostate,ovary,upper_gi, cervical,liver_bileduct,breast,uterine
tcgcttcgcccggggcttgcctcgcctctccccgccgcggcgcccgcagcctccggccacctgttcggcgtcgcggcgcgctcgccggcggctgcccggggctgtgtggcgctggcgctcgctcggggccgctgggggaggggacggc

SEQ ID NO: 466074 - DNA, 310 bp, Homo sapiens
  chr10:35103769-35104079
  hyper
  lymphoid_neoplasm vs. cervical,colorectal,lung,renal, pancreas_gallbladder,sarcoma,breast,upper_gi,prostate,ovary, liver_bileduct,thyroid
cgccccctccccgcccgcgcccccggcccctcaccttggcgatggccttccggtagcgggtcaccgcctgctggatgaggctgaaaactttcatgtggccgtccccgcacggcacgaccacccgggtccgtccgaagcacacggtcactttcatgccgccgccgccgcgggcgggcccgcgcccctcgccgagcgcagccggagcagccgaggccgggaccgaggacgctgggcgcggaggagccgctggggactcgggcgcgcgggcggctaggggcgcgggcaggcggcggcgacgccggggggccgc

SEQ ID NO: 466075 - DNA, 649 bp, Homo sapiens; identical to SEQ ID NO: 347086
  chr10:35104117-35104766
  hyper
  lymphoid_neoplasm vs. cervical,colorectal,lung,renal, pancreas_gallbladder,sarcoma,breast,upper_gi,prostate,ovary, liver_bileduct,thyroid

SEQ ID NO: 466076 - DNA, 28 bp, Homo sapiens
  chr10:43571939-43571967
  hyper
  lymphoid_neoplasm vs. bladder_and_urothelial
cgcctcctgcctccggccccagcagagg

SEQ ID NO: 466077 - DNA, 252 bp, Homo sapiens; identical to SEQ ID NO: 462300
  chr10:43572998-43573250
  hyper
  lymphoid_neoplasm vs. bladder_and_urothelial

SEQ ID NO: 466078 - DNA, 133 bp, Homo sapiens; identical to SEQ ID NO: 333927
  chr10:43725410-43725543
  hyper
  lymphoid_neoplasm vs. bladder_and_urothelial

SEQ ID NO: 466079 - DNA, 505 bp, Homo sapiens
  chr10:43761675-43762180
  hyper
  lymphoid_neoplasm vs. lung,pancreas_gallbladder,renal
cgttcctggggccggcaaggcctggggcaaagagagcgtggtccttcaaatgacccttgcccagcagggagagggagacacctggcatggccctggacctctcccccaaatgcagagctcaagccccaattcctcgccaaacagcaagggcgtgagataccacggcggggcccagaatgcagaagagcaaatggaaacttccaactgcgcagccctgagctcctccgattccccagcccccacccccacgccaggccccgggcagcgaacctgcccgcagtgcccacgcccgcccgccgcgtgcgctcctgccacgcccggcccggcccggcccggcccgccaggtgccctgaaggggcggagggtgcagggggtcctggcgccgtccagcccggggcggagttctcagcaactccgcgcgccgggatcccggccgccctccccgcgcgcgtcccccgccccgcgcccggagcccgcgccccggccccacgacggccgcgccggg

SEQ ID NO: 466080 - DNA, 215 bp, Homo sapiens
  chr10:43761965-43762180
  hyper
  lymphoid_neoplasm vs. prostate,melanoma,lung,renal
cgcccgccgcgtgcgctcctgccacgcccggcccggcccggcccggcccgccaggtgccctgaaggggcggagggtgcagggggtcctggcgccgtccagcccggggcggagttctcagcaactccgcgcgccgggatcccggccgccctccccgcgcgcgtcccccgccccgcgcccggagcccgcgccccggccccacgacggccgcgccggg

SEQ ID NO: 466081 - DNA, 217 bp, Homo sapiens; identical to SEQ ID NO: 452762
  chr10:44185124-44185341
  hyper
  lymphoid_neoplasm vs. thyroid,myeloid_neoplasm

SEQ ID NO: 466082 - DNA, 78 bp, Homo sapiens; identical to SEQ ID NO: 347090
  chr10:44186043-44186121
  hyper
  lymphoid_neoplasm vs. thyroid,myeloid_neoplasm

SEQ ID NO: 466083 - DNA, 174 bp, Homo sapiens
  chr10:44879650-44879824
  hyper
  lymphoid_neoplasm vs. sarcoma
cgtgtgaggctcggagggtccctgggcctctctcaggtgaacccgagaagagacaggaagacagcggctggacgcgcgcccaggtccgcgtcgctgcggaccgcggagctgtgcagaagcgcggcctggcgggtggcacaagcccgacagctgcgccgcgcagcccgcccgcgc

SEQ ID NO: 466084 - DNA, 296 bp, Homo sapiens
  chr10:62761026-62761322
  hyper
  lymphoid_neoplasm vs. pancreas_gallbladder, bladder_and_urothelial,upper_gi,prostate,colorectal,breast, head_and_neck
cgcgtccccatgagcctgcggatgtggggactgcgggtgggcagagagaccccccataatcccgcccaccctggcgcggctcctcccgggcgcgctcccgccccgccacgccccgcgacgcccgcgctacctggggacgctggaagctcccgcggcggctctgggtcccgccgggcggccgaggctggcgcgggctttgtaaagccgccgggacagcgccgaccccgccccgccccgccgaccccgccctctcccacctcggccgcctcccccgcctgcatcccgggccacagtcc

SEQ ID NO: 466085 - DNA, 76 bp, Homo sapiens; identical to SEQ ID NO: 287148
  chr10:62761372-62761448
  hyper
  lymphoid_neoplasm vs. pancreas_gallbladder, bladder_and_urothelial,upper_gi,prostate,colorectal,breast, head_and_neck

SEQ ID NO: 466086 - DNA, 99 bp, Homo sapiens; identical to SEQ ID NO: 287184
  chr10:71333132-71333231
  hyper
  lymphoid_neoplasm vs. multiple_myeloma

SEQ ID NO: 466087 - DNA, 199 bp, Homo sapiens
  chr10:71389862-71390061
  hyper
  lymphoid_neoplasm vs. cervical,lung,uterine,ovary, colorectal,head_and_neck,anorectal,pancreas_gallbladder, bladder_and_urothelial,non_cancer,thyroid
cgccccatctccccgacccccagcaccccgcgccgcccccaaccctgggccgggcaggtgcaattcctcaggcggcctacagagggcgatgtgcgccgccactgggccgcgcccctccggcgcgcgcttcctgtgaggtcaggtgggaggaaaccgcctggagccgccgggagtggacgccgccgaggcccggagtcgc

SEQ ID NO: 466088 - DNA, 140 bp, Homo sapiens; identical to SEQ ID NO: 351051
  chr10:71390109-71390249
  hyper
  lymphoid_neoplasm vs. cervical,lung,uterine,ovary, colorectal,head_and_neck,anorectal,pancreas_gallbladder, bladder_and_urothelial,non_cancer,thyroid

SEQ ID NO: 466089 - DNA, 779 bp, Homo sapiens
  chr10:71812318-71813097
  hyper
  lymphoid_neoplasm vs. head_and_neck
cgcgaccatagcgcgtttgtgcccagttctggggaaagcctcatgttagcgagtggccctcggctcgtctcgcagatcggccaagtacgcggaggccgcgcggtttcaccattaatactcctgaaggacaatagctcatcaagccccaccgaaagccccggacccgtcgcggagcctgggctggcgggggatgaggctgagcaactcctcctagaggtggttatgtggagaaggagcaatcccttctccctcctcctcctccccccgctactatccgcggcccagagaactgccgcttgccgccattgacacgcacagatagaacccaaagaaaggcaaagagtcctgcccggcaccggcgccgcgtgggccaaacctgcgcccgtggaggggcgcgcagagggcaccgggcgccgggagcaggcggcgcagcaccaggtgagcccgccatggcgatggcattattgtttagggtgctccggggtctggaaacaaaacgcgccgccggggcagtgcaggggccggagagaaccacctctgcctctcccccgagcccctgcgggcgcaccctcgatagccgacccaccctctgcaaaaacaaattcttaaatccagctgcccaacttgcttccttgggcgataaagggggggctgctaaagaagtggtcaaattcctgcggccagcgaggggccgggggcgtcgagggtactgagaggggaaggaggagggatgcgaggttcagcagcgggccccaggcgaggctggacccggaggaagc

SEQ ID NO: 466090 - DNA, 490 bp, Homo sapiens
  chr10:71812611-71813101
  hyper
  lymphoid_neoplasm vs. liver_bileduct,breast,cervical
cgcttgccgccattgacacgcacagatagaacccaaagaaaggcaaagagtcctgcccggcaccggcgccgcgtgggccaaacctgcgcccgtggaggggcgcgcagagggcaccgggcgccgggagcaggcggcgcagcaccaggtgagcccgccatggcgatggcattattgtttagggtgctccggggtctggaaacaaaacgcgccgccggggcagtgcaggggccggagagaaccacctctgcctctcccccgagcccctgcgggcgcaccctcgatagccgacccaccctctgcaaaaacaaattcttaaatccagctgcccaacttgcttccttgggcgataaagggggggctgctaaagaagtggtcaaattcctgcggccagcgaggggccgggggcgtcgagggtactgagaggggaaggaggagggatgcgaggttcagcagcgggccccaggcgaggctggacccggaggaagcggag

SEQ ID NO: 466091 - DNA, 346 bp, Homo sapiens
  chr10:77159582-77159928
  hyper
  lymphoid_neoplasm vs. colorectal,liver_bileduct,sarcoma, lung,melanoma,anorectal
cgccgccgcagctaatccggccgtgtgccagccccgtgggtcccccttcggccgaggcgcccccggtgcccttgccaccgccgcccacgtcggtgtctttcttgtcgtccttgccctccggggcacccccggccgaggacagcatacctcccggcgagcaggccgaggcgctggagctcgggctgcctgtcctgggcgtgaatggctggcaggtggcgctcggtacccggaatcccgacttctccgacgaaacacccccgccgccgcccccgccaccgccaccgcctccaccgccgcctcccggctccttcttatccgagccgggtttggagtacggcttgaaact

SEQ ID NO: 466092 - DNA, 407 bp, Homo sapiens
  chr10:77160017-77160424
  hyper
  lymphoid_neoplasm vs. colorectal,liver_bileduct,sarcoma, lung,melanoma,anorectal
cgccgcccccgttggaggcaaccgaggagagtttggaggagggcgaggggtcgggcttcccgatctgcgaacatgtttgcgccaacagcgccagcgggctcttcttggcatcgagctgcggggtcagacgatggggggggagcgtcacacagagaaagaagtggaaaccctttagaatcctggcttctggggttcaaatgcctctccgcaacagcccacgaagatcctcccagccccaaggcgcaattctaggcggcaccccctcttcaacacccactcacaaacattctcgccgttgggaaaggcagcagattgctccccccgcccaaccaccacccccagcagcatctttcctgccctctctgagcgctaactagatttttaaagagcaaaatgttttggttttc

SEQ ID NO: 466093 - DNA, 918 bp, Homo sapiens; identical to SEQ ID NO: 351062
  chr10:77160017-77160935
  hyper
  lymphoid_neoplasm vs. liver_bileduct

SEQ ID NO: 466094 - DNA, 544 bp, Homo sapiens; identical to SEQ ID NO: 457341
  chr10:77160489-77161033
  hyper
  lymphoid_neoplasm vs. uterine

SEQ ID NO: 466095 - DNA, 29 bp, Homo sapiens
  chr10:77161406-77161435
  hyper
  lymphoid_neoplasm vs. uterine
agtgccgggcggctcgcggtgtccgcctc

SEQ ID NO: 466096 - DNA, 68 bp, Homo sapiens
  chr10:77160965-77161033
  hyper
  lymphoid_neoplasm vs. breast,ovary,lung,uterine,melanoma, renal,upper_gi,non_cancer
cggttggcctggcgcagggggtcagaggggggcacggcgtgcacaaaaggcttggtgctgccggccgg

SEQ ID NO: 466097 - DNA, 218 bp, Homo sapiens
  chr10:77161406-77161624
  hyper
  lymphoid_neoplasm vs. breast,ovary,lung,uterine,melanoma, renal,upper_gi,non_cancer
agtgccgggcggctcgcggtgtccgcctcgggctgctcccctgcgctgcgttctcgcggccccgcgccggcgctgcgctctgcgatgcgagccgctgcgtgtccagccggggctctggcgaggaaactcacttcaaaagcagctgcaccaagggggagattaaagcctttgccgccttccaatcaaatgggagcccgaggtgattggagggtcaaggg

SEQ ID NO: 466098 - DNA, 253 bp, Homo sapiens
  chr10:77161691-77161944
  hyper
  lymphoid_neoplasm vs. breast,ovary,lung,uterine,melanoma, renal,upper_gi,non_cancer
gctccctcttcgccgcccccctgtgtgtcccctccctcgatttcgctgggaggacgagatggacatttattctacgtttgccatccgccgcctccctcttttttcctcctcgtcgttcttcctttccccagctcgaaaataaactgaaaccttcttttgaaggggggtgcgcgtgaggaacagactgcggggggtgtccagaaggagcaccggtgggagtgtggacaccggccggactgtcaactccaggggc

SEQ ID NO: 466099 - DNA, 175 bp, Homo sapiens
  chr10:77161449-77161624
  hyper
  lymphoid_neoplasm vs. sarcoma,anorectal,ovary,melanoma, head_and_neck,lung,non_cancer,renal,prostate,colorectal,breast, uterine,upper_gi,myeloid_neoplasm,bladder_and_urothelial, thyroid,liver_bileduct
cgctgcgttctcgcggccccgcgccggcgctgcgctctgcgatgcgagccgctgcgtgtccagccggggctctggcgaggaaactcacttcaaaagcagctgcaccaagggggagattaaagcctttgccgccttccaatcaaatgggagcccgaggtgattggagggtcaaggg

SEQ ID NO: 466100 - DNA, 742 bp, Homo sapiens; identical to SEQ ID NO: 347101
  chr10:77161691-77162433
  hyper
  lymphoid_neoplasm vs. sarcoma,anorectal,ovary,melanoma, head_and_neck,lung,non_cancer,renal,prostate,colorectal,breast, uterine,upper_gi,myeloid_neoplasm,bladder_and_urothelial, thyroid,liver_bileduct

SEQ ID NO: 466101 - DNA, 730 bp, Homo sapiens
  chr10:77161977-77162707
  hyper
  lymphoid_neoplasm vs. colorectal,melanoma,liver_bileduct, lung,breast,renal,upper_gi,thyroid,head_and_neck
cgcagtaatcgagatcccgcgcggcgcagcgcagccaccagggtaagaaggcaaggtggggagccggagctggaagaagcccgcccgcccgctctaatttcctcagattccgcggcggagaaaccagaagctagatgggcagtcgcagcggcggcggctcaacaccgcgaggagcgctgggctctccgcccttcccggccacgtgacgcccggggacgcgtagattggggcagcagcgggggtcacatgtttcctctgtttcaccctcagtctgtcccccaaccccccattcttactctcccaccctgttttcctccctcccccccttctttgggcatctccacccctccatcaattgtcaatgttcctcgaccgcaatcaatcagttatttgtcagctcttgtcaatcctcccgtgatttatgtcagcttttgttgctgattacaaggcgggtgcgacttgaagggaaaaagagagagggagagagagacggagaggaaggaggagattgagagggaactggaggaggggaaaagaggagcggcctcctgggatgggggtggggtgggggctctaagaaaaagaatgaaagaggcgcacggtgtcaggaaaatgaatagcgagagtaaagtgcgcaggtgcgcccagggcgccgagaggggcgcgcaggcctggagtgtgcgcctgccctctcggtgtcggagagacgcccttccacctctgggagcct

SEQ ID NO: 466102 - DNA, 240 bp, Homo sapiens
  chr10:77162467-77162707
  hyper
  lymphoid_neoplasm vs. melanoma,colorectal,liver_bileduct, upper_gi,lung,thyroid,breast,non_cancer,head_and_neck
cggagaggaaggaggagattgagagggaactggaggaggggaaaagaggagcggcctcctgggatgggggtggggtgggggctctaagaaaaagaatgaaagaggcgcacggtgtcaggaaaatgaatagcgagagtaaagtgcgcaggtgcgcccagggcgccgagaggggcgcgcaggcctggagtgtgcgcctgccctctcggtgtcggagagacgcccttccacctctgggagcct

SEQ ID NO: 466103 - DNA, 95 bp, Homo sapiens; identical to SEQ ID NO: 351066
  chr10:77163338-77163433
  hyper
  lymphoid_neoplasm vs. melanoma,colorectal,liver_bileduct, upper_gi,lung,thyroid,breast,non_cancer,head_and_neck

SEQ ID NO: 466104 - DNA, 325 bp, Homo sapiens
  chr10:77163338-77163663
  hyper
  lymphoid_neoplasm vs. lung,anorectal
ggatgcccagtgtgtatgcatgcctgtggcgctgcgtgagttatcggggctctgatagcgtccggagcgggttcgagggtctcctccaggaactcgcagaaattagagggggtggggaggaggacacacccccttcctcggaacgacttagaagactttgaatctcccctcctccgcttttccgccccggctcttcttttgttgtcaagtccttttgataaatggtggggctgggagctctgggagtcgggagccagtctgtgcccgcgtggggggcgggggccgagcctggagacccggtttcgaccggcgcgcacctggggct

SEQ ID NO: 466105 - DNA, 86 bp, Homo sapiens; identical to SEQ ID NO: 359608
  chr10:77163726-77163812
  hyper
  lymphoid_neoplasm vs. lung,anorectal

SEQ ID NO: 466106 - DNA, 311 bp, Homo sapiens
  chr10:77168785-77169096
  hyper
  lymphoid_neoplasm vs. head_and_neck,liver_bileduct, cervical,breast,uterine,non_cancer,lung,colorectal,melanoma, upper_gi
cgcgctcgggaggggaggctgtcaaaacccagtcatcgcggggactggatgggggacaattctccgacgccgcggcctggacccgcccccacccaaccggcgcaccacctcccaggcaccacggagcctgcgcaagctgcggggccgtaaaggaaccggcccccaatctccggggcttcagtcccgcccctctctccccccagtgccctgcagcgctcccagggtccgtgtctgccctccccaagcccccactgtcaatacaatccctgttaaaaaaaaaaaatctttttagagccaggcacgtgccgtcg

SEQ ID NO: 466107 - DNA, 364 bp, Homo sapiens; identical to SEQ ID NO: 351068
  chr10:77169218-77169582
  hyper
  lymphoid_neoplasm vs. head_and_neck,liver_bileduct, cervical,breast,uterine,non_cancer,lung,colorectal,melanoma, upper_gi

SEQ ID NO: 466108 - DNA, 201 bp, Homo sapiens
  chr10:77190985-77191186
  hyper
  lymphoid_neoplasm vs. cervical
cgttcagccaagaggcccctcctcgctgcagttgaggtccattatgtaacccagcttgcgaaatgcaggaaaggcccggctggctacagcccggctaacggctcagaaagggcgcccctgataggaatacccccacctcaggcgtggcccagacaaacgcgataaagctgtgggcatggagttttgggcattgggacatcc

SEQ ID NO: 466109 - DNA, 103 bp, Homo sapiens; identical to SEQ ID NO: 452774
  chr10:83634159-83634262
  hyper
  lymphoid_neoplasm vs. bladder_and_urothelial

SEQ ID NO: 466110 - DNA, 47 bp, Homo sapiens; identical to SEQ ID NO: 359614
  chr10:83634499-83634546
  hyper
  lymphoid_neoplasm vs. bladder_and_urothelial

SEQ ID NO: 466111 - DNA, 113 bp, Homo sapiens
  chr10:95753372-95753485
  hyper
  lymphoid_neoplasm vs. renal
cgcccttcccggagccgggcgccccaggagcgctctctctggctcccgccagaaaggatggctcctaggggtcagggccaggggtctgggaaggggtcgcgccgccagcagcc

SEQ ID NO: 466112 - DNA, 373 bp, Homo sapiens
  chr10:95753760-95754133
  hyper
  lymphoid_neoplasm vs. renal
gcaacgcggcgggcggcgggctcgcgcggcgggaggggcagcggcggcgcgcccgggctctacctcccgggctctgcctcccgggctctgcctctcgggcacttgcctggctcctgcgcgttcctgggcatcggctctgcagctgacacacagtagcggggacacccgacgccgctagcgacaggcgcgcggacggctggtcccagagggacgctgcgcttggggacgccggcgagactcgccaggagccaagaggtgaggaagcgactctgtagctcggttcctgaggactggagaaagggaaggatgggctggttctctcccaaggcagtcgacccgcctaagggagcagcccgactccgcgtacctggcg

SEQ ID NO: 466113 - DNA, 50 bp, Homo sapiens; identical to SEQ ID NO: 359636
  chr10:95754214-95754264
  hyper
  lymphoid_neoplasm vs. renal

SEQ ID NO: 466114 - DNA, 24 bp, Homo sapiens
  chr10:99789576-99789600
  hyper
cggcttgcctcaggcagcctgaag

SEQ ID NO: 466115 - DNA, 31 bp, Homo sapiens
  chr10:100992012-100992043
  hyper
  lymphoid_neoplasm vs. multiple_myeloma, bladder_and_urothelial,myeloid_neoplasm
cgaacacacagacacacgaacacacagatac

SEQ ID NO: 466116 - DNA, 59 bp, Homo sapiens; identical to SEQ ID NO: 351085
  chr10:100992740-100992799
  hyper
  lymphoid_neoplasm vs. multiple_myeloma, bladder_and_urothelial,myeloid_neoplasm

SEQ ID NO: 466117 - DNA, 5 bp, Homo sapiens
  chr10:102483746-102483751
  hyper
  lymphoid_neoplasm vs. bladder_and_urothelial
cgggg

SEQ ID NO: 466118 - DNA, 386 bp, Homo sapiens
  chr10:102489864-102490250
  hyper
  lymphoid_neoplasm vs. colorectal
ggcctgcggcctcagcgcgagagccctggcccccttcccgccgcgggtcgcggtcgggaaagcgcgccctgcaagggggttttgtagataaacaaaagcgtttgctcttctggttttcttttattttctttattcgcctgtcccttccttcttaatctccctcttcgctcttgtttctttaacttatttcccttcctcattttccctttcttttcgttcgcttttccttgtcactctccttcttgttctcttctgtctctttctgtatctccctcttccattttggccccttctctgcctctgggtttccctttcccgggcccctcactcttcctgggctaggattgcgccgtctccctgcatcatttttcctggctccgctgcct

SEQ ID NO: 466119 - DNA, 331 bp, Homo sapiens; identical to SEQ ID NO: 455597
  chr10:102490316-102490647
  hyper
  lymphoid_neoplasm vs. colorectal

SEQ ID NO: 466120 - DNA, 1 bp, Homo sapiens
  chr10:102490715-102490716
  hyper
  lymphoid_neoplasm vs. colorectal
c

SEQ ID NO: 466121 - DNA, 61 bp, Homo sapiens
  chr10:102498764-102498825
  hyper
  lymphoid_neoplasm vs. multiple_myeloma
cacgcggacacacacacacacacacacacacacacacacacacggcccccatagccaccgc

SEQ ID NO: 466122 - DNA, 247 bp, Homo sapiens
  chr10:102988365-102988612
  hyper
  lymphoid_neoplasm vs. multiple_myeloma
gccctgcgcgtgcttgtccgcggcggccagcaggtgcgccgccccgcacagcgagtaacttctccgcacagacggcttgttgaggatgtcctcgatgctgaacggcgtcagtggcttgttggagttggcaggcggaggcaggtggtccagcgggctgcgccgccgctcctcccccggcgccgccttgccgtcctccttggaagtcatctcggccttgttcggggtcccggccggggcggctcgggcc

SEQ ID NO: 466123 - DNA, 1 bp, Homo sapiens
  chr10:102988936-102988937
  hyper
  lymphoid_neoplasm vs. multiple_myeloma
c

SEQ ID NO: 466124 - DNA, 170 bp, Homo sapiens
  chr10:114711931-114712101
  hyper
  lymphoid_neoplasm vs. head_and_neck,colorectal
cgcgcagagcccggggccctggagaggctccttggctttctcttttgggcgactatgtatttagctttctagtggagattgctggctctcggccctccttcccccttcccctggaaggtcacacttcccagattggtcccaccgcaaacttgggggctctgaggcgtcct

SEQ ID NO: 466125 - DNA, 427 bp, Homo sapiens; identical to SEQ ID NO: 359683
  chr10:114712446-114712873
  hyper
  lymphoid_neoplasm vs. head_and_neck,colorectal

SEQ ID NO: 466126 - DNA, 269 bp, Homo sapiens
  chr10:116163621-116163890
  hyper
  lymphoid_neoplasm vs. pancreas_gallbladder
ttggtgtgggggagcaaagaagggcttggagagaaacgatgacccgaacggcaggacgtttggggaggccccacctagcccggggagggtctgcgcgcccactccactgcccaagcgctttgccgggagcaggaagcccctagcccggcgggcgcccgggagaaaggactcaacagcccgaccctttgcccccagcagctcagcacggttcccaccttcttcggggcttcctcggccccaggcatctttcctgtgcggcgggactgagg

SEQ ID NO: 466127 - DNA, 208 bp, Homo sapiens
  chr10:116163919-116164127
  hyper
  lymphoid_neoplasm vs. pancreas_gallbladder
tcctgcaacaggtgagaagccccgccacgccccccactgacgaccccctccttccgcgcccgggaggatcaaagggctcgggccgcagcagccacctaggagcccacccgcccagtccgcggcgccgctgtcgccccctcttaggcccaggtccgggctgggtgggggcagtgggctctgcttatcccgagtcctggcaagacgagtc

SEQ ID NO: 466128 - DNA, 80 bp, Homo sapiens; identical to SEQ ID NO: 372543
  chr10:116164364-116164444
  hyper
  lymphoid_neoplasm vs. pancreas_gallbladder

SEQ ID NO: 466129 - DNA, 916 bp, Homo sapiens; identical to SEQ ID NO: 334075
  chr10:116527415-116528331
  hyper
  lymphoid_neoplasm vs. pancreas_gallbladder,cervical, liver_bileduct

SEQ ID NO: 466130 - DNA, 51 bp, Homo sapiens; identical to SEQ ID NO: 359690
  chr10:119001564-119001615
  hyper
  lymphoid_neoplasm vs. sarcoma,prostate

SEQ ID NO: 466131 - DNA, 204 bp, Homo sapiens
  chr10:119302490-119302694
  hyper
  lymphoid_neoplasm vs. sarcoma
cgcctgcaaattcttctggaaggattttcccccctctcttcaggttgggcgcgtttggtgcaagattctcgggatcctcggctttgcctctccctctccctcccccctcctttcctttttcctttcctttcctttctttcttcctttccttccccccacccccacccccaccccaaacaaacgagtccccaattctcgtccgtc

SEQ ID NO: 466132 - DNA, 140 bp, Homo sapiens; identical to SEQ ID NO: 359696
  chr10:119303721-119303861
  hyper
  lymphoid_neoplasm vs. melanoma

SEQ ID NO: 466133 - DNA, 74 bp, Homo sapiens; identical to SEQ ID NO: 351119
  chr10:122739316-122739390
  hyper
  lymphoid_neoplasm vs. multiple_myeloma,cervical, pancreas_gallbladder

SEQ ID NO: 466134 - DNA, 210 bp, Homo sapiens
  chr10:123356997-123357207
  hyper
  lymphoid_neoplasm vs. renal,prostate
cggccccaccccagcggccccctcccgaaaaaggggtctccgcagggcctggatggtacggaagttcccaggacacacggatggggcacctcggagatgaccccgggaaccggcctgcggggctgtgccacgggcaggcgaaccttccgcccgtctgctctggggtcggagaaacgcgcccagtcagcgggaatgcgcccgccagggttt

SEQ ID NO: 466135 - DNA, 373 bp, Homo sapiens
  chr10:123357242-123357615
  hyper
  lymphoid_neoplasm vs. renal,prostate
tcagcatctggatgggggtagcagaggcagaacttccagaacgccggccgtcagcacgcacccacctcccccatcacctatgcagccacagagggaggacacggagcgtcctccacaatgctagtccttccgcgccccccgcccggaggacggtgcacccggcgtcccgggctcccgtggcgcccacgtccccggctggcgaagctccccgaggcgtcttgcgcggcgattaccttgaatggcaacgctcctccgcgacctgtgttgtccccgcgccccgcgtgggtcgggatggagaaagcgacgagcccggggttgcggggagcaactccaaacgcagaagagtggtccttgggtcttcgccggcgccaag

SEQ ID NO: 466136 - DNA, 107 bp, Homo sapiens
  chr10:123357660-123357767
  hyper
  lymphoid_neoplasm vs. renal,prostate
atgacgcccgcgggctgccctcggatttggggaacgagaggaagaaaggactcaggcttggcgttgcctccaccaaactttgctcgcgagttgcgaaggctcagagc

SEQ ID NO: 466137 - DNA, 94 bp, Homo sapiens
  chr10:123357893-123357987
  hyper
  lymphoid_neoplasm vs. renal,prostate
ccgcgcgcgctccctcgcccgctccgcacccgccgcccgcccgctcggctctccaccgcgctctcctccagccgccgcccgcgccgccgccgcc

SEQ ID NO: 466138 - DNA, 120 bp, Homo sapiens
  chr10:123357495-123357615
  hyper
  lymphoid_neoplasm vs. head_and_neck,melanoma,prostate, renal,colorectal,bladder_and_urothelial,ovary,sarcoma, pancreas_gallbladder,upper_gi,lung,non_cancer,anorectal,thyroid, uterine,breast,myeloid_neoplasm,cervical
cgcgacctgtgttgtccccgcgccccgcgtgggtcgggatggagaaagcgacgagcccggggttgcggggagcaactccaaacgcagaagagtggtccttgggtcttcgccggcgccaag

SEQ ID NO: 466139 - DNA, 107 bp, Homo sapiens; identical to SEQ ID NO: 466136
  chr10:123357660-123357767
  hyper
  lymphoid_neoplasm vs. head_and_neck,melanoma,prostate, renal,colorectal,bladder_and_urothelial,ovary,sarcoma, pancreas_gallbladder,upper_gi,lung,non_cancer,anorectal,thyroid, uterine,breast,myeloid_neoplasm,cervical

SEQ ID NO: 466140 - DNA, 376 bp, Homo sapiens
  chr10:123357893-123358269
  hyper
  lymphoid_neoplasm vs. head_and_neck,melanoma,prostate, renal,colorectal,bladder_and_urothelial,ovary,sarcoma, pancreas_gallbladder,upper_gi,lung,non_cancer,anorectal,thyroid, uterine,breast,myeloid_neoplasm,cervical
ccgcgcgcgctccctcgcccgctccgcacccgccgcccgcccgctcggctctccaccgcgctctcctccagccgccgcccgcgccgccgccgccgcccccgcctcctcgcggcgggtcacgcccccactgaaacccgagccgtttcctggacggcggcgccctctctgccaatcagcgccgcgcgcccgggccgccccgagtcccgcgcggctcccgacgcctccgagcagccggagacaccggcccgggaggcgagggctcggccgcgatgcggccgtagggatgcagcgacagcctccgaataaggcctggtcccgcgccccgcgccacctcctccctcctccccgggcgagcgaggctggccaacggctcgct

SEQ ID NO: 466141 - DNA, 275 bp, Homo sapiens
  chr10:124133662-124133937
  hyper
  lymphoid_neoplasm vs. liver_bileduct
cgttgctgaaagaatttcgactaacccttctttaagtctctcttaccctcctgtactattaacaccattgtaagtaggcagtggagctacatttgcagggagagagaagagcgaaaaattggcgcgcagagctgtaaagcgtttttctccaggtcacaccgcagcctgtaaatttgtgacacttggaccgattatgggacagcttgcaaacaaattatctgcaaactaacgaagcctatttttaaagatccctgttcctcgcagctctaggcgat

SEQ ID NO: 466142 - DNA, 276 bp, Homo sapiens; identical to SEQ ID NO: 359707
  chr10:124134313-124134589
  hyper
  lymphoid_neoplasm vs. liver_bileduct

SEQ ID NO: 466143 - DNA, 29 bp, Homo sapiens
  chr10:124220873-124220902
  hyper
  lymphoid_neoplasm vs. head_and_neck,ovary,cervical, breast,renal,uterine
cgctgccccgcccgcgccccgccagcacc

SEQ ID NO: 466144 - DNA, 17 bp, Homo sapiens
  chr10:124221049-124221066
  hyper
  lymphoid_neoplasm vs. head_and_neck,ovary,cervical, breast,renal,uterine
gggccgcgcggccgcgc

SEQ ID NO: 466145 - DNA, 630 bp, Homo sapiens
  chr10:124221086-124221716
  hyper
  lymphoid_neoplasm vs. head_and_neck,ovary,cervical, breast,renal,uterine
cgaggccctcctgcactctccccggcgccgctctccggccctcgccctgtccgccgccaccgccgccgccgccagagtcgccatgcagatcccgcgcgccgctcttctcccgctgctgctgctgctgctggcggcgcccgcctcggcgcagctgtcccgggccggccgctcggcgcctttggccgccgggtgcccagaccgctgcgagccggcgcgctgcccgccgcagccggagcactgcgagggcggccgggcccgggacgcgtgcggctgctgcgaggtgtgcggcgcgcccgagggcgccgcgtgcggcctgcaggagggcccgtgcggcgaggggctgcagtgcgtggtgcccttcggggtgccagcctcggccacggtgcggcggcgcgcgcaggccggcctctgtgtgtgcgccagcagcgagccggtgtgcggcagcgacgccaacacctacgccaacctgtgccagctgcgcgccgccagccgccgctccgagaggctgcaccggccgccggtcatcgtcctgcagcgcggagcctgcggccaaggtactccgccgcgctcctgggcagctccccactctctccatcccagctcggacctgcttctgcgggactggtgggc

SEQ ID NO: 466146 - DNA, 345 bp, Homo sapiens
  chr10:124221371-124221716
  hyper
  lymphoid_neoplasm vs. ovary,head_and_neck,liver_bileduct, pancreas_gallbladder
cggcgcgcccgagggcgccgcgtgcggcctgcaggagggcccgtgcggcgaggggctgcagtgcgtggtgcccttcggggtgccagcctcggccacggtgcggcggcgcgcgcaggccggcctctgtgtgtgcgccagcagcgagccggtgtgcggcagcgacgccaacacctacgccaacctgtgccagctgcgcgccgccagccgccgctccgagaggctgcaccggccgccggtcatcgtcctgcagcgcggagcctgcggccaaggtactccgccgcgctcctgggcagctccccactctctccatcccagctcggacctgcttctgcgggactggtgggc

SEQ ID NO: 466147 - DNA, 318 bp, Homo sapiens; identical to SEQ ID NO: 351125
  chr10:124221921-124222239
  hyper
  lymphoid_neoplasm vs. ovary,head_and_neck,liver_bileduct, pancreas_gallbladder

SEQ ID NO: 466148 - DNA, 221 bp, Homo sapiens
  chr10:128076024-128076245
  hyper
  lymphoid_neoplasm vs. prostate
gagtgacctggaagccaggaagaggggcagagaggaaactaaagaagtaggtaagagagtcagtttatgaaaatagagcctgctgtggagagcagcaggcacacctgcggaggagggggctgcctcacctgcggggccgctgcgcgcccccctaagtgtgttagcgggggaggcggggctggaaaggaaacctggtgaagggctggcccggagcctggggt

SEQ ID NO: 466149 - DNA, 775 bp, Homo sapiens; identical to SEQ ID NO: 372580
  chr10:128593891-128594666
  hyper
  lymphoid_neoplasm vs. lung

SEQ ID NO: 466150 - DNA, 89 bp, Homo sapiens; identical to SEQ ID NO: 372587
  chr10:133110981-133111070
  hyper
  lymphoid_neoplasm vs. melanoma

SEQ ID NO: 466151 - DNA, 134 bp, Homo sapiens
  chr10:133999554-133999688
  hyper
  lymphoid_neoplasm vs. melanoma
cggccgcagcaagtccccgagggcagcccggcgtggcccaggcccgggacccccagcaggtagtggccgcgggacagaggccgtgggcccgggctcggactccccgagaccctcgcacccggaggacgccgggc

SEQ ID NO: 466152 - DNA, 207 bp, Homo sapiens
  chr10:134600998-134601205
  hyper
  lymphoid_neoplasm vs. prostate,melanoma,sarcoma
gcttcccccgtcgactccgcactcgattcgactgggattgggattcgattgggcgcggccgccccaccggtgatcggcccccgcggagcctggcccgggaacccccagcgcccgtccggccccgagacccgccccggcctgtcctgcgccccgctccctcggaggagacacgaggaagggccctcccgggtcgggttcgggcccctc

SEQ ID NO: 466153 - DNA, 128 bp, Homo sapiens; identical to SEQ ID NO: 372592
  chr10:134602414-134602542
  hyper
  lymphoid_neoplasm vs. melanoma

SEQ ID NO: 466154 - DNA, 89 bp, Homo sapiens; identical to SEQ ID NO: 372595
  chr10:134902307-134902396
  hyper
  lymphoid_neoplasm vs. sarcoma

SEQ ID NO: 466155 - DNA, 452 bp, Homo sapiens
  chr10:134973438-134973890
  hyper
  lymphoid_neoplasm vs. colorectal,uterine,prostate, pancreas_gallbladder,anorectal
cggcccagcgaccgccccgccccccaccccgggccccgccccccaccccgggccccgcccggccctgcccaacgccgctgcagaggccaccccgggactgcggcagccccgcccggcagcagcgggggtgggacgggggcggcgggagccggcgagggggtctgcccgtccgagctttcctgggcgccggctccgcccctcgacccttggggcccaggtggggcgcagaccccgtggctccccgcggaggccacacgcctggctccgcccccggtgcctcccccaggaaggagcgacgttccctaggcgccgggtccggacagcgccgcgcagcccccgcgcaccccgcgccccccgcgccccccgggcccgccccgtatccctgaccgcgtcccctggagacactgcggcagcggcgggcgggcgggggcgggcgagggccgggcgcgtct

SEQ ID NO: 466156 - DNA, 81 bp, Homo sapiens
  chr11:280028-280109
  hyper
  lymphoid_neoplasm vs. cervical
cgcagcctgccccacctccgacccttgtccccgcgctgtctcccgctgcgcccagagtacaagaagaagtaccgggagcac

SEQ ID NO: 466157 - DNA, 271 bp, Homo sapiens; identical to SEQ ID NO: 372602
  chr11:280472-280743
  hyper
  lymphoid_neoplasm vs. cervical

SEQ ID NO: 466158 - DNA, 5 bp, Homo sapiens
  chr11:369411-369416
  hyper
  lymphoid_neoplasm vs. breast
cgcgc

SEQ ID NO: 466159 - DNA, 3 bp, Homo sapiens
  chr11:370273-370276
  hyper
  lymphoid_neoplasm vs. breast
gac

SEQ ID NO: 466160 - DNA, 683 bp, Homo sapiens
  chr11:416597-417280
  hyper
  lymphoid_neoplasm vs. colorectal,upper_gi,lung,cervical, pancreas_gallbladder
ggttcgacgctcagcacccagcaccctgcgggcgactcccgctcagctcggacgcgccgcccctccgctccccgtgcgcgctgggcccccagcgcctgtcctgaagcaggaacgtgggtaaaaggctgcggccccgcaggccgaggggctctggttcgctcccctaccccgcgcccacctgcgccctgggcgccctccaagtgaggagggcggagaacgaggacgcgcgcgggaggcgggcacgggggtgcggctcggggcgctcggccggggcagaggcgcgcggatggcggaagctccacccggcgccgggcgagctcgggccccagcctgactcttggtccgccctcggcgcctcaggaagcctcgagctgggatccaggcttgggcgaccgaggtgggatccctgcgcgcctcggcgctcctagccccgctctgttctgcgcgagggtcaccaaaaagccgctgaccacgtcgggcagaggaaagggtggcccccgcccccttcgcccactttcctcccttcccccagccctggaaagggccaggacgcgggcgagctcgggcttccgggcgacgcgggaacctccccggccccgagccatttcctgagagaccgcgcccagggacaagcagcgccccgggccccgactccaggcctgcagcggctctgggaggactgc

SEQ ID NO: 466161 - DNA, 753 bp, Homo sapiens
  chr11:416787-417540
  hyper
  lymphoid_neoplasm vs. upper_gi,pancreas_gallbladder, colorectal
cgccctccaagtgaggagggcggagaacgaggacgcgcgcgggaggcgggcacgggggtgcggctcggggcgctcggccggggcagaggcgcgcggatggcggaagctccacccggcgccgggcgagctcgggccccagcctgactcttggtccgccctcggcgcctcaggaagcctcgagctgggatccaggcttgggcgaccgaggtgggatccctgcgcgcctcggcgctcctagccccgctctgttctgcgcgagggtcaccaaaaagccgctgaccacgtcgggcagaggaaagggtggcccccgcccccttcgcccactttcctcccttcccccagccctggaaagggccaggacgcgggcgagctcgggcttccgggcgacgcgggaacctccccggccccgagccatttcctgagagaccgcgcccagggacaagcagcgccccgggccccgactccaggcctgcagcggctctgggaggactgcgacctccactcaccttcgcgggtctgatggcgaccgccactcacctgctgccaggacctggggctcgcgccgggcgggggcggggcagctcacctgagccaggtgcgcagcggcaacagccccggcggcggcgtagccccggcagcggcagcaggtgcggccccgccccgcagtcagggcgggggcggaccccagcgtcccgctctgcgcccaaggctggcgctggaggctgcgctgctgcccgggagccgctgccgcac

SEQ ID NO: 466162 - DNA, 732 bp, Homo sapiens
  chr11:1410711-1411443
  hyper
  lymphoid_neoplasm vs. head_and_neck,anorectal,ovary, non_cancer,pancreas_gallbladder
cggacgtggcagccggcgggctggaggctcccaggtcccggcctcgccctggcctcgcctcgccccctagagtctccccgagcgctcgtagcggcggggcggggtggggaggcgctgattggccggcgcgggcaccgcttgccgccgccacggcatcccgctgcgttcgtacaggctcgtgtcgactcggctccgttgcgcggcccggctcggctcccctcagctgcgctcgactccgctgttcggctcggctgttcggcttggctacagggctcggctgttcggcttggctacatggctcggctgcgcggctcggctctgttcggctcggctcggctgctgggctcggctgttcggctcagctgcgcggctcggctcgtctcggctctgttcggctcggctcggctgctgggctcggctgttcggctcagctgcacggctcggctcggctcggctcggctcggctgcgcggccgctgacgggcgtgcgctgggggcgcggggcgcggggcgcgggcctcggcggcggcggcggcggcggcggcggaagccaggtgcccccgcccgccctgtcctctcgacgaggcggaggcgtcgccgcgggccaggcctcggactgccgcgtcggagtggacgcggggggcggcggcgcgggcggacgcgggcggcgcgaagcagcggggcccgcgggggcgccccggccgggtcggcgcggacggcactcggcggacgc

SEQ ID NO: 466163 - DNA, 409 bp, Homo sapiens
  chr11:1411034-1411443
  hyper
  lymphoid_neoplasm vs. anorectal,prostate,thyroid, myeloid_neoplasm,non_cancer,ovary,renal,breast
cggctcggctcggctgctgggctcggctgttcggctcagctgcgcggctcggctcgtctcggctctgttcggctcggctcggctgctgggctcggctgttcggctcagctgcacggctcggctcggctcggctcggctcggctgcgcggccgctgacgggcgtgcgctgggggcgcggggcgcggggcgcgggcctcggcggcggcggcggcggcggcggcggaagccaggtgcccccgcccgccctgtcctctcgacgaggcggaggcgtcgccgcgggccaggcctcggactgccgcgtcggagtggacgcggggggcggcggcgcgggcggacgcgggcggcgcgaagcagcggggcccgcgggggcgccccggccgggtcggcgcggacggcactcggcggacgc

SEQ ID NO: 466164 - DNA, 94 bp, Homo sapiens
  chr11:2290844-2290938
  hyper
  lymphoid_neoplasm vs. myeloid_neoplasm,head_and_neck
cgctcgggcctggcgctcggctccgcgggctcctgggggcgcgacccgccgggcctgcccaccccgtccctccaccccggcccccggccctccc

SEQ ID NO: 466165 - DNA, 127 bp, Homo sapiens; identical to SEQ ID NO: 351146
  chr11:2465520-2465647
  hyper
  lymphoid_neoplasm vs. bladder_and_urothelial,upper_gi, colorectal,uterine,non_cancer,thyroid

SEQ ID NO: 466166 - DNA, 158 bp, Homo sapiens; identical to SEQ ID NO: 462327
  chr11:2466019-2466177
  hyper
  lymphoid_neoplasm vs. myeloid_neoplasm, bladder_and_urothelial,anorectal,thyroid,colorectal,lung,ovary, cervical,uterine,upper_gi,non_cancer,pancreas_gallbladder, breast

SEQ ID NO: 466167 - DNA, 251 bp, Homo sapiens; identical to SEQ ID NO: 462328
  chr11:2466191-2466442
  hyper
  lymphoid_neoplasm vs. myeloid_neoplasm, bladder_and_urothelial,anorectal,thyroid,colorectal,lung,ovary, cervical,uterine,upper_gi,non_cancer,pancreas_gallbladder, breast

SEQ ID NO: 466168 - DNA, 16 bp, Homo sapiens
  chr11:2466831-2466847
  hyper
  lymphoid_neoplasm vs. myeloid_neoplasm, bladder_and_urothelial,anorectal,thyroid,colorectal,lung,ovary, cervical,uterine,upper_gi,non_cancer,pancreas_gallbladder, breast
aaggaagtggggaaac

SEQ ID NO: 466169 - DNA, 413 bp, Homo sapiens; identical to SEQ ID NO: 359748
  chr11:2950407-2950820
  hyper
  lymphoid_neoplasm vs. head_and_neck

SEQ ID NO: 466170 - DNA, 212 bp, Homo sapiens
  chr11:3186017-3186229
  hyper
  lymphoid_neoplasm vs. upper_gi
cgcgtcggccgagctggggggacagaccccctgattggccagggtttgtggtggtcagacccagccaccttccctggcggtcccggctcctttaagccccaccaagtggggagccgagctgggcgcgccgcttcccactcgcgggccccacccgccccaacccgccaggcgccgacccgtcctggcccggggcgcccccaggctcccgcgct

SEQ ID NO: 466171 - DNA, 291 bp, Homo sapiens
  chr11:3186311-3186602
  hyper
  lymphoid_neoplasm vs. upper_gi
agctcctggatcccttcggccggccccccgcggccctcggttcgctccggccctgcccggcggggccctccggatccttcccagcccgccatccccccgccgccctgccgccccccgggccgccgcgctcctacctcctaccgtgccgcgagctcggtgctccgggccggccgggcgcgcgggggctccactggcggcgcgggcctggctgcaggaaatgccagcagatggtccccccgcgcgaggcggagcgagggcgcggcggagggaggaggcccagggagcccggag

SEQ ID NO: 466172 - DNA, 151 bp, Homo sapiens
  chr11:3663265-3663416
  hyper
  lymphoid_neoplasm vs. anorectal,uterine,prostate,renal
cgccccccgccccaagtctccgcccccgactccccacaccccttcctcagagcctccagtctggggacctttccgagactgtaaaggcggggccgcagtttggctccgcctgagaggggagggccgggggcggaggacccacttgaaggct

SEQ ID NO: 466173 - DNA, 212 bp, Homo sapiens; identical to SEQ ID NO: 359753
  chr11:3663525-3663737
  hyper
  lymphoid_neoplasm vs. anorectal,uterine,prostate,renal

SEQ ID NO: 466174 - DNA, 160 bp, Homo sapiens; identical to SEQ ID NO: 462330
  chr11:12030561-12030721
  hyper

SEQ ID NO: 466175 - DNA, 263 bp, Homo sapiens
  chr11:12030561-12030824
  hyper
  lymphoid_neoplasm vs. head_and_neck,thyroid, myeloid_neoplasm,lung,sarcoma,bladder_and_urothelial, multiple_myeloma
cctcaagcctctctcagcccctacctggggtggaccaagcacaggtcagccccctccccttggcgtcgggtcctactcgagcgccccgccccacatccaccaagagaggctgagctcagcagagtcgtcccctcccccgccgccgcccctcacccaccccgactggaccgagttgcgctgcgggccggactggatctgctcgctcccgccgggaggccgccgggctgcgggtgcagatgcgggagcggcgcggtgggcgggcc

SEQ ID NO: 466176 - DNA, 53 bp, Homo sapiens; identical to SEQ ID NO: 359760
  chr11:12031006-12031059
  hyper
  lymphoid_neoplasm vs. head_and_neck,thyroid, myeloid_neoplasm,lung,sarcoma,bladder_and_urothelial, multiple_myeloma

SEQ ID NO: 466177 - DNA, 125 bp, Homo sapiens
  chr11:12131738-12131863
  hyper
  lymphoid_neoplasm vs. sarcoma,head_and_neck,lung, pancreas_gallbladder,anorectal,breast,uterine,renal,colorectal, bladder_and_urothelial,non_cancer,prostate,upper_gi,ovary
cgtacacagtcggtactagaagtgccatgctgctcccccatgtccaaaaggggatgccgtgtcttgctttccagccgcctagaccaagaagcgtgaggcccaggccctcgccgctcccttgatac

SEQ ID NO: 466178 - DNA, 288 bp, Homo sapiens
  chr11:12132212-12132500
  hyper
  lymphoid_neoplasm vs. sarcoma,head_and_neck,lung, pancreas_gallbladder,anorectal,breast,uterine,renal,colorectal, bladder_and_urothelial,non_cancer,prostate,upper_gi,ovary
gcgcccgcggccagggccgaggcaggcctgacccggggccgggcagcccgcgcgactttcggtaaggcgggggcggcgctggcctcagggtggggagggcgggcgggcgcgggtggggaccgtgccagcctcggctggactctgcgccgtgtccaacgcccgggagggtcaggtgcggccgcagcatcccccgcctcaaacccacccggcggggcgcacagtgagcaggtggcgctgcgacgaagcccggggcggccctggccggcctctgaaccaattagaacgcaa

SEQ ID NO: 466179 - DNA, 2 bp, Homo sapiens
  chr11:12132611-12132613
  hyper
  lymphoid_neoplasm vs. sarcoma,head_and_neck,lung, pancreas_gallbladder,anorectal,breast,uterine,renal,colorectal, bladder_and_urothelial,non_cancer,prostate,upper_gi,ovary
gc

SEQ ID NO: 466180 - DNA, 56 bp, Homo sapiens
  chr11:12399222-12399278
  hyper
  lymphoid_neoplasm vs. sarcoma,prostate
ctgtccccaagtctcccactcccaagtcgcccccgtcccgcaagaaagatgattcc

SEQ ID NO: 466181 - DNA, 345 bp, Homo sapiens
  chr11:12399383-12399728
  hyper
  lymphoid_neoplasm vs. sarcoma,prostate
ggccgaggggccggggcactgggaccgggcgggagcgcgccgcgggtgcccggcgcggtggggcgcgcggcgatgcgtgcgcgcgcttcccgggtacgtcgggcaggagcgacgcgcaccccacactgagcccggggctcgcgggccatcgaggccaccccgcccgctcgcggtcgcccgggcgctgccctcctgggccggggaccaggccaacgcccccgccgggccgtgggcgggcgccgcttggcggccggaggcggcgggaccggagcccaggcggggccccagcccgcagacagtgcgatccagtaggccctgccccgccctctgcgcccgaaggctggc

SEQ ID NO: 466182 - DNA, 71 bp, Homo sapiens; identical to SEQ ID NO: 359765
  chr11:12399791-12399862
  hyper
  lymphoid_neoplasm vs. sarcoma,prostate

SEQ ID NO: 466183 - DNA, 234 bp, Homo sapiens; identical to SEQ ID NO: 347137
  chr11:12696746-12696980
  hyper
  lymphoid_neoplasm vs. bladder_and_urothelial,ovary, head_and_neck,breast,pancreas_gallbladder,lung,upper_gi, colorectal,sarcoma,liver_bileduct,anorectal

SEQ ID NO: 466184 - DNA, 30 bp, Homo sapiens
  chr11:13030890-13030920
  hyper
  lymphoid_neoplasm vs. cervical
ggcgcgttgccccgggagcgcccgtcgtcc

SEQ ID NO: 466185 - DNA, 30 bp, Homo sapiens; identical to SEQ ID NO: 466184
  chr11:13030890-13030920
  hyper
  lymphoid_neoplasm vs. head_and_neck

SEQ ID NO: 466186 - DNA, 179 bp, Homo sapiens
  chr11:13031624-13031803
  hyper
  lymphoid_neoplasm vs. head_and_neck
atgacccaggagaaacagcggcgagtggtgcgcaaggcctttcgcaaactggccaagctcaaccggcggcgccagcagcagacaccgtcgtcctgttcgtccacttcgtcgtccactgcctcgtcctgctcttcgtcgccgcggacccacgagagcgcgtcggtggagcgcatggagac

SEQ ID NO: 466187 - DNA, 333 bp, Homo sapiens; identical to SEQ ID NO: 462331
  chr11:13031624-13031957
  hyper
  lymphoid_neoplasm vs. cervical,head_and_neck

SEQ ID NO: 466188 - DNA, 117 bp, Homo sapiens
  chr11:13031840-13031957
  hyper
  lymphoid_neoplasm vs. head_and_neck
cgccagcaggtgcagcggctccacgagctggaccgcgagatcgatcactacgaggccaaggtgcacctggaccgcatgcggcgtcacggggtcaactacgtgcaggacacttacttg

SEQ ID NO: 466189 - DNA, 345 bp, Homo sapiens
  chr11:13032312-13032657
  hyper
  lymphoid_neoplasm vs. head_and_neck
gcctttacattgggctgcggctcaacacggacctagaggccgtcaagtcggacttggattacagccagcagcaatgggacagcaagaagcgcgagctacagggccttctgcaaactttgcacactttggagctgacggtggcaccggatggggctcctggctctggcagtccctcgcgggaacctgggcctcaagcctgcgccgacatgtgggtggaccaggcccgtggactggccaagagcggtcctggcaacgacgaagactcggatacgggactgagctctatgcatagccaagactcggactccttgcccatgtgcgaatcccttgtgtaggggtgggggg

SEQ ID NO: 466190 - DNA, 5 bp, Homo sapiens
  chr11:14665069-14665074
  hyper
  lymphoid_neoplasm vs. anorectal,bladder_and_urothelial, prostate,melanoma
cgtcc

SEQ ID NO: 466191 - DNA, 347 bp, Homo sapiens; identical to SEQ ID NO: 457360
  chr11:14665271-14665618
  hyper
  lymphoid_neoplasm vs. anorectal,bladder_and_urothelial, prostate,melanoma

SEQ ID NO: 466192 - DNA, 299 bp, Homo sapiens; identical to SEQ ID NO: 457361
  chr11:14665651-14665950
  hyper
  lymphoid_neoplasm vs. anorectal,bladder_and_urothelial, prostate,melanoma

SEQ ID NO: 466193 - DNA, 155 bp, Homo sapiens
  chr11:14665463-14665618
  hyper
  lymphoid_neoplasm vs. head_and_neck
cgcgcggtggggaccccgggccgtggcggccggcgcagccctgacgggttgcgaaccagggggcgccccgaacgcgggggttggggtctgggagcgcgagcggccgctacggtacgagcggggtgtgctgagtcccgtggccacccccggcccca

SEQ ID NO: 466194 - DNA, 299 bp, Homo sapiens; identical to SEQ ID NO: 457361
  chr11:14665651-14665950
  hyper
  lymphoid_neoplasm vs. head_and_neck

SEQ ID NO: 466195 - DNA, 32 bp, Homo sapiens
  chr11:14665995-14666027
  hyper
  lymphoid_neoplasm vs. head_and_neck
cgcctgtgccttcttcttcctcacctgcttcc

SEQ ID NO: 466196 - DNA, 394 bp, Homo sapiens
  chr11:14666056-14666450
  hyper
  lymphoid_neoplasm vs. head_and_neck
ggccggagctgcggctcctggtggctgctggcgctgcccgcctgctgttacctgggggacttcttggtgtggcagtggtggtcttggccttggggggatggcgacgcagggtccgcggccccgcacacgcccccggaggcggcagcgggcaggttgctgctggtgctgagctgcgtagggctgctgctgacgctcgcgcacccgctgcggctccggcactgcgttctggtgctgctcctggccagcttcgtctggtgggtctccttcaccagcctcgggtcgctgccctccgccctcaggccgctgctctccggcctggtggggggcgctggctgcctgctggccctggggttggatcacttctttcaaatcagggaagcgcctcttcatcctc

SEQ ID NO: 466197 - DNA, 32 bp, Homo sapiens; identical to SEQ ID NO: 466195
  chr11:14665995-14666027
  hyper
  lymphoid_neoplasm vs. pancreas_gallbladder

SEQ ID NO: 466198 - DNA, 441 bp, Homo sapiens
  chr11:14666056-14666497
  hyper
  lymphoid_neoplasm vs. pancreas_gallbladder
ggccggagctgcggctcctggtggctgctggcgctgcccgcctgctgttacctgggggacttcttggtgtggcagtggtggtcttggccttggggggatggcgacgcagggtccgcggccccgcacacgcccccggaggcggcagcgggcaggttgctgctggtgctgagctgcgtagggctgctgctgacgctcgcgcacccgctgcggctccggcactgcgttctggtgctgctcctggccagcttcgtctggtgggtctccttcaccagcctcgggtcgctgccctccgccctcaggccgctgctctccggcctggtggggggcgctggctgcctgctggccctggggttggatcacttctttcaaatcagggaagcgcctcttcatcctcgactgtccagtgccgccgaagaaaaagtgcctgtgatccgaccccgg

SEQ ID NO: 466199 - DNA, 308 bp, Homo sapiens; identical to SEQ ID NO: 359777
  chr11:14666531-14666839
  hyper
  lymphoid_neoplasm vs. pancreas_gallbladder

SEQ ID NO: 466200 - DNA, 262 bp, Homo sapiens
  chr11:16626178-16626440
  hyper
  lymphoid_neoplasm vs. cervical
tctagccctaaacttcaagcgcggccctcacagggtctcacacacaaaagcagcccaggacagcccatctcgctaacagcccagccccgccagttcagtcgaagacttatttttagtccccaaataggggctgcattcaatatctgacaattcacacaaaacaacattttcaaacttggtccgcctaagagaccgtaaataaaactcaaaacaagctggcgactgccaccttttatctgctccgaacacaccaattcttttt

SEQ ID NO: 466201 - DNA, 342 bp, Homo sapiens
  chr11:16626496-16626838
  hyper
  lymphoid_neoplasm vs. cervical
tcagcagccccgggccgctcctcccggcatcggagcacaaccccagcagcctttgcacaagccctttcccttctctgcccggccctttaagggagaaggaagaaagcagctcccgcgggagcggccgggctcgggctgggtcccggggcgggtggcagcaccgccccctgccctgggccgagcccgggagcagcggaccgcggccccggctgcagaggaacggcgggtggcggggccccggcagggcgccgagaaggacggagggcgccggctgggctcagggacgcggggcggggaagaaacgtgccggcgaccgtgcgctcggccgggtgactccctggc

SEQ ID NO: 466202 - DNA, 81 bp, Homo sapiens
  chr11:16626359-16626440
  hyper
  lymphoid_neoplasm vs. pancreas_gallbladder
cgcctaagagaccgtaaataaaactcaaaacaagctggcgactgccaccttttatctgctccgaacacaccaattcttttt

SEQ ID NO: 466203 - DNA, 839 bp, Homo sapiens
  chr11:16626496-16627335
  hyper
  lymphoid_neoplasm vs. pancreas_gallbladder
tcagcagccccgggccgctcctcccggcatcggagcacaaccccagcagcctttgcacaagccctttcccttctctgcccggccctttaagggagaaggaagaaagcagctcccgcgggagcggccgggctcgggctgggtcccggggcgggtggcagcaccgccccctgccctgggccgagcccgggagcagcggaccgcggccccggctgcagaggaacggcgggtggcggggccccggcagggcgccgagaaggacggagggcgccggctgggctcagggacgcggggcggggaagaaacgtgccggcgaccgtgcgctcggccgggtgactccctggcgaagtccgcgcccggcggggctgaactacccctcgcccccgctcccgccaggtcaggcaccactgccctcgcggccagggtaaagaggaccacagatcagtcagccttggatttcggatgggcttggaattcggtttgtttattcctgaaaagatcattaaaaagtactgtccaaaaacggggggagggggaaggaagggcgacaagcggagggagctggaggcaactcgagcggtgtcccgaaaaagttgcggcggagcggcggtggggtgagggtgggaggagggagcgcaagcgttttctagcgacccgggttttcttcatgaactcctccgagtaaactttatcccggcgagagagcggcggagatcctcgactcccgcccgccctcaaccagtgtcaaccccacaaacagcctaagtttccaaaccgaaatgggggtggggtgggggtagcattaagaagcccagaagctcagcgggtcctcccgacctccc

SEQ ID NO: 466204 - DNA, 521 bp, Homo sapiens
  chr11:16626844-16627365
  hyper
  lymphoid_neoplasm vs. head_and_neck
cgcgcccggcggggctgaactacccctcgcccccgctcccgccaggtcaggcaccactgccctcgcggccagggtaaagaggaccacagatcagtcagccttggatttcggatgggcttggaattcggtttgtttattcctgaaaagatcattaaaaagtactgtccaaaaacggggggagggggaaggaagggcgacaagcggagggagctggaggcaactcgagcggtgtcccgaaaaagttgcggcggagcggcggtggggtgagggtgggaggagggagcgcaagcgttttctagcgacccgggttttcttcatgaactcctccgagtaaactttatcccggcgagagagcggcggagatcctcgactcccgcccgccctcaaccagtgtcaaccccacaaacagcctaagtttccaaaccgaaatgggggtggggtgggggtagcattaagaagcccagaagctcagcgggtcctcccgacctcccgcacccagagcctgggtgacactgaagcgc

SEQ ID NO: 466205 - DNA, 286 bp, Homo sapiens; identical to SEQ ID NO: 359779
  chr11:16627410-16627696
  hyper
  lymphoid_neoplasm vs. head_and_neck

SEQ ID NO: 466206 - DNA, 75 bp, Homo sapiens
  chr11:16628231-16628306
  hyper
cggacgaatacttaggatggcgataacagctttctgttgtcaaaggttgcgttgtgtccctgtccctgccctttt

SEQ ID NO: 466207 - DNA, 183 bp, Homo sapiens; identical to SEQ ID NO: 359781
  chr11:16628933-16629116
  hyper

SEQ ID NO: 466208 - DNA, 22 bp, Homo sapiens
  chr11:17742758-17742780
  hyper
  lymphoid_neoplasm vs. multiple_myeloma
cgcggccccacccctgcttact

SEQ ID NO: 466209 - DNA, 403 bp, Homo sapiens
  chr11:17742811-17743214
  hyper
  lymphoid_neoplasm vs. multiple_myeloma
cgggaagagtgcggcggtgtcgagcctagactgcctgtccagcatcgtggagcgcatctccaccgagagccctgcggcgcccgccctcctgctggcggacgtgccttctgagtcgcctccgcgcaggcaagaggctgccgcccccagcgagggagagagcagcggcgaccccacccagtcaccggacgccgccccgcagtgccctgcgggtgcgaaccccaacccgatataccaggtgctctgaggggatggtggccgcccacccgcccgagggatggtgcccctagggtccctcgcgcccaaaagattgaacttaaatgcccccctcccaacagcgctttaaaagcgacctctcttgaggtaggagaggcgggagaactgaagtttccgcccccgccccaca

SEQ ID NO: 466210 - DNA, 37 bp, Homo sapiens; identical to SEQ ID NO: 351163
  chr11:17743245-17743282
  hyper
  lymphoid_neoplasm vs. multiple_myeloma

SEQ ID NO: 466211 - DNA, 768 bp, Homo sapiens
  chr11:19733708-19734476
  hyper
  lymphoid_neoplasm vs. liver_bileduct
cggggtcatggagcctctcccggcttcttcaggccactctaattacagagtctgtggtaggttgcgtggaggagctgtctcggggcgggaagcttccctgcgtattgtatttgcctataaatacttcaaatagttaagtgaaatgtgcagcctttgaaaactggagaggaagccgttgggaggccccccgcccagccggcctggaagagcaggcagagaaatggctggcgcgctcttaaagcgggagacgagcttcggccctgcccaagccagatgggggcagcgaggctgcgggcgtgactccggaagactcaaaccgttaaggtgaccggagcaatttgaaaaaggaaacaaacttccctcgagccgtgcccgcgtggctctggggcggacggttgcgttcgaaagggcatttttcaaaagaagggtttcaggaacgcaggggtgtgggccccccgggaggcgcgcggccggggcagtgccgcaaagcggccaccagcccgctttgtactcgcggccaagcgcggccccagagtttcggcggcggccagagtttaggccacaccctctttgcagtgagacccgcggccgctgattggcgcaccgtggaccaatgggcgcgccggggcggccccggctgtcagcgcgcgccgcagcagcgccggcagcagcctgtcctcccctgcgctgagccccgcagccagcgcagccttcccgggaagcgcggcggccgctcccgagcgcagccctgcccggcccgccagccgc

SEQ ID NO: 466212 - DNA, 955 bp, Homo sapiens
  chr11:19733991-19734946
  hyper
  lymphoid_neoplasm vs. liver_bileduct,multiple_myeloma, lung,thyroid,anorectal,ovary,uterine,non_cancer,breast, colorectal,pancreas_gallbladder,cervical,renal, bladder_and_urothelial,head_and_neck,sarcoma,melanoma
cgaggctgcgggcgtgactccggaagactcaaaccgttaaggtgaccggagcaatttgaaaaaggaaacaaacttccctcgagccgtgcccgcgtggctctggggcggacggttgcgttcgaaagggcatttttcaaaagaagggtttcaggaacgcaggggtgtgggccccccgggaggcgcgcggccggggcagtgccgcaaagcggccaccagcccgctttgtactcgcggccaagcgcggccccagagtttcggcggcggccagagtttaggccacaccctctttgcagtgagacccgcggccgctgattggcgcaccgtggaccaatgggcgcgccggggcggccccggctgtcagcgcgcgccgcagcagcgccggcagcagcctgtcctcccctgcgctgagccccgcagccagcgcagccttcccgggaagcgcggcggccgctcccgagcgcagccctgcccggcccgccagccgcgcgtcccggcgcccgcgccccacggccacagccttgcctctatctagctcacggagcatgtgcagacccgcaggcgctaaggtgctctcagtccgggggccttctgggcagcggtgactgtcaccccaagagagacctttcgggggctcttgccgcacctctgctgcgtcgcgggtgacactgcggtgctcgcgagcagggtggcagctgcctctcggtggagacgtcttgggacccttgcgcccttcttctctccttccttcgctgctgtctcctttccttccttggctgctcgctctttctctcgccggctcagacccgtagcctccggaacgggactcgtgggtcgccgccgcctctgtctcttccaaaggggcctcctcacttcggagatgcagtgacaagttaatatgggcgtccaagcctctgtttcccaggaggaaatttgcaagaggcggcagcccctgagc

SEQ ID NO: 466213 - DNA, 497 bp, Homo sapiens
  chr11:19734477-19734974
  hyper
  lymphoid_neoplasm vs. myeloid_neoplasm,renal,uterine, non_cancer,ovary,breast,lung,thyroid
cgtcccggcgcccgcgccccacggccacagccttgcctctatctagctcacggagcatgtgcagacccgcaggcgctaaggtgctctcagtccgggggccttctgggcagcggtgactgtcaccccaagagagacctttcgggggctcttgccgcacctctgctgcgtcgcgggtgacactgcggtgctcgcgagcagggtggcagctgcctctcggtggagacgtcttgggacccttgcgcccttcttctctccttccttcgctgctgtctcctttccttccttggctgctcgctctttctctcgccggctcagacccgtagcctccggaacgggactcgtgggtcgccgccgcctctgtctcttccaaaggggcctcctcacttcggagatgcagtgacaagttaatatgggcgtccaagcctctgtttcccaggaggaaatttgcaagaggcggcagcccctgagcgcccagagctcttgaaaggccacccagg

SEQ ID NO: 466214 - DNA, 339 bp, Homo sapiens
  chr11:19735066-19735405
  hyper
  lymphoid_neoplasm vs. myeloid_neoplasm,renal,uterine, non_cancer,ovary,breast,lung,thyroid
gcgctcgcccgattgcttcgagttccccgacctggggattttttttttagccgctggtggtgggcgcctcgtgggctaaggcccggcgcctgctctgctacccgcgctgcctttagcggtcgcccccgccgccgctgccagggacgtgctgggaaagcccaagccccgggagaagatgccggccatcctggtcgcctccaaaatgaagtcgggactgcccaaacccgtgcacagcgccgcgcccatcctgcacgtgcccccggcccgggcgggcccccagccctgctacctgaagttgggaagcaaggtggaggtgagcaagaccacctatcctagcca

SEQ ID NO: 466215 - DNA, 2 bp, Homo sapiens
  chr11:20185487-20185489
  hyper
  lymphoid_neoplasm vs. non_cancer
gc

SEQ ID NO: 466216 - DNA, 38 bp, Homo sapiens; identical to SEQ ID NO: 351170
  chr11:20619974-20620012
  hyper
  lymphoid_neoplasm vs. melanoma

SEQ ID NO: 466217 - DNA, 5 bp, Homo sapiens
  chr11:20621337-20621342
  hyper
  lymphoid_neoplasm vs. bladder_and_urothelial
cgacg

SEQ ID NO: 466218 - DNA, 4 bp, Homo sapiens
  chr11:27740460-27740464
  hyper
  lymphoid_neoplasm vs. sarcoma
cggg

SEQ ID NO: 466219 - DNA, 406 bp, Homo sapiens
  chr11:27740493-27740899
  hyper
  lymphoid_neoplasm vs. sarcoma
gcgaaaactgccaccgggcttggctctgtggccggaacaaaaggcctgagaagggggtgggggtgagggttataggagtgtggagagcctggtggcccccgcccaggggcgcctaagtccctgagctccctgaagagtggcaagaggataacgcagccgcgcgttccggcagttcgctgtcccccgggggtgcaggcgggggcgggagaggtagaacacaggtctgggcggctccgcgccgcttctatctcacccgccaagcccctcacctccacccaccgccagtcccctgcccacccgggtggcggcggcggctcagcgactagccggccgccctccaccggcgcctccggacgcaacctcgccctggcagggcggtctgcgcgtccagctgattggtggctct

SEQ ID NO: 466220 - DNA, 178 bp, Homo sapiens; identical to SEQ ID NO: 359802
  chr11:27740986-27741164
  hyper
  lymphoid_neoplasm vs. sarcoma

SEQ ID NO: 466221 - DNA, 52 bp, Homo sapiens; identical to SEQ ID NO: 457373
  chr11:44337578-44337630
  hyper
  lymphoid_neoplasm vs. multiple_myeloma, bladder_and_urothelial

SEQ ID NO: 466222 - DNA, 230 bp, Homo sapiens; identical to SEQ ID NO: 359827
  chr11:44338552-44338782
  hyper
  lymphoid_neoplasm vs. ovary

SEQ ID NO: 466223 - DNA, 586 bp, Homo sapiens
  chr11:46299162-46299748
  hyper
  lymphoid_neoplasm vs. upper_gi
cgtggcgccttggccagctgggctagccagccaggggttcccggtttcacagagaggaaagtgacagaagacgtgcggagggagacgcagagacagaggagaggccggcagccacccagtctcgggggagcacttagctcccccgccccggctcccaccctgtccggggggctcctgaagccctcagccccaaccccgggctccccatggaagccagctgtgccccaggaggagcaggaggaggtggagtcggctgaatgcccacggtgcgcccggggcccctgagcccatcccgctcctagccgctgccctaaggcccccgcgcgccccgcgccccccacccggggccgcgccgcctccgtccgcccctcccccggggcttcgccccggacctgccccccgcccgtttgccagcgctcaggcaggagctctggactgggcgcgccgccgccctggagtgagggaagcccagtggaagggggtcccgggagccggctgcgatggacgccgtcttggaacccttcccggccgacaggctgttccccggatccagcttcctggacttgggggatctgaacgagtcgga

SEQ ID NO: 466224 - DNA, 4 bp, Homo sapiens
  chr11:61347876-61347880
  hyper
  lymphoid_neoplasm vs. cervical,breast,anorectal, head_and_neck,sarcoma,thyroid,uterine,colorectal,lung,ovary
cgcc

SEQ ID NO: 466225 - DNA, 604 bp, Homo sapiens; identical to SEQ ID NO: 347160
  chr11:61347974-61348578
  hyper
  lymphoid_neoplasm vs. cervical,breast,anorectal, head_and_neck,sarcoma,thyroid,uterine,colorectal,lung,ovary

SEQ ID NO: 466226 - DNA, 217 bp, Homo sapiens; identical to SEQ ID NO: 359847
  chr11:61355118-61355335
  hyper

SEQ ID NO: 466227 - DNA, 206 bp, Homo sapiens
  chr11:61684832-61685038
  hyper
  lymphoid_neoplasm vs. pancreas_gallbladder,head_and_neck
tccacatcccggcgcctcggggcgcccaggcgtccgttcccagcgccgccgcgtcctcccagcgccgcgtccccgcccgccgccgactccgccaggggccgagccgccccaccgcctgtcagccctgcccgcggccggtcagtaggtctcagacgcctgggctcgcggcccccagcccagccccgaccctgccctgggcgggtcac

SEQ ID NO: 466228 - DNA, 128 bp, Homo sapiens; identical to SEQ ID NO: 359852
  chr11:61685087-61685215
  hyper
  lymphoid_neoplasm vs. pancreas_gallbladder,head_and_neck

SEQ ID NO: 466229 - DNA, 224 bp, Homo sapiens
  chr11:66725377-66725601
  hyper
  lymphoid_neoplasm vs. head_and_neck,lung,colorectal, pancreas_gallbladder,upper_gi,uterine
cgatggggacaacttgggctcccgatcctgacagacttgggttcgaaccctcagggacctcgcgcgaggcgctttagtcagtttctccatctgcaaaatgggcccgagagcaagaatgaggcagcccgcaggcggacgctgcggaggggcgctcgggggctgcagccgggggcgggtccgggggcgggtccagccggccgagcccccgcgcgagggggaggggc

SEQ ID NO: 466230 - DNA, 309 bp, Homo sapiens
  chr11:66725637-66725946
  hyper
  lymphoid_neoplasm vs. head_and_neck,lung,colorectal, pancreas_gallbladder,upper_gi,uterine
ccgtcgctgtctcctccagccgtcactcgcggagcccgcgccgcctttgcgcgcgcgacccttacataagcgtccctcgcagcggtgccggcgcacgtccacccgctccgacccgccgcgggaagaggaccgtgcggagcgcggcggacactcacctcctcgccgtcgccagtcctcgccgccgcctctaccgctgctgcctccactgacagagaacagctgcggtctccgtgcaaccgaacttgctgcagtcccggccccgccttacggacttcctattggcccagacagcccaacccctcccgttat

SEQ ID NO: 466231 - DNA, 19 bp, Homo sapiens
  chr11:66726353-66726372
  hyper
  lymphoid_neoplasm vs. head_and_neck,lung,colorectal, pancreas_gallbladder,upper_gi,uterine
aggaaaagctaacgttagc

SEQ ID NO: 466232 - DNA, 244 bp, Homo sapiens
  chr11:69452414-69452658
  hyper
  lymphoid_neoplasm vs. cervical
cgggagtcgaggaattagaatcgcctttaaccctcaagagttgcgccttcagcctcgggatcccagatgcgtcgttggagccagggccgcccccctacctgttgggtttgcgttttaactccagcgcacaccttgccggcagccctcggagctaggggaggggtctcgtttccccgcagcccgccggacagacgactggggcacgggaggggcggtggcagggtggtctgtgtgtggctgaaac

SEQ ID NO: 466233 - DNA, 212 bp, Homo sapiens
  chr11:69589517-69589729
  hyper
  lymphoid_neoplasm vs. multiple_myeloma
cgggtgtccgcgtgcgcgccgccgatgcggccgtcggggagcgcctggaggtggaagccgatgcccacgttgcagtagagccgccgcagccgcttgatgcccagcaggtagtcgccggcgccgctctggacggccgcctccttgggctgcgctgccaccggcaggcgcgccaacgagagcgccaccaggctctcccagcggcgctccagctc

SEQ ID NO: 466234 - DNA, 230 bp, Homo sapiens
  chr11:69589517-69589747
  hyper
  lymphoid_neoplasm vs. melanoma
cgggtgtccgcgtgcgcgccgccgatgcggccgtcggggagcgcctggaggtggaagccgatgcccacgttgcagtagagccgccgcagccgcttgatgcccagcaggtagtcgccggcgccgctctggacggccgcctccttgggctgcgctgccaccggcaggcgcgccaacgagagcgccaccaggctctcccagcggcgctccagctcggcctccagcgtgccgtt

SEQ ID NO: 466235 - DNA, 212 bp, Homo sapiens
  chr11:74022468-74022680
  hyper
  lymphoid_neoplasm vs. ovary
cgcagccgcgcctcctccccgcgcaggtaccgcctcagcagccccagcagccggcgctcgggcgccagggcgcgcgccacgctggtcagcgccgagaacgtgtcgccccgagccgcagccctttctgggtctcctgtcccgagcgccagcaccgccagcagcgccgccagccgcgccccaggacccatagccagcgctcgcgaacttcccct

SEQ ID NO: 466236 - DNA, 137 bp, Homo sapiens; identical to SEQ ID NO: 359899
  chr11:74022716-74022853
  hyper
  lymphoid_neoplasm vs. ovary

SEQ ID NO: 466237 - DNA, 162 bp, Homo sapiens; identical to SEQ ID NO: 455623
  chr11:74178245-74178407
  hyper

SEQ ID NO: 466238 - DNA, 121 bp, Homo sapiens; identical to SEQ ID NO: 455624
  chr11:74178470-74178591
  hyper

SEQ ID NO: 466239 - DNA, 26 bp, Homo sapiens
  chr11:74441810-74441836
  hyper
  lymphoid_neoplasm vs. prostate
cgcatccctcctctgcccacccagcc

SEQ ID NO: 466240 - DNA, 325 bp, Homo sapiens; identical to SEQ ID NO: 462358
  chr11:74951799-74952124
  hyper
  lymphoid_neoplasm vs. melanoma,ovary,myeloid_neoplasm, head_and_neck,non_cancer

SEQ ID NO: 466241 - DNA, 67 bp, Homo sapiens; identical to SEQ ID NO: 462359
  chr11:74952057-74952124
  hyper
  lymphoid_neoplasm vs. sarcoma,anorectal,non_cancer, prostate,cervical,breast

SEQ ID NO: 466242 - DNA, 775 bp, Homo sapiens
  chr11:77184258-77185033
  hyper
  lymphoid_neoplasm vs. colorectal
cggactcggtcccggaccggtactcgtgtggcctcccggctccagcctggcctggccccgccccgccccttccctctcccaggtctctcgaatcgcccggcgtctgagacccgcgaccccgccggtacgcgcacagggggcctttgttggcccgacgggagcgggcctcgcggggcgccgcccgcctcaccttacctggcgcctcctcccgcccaggcgcccggccccgcaacgcgaaataaatgggcccagacccccactccacccgtccccacccccgcgccccagccctggcagcccgggacgcgaggggtactgggcggtaggcccgctctcaccttccgcgctcgctcagctcctctcggctcctcctcctcctcccggcggtgggtgccgcctagccgggagtgagggcgcgagtgtgcgcgagctaccgcttcactttctccctcctgccgccgccgccgcgctgcccgtggcggggctcccctcaggacaggggaactgcgagggaagggatgatgggggggcgggagggagcgaggcgacgcgggcggggggggaaggggggactgaggggcgaggtgcgaagggctcagatggcctctgaggcaggaggtggtaactggatgcggagaccaggttcctcgagggggctcacgaaagcgcggggctccgtggaaaagggaatgagagtccaagggggaaggcgtctgtgggggaggactgcagagcctgtgagggaagcgcgatgggcgagcgagggggcgggagc

SEQ ID NO: 466243 - DNA, 977 bp, Homo sapiens; identical to SEQ ID NO: 359906
  chr11:77184557-77185534
  hyper
  lymphoid_neoplasm vs. liver_bileduct

SEQ ID NO: 466244 - DNA, 240 bp, Homo sapiens; identical to SEQ ID NO: 460659
  chr11:86382607-86382847
  hyper
  lymphoid_neoplasm vs. cervical,colorectal,sarcoma

SEQ ID NO: 466245 - DNA, 63 bp, Homo sapiens; identical to SEQ ID NO: 460660
  chr11:86383105-86383168
  hyper
  lymphoid_neoplasm vs. cervical,colorectal,sarcoma

SEQ ID NO: 466246 - DNA, 20 bp, Homo sapiens
  chr11:100999022-100999042
  hyper
  lymphoid_neoplasm vs. sarcoma,melanoma
gcccccggcgggacagccgc

SEQ ID NO: 466247 - DNA, 162 bp, Homo sapiens
  chr11:100999159-100999321
  hyper
  lymphoid_neoplasm vs. sarcoma,melanoma
cggagacggcttcactggggccccggaccagtgagggctctcagaggccgggagcagcagctgccgggctggtgacaggccccggggcagcactttatgggcagctgccgtcccggagctgtctccaaccttgcacccggaccggctcatgagcggggacaa

SEQ ID NO: 466248 - DNA, 242 bp, Homo sapiens
  chr11:100999360-100999602
  hyper
  lymphoid_neoplasm vs. sarcoma,melanoma
aagttcggggccaaacaggcaccaagagctggtgacctcgcaggcgggagggctgggttggctctgcccgggacctgagggcgccaacagagtgtccaagacactgtccagcagtccgctgtccttttctgggggactagaactgctgcctccagcaccccttgtagcttcagctctggaatatgcgccctccacgtccgacagcgactgctggtcctgcgtcttttcgtcggaggggtcct

SEQ ID NO: 466249 - DNA, 757 bp, Homo sapiens
  chr11:101980831-101981588
  hyper
  lymphoid_neoplasm vs. liver_bileduct,renal
cgcccgcgttctccgcagacaccacagttcggacccggattggacccatcgtttgcggttcgcggggcagaatacggggcacgcttcgggcccctgcccggctgagcgcgggcgaagggcggaccgggccagggcgagcgggtcacgtgcggccgggagaggcgccgcgggccgggagtgtgcaggaatgtagcaacttgcagcgaaaagtttccctgcgctgccggccgggccgcggtgcgggcgggcgcgcagaggaaggaagagccgagaggaggcggggccgcggcggcgcgggcgggcgcttctcctaactttagttttggcgtttgaggcgagtttctgtctcagtcgggcgcagccgccgccagggaaaagaaagggaggaaggaaggaacaagaaaaggaaataaagagaaaggggaggcggggaaaggcaacgagctgtccggcctccgtcaagggagttggagggaaaaagttctcaggcgccgcaggtccgagtgcctcgcagcccctcccgaggcgcagccgccagaccagtggagccggggcgcagggcgggggcggaggcgccggggcgggggatgcggggccgcggcgcagccccccggccctgagagcgaggacagcgccgcccggcccgcagccgtcgccgcttctccacctcggcccgtggagccggggcgtccgggcgtagccctcgctcgcctgggtcagggggtgcgcgtcgggggaggcagaagccatggatccc

SEQ ID NO: 466250 - DNA, 536 bp, Homo sapiens
  chr11:101981099-101981635
  hyper
  lymphoid_neoplasm vs. cervical,liver_bileduct,upper_gi, anorectal,pancreas_gallbladder
cgagaggaggcggggccgcggcggcgcgggcgggcgcttctcctaactttagttttggcgtttgaggcgagtttctgtctcagtcgggcgcagccgccgccagggaaaagaaagggaggaaggaaggaacaagaaaaggaaataaagagaaaggggaggcggggaaaggcaacgagctgtccggcctccgtcaagggagttggagggaaaaagttctcaggcgccgcaggtccgagtgcctcgcagcccctcccgaggcgcagccgccagaccagtggagccggggcgcagggcgggggcggaggcgccggggcgggggatgcggggccgcggcgcagccccccggccctgagagcgaggacagcgccgcccggcccgcagccgtcgccgcttctccacctcggcccgtggagccggggcgtccgggcgtagccctcgctcgcctgggtcagggggtgcgcgtcgggggaggcagaagccatggatcccgggcagcagccgccgcctcaaccggccccccagggccaagggcagcc

SEQ ID NO: 466251 - DNA, 103 bp, Homo sapiens
  chr11:101981964-101982067
  hyper
  lymphoid_neoplasm vs. cervical,liver_bileduct,upper_gi, anorectal,pancreas_gallbladder
gagccgcggccgccagctctggtcaggggaggggggttgcgggaactctagctggggtgggggtcccgaggcgaagtggaactggagtcgtccactccgccgc

SEQ ID NO: 466252 - DNA, 37 bp, Homo sapiens
  chr11:101981598-101981635
  hyper
  lymphoid_neoplasm vs. cervical,upper_gi,anorectal,lung
cgccgcctcaaccggccccccagggccaagggcagcc

SEQ ID NO: 466253 - DNA, 612 bp, Homo sapiens; identical to SEQ ID NO: 351249
  chr11:101981964-101982576
  hyper
  lymphoid_neoplasm vs. cervical,upper_gi,anorectal,lung

SEQ ID NO: 466254 - DNA, 502 bp, Homo sapiens
  chr11:113345738-113346240
  hyper
  lymphoid_neoplasm vs. uterine,bladder_and_urothelial
tccctcctcctctccccgtgacactgagtcgcccgccgctccatccggccggtgcttaccttcaagccatagggcgcccgggggcagagacggcgccggctgcttgaggcttccagctcccgccgcatccacgcgcggccgcccctccggcagccgtccggggccgccactctcctcggccggtccctggctcccggccccgccgcgccgttcagagccccggcgggcagcagctcggccggctctggcccgcggggagcagtggacgggccgcggcggggcggggcggggcggggccgggcgcggggcgggcgggcaggagggagcgcggggacggggcggaggcggcgcggtgcgcgcgtgaggctgccggttcggcactgaagctggacagctctgcggcgcccgagcgcggggagcgcgggagggaggtgccccggtccccgcccctgagacaggccccgcccccgccccccaccaaaggagctgtacctcctcggcg

SEQ ID NO: 466255 - DNA, 41 bp, Homo sapiens
  chr11:115374753-115374794
  hyper
  lymphoid_neoplasm vs. melanoma
tgggtgcagccatccctggggactctcattcacacttagcc

SEQ ID NO: 466256 - DNA, 239 bp, Homo sapiens
  chr11:115374753-115374992
  hyper
  lymphoid_neoplasm vs. sarcoma
tgggtgcagccatccctggggactctcattcacacttagccgggcaggggagaaggggctcacagatgccctcagccccttccctctcagccctgagtttcctctccacactccctccgcttcggatgtaggaagtggggggaggttgtcatggaaacgtttcccccctctgtggccaaggctactggggtgccttcggagatttaggggccaaccggtcggtgcccacacctacctgt

SEQ ID NO: 466257 - DNA, 122 bp, Homo sapiens
  chr11:115374870-115374992
  hyper
  lymphoid_neoplasm vs. sarcoma,uterine,prostate, liver_bileduct,myeloid_neoplasm
cgcttcggatgtaggaagtggggggaggttgtcatggaaacgtttcccccctctgtggccaaggctactggggtgccttcggagatttaggggccaaccggtcggtgcccacacctacctgt

SEQ ID NO: 466258 - DNA, 399 bp, Homo sapiens; identical to SEQ ID NO: 452805
  chr11:115375434-115375833
  hyper
  lymphoid_neoplasm vs. sarcoma,uterine,prostate, liver_bileduct,myeloid_neoplasm

SEQ ID NO: 466259 - DNA, 399 bp, Homo sapiens; identical to SEQ ID NO: 452805
  chr11:115375434-115375833
  hyper
  lymphoid_neoplasm vs. bladder_and_urothelial,renal, uterine,breast,liver_bileduct,prostate

SEQ ID NO: 466260 - DNA, 301 bp, Homo sapiens; identical to SEQ ID NO: 347181
  chr11:115375894-115376195
  hyper
  lymphoid_neoplasm vs. bladder_and_urothelial,renal, uterine,breast,liver_bileduct,prostate

SEQ ID NO: 466261 - DNA, 752 bp, Homo sapiens; identical to SEQ ID NO: 359945
  chr11:119455153-119455905
  hyper
  lymphoid_neoplasm vs. upper_gi,multiple_myeloma

SEQ ID NO: 466262 - DNA, 224 bp, Homo sapiens
  chr11:120110626-120110850
  hyper
  lymphoid_neoplasm vs. cervical,ovary, pancreas_gallbladder
cgccactccgggcgcggtgaggaggtgctgccaggctgggttggagcaggcaggtgttccgcgggatcgagacccgccccggcagcacccccggccccctccccaggtccccagctccatgtatgcaaatcactgctttgcatgggcctggggccaggcgcggggctcctgccagggggcgtggccggcggcccccgccccgcgccgcgtgctcacctggggag

SEQ ID NO: 466263 - DNA, 155 bp, Homo sapiens; identical to SEQ ID NO: 351262
  chr11:120110967-120111122
  hyper
  lymphoid_neoplasm vs. cervical,ovary, pancreas_gallbladder

SEQ ID NO: 466264 - DNA, 418 bp, Homo sapiens
  chr11:123524977-123525395
  hyper
  lymphoid_neoplasm vs. uterine
cagccccgcggctcctgcttcgtccgccctaactgcttctccagctgggcgtgaccccactcccgaagccgccggggccgcccgtctgggctacagaatgcgttccacgtcggtcccgtccacgcccgccctcggctccctggggaggtgcagcggggccgggaaggaagcggcagctcccgttcggccggcgatgtcagaggttggggggtgggtgtagaggcggagccccttcccgggagctcgcccccggatggtgcggggccccgaccctgggtggcaggtgatcagcaacccttctctaggcccccaggccgtgtgtgctgtcagccctgacatgcgcaggcggctctccgccaccaccaccgccccggaccctccccctagtgcacactccccaccccctgatgggcgtgcc

SEQ ID NO: 466265 - DNA, 137 bp, Homo sapiens; identical to SEQ ID NO: 359958
  chr11:123525473-123525610
  hyper
  lymphoid_neoplasm vs. uterine

SEQ ID NO: 466266 - DNA, 6 bp, Homo sapiens
  chr11:124738440-124738446
  hyper
  lymphoid_neoplasm vs. multiple_myeloma
cggcct

SEQ ID NO: 466267 - DNA, 618 bp, Homo sapiens
  chr11:124932779-124933397
  hyper
  lymphoid_neoplasm vs. cervical
cgagattagtcatgcagggccgctgagtgtgacttccagccctccagcgtctcgtgtcccgcccgtgtcggagcccatggctttttaggacaggaagcgctgcggggtagtgcgggcaggcaggcacgtcacaccggacagcgtcgagattgctgctttcggttccccagcgggtggtgaggcagaaagtgcagggcggaatgaggagccccagcacctcagagctgtcgggcagtggcggggaagcaaagcacaggagcgctgtggtgccagcggccgggctagggacgactggcgggtttgcgctggacccgaccccgagggcgggcgcaagggggcgggcgctgccgtactcaggccgcggggccagggcgggccggccggcggggcatttaaaccccgctgacagccagtccagcccgggacacgcgcccagctctgtagcctcctccgtcgactcagccttaggtaccggtcaggcaaaatgcggtcctccctggctccgggagtctggttcttccgggccttctccagggacagctggtgagcggggcaggggagggaggcgtgccgggacctcctgggctcggggcttgcaggggccgcggggggcctcgg

SEQ ID NO: 466268 - DNA, 544 bp, Homo sapiens
  chr11:129148497-129149041
  hyper
  lymphoid_neoplasm vs. liver_bileduct,melanoma,upper_gi, lung,colorectal,head_and_neck,breast,renal,anorectal, bladder_and_urothelial,sarcoma,pancreas_gallbladder,thyroid, myeloid_neoplasm,uterine,non_cancer,prostate,ovary
cgtcgtccaacatgcagcggcaacttcagtcaatcggaaagacgaggggggaactccacgggagcctaagggagcagagacctctggccccgcggggcccacgcacacctgggggcgggacccgcgatgtcgcccgcgggcagcggagggaaacgctcccgcggctcctccgggagcgccggtgtccctggagcccccactcggccgctcccaggagtcgcggctgccgcccgccttgggcccggggcggagagcgctgcggcaggccagaacgccgtccgaacgcccggctcgcggaggccgcggggagcgcggggcgcgggcgcgggaggcggtgggcccgcagcgccgtccgccccgggaggccggggagatggggccgggggcggggggacaaccgagaggctcctccgggagcatgcgatccggaaccctcactctaaaaagaatattttaagaaggaaagagaggccccccgcagccttccccgcggggcctgcccacgtcaccggcgcccccggccctcccgcgcgcccgccttacc

SEQ ID NO: 466269 - DNA, 361 bp, Homo sapiens
  chr11:129149096-129149457
  hyper
  lymphoid_neoplasm vs. liver_bileduct,melanoma,upper_gi, lung,colorectal,head_and_neck,breast,renal,anorectal, bladder_and_urothelial,sarcoma,pancreas_gallbladder,thyroid, myeloid_neoplasm,uterine,non_cancer,prostate,ovary
cgtgtctgccctccgcgggccgggcccgacgccctccgcccgccgccgccgccgccgagcgccgcccgcgccgccgagcctagcgcctggccgccgagggcagccgcgggggctcggccgggcgtcccccgcgccagcgcctcatcccgcctcgcgccccgtcaggctcgggggcgggggcgccgggccgcggcctccaagtccccacctccggcacgcaccgcgctcgccctcccgcggcggagtcggcccccggggacgcgggtcctcgggctccagagcctctcaccctgacgccttcgggccgcccccgcagcgcccccgcccagctggccggcgcgtgcccccgccggagcccgcc

SEQ ID NO: 466270 - DNA, 68 bp, Homo sapiens
  chr11:129148973-129149041
  hyper
  lymphoid_neoplasm vs. bladder_and_urothelial, head_and_neck,prostate,upper_gi,breast,ovary,colorectal, anorectal,thyroid,uterine,lung,pancreas_gallbladder,non_cancer, renal,cervical,sarcoma,liver_bileduct,melanoma
cgcagccttccccgcggggcctgcccacgtcaccggcgcccccggccctcccgcgcgcccgccttacc

SEQ ID NO: 466271 - DNA, 820 bp, Homo sapiens; identical to SEQ ID NO: 345406
  chr11:129149096-129149916
  hyper
  lymphoid_neoplasm vs. bladder_and_urothelial, head_and_neck,prostate,upper_gi,breast,ovary,colorectal, anorectal,thyroid,uterine,lung,pancreas_gallbladder,non_cancer, renal,cervical,sarcoma,liver_bileduct,melanoma

SEQ ID NO: 466272 - DNA, 16 bp, Homo sapiens
  chr11:133827440-133827456
  hyper
  lymphoid_neoplasm vs. thyroid
aaacgtgatgcagacc

SEQ ID NO: 466273 - DNA, 242 bp, Homo sapiens
  chr11:134201549-134201791
  hyper
  lymphoid_neoplasm vs. colorectal,ovary,upper_gi,thyroid, non_cancer,prostate,renal,breast,lung,cervical,head_and_neck, bladder_and_urothelial,pancreas_gallbladder
agcagaaagacggcggactctgcaccgctccacgacactggggacccgccccggccagacccgtcccctaccgagaccttgtccccgccccgcccccggccggggccccgccccgccagccccgcccccgccagccccctctcctaccgagacctcgtccccgcccaccagccccgccccgccccccccccgacagaggccccgccccggccccggccagccccgcccccgcttgcgcgagg

SEQ ID NO: 466274 - DNA, 236 bp, Homo sapiens; identical to SEQ ID NO: 345409
  chr11:134202154-134202390
  hyper
  lymphoid_neoplasm vs. colorectal,ovary,upper_gi,thyroid, non_cancer,prostate,renal,breast,lung,cervical,head_and_neck, bladder_and_urothelial,pancreas_gallbladder

SEQ ID NO: 466275 - DNA, 73 bp, Homo sapiens; identical to SEQ ID NO: 351280
  chr11:134281810-134281883
  hyper
  lymphoid_neoplasm vs. multiple_myeloma

SEQ ID NO: 466276 - DNA, 91 bp, Homo sapiens
  chr12:2161370-2161461
  hyper
  lymphoid_neoplasm vs. uterine
cgtgctcggctgcctccaaggaattattaaacctgggtctaggaatctgttcagacatctgggcaccgctgcctcgcctaccaggctccgc

SEQ ID NO: 466277 - DNA, 768 bp, Homo sapiens
  chr12:3186011-3186779
  hyper
  lymphoid_neoplasm vs. pancreas_gallbladder, liver_bileduct
cgcgctgtcagcatctcgcacagtccgcccgaaacaccagggaaggggttcgtaggtgtgggggtggggtggcgaggccaggcagcctggcgcgagggagagagccgaggcctgggccaggaaggcccttgggtgccgtgtgggcgcagagcccaggagagcgcactgccaggcccggacctccccgcccctaccccgggaagaggcccgttcgccgcagggggaaggcgggatcatagcacctcggaggagcggccggtccgggcatgcgggcggcggggcggggagggaggcttccggaaccccgagagagcacccgtgcctcgcgggccccgtgccccgtccccgggctccccttcctctaacgcaggggacccagcccggggcagtgccgggcactggcgctggcgccccgctcagccctgcgatccttctccgccccgcccctccccgctccgccccgcccctccccgctccgcccccgggccgccccgccccgcaggctcgccattcccgggcaggccccgccccctgtttccgctggcggcggcggcggcggcggtgccggagcgcgagcagagcggagacccccaggtcctgcgggcgcggtgagtgcggcccgggcggcgggcggcgaggcgggtctcgagagcgtgcggagtcgcgcggccttgagccggcgccgggcgggctgggcacccccaggccgagacccgagaagggggagcggccgggggcgcccacgggaggcagtgtgggcagggcggc

SEQ ID NO: 466278 - DNA, 773 bp, Homo sapiens; identical to SEQ ID NO: 351295
  chr12:3186287-3187060
  hyper
  lymphoid_neoplasm vs. liver_bileduct,cervical,colorectal, upper_gi

SEQ ID NO: 466279 - DNA, 198 bp, Homo sapiens; identical to SEQ ID NO: 347198
  chr12:3600534-3600732
  hyper
  lymphoid_neoplasm vs. multiple_myeloma,melanoma

SEQ ID NO: 466280 - DNA, 235 bp, Homo sapiens
  chr12:3600534-3600769
  hyper
  lymphoid_neoplasm vs. multiple_myeloma,sarcoma
ggggagggggtcgggggcacgagaagaacttgaaaccgtgtgaaggaatccggagcagatgagaagggaggaaaataaaagaaagtggagactgcagaacagactccgctgtggctgactgtgccggccgacgctccagctgaggggctgggttggatttttttttttctcccatcctctcgctctctcttttaaagcgacaccagctctctctcctcctctactatctcggtat

SEQ ID NO: 466281 - DNA, 6 bp, Homo sapiens
  chr12:3600982-3600988
  hyper
  lymphoid_neoplasm vs. multiple_myeloma,sarcoma
tctgcc

SEQ ID NO: 466282 - DNA, 153 bp, Homo sapiens
  chr12:4140253-4140406
  hyper
  lymphoid_neoplasm vs. multiple_myeloma,colorectal, cervical,renal
cgcagcaatgcgcctccaagccgggcccaggccgagcgcctctcgccgccgcgcacattccggagggggaccgcggggctcaaagggcctgcggcgtaggtggctcagccctttccttggctttccctccagggccatacttgccgaaaccca

SEQ ID NO: 466283 - DNA, 242 bp, Homo sapiens
  chr12:6472613-6472855
  hyper
  lymphoid_neoplasm vs. pancreas_gallbladder,colorectal
ggaagccgatcttccagtccttccagtccacctgggggttgttgtcccgcaagctggaggccacgctacgggctcgacgggccccgtgaggcgggggcgggaccctcaggcgctgcaaggggtgcggcagagtcccccgcaggtcgcgacggctgcgggagccggccacgagagtggtgaaggagctgtatttgtacaggtcaaagagcgtctgctctgtgatgcggtccagctcctccagc

SEQ ID NO: 466284 - DNA, 95 bp, Homo sapiens
  chr12:6472900-6472995
  hyper
  lymphoid_neoplasm vs. pancreas_gallbladder,colorectal
caggccaggggccctggagcgagtgtctggcccctccggggtcagggtcctcatctgtgccccgggaggccggtccatcccggagaagcctgggc

SEQ ID NO: 466285 - DNA, 4 bp, Homo sapiens
  chr12:6473162-6473166
  hyper
  lymphoid_neoplasm vs. pancreas_gallbladder,colorectal
gccc

SEQ ID NO: 466286 - DNA, 805 bp, Homo sapiens
  chr12:15941612-15942417
  hyper
  lymphoid_neoplasm vs. upper_gi
cgagggggtaaacgggggtgggaccctgccctaaagggtcattttgaaaagaacccctccccatttgaggcgggttggcagagcagcgcacaaatcccaagtctaacgtaataagccgagatcgggatactcggtctgcagtcgccccacggaccagatgagcgcaggtgtatctgcggaagctcaggttaccatgaatatcactgggccacggcgaaccctccctgcccagcctcccggagccctgggcgcgggtctgcacgggccccacagcttgcccggacccggcgagcggacgcctccggccgcagcgccctaccgcacctggctgccaacaccagttgaaagcagtcaaagtgaagggaggcggacgcggctcctggcaccgctccgattccagcacacaaaggcggatttttaaaatcgagaaagtcaaagccgccggaccccgggaccggcgcctttcgccaaggggctcttacctcggatccgccctcggggccacggctttccccggagacgccgcgagcccagacgaggtgggaggggaccgggagaaagccccccaatctgattcgcgcccagccagtcgtccgcgagccgcggagccgccttctgcacccagctaaagagcagcgatctccgaggcgagcacagcgccggcctcgcgccgggcgagaccgcctcgctagctgctgcctgtgaagtctggagccgcccgcccgctcgcagccagtgccaaccgcgcgccgcgcatgcccagtgcccgcgcgaggaacgagcgagcgggcgggcgggcgagtgc

SEQ ID NO: 466287 - DNA, 804 bp, Homo sapiens; identical to SEQ ID NO: 351321
  chr12:15941918-15942722
  hyper
  lymphoid_neoplasm vs. cervical,anorectal

SEQ ID NO: 466288 - DNA, 74 bp, Homo sapiens
  chr12:19282260-19282334
  hyper
  lymphoid_neoplasm vs. upper_gi,ovary,cervical,lung,renal, thyroid,colorectal,pancreas_gallbladder,prostate,breast, melanoma,non_cancer,head_and_neck,liver_bileduct,sarcoma, bladder_and_urothelial,myeloid_neoplasm
cgctgtgtttttgttgtttgaaagagagaaatcaggggcttgggcattattaggctccctttgatcgcgccctg

SEQ ID NO: 466289 - DNA, 772 bp, Homo sapiens; identical to SEQ ID NO: 345419
  chr12:19282363-19283135
  hyper
  lymphoid_neoplasm vs. upper_gi,ovary,cervical,lung,renal, thyroid,colorectal,pancreas_gallbladder,prostate,breast, melanoma,non_cancer,head_and_neck,liver_bileduct,sarcoma, bladder_and_urothelial,myeloid_neoplasm

SEQ ID NO: 466290 - DNA, 569 bp, Homo sapiens
  chr12:19282635-19283204
  hyper
  lymphoid_neoplasm vs. sarcoma,liver_bileduct, myeloid_neoplasm,lung,thyroid,prostate,renal,ovary,melanoma, breast,head_and_neck,pancreas_gallbladder, bladder_and_urothelial,upper_gi,colorectal,non_cancer
cgcgctcgctccgcgctcccttcgctcgctcgttccctcctccctcggcagccgcggcggcagcaggagaaggcggcggcggcggctagggatcagacatggcggcggatctgaacctggagtggatctccctgccccggtcctggacttacgggatcaccaggggcggccgagtcttcttcatcaagtaaagagccggggacggcacgggggcccgcgggggcgggagggcaggaggcgggcggctggcgacacgggggagagcccgggtctgtgctcctgcagcccctcggctcgcccccgcgtcccctctcacgctccgtgtctgccccttctctcacccctgcagcgaggaggccaagagcaccacctggctgcaccccgtcaccggcgaggcggtggtcaccggacaccggcggcagagcacaggtaacgccgggcccaaacggagttgggctccgcctggaggaggcggcagagcccgggccgcccggctccccgcaacctgccccgcgccgcgggccccgggaggcggcgaggcggggcggaggccgggcgggagcggccgc

SEQ ID NO: 466291 - DNA, 144 bp, Homo sapiens; identical to SEQ ID NO: 347219
  chr12:19283425-19283569
  hyper
  lymphoid_neoplasm vs. sarcoma,liver_bileduct, myeloid_neoplasm,lung,thyroid,prostate,renal,ovary,melanoma, breast,head_and_neck,pancreas_gallbladder, bladder_and_urothelial,upper_gi,colorectal,non_cancer

SEQ ID NO: 466292 - DNA, 58 bp, Homo sapiens
  chr12:19283146-19283204
  hyper
  lymphoid_neoplasm vs. upper_gi,lung,melanoma,renal,ovary, head_and_neck,pancreas_gallbladder,sarcoma
cgcgccgcgggccccgggaggcggcgaggcggggcggaggccgggcgggagcggccgc

SEQ ID NO: 466293 - DNA, 250 bp, Homo sapiens
  chr12:19283425-19283675
  hyper
  lymphoid_neoplasm vs. upper_gi,lung,melanoma,renal,ovary, head_and_neck,pancreas_gallbladder,sarcoma
ggtgacccccagctgccgtcttgccccccagcaatcttcaggcagtccttacccactcccctccctgcagccccggaccccgatcgcccgccgggataacgtaaccacatcctccccctcctcccaggagcgctgcctcctgccgtgcagcttcctcctcctaggtgggacttgtgggtaggtggctgatgaaggaggaggaggaggaggagaggagttcgggggtgctgcgatcctctctgtgacaggg

SEQ ID NO: 466294 - DNA, 226 bp, Homo sapiens; identical to SEQ ID NO: 351327
  chr12:19283783-19284009
  hyper
  lymphoid_neoplasm vs. upper_gi,lung,melanoma,renal,ovary, head_and_neck,pancreas_gallbladder,sarcoma

SEQ ID NO: 466295 - DNA, 192 bp, Homo sapiens
  chr12:33049135-33049327
  hyper
  lymphoid_neoplasm vs. liver_bileduct,renal,cervical
cgcaccagtgaggggcgcggaccggcggagtagaaaaagaaaggggtgaaatcttgaagtgagttagttaacattgatagatatgtacaatatttaatatacataggtacctatatgacaaagctgagtaataggttatggaaaagagtgctttccacaagcaagtcggtcataccgaagacggcgagcaac

SEQ ID NO: 466296 - DNA, 235 bp, Homo sapiens
  chr12:33049390-33049625
  hyper
  lymphoid_neoplasm vs. liver_bileduct,renal,cervical
tgaccgggtgtggggcagggggcggcgccggggagcggcgggctccactcaccgttgcccacggagctgcggcccttccgggcgagggtctgctgcacctgctcctggatccgcaggctcttgactgtctggccgccgcggccgctgctccccgccagcttcagcttggcctcggagggcagcgccaggctggagctgtccagttgtcccaggatctgctggcccaggacggtcc

SEQ ID NO: 466297 - DNA, 316 bp, Homo sapiens; identical to SEQ ID NO: 351334
  chr12:33049652-33049968
  hyper
  lymphoid_neoplasm vs. liver_bileduct,renal,cervical

SEQ ID NO: 466298 - DNA, 124 bp, Homo sapiens
  chr12:33049501-33049625
  hyper
  lymphoid_neoplasm vs. upper_gi
cgcaggctcttgactgtctggccgccgcggccgctgctccccgccagcttcagcttggcctcggagggcagcgccaggctggagctgtccagttgtcccaggatctgctggcccaggacggtcc

SEQ ID NO: 466299 - DNA, 350 bp, Homo sapiens
  chr12:33049652-33050002
  hyper
  lymphoid_neoplasm vs. upper_gi
cgggggctgccatggggccggtgggggcgaccgagctgctcgcctgcctctggactcgcgggcgaagccgccacggagctgggggcgctggcgcgagccccgccccgctcgagtccggccccgcccctggcccgccccccgcgccggtgagaggcccgggccgggggggagctcggcctcgtgggccggacgcccggccttccctgaggagggggcgcggctccggccgggcacgcgcagtcgggcccgggggcgggggcgggggcgggccggacccgctgagcgcgcggacacctggagacttgtacccgcccgcggggaggtggggagaggggcgcggttcgcctggg

SEQ ID NO: 466300 - DNA, 76 bp, Homo sapiens; identical to SEQ ID NO: 372973
  chr12:33050245-33050321
  hyper
  lymphoid_neoplasm vs. upper_gi

SEQ ID NO: 466301 - DNA, 195 bp, Homo sapiens
  chr12:53342685-53342880
  hyper
  lymphoid_neoplasm vs. liver_bileduct, pancreas_gallbladder,head_and_neck
cgtgtccatgcccggttggccaccccgtttctggggggtgagcggggcttggcagggctgcgcggagggcgcgggggtggggcccggggcggagcggcccggggcggagggcgcgggctccgagccgtccacctgtggctccggcttccgaagcggctccggggcgggggcggggcctcactctgcgatataact

SEQ ID NO: 466302 - DNA, 39 bp, Homo sapiens
  chr12:53342911-53342950
  hyper
  lymphoid_neoplasm vs. liver_bileduct, pancreas_gallbladder,head_and_neck
tcgtccgcaaagcctgagtcctgtcctttctctctcccc

SEQ ID NO: 466303 - DNA, 303 bp, Homo sapiens
  chr12:54332438-54332741
  hyper
  lymphoid_neoplasm vs. bladder_and_urothelial
cgtgcgcagagcgggtcacgtgggcgcgggaggggtgctgagaggtggagagcgggagccggcggatttcttaatgaagtgtctccgcatgcgtagagggaatgtagggagggaggtggaagcactaggaggaggggaggggtggagagaaaagaggggagggatggggggaggggaaacaggagcgaggtgtctccctagctcgctgcctctggcaagtggagtttttaaaaagctccagcagatcatgtcatgacgacttcgctgctcctgcatccacgctggccggagagccttatgtac

SEQ ID NO: 466304 - DNA, 182 bp, Homo sapiens; identical to SEQ ID NO: 459384
  chr12:54366668-54366850
  hyper
  lymphoid_neoplasm vs. sarcoma

SEQ ID NO: 466305 - DNA, 18 bp, Homo sapiens
  chr12:54387801-54387819
  hyper
  lymphoid_neoplasm vs. cervical
cgggaggaagaaaaggca

SEQ ID NO: 466306 - DNA, 251 bp, Homo sapiens
  chr12:54388354-54388605
  hyper
  lymphoid_neoplasm vs. cervical
aggccctgcacgcctctgcagctgccgggccgtgtccgggacgtctgaactgaggccgaccaatggtcacagcatgaaaaataaatgcaatggaaggtctttctgtcttttcttttccgcgtaaaaggtcctttcttttttctctctttcggatatacctggatttggtccagaccaggttgcccgcgggagggccccgcgagcggcagcgcgcgagggagggagagagagggagggcgagaaggagggag

SEQ ID NO: 466307 - DNA, 104 bp, Homo sapiens; identical to SEQ ID NO: 464141
  chr12:54393256-54393360
  hyper
  lymphoid_neoplasm vs. breast

SEQ ID NO: 466308 - DNA, 60 bp, Homo sapiens
  chr12:56882380-56882440
  hyper
caagctgaggcgaagccggtgggggcgggaggcgctccccgggaacaccgtggggctgcg

SEQ ID NO: 466309 - DNA, 217 bp, Homo sapiens
  chr12:59313943-59314160
  hyper
  lymphoid_neoplasm vs. upper_gi
cagcgcgccccagcaccgcgcacagcagcagccccaaccccgcggcgcgcgcacggaggctcggcgcgctcatcgcggtccagcggcctaggtctctacccgaagctcccagccggcgcgcgctcggggcccggcacaaacttccagccgagggtgcacgcccgccctcgcggtcgcgtgcgcgctcctccctcgcgctgcccggtcaattccttct

SEQ ID NO: 466310 - DNA, 341 bp, Homo sapiens; identical to SEQ ID NO: 360136
  chr12:59314189-59314530
  hyper
  lymphoid_neoplasm vs. upper_gi

SEQ ID NO: 466311 - DNA, 74 bp, Homo sapiens
  chr12:63327114-63327188
  hyper
  lymphoid_neoplasm vs. upper_gi
cgggaaccaagcctgccccggggtatccgggccaccagaacagggtcagcatcaaggcgcccaggcattggaag

SEQ ID NO: 466312 - DNA, 552 bp, Homo sapiens
  chr12:63327326-63327878
  hyper
  lymphoid_neoplasm vs. upper_gi
tccctggttcattaataaccttgaattctattctaaatgtctcctagttttcccgtttcgtacagctgaggtagtagatagaagggaaaacgttacttatcttaccattcataagatggttattaatagtcagtggaaaagtggccatggagctgggggaagggcaataaaatcctccacctctcctttcccgattccactctgggtcgtcaacctaactcagtcggttcctgaaatagctgatcagtcaaacgcaagcttaatcaccaaagcggattaccaaaatgttatattagacagttggaataagtttccccctccccaagggctgagggaaatagtactggcatttaccgaaagcgcagcattttactacctgctaaaggagaagcggaggaactcgcgggctgaaagtgagagaaactgagaccttcggaaatgtacaaccacgcactcggacacggccacctcccggaatcggacacaagctcccaggcgcagtgacatctcctccaagcctccacccccataaactcttcatcacgcgggggc

SEQ ID NO: 466313 - DNA, 112 bp, Homo sapiens; identical to SEQ ID NO: 360140
  chr12:63545006-63545118
  hyper
  lymphoid_neoplasm vs. non_cancer,myeloid_neoplasm, thyroid

SEQ ID NO: 466314 - DNA, 41 bp, Homo sapiens; identical to SEQ ID NO: 351387
  chr12:66136243-66136284
  hyper
  lymphoid_neoplasm vs. myeloid_neoplasm,anorectal, multiple_myeloma,thyroid,non_cancer,sarcoma,uterine,ovary

SEQ ID NO: 466315 - DNA, 123 bp, Homo sapiens
  chr12:66217380-66217503
  hyper
  lymphoid_neoplasm vs. colorectal,pancreas_gallbladder
cggttgcctctagtctttcctggagaaaaaagttcaatgaagaagctggggcgctctgtgtgtgcacattgtttgcatgtgtctgcgaatgtgcatgtctatctgcgtgcctgtgtgtatgtg

SEQ ID NO: 466316 - DNA, 238 bp, Homo sapiens
  chr12:66217650-66217888
  hyper
  lymphoid_neoplasm vs. colorectal,pancreas_gallbladder
gagggcattccgaggcggagtacggctgtcaggggacctctcccactccactgcagtcccttcccactcacagtgaaccggtgcgctgcctgaggtgcagcctagacgcttcctgcaaagtgttggctcggcacggtagaggcgcaggtaaaggccaagccccgaaacgtggctccgggacagtcacgttcccgcgccttcccaggacaactgcccaggggtgacctcgagaggcggg

SEQ ID NO: 466317 - DNA, 208 bp, Homo sapiens; identical to SEQ ID NO: 360145
  chr12:66217920-66218128
  hyper
  lymphoid_neoplasm vs. colorectal,pancreas_gallbladder

SEQ ID NO: 466318 - DNA, 236 bp, Homo sapiens
  chr12:66218548-66218784
  hyper
  lymphoid_neoplasm vs. sarcoma
cgcagggtggggggaagaggaggaggaattctttccccgcctaacatttcaagggacacaattcactccaagtctcttccctttccaagccgcttccgaagtgctcccggtgcccgcaactcctgatcccaacccgcgagaggagcctctgcgacctcaaagcctctcttccttctccctcgcttccctcctcctcttgctacctccacctccaccgccacctccacctccggcac

SEQ ID NO: 466319 - DNA, 97 bp, Homo sapiens
  chr12:66219327-66219424
  hyper
  lymphoid_neoplasm vs. sarcoma
gccccggggcgccagcaaccctccgggcggggaggtggggagccgcggcgggcggcccggggaaggcgggaggtggggtcgggcgaagcgcgtcctc

SEQ ID NO: 466320 - DNA, 362 bp, Homo sapiens
  chr12:66219327-66219689
  hyper
  lymphoid_neoplasm vs. melanoma
gccccggggcgccagcaaccctccgggcggggaggtggggagccgcggcgggcggcccggggaaggcgggaggtggggtcgggcgaagcgcgtcctcggactttcgctattgtgcacggccccgagtggcgcggtgtcgcccagtgactggaagcgaccgggatccgacaaacccgggctcgcaggcgctttccgagttgcttttgcaactgcccgggaggaaggaggtgccggggacccgggcgcttcggccgatctgggctgaaggggctagagtcttgggggccggaggctctttctcccgcctcccggggctgctcgcgggtcgggggctggcgcgccgcagccgcccccttggcgcc

SEQ ID NO: 466321 - DNA, 258 bp, Homo sapiens
  chr12:66219431-66219689
  hyper
  lymphoid_neoplasm vs. upper_gi
cgctattgtgcacggccccgagtggcgcggtgtcgcccagtgactggaagcgaccgggatccgacaaacccgggctcgcaggcgctttccgagttgcttttgcaactgcccgggaggaaggaggtgccggggacccgggcgcttcggccgatctgggctgaaggggctagagtcttgggggccggaggctctttctcccgcctcccggggctgctcgcgggtcgggggctggcgcgccgcagccgcccccttggcgcc

SEQ ID NO: 466322 - DNA, 119 bp, Homo sapiens; identical to SEQ ID NO: 360147
  chr12:66220194-66220313
  hyper
  lymphoid_neoplasm vs. upper_gi

SEQ ID NO: 466323 - DNA, 127 bp, Homo sapiens
  chr12:69326527-69326654
  hyper
  lymphoid_neoplasm vs. myeloid_neoplasm,thyroid,anorectal, non_cancer,prostate,cervical,bladder_and_urothelial,breast, head_and_neck
cgcttccatcccttcctggcggtggtagttgaaatccagcgcagctaccaaaggcagcaacagccctagccagaggcacgggaagtccatgttctagagatgaataaaaataagaagaacctgagaa

SEQ ID NO: 466324 - DNA, 208 bp, Homo sapiens
  chr12:71833930-71834138
  hyper
  lymphoid_neoplasm vs. pancreas_gallbladder,upper_gi, colorectal,head_and_neck
ctcccaggtctggtgtgttgctgaggggctgccccacacactgtcattgcgagcccgacggcaggatgttgctcagggtggactgctccgacctggggctctcggagctgccttccaacctcagcgtcttcacctcctacctgtaagtacttccccacgtcactccgggagagagactaagaggggaaggaaggttcgtccaaggcga

SEQ ID NO: 466325 - DNA, 2 bp, Homo sapiens
  chr12:71834289-71834291
  hyper
  lymphoid_neoplasm vs. pancreas_gallbladder,upper_gi, colorectal,head_and_neck
tc

SEQ ID NO: 466326 - DNA, 208 bp, Homo sapiens; identical to SEQ ID NO: 466324
  chr12:71833930-71834138
  hyper
  lymphoid_neoplasm vs. pancreas_gallbladder

SEQ ID NO: 466327 - DNA, 486 bp, Homo sapiens
  chr12:71834289-71834775
  hyper
  lymphoid_neoplasm vs. pancreas_gallbladder
tcgagtgcaacccgggaaagcgctgctgcgccgcagcttcccagtccagcgctagaaacatcgcagggcgaattcctgcaaatgcaggcatttgcgtgcggagtggacatttgtgacccagagcctggtacccaaaggcaggctgccatctggtccccgccccaaccgcctctctgcgtctagtcgcattccacgaaaagatggtctgtagaaagtttccccaaaggagaaacaacttgcccagctccaaagggtttttagtctgcatcccttgcactgtgacgtgatgtaacctttttggggttttttcctcttttcctcccttccttcctcccttcttccttccttccctccctcctttctttttattttctttcttttttaacggcgtgattaaaatgtggcaaccacaaaccccgattagagctgccagaacgttatctttacctttggctgcccgcgccgccctttgaagtgcccgcggcc

SEQ ID NO: 466328 - DNA, 3 bp, Homo sapiens
  chr12:75603494-75603497
  hyper
  lymphoid_neoplasm vs. multiple_myeloma
gcc

SEQ ID NO: 466329 - DNA, 386 bp, Homo sapiens
  chr12:81330352-81330738
  hyper
  lymphoid_neoplasm vs. liver_bileduct
gggactagagggtgtcctcctctgcagagccgtaggactcgagcgccttcatcactggacgctggagccaggaaggaaacccacacactcagggacaggtataaccccacaggggtgcaccagtgaggccccgatcgcagcggaggactccatccctgagcttgtgagggcgtcctggggaggaagcgaacactttccccgttcaagtcagagagcaggactcactgggtggcaggtcagaagttgaattttaacccgacctgcgctttgtccccgcgccttccgcagcctgggcgccgcggtggcaccgagctgggagaggacacgagaggctggcgcgggagaagccgagagttgctatcgaccgggagctgccggcggcggga

SEQ ID NO: 466330 - DNA, 187 bp, Homo sapiens
  chr12:81330551-81330738
  hyper
  lymphoid_neoplasm vs. liver_bileduct
cgttcaagtcagagagcaggactcactgggtggcaggtcagaagttgaattttaacccgacctgcgctttgtccccgcgccttccgcagcctgggcgccgcggtggcaccgagctgggagaggacacgagaggctggcgcgggagaagccgagagttgctatcgaccgggagctgccggcggcggga

SEQ ID NO: 466331 - DNA, 225 bp, Homo sapiens; identical to SEQ ID NO: 351393
  chr12:81331319-81331544
  hyper
  lymphoid_neoplasm vs. liver_bileduct

SEQ ID NO: 466332 - DNA, 313 bp, Homo sapiens; identical to SEQ ID NO: 457453
  chr12:81331319-81331632
  hyper
  lymphoid_neoplasm vs. bladder_and_urothelial

SEQ ID NO: 466333 - DNA, 369 bp, Homo sapiens
  chr12:82152624-82152993
  hyper
  lymphoid_neoplasm vs. multiple_myeloma
cgcggcgccgctccccctccgcgcccgggccacccggggtgtgtggggcgtccctccaaaagaaagcttggagaaaaggcgtgagaagtatctgggagagaagttctccacccagtctcccctcctggagcccctctggagtttaaggctaaccctgggagttagaaacctaaaggaaaacgagtccctagggatgcaaaaagcaggacaggtctcctcctggcccccagcctgtttccgcgcgctcccgtgtctcgtttcacttaaaggaggcgctttttctctggaaaggcaaacatcaccccacgccgtcccccggccccccttccctcccccccgccgcccccccgccgccacagcacacacacc

SEQ ID NO: 466334 - DNA, 4 bp, Homo sapiens
  chr12:82153478-82153482
  hyper
  lymphoid_neoplasm vs. multiple_myeloma
gaac

SEQ ID NO: 466335 - DNA, 88 bp, Homo sapiens; identical to SEQ ID NO: 360168
  chr12:85674884-85674972
  hyper
  lymphoid_neoplasm vs. melanoma

SEQ ID NO: 466336 - DNA, 294 bp, Homo sapiens
  chr12:88973866-88974160
  hyper
  lymphoid_neoplasm vs. liver_bileduct
cggctcggctcgggatcacacaccacgccggcctcccccgcatcctcttgtctcacccggcaggcacagccctgcacgccccagctgcaagtcccagggagcgccggcttccccggggcaccgggcgcgatttttcctggagagcctgggagctcccgggcgcgccctactcacttgtgtcttcttcataaggaaaggcagcgctgcgatccagcacaaacagtggtgtggcgactccgtttagctgttctggagctccagcatattgcacgaacagcggcggcagatagtcca

SEQ ID NO: 466337 - DNA, 178 bp, Homo sapiens
  chr12:88974253-88974431
  hyper
  lymphoid_neoplasm vs. liver_bileduct
tgctgagccgccggcgcttttatacagttcccgcccgcctgctccggacacgcctccttcccttccggagcccggggtaggcgagaagcaggcaagggcgcggagggaagaatcgggagggcggccagagcacggtaaatgccccagaagtttggcagattaggccaaccttgtccgc

SEQ ID NO: 466338 - DNA, 35 bp, Homo sapiens; identical to SEQ ID NO: 373118
  chr12:88974679-88974714
  hyper
  lymphoid_neoplasm vs. liver_bileduct

SEQ ID NO: 466339 - DNA, 391 bp, Homo sapiens
  chr12:99287760-99288151
  hyper
  lymphoid_neoplasm vs. melanoma
cgcaaattggaatttcgctggaaacactgacccgaccttcaccgaagcagcaaatcgcagtctctgctgctctgctcctgctctccaaggcttaacattggaaagtccatgcccacgtccccctctaattaatcaatgtagaaagaaatacgagggaagagagagggagcacactccacaccaaccttgccagcttctattcttcctgctattccttaaaggcgatgcacagcgcacctggaaattacgtggacttggcatggctttttaatattaaagacaaacgacctttggaaaatatacactgttaaagtcaaaccatttggagagacacccagcaatttacctcctcaaactcctcggaaccccaagaatgaggaaaggaaatgga

SEQ ID NO: 466340 - DNA, 268 bp, Homo sapiens; identical to SEQ ID NO: 452828
  chr12:103351149-103351417
  hyper
  lymphoid_neoplasm vs. thyroid

SEQ ID NO: 466341 - DNA, 80 bp, Homo sapiens
  chr12:106975167-106975247
  hyper
  lymphoid_neoplasm vs. multiple_myeloma,ovary
cgggctctgtccagccggtaccgcgcgccgccttcttcctcccgcaccgtgaccttaactcggcacgtgctggcccctcg

SEQ ID NO: 466342 - DNA, 72 bp, Homo sapiens
  chr12:107486379-107486451
  hyper
  lymphoid_neoplasm vs. liver_bileduct, pancreas_gallbladder
cgagtgtttcaggtcgtcagtactctttggccagagaagtattaagtcaattctatttaatacttagggcac

SEQ ID NO: 466343 - DNA, 523 bp, Homo sapiens
  chr12:107486672-107487195
  hyper
  lymphoid_neoplasm vs. liver_bileduct, pancreas_gallbladder
ccttcagggcggggttgtcgtggagccggagcccctttcggaaccagtgcacggcgttcacccccatgccggggggcgcggcgggtcctccacggagaaattcaaggaaggaggctccggctcatagccgacaccttcgcttccaagagaattgcctcacccggggcgtgaggaaagggcggcagagggggaacaggaaaaaatgactccgaggaggggaccggagaaggcgggggcgccggaggcgcagtggaaagatgaatggaggttgcctagtcggcggagtccgggtgtgacgccctttaggagcccgcgcccgccgcaaccgcctggaggcgacgcataacttcgagggcctcggacctccggagcctgagcaagttccaggagctcgagccgccacgacggcccgagccggcacggacggccccaggagattcgtcacggaaacctcgccccaccaaggcggcccctaaagacaaaacggcccgcccgaggtgagtcaccgaggagaaccggaggg

SEQ ID NO: 466344 - DNA, 230 bp, Homo sapiens
  chr12:107711721-107711951
  hyper
  lymphoid_neoplasm vs. melanoma,prostate,renal
cggctgaaagagggccgcactaattggtttgcgtacccgaagtgggaatagagagggaggaaaaccatgtttcaggtgttacggggggaaaaaagtgaaatgcgaaccgcaggggagagagcgaccgtcaggcagacaccttgtgaaccgcggtggagagcacacctaggtggggaggtcaccggcccaacccaccaccctccgggagaatgcgggcagggacagcagca

SEQ ID NO: 466345 - DNA, 220 bp, Homo sapiens; identical to SEQ ID NO: 351409
  chr12:107712337-107712557
  hyper
  lymphoid_neoplasm vs. melanoma,prostate,renal

SEQ ID NO: 466346 - DNA, 723 bp, Homo sapiens; identical to SEQ ID NO: 373152
  chr12:107712337-107713060
  hyper
  lymphoid_neoplasm vs. bladder_and_urothelial

SEQ ID NO: 466347 - DNA, 59 bp, Homo sapiens
  chr12:113905322-113905381
  hyper
  lymphoid_neoplasm vs. head_and_neck
cgcctcttccgcaccaggactcccccgaggcggggccgggccggattaggccgggaggg

SEQ ID NO: 466348 - DNA, 43 bp, Homo sapiens; identical to SEQ ID NO: 360206
  chr12:113906434-113906477
  hyper
  lymphoid_neoplasm vs. multiple_myeloma,ovary

SEQ ID NO: 466349 - DNA, 83 bp, Homo sapiens; identical to SEQ ID NO: 373165
  chr12:113914528-113914611
  hyper
  lymphoid_neoplasm vs. multiple_myeloma

SEQ ID NO: 466350 - DNA, 11 bp, Homo sapiens
  chr12:113916316-113916327
  hyper
  lymphoid_neoplasm vs. melanoma
gtgtgtgtgtg

SEQ ID NO: 466351 - DNA, 358 bp, Homo sapiens
  chr12:120031899-120032257
  hyper
  lymphoid_neoplasm vs. multiple_myeloma
gcaggggagtccgcgcgctctctgcggctcccttcctcacggcccggcccgcgctaggtgttctttgtcctcgcacctcctcctcacctttctcgggctctcagagctctccccgcaatcatcagcacctcctctgcactcctcgtggtactcagagccctgatcaagcttcccccaggctagctttcctcttctttccagctcccagggtgcgtttcctctccaacccggggaagttcttccgtggactttgctgactcctctgaccttcctaggcacttgcccggggcttctcaaccctcttttctagagccccagtgcgcgccaccctagcgagcgcagtaagctcataccccga

SEQ ID NO: 466352 - DNA, 473 bp, Homo sapiens; identical to SEQ ID NO: 334688
  chr12:123380333-123380806
  hyper
  lymphoid_neoplasm vs. cervical,renal, pancreas_gallbladder,ovary,uterine,anorectal,upper_gi,breast, thyroid,prostate,lung,non_cancer,colorectal,myeloid_neoplasm, bladder_and_urothelial

SEQ ID NO: 466353 - DNA, 3 bp, Homo sapiens
  chr12:124779503-124779506
  hyper
  lymphoid_neoplasm vs. upper_gi
cgc

SEQ ID NO: 466354 - DNA, 610 bp, Homo sapiens
  chr12:124779593-124780203
  hyper
  lymphoid_neoplasm vs. upper_gi
ggaggaggaggcgcctagaaaaggaggcgcgggccggggaggtgcggagagggccgggcggcaacgtgcgcctcggggctgggccggcctgcgggatcgcagcgcagcgcagaggcgaggctgggcccggcgggcgggagccgcggagggcggagggcggagggcggcggcgctggcaggagcgcggcccacggcggcgagcaggctgcaggcccgcggggatccggggcgcggggggcgccgggcctgatcgccgcctctcgcggtgcccgcaggtccccgggcgcgcagctctcgccccgccgccgcctgccccgggccccggagcgcggtggagaagcccccggaggagcggggggcccgcgccccgcgccccccagacatggtgggccacctgcatctgcagggcatggaggacagcctgaaggagcagggccgggagggcttgctggacagccccgactccgggctgccccccagccccagccccagcccgcccttctactccctggcgcccggcatcctcgacgcgcgcgcggggggcgccggcgcctcctcggagcccccgggacccagcgaggccagagcggtaaggaggcgctctctctcc

SEQ ID NO: 466355 - DNA, 173 bp, Homo sapiens; identical to SEQ ID NO: 373212
  chr12:133195984-133196157
  hyper
  lymphoid_neoplasm vs. bladder_and_urothelial

SEQ ID NO: 466356 - DNA, 155 bp, Homo sapiens
  chr13:21634593-21634748
  hyper
  lymphoid_neoplasm vs. cervical,pancreas_gallbladder
cgcctcgggccgcgtcccgccaagaccgtgagcaaactcgcagagttggcgcggcagccggccgggagacgccgagcagggcctggccgcccgcagcccgggaggaacggcgcccccagggtccggtggcctctgaggggctgactggcccgtga

SEQ ID NO: 466357 - DNA, 569 bp, Homo sapiens; identical to SEQ ID NO: 373224
  chr13:21634965-21635534
  hyper
  lymphoid_neoplasm vs. cervical,pancreas_gallbladder

SEQ ID NO: 466358 - DNA, 783 bp, Homo sapiens; identical to SEQ ID NO: 334723
  chr13:24734971-24735754
  hyper
  lymphoid_neoplasm vs. upper_gi

SEQ ID NO: 466359 - DNA, 82 bp, Homo sapiens; identical to SEQ ID NO: 459404
  chr13:25746000-25746082
  hyper
  lymphoid_neoplasm vs. sarcoma,myeloid_neoplasm

SEQ ID NO: 466360 - DNA, 7 bp, Homo sapiens
  chr13:25746119-25746126
  hyper
  lymphoid_neoplasm vs. sarcoma,myeloid_neoplasm
cgacaac

SEQ ID NO: 466361 - DNA, 282 bp, Homo sapiens; identical to SEQ ID NO: 459406
  chr13:26624917-26625199
  hyper
  lymphoid_neoplasm vs. head_and_neck

SEQ ID NO: 466362 - DNA, 204 bp, Homo sapiens; identical to SEQ ID NO: 459407
  chr13:26624995-26625199
  hyper
  lymphoid_neoplasm vs. head_and_neck

SEQ ID NO: 466363 - DNA, 71 bp, Homo sapiens; identical to SEQ ID NO: 457471
  chr13:27131483-27131554
  hyper
  lymphoid_neoplasm vs. melanoma,sarcoma,prostate,uterine, anorectal,myeloid_neoplasm,non_cancer,thyroid,head_and_neck, breast,lung,ovary

SEQ ID NO: 466364 - DNA, 2 bp, Homo sapiens
  chr13:44361226-44361228
  hyper
  lymphoid_neoplasm vs. head_and_neck
gc

SEQ ID NO: 466365 - DNA, 124 bp, Homo sapiens
  chr13:53420877-53421001
  hyper
  lymphoid_neoplasm vs. myeloid_neoplasm
cgcagcgcgtagatggctccggtagctgggtccaccgagacataagtggacacggcgcccccggcgcggcccacctcggcctccagcagccggtaggtgacctggccgttgcggcccaggtccc

SEQ ID NO: 466366 - DNA, 81 bp, Homo sapiens
  chr13:53422554-53422635
  hyper
  lymphoid_neoplasm vs. melanoma
cgcctcacaggactcatgcctccagcctcaagtgcgatccgaaaggctaaggaagtcttctctggtttccaggtcgggcgt

SEQ ID NO: 466367 - DNA, 232 bp, Homo sapiens
  chr13:53422885-53423117
  hyper
  lymphoid_neoplasm vs. melanoma
atccctttaatgtggaaaggcttagaggggaaaacaagaaaggaaaattagggaatctttcttttgtttaactccttttgctttttcccccttttcttgtcagcaccctgcatgtagaggagttggcacagggctccaggagtaaaaggagcggatggttttgttaattgtcgcctgcctccctccgtgccgcggctagaactaagtgcgaacacgctggggtttcacccca

SEQ ID NO: 466368 - DNA, 64 bp, Homo sapiens; identical to SEQ ID NO: 351479
  chr13:53423198-53423262
  hyper
  lymphoid_neoplasm vs. melanoma

SEQ ID NO: 466369 - DNA, 83 bp, Homo sapiens
  chr13:53424677-53424760
  hyper
  lymphoid_neoplasm vs. melanoma,anorectal, myeloid_neoplasm
cgcagccctttcttccgctgtcttccatctcccaagtgcgatttagtatgtagccctcccaccgtccccgcccaagagatatt

SEQ ID NO: 466370 - DNA, 235 bp, Homo sapiens
  chr13:96743113-96743348
  hyper
  lymphoid_neoplasm vs. ovary
accatggatgaaaggttcaacaagtggctgctgacgccggtgctcactctcctcttcgtggtcatcatgtaccagtacgtgtccccctcctgcaccagctcctgcaccaacttcggggagcagccccgcgcgggggaggccggcccgcccgccgtcccgggtcccgcccgccgggctcaggcgccgccggaggagtgggagcggcggccccagttgcccccgccgccccgggggc

SEQ ID NO: 466371 - DNA, 56 bp, Homo sapiens
  chr13:100620289-100620345
  hyper
  lymphoid_neoplasm vs. colorectal,myeloid_neoplasm, sarcoma
cgggcccgcgggacggttataaacgggactgggggcacgtgggtcaggaaaggggc

SEQ ID NO: 466372 - DNA, 112 bp, Homo sapiens
  chr13:100620374-100620486
  hyper
  lymphoid_neoplasm vs. colorectal,myeloid_neoplasm, sarcoma
ttgatcaatccgttccgggatcccggataacccccaaaagggagagcggcgtggcagggagggaaagaagtccggatgggccctctcagaacacaatgtccaatagctgagc

SEQ ID NO: 466373 - DNA, 106 bp, Homo sapiens
  chr13:100620515-100620621
  hyper
  lymphoid_neoplasm vs. colorectal,myeloid_neoplasm, sarcoma
cgggttggagtctgaacccgaggcgcctgcgtccctcccgcagggacccccacgctccaccgggtggggcccacgcggccgccgggagggggcaggaaatgcaacc

SEQ ID NO: 466374 - DNA, 10 bp, Homo sapiens
  chr13:100620631-100620641
  hyper
  lymphoid_neoplasm vs. colorectal,myeloid_neoplasm, sarcoma
cgcagagcca

SEQ ID NO: 466375 - DNA, 220 bp, Homo sapiens
  chr13:100620916-100621136
  hyper
  lymphoid_neoplasm vs. colorectal,myeloid_neoplasm, sarcoma
cttcacggtccctggatcctgccctgccgagaagtgctgggcacaggagcgagcagccggcttagcgggccagggcgtttttacgagagcctcctgggaagtttcttcctggaaaaatcattaaggcggactgatcccgattagagagaaaaggggctcctgggaaaacgtgctccccaccggccatcaggcggcccgcaggagccaagccaaggctccc

SEQ ID NO: 466376 - DNA, 351 bp, Homo sapiens
  chr13:100621366-100621717
  hyper
  lymphoid_neoplasm vs. cervical
ctcaaagggggcacacgacccacaggagccatccaccgcctcgcgccgcagccgccctcctcagcgctgtgggatccccagaggcagggcttgaggtggggtgggagggtccccacgacgccggtggctccccaccaattccacgacagggtaggcctcaccgatggtgggaggctcgggtcctcctacaactagaaccttctctagaaaggcagatgtcaactccagcaccctccagggcgagtgtgatactgcgtgtgagagggcgcgtggggcgtgtaaatgatgtgagtgtgaggacacacaggtgtcgcgggaatggggtgcacgcgcaggaggatatgagtgtgt

SEQ ID NO: 466377 - DNA, 17 bp, Homo sapiens
  chr13:100622015-100622032
  hyper
  lymphoid_neoplasm vs. cervical
tgccgaccgtcctgggc

SEQ ID NO: 466378 - DNA, 22 bp, Homo sapiens
  chr13:100622155-100622177
  hyper
  lymphoid_neoplasm vs. cervical
cgcggggcctgtgtgtgctatc

SEQ ID NO: 466379 - DNA, 543 bp, Homo sapiens
  chr13:100623181-100623724
  hyper
  lymphoid_neoplasm vs. cervical
ccgcgtaggtgccgctggcggagatgaacatgccggccgagtggggaggcggggccgggtgctggggggagccggtgccggaccgctgctcccctccgagcggggccccgtgcatggccgccgcgggggccgtggcggaaaggtccctccggaggacgaagtccctgctgtggcctttgccgctgctgccgccgccgccactgttggtggtggtgtagcccgagagggcaggaggaggaggaggcgggggagggggagggggtgaaggggtgggaggaagaggaggggctgggggcgggggcgcggagggctgcgcgccactgctgcccccgccgcaggggtagctgcccgcgccggggtgcgcgaccaaggctgcagcacgggcggcggctgccggagcctccgggtgtgccgggaacgcctgggagggagggctgaggcccagcgtgctcgcctgggccatgtgctcgggtccgagcggagtggtggccacgccggggtcagcgcccaggtcccgcaggcggaggtgcgcgacggcggccc

SEQ ID NO: 466380 - DNA, 67 bp, Homo sapiens
  chr13:100631544-100631611
  hyper
  lymphoid_neoplasm vs. cervical
cgcttaagccgggagaggctgcctgagccggcgcaagagagcccgggttctgccagccatagtgagc

SEQ ID NO: 466381 - DNA, 242 bp, Homo sapiens
  chr13:100631642-100631884
  hyper
  lymphoid_neoplasm vs. cervical
catttcagaacataattctgaaaaatttattattttctcttcgtttaattttatttcaactcctagagatttataaataaaagcagttctccaggccagccaggagaacacgcccgaggcgctggcctcaggctgtcccttcacacctccgcagcctctgggccctccgttccctctctagttacctcgggagcgcgagatttgggcggcgggacaggaaacgtccgcagcggtcagccagg

SEQ ID NO: 466382 - DNA, 414 bp, Homo sapiens
  chr13:100631937-100632351
  hyper
  lymphoid_neoplasm vs. cervical
gctcctggagaaggagtggatggatatatatgctttctagaaggtttaagccctgccgtgtctgacggcttcttctcccgagaccctgagcctgacccgcagccaaactccggcctgagtctcgcttggtctcgggcgttcccacacttctcagcccaaggatgcgcggcccggcttctgggcatttaccctgagggtgacactgtctttaaacgacttccgaacaacccccttccacgcaggggccgctgcccagtgtttactgctgtaaacggagcaggacgcaagcggcgggtggggagctcagcgcgccgaggggcggacggggacgccgcggggggcggggaaggcggtgtctgggtgggcgtccggagggtgggaagaaggggcatgcctggctttctctgtgcccac

SEQ ID NO: 466383 - DNA, 493 bp, Homo sapiens
  chr13:100631937-100632430
  hyper
  lymphoid_neoplasm vs. anorectal
gctcctggagaaggagtggatggatatatatgctttctagaaggtttaagccctgccgtgtctgacggcttcttctcccgagaccctgagcctgacccgcagccaaactccggcctgagtctcgcttggtctcgggcgttcccacacttctcagcccaaggatgcgcggcccggcttctgggcatttaccctgagggtgacactgtctttaaacgacttccgaacaacccccttccacgcaggggccgctgcccagtgtttactgctgtaaacggagcaggacgcaagcggcgggtggggagctcagcgcgccgaggggcggacggggacgccgcggggggcggggaaggcggtgtctgggtgggcgtccggagggtgggaagaaggggcatgcctggctttctctgtgcccacggtcctgcacctgtggtttcaatgccacagagcaagtttacaaaggcggggtgaaagtagggagcgtgccaagcgggca

SEQ ID NO: 466384 - DNA, 367 bp, Homo sapiens; identical to SEQ ID NO: 351497
  chr13:100632514-100632881
  hyper
  lymphoid_neoplasm vs. anorectal

SEQ ID NO: 466385 - DNA, 33 bp, Homo sapiens
  chr13:100632397-100632430
  hyper
  lymphoid_neoplasm vs. anorectal
cggggtgaaagtagggagcgtgccaagcgggca

SEQ ID NO: 466386 - DNA, 576 bp, Homo sapiens
  chr13:100632514-100633090
  hyper
  lymphoid_neoplasm vs. anorectal
caggcgacccagctgttagccacctctcgagcggcctggagtgctcgggccaggcgtccccggggttttcggtgtccgctgggagctgctcagatcccggggaagtcggtggcctacgcagaaagactggagcgctgggttgcctcccattcctgacccggctgagggcgccctgaccccgcggcccgggcccgcgtccgagccacgctggacgcccggctcccgggagcgccgcggtcggccaggactagaagccgcggcgccgaggtctcgggagaagcgcggcaggatggcaggccgggcccacgggcacgttcggcggctgcctgagccggcagcagctcagggagcgcgaggactgaggggcgggcccggcagcggggcgggggcgcgggactgactaggccgcggcggccaatcgcggcgccgggagggcgggcggggcgggagccgccgttaaaggggcggtttgaccgggggggcccggcctcgagctggagggagggagggaggccggggcgggagactagggggtgcggggggaggggagaggaaaaggaggagacaaaaaataaa

SEQ ID NO: 466387 - DNA, 36 bp, Homo sapiens; identical to SEQ ID NO: 289879
  chr13:100633184-100633220
  hyper
  lymphoid_neoplasm vs. anorectal

SEQ ID NO: 466388 - DNA, 147 bp, Homo sapiens
  chr13:100634131-100634278
  hyper
  lymphoid_neoplasm vs. cervical,colorectal
cgaggcagatccaggcggcggcggaggcggcgggcgcaggagagcggctcccagggctgaagtggccgccaccaccgccgcctgcgcctggagcccggtggccgccggacgcaccgcgcggatcgggagcgggagtcgaggcggcgc

SEQ ID NO: 466389 - DNA, 8 bp, Homo sapiens
  chr13:100634307-100634315
  hyper
  lymphoid_neoplasm vs. cervical,colorectal
gcgcgctg

SEQ ID NO: 466390 - DNA, 129 bp, Homo sapiens
  chr13:100634617-100634746
  hyper
  lymphoid_neoplasm vs. cervical,colorectal
ccacgccgcgcacgttggctcctactctgggccgcccttcaactccacccgggacttcctgttccgcagccgcggcttcggggactcggcgccgggcggcgggcagcacgggctgttcgggccgggcgc

SEQ ID NO: 466391 - DNA, 5 bp, Homo sapiens
  chr13:100634940-100634945
  hyper
  lymphoid_neoplasm vs. cervical,colorectal
cgcaa

SEQ ID NO: 466392 - DNA, 129 bp, Homo sapiens; identical to SEQ ID NO: 466390
  chr13:100634617-100634746
  hyper
  lymphoid_neoplasm vs. head_and_neck,anorectal,uterine, myeloid_neoplasm

SEQ ID NO: 466393 - DNA, 5 bp, Homo sapiens
  chr13:100634940-100634945
  hyper
  lymphoid_neoplasm vs. head_and_neck,anorectal,uterine, myeloid_neoplasm
cgcaa

SEQ ID NO: 466394 - DNA, 339 bp, Homo sapiens
  chr13:100635597-100635936
  hyper
  lymphoid_neoplasm vs. uterine
cgagttttgaatgattagcctcacatcaaatgtatgcttgggtcatgcaattgcttcgtttgctcagccccggttaataatttccgttttaagtagaaagcacaaaataaaactgctcgctaattcggtgcccgggaagcgagcctagagaggattttgccagcttgtctgaatgtgcttttctgctcggagtgtatgtctgtctgagtggtttgtgtgttttcccacttcttttactcggggtccaaacgcccttcccgggactgtttcccatgaaatgagtctggtgtgagccgaagctgtaatgcgtttctcatttttaaagtgtttttaaagccc

SEQ ID NO: 466395 - DNA, 207 bp, Homo sapiens; identical to SEQ ID NO: 457501
  chr13:108518148-108518355
  hyper
  lymphoid_neoplasm vs. liver_bileduct

SEQ ID NO: 466396 - DNA, 1 bp, Homo sapiens
  chr13:108518657-108518658
  hyper
  lymphoid_neoplasm vs. liver_bileduct
c

SEQ ID NO: 466397 - DNA, 4 bp, Homo sapiens
  chr13:108518714-108518718
  hyper
  lymphoid_neoplasm vs. liver_bileduct
cgct

SEQ ID NO: 466398 - DNA, 322 bp, Homo sapiens
  chr13:108518933-108519255
  hyper
  lymphoid_neoplasm vs. liver_bileduct
cccctggtcatattttgggaacgcacagccctggccgactccaccgtgagggcgcctgtgccggtgtcaccacaatatgcattgacttaaagggtttaatttccttatcccctcctcccgtttcttctctctcctctctctctttctctctcttcccctctccctctctcctctctctctctctccctctccctctcttttatctctctctgtctcttttgcctacataaatattaccaggctttgaaggaaggtctgacttgcttcctaatcatcagccgaccccatcctctgtagagtgggaaacaataatggagagaga

SEQ ID NO: 466399 - DNA, 22 bp, Homo sapiens
  chr13:108519410-108519432
  hyper
  lymphoid_neoplasm vs. liver_bileduct
tctcccctgccaggggcatgcc

SEQ ID NO: 466400 - DNA, 59 bp, Homo sapiens; identical to SEQ ID NO: 459416
  chr13:108519564-108519623
  hyper
  lymphoid_neoplasm vs. liver_bileduct

SEQ ID NO: 466401 - DNA, 43 bp, Homo sapiens; identical to SEQ ID NO: 459414
  chr13:108519212-108519255
  hyper
  lymphoid_neoplasm vs. multiple_myeloma,liver_bileduct

SEQ ID NO: 466402 - DNA, 22 bp, Homo sapiens
  chr13:108519410-108519432
  hyper
  lymphoid_neoplasm vs. multiple_myeloma,liver_bileduct
tctcccctgccaggggcatgcc

SEQ ID NO: 466403 - DNA, 59 bp, Homo sapiens; identical to SEQ ID NO: 459416
  chr13:108519564-108519623
  hyper
  lymphoid_neoplasm vs. multiple_myeloma,liver_bileduct

SEQ ID NO: 466404 - DNA, 166 bp, Homo sapiens; identical to SEQ ID NO: 452855
  chr13:108519932-108520098
  hyper
  lymphoid_neoplasm vs. multiple_myeloma,liver_bileduct

SEQ ID NO: 466405 - DNA, 34 bp, Homo sapiens
  chr13:114017783-114017817
  hyper
  lymphoid_neoplasm vs. pancreas_gallbladder,head_and_neck, colorectal,lung,renal,upper_gi
cgctgggattacaggcgtgagccaccgcgcccgg

SEQ ID NO: 466406 - DNA, 229 bp, Homo sapiens
  chr13:114017991-114018220
  hyper
  lymphoid_neoplasm vs. pancreas_gallbladder,head_and_neck, colorectal,lung,renal,upper_gi
cgctccgggagcccggactttgcccggcccgtcccagcccaacccacctgcgccctcgggacccacctgcgcccccgggacccacctgtccggctcctggggacgcccccgccctgcagcagccgggaccatttgatcgccctgcgggtgagcgtgaccaggtagctggagaaaaacttctcgtaggcggcgtcgtcgaagtcctcaggccgctcgaatccgtacgggt

SEQ ID NO: 466407 - DNA, 140 bp, Homo sapiens; identical to SEQ ID NO: 360358
  chr13:114018330-114018470
  hyper
  lymphoid_neoplasm vs. pancreas_gallbladder,head_and_neck, colorectal,lung,renal,upper_gi

SEQ ID NO: 466408 - DNA, 2 bp, Homo sapiens
  chr14:23834171-23834173
  hyper
  lymphoid_neoplasm vs. multiple_myeloma
cg

SEQ ID NO: 466409 - DNA, 6 bp, Homo sapiens
  chr14:29234550-29234556
  hyper
  lymphoid_neoplasm vs. multiple_myeloma
cgggat

SEQ ID NO: 466410 - DNA, 1 bp, Homo sapiens
  chr14:37050213-37050214
  hyper
  lymphoid_neoplasm vs. anorectal
c

SEQ ID NO: 466411 - DNA, 255 bp, Homo sapiens; identical to SEQ ID NO: 462440
  chr14:37050246-37050501
  hyper
  lymphoid_neoplasm vs. anorectal

SEQ ID NO: 466412 - DNA, 214 bp, Homo sapiens; identical to SEQ ID NO: 462441
  chr14:37050539-37050753
  hyper
  lymphoid_neoplasm vs. anorectal

SEQ ID NO: 466413 - DNA, 251 bp, Homo sapiens; identical to SEQ ID NO: 462442
  chr14:37050794-37051045
  hyper
  lymphoid_neoplasm vs. anorectal

SEQ ID NO: 466414 - DNA, 404 bp, Homo sapiens
  chr14:37051196-37051600
  hyper
  lymphoid_neoplasm vs. ovary,lung,anorectal, myeloid_neoplasm
gtcagacacagaaaccccaaatctcggagcaccagtgccaggcagggatctgctcttaggatgtgccgaccgggatgaatgcgttaggggttcgaggacagggctcccgtttccaagactgaggaaatctagactctgggctgggatttcggctttccggcccctcgtgggctgggcccttgattctgctgccccacgcctcctacctcccaccccgcaccgcaatccaccacgcacttacaagggtagtggccgcgctccgaatccagccaggcggcgcaggggtcgggctggggggcgcgtggttctggctcccgcctcggcaggtgttgcgcgtcctgctcgggtaaatctagaaggctgcgcacggtgaagctcaggcgtccagaggtggccatggccga

SEQ ID NO: 466415 - DNA, 15 bp, Homo sapiens
  chr14:37116652-37116667
  hyper
  lymphoid_neoplasm vs. prostate,head_and_neck,breast
cggcctcagaacccc

SEQ ID NO: 466416 - DNA, 226 bp, Homo sapiens
  chr14:38052540-38052766
  hyper
  lymphoid_neoplasm vs. bladder_and_urothelial
cgaggtcaagacccgcagtgtcttagtgggttttcacctccacctccgtacaatcaagagggcagagaaggcgggggctggaggtggctgaaagggcagggatggcggtgaaacccgggaggaggcgacattcgtgtcaggtggcggtcccaggcagtgtccacaggcccggaagccgaggggaccaggcatcaagccccgcgtccagatccctgcacccgggggc

SEQ ID NO: 466417 - DNA, 175 bp, Homo sapiens; identical to SEQ ID NO: 347289
  chr14:38053203-38053378
  hyper
  lymphoid_neoplasm vs. bladder_and_urothelial

SEQ ID NO: 466418 - DNA, 109 bp, Homo sapiens
  chr14:38063865-38063974
  hyper
  lymphoid_neoplasm vs. bladder_and_urothelial,lung
cggagtttcctaaaactccctctccggctgcgagagtcgggacagagcagggcagcaggtcccgcttccaggcccggccaaggcccggccggggccacaccggcgggcg

SEQ ID NO: 466419 - DNA, 305 bp, Homo sapiens
  chr14:38064003-38064308
  hyper
  lymphoid_neoplasm vs. bladder_and_urothelial,lung
ggcccgcctgcctgccttgcctggcgcccaccgctccccggcctcccccggcacgggctccagcggcgccccaccggccgcccgcctcgccttgcctctcacctcctgcgtgtctgcgtagtagctgttccagtcgctggtttcatgcccttccatcttcacagttcctaacatcctggagccaccctgcccaatacaaccatccagccctgtgcgaagcgacgggcggccgcgcggcgcggggcgggggaggggagctgagcagctgcagtcacccgagcgcccgcgcgggcccaacgccaccc

SEQ ID NO: 466420 - DNA, 20 bp, Homo sapiens
  chr14:38064382-38064402
  hyper
  lymphoid_neoplasm vs. bladder_and_urothelial,lung
gccgggggcaggcggctgcc

SEQ ID NO: 466421 - DNA, 309 bp, Homo sapiens; identical to SEQ ID NO: 360415
  chr14:38064549-38064858
  hyper
  lymphoid_neoplasm vs. bladder_and_urothelial,lung

SEQ ID NO: 466422 - DNA, 30 bp, Homo sapiens; identical to SEQ ID NO: 460715
  chr14:60974092-60974122
  hyper
  lymphoid_neoplasm vs. multiple_myeloma

SEQ ID NO: 466423 - DNA, 65 bp, Homo sapiens
  chr14:61748033-61748098
  hyper
  lymphoid_neoplasm vs. lung,pancreas_gallbladder, non_cancer,upper_gi,prostate,breast,head_and_neck,cervical
tagttccaggccctacgagcagtgcccacaccctcccagttccgcctccgcccaggtgcgctgca

SEQ ID NO: 466424 - DNA, 202 bp, Homo sapiens
  chr14:65171074-65171276
  hyper
  lymphoid_neoplasm vs. lung,colorectal,renal
acccacaggaaaaattcctggcccgcccctccctcgctccctcgctccctcgctccctcgctccctcgctccctcgctccctcgctccctcctgccctcccgctgcagctccggctccgctcgacttcctgccgggcgctggcaagccgcgcgctgcctggggtctccgggggccgcgcttgcagctggccgagtccgggcc

SEQ ID NO: 466425 - DNA, 188 bp, Homo sapiens; identical to SEQ ID NO: 360475
  chr14:65171373-65171561
  hyper
  lymphoid_neoplasm vs. lung,colorectal,renal

SEQ ID NO: 466426 - DNA, 77 bp, Homo sapiens
  chr14:67878644-67878721
  hyper
  lymphoid_neoplasm vs. cervical
cgttccggggcgcgcgtctggccccgctctagggagccgcgtcggcggggccccacccgggcaatgtcccgaagctc

SEQ ID NO: 466427 - DNA, 41 bp, Homo sapiens
  chr14:67878763-67878804
  hyper
  lymphoid_neoplasm vs. cervical
cgccgtcctccatgtcgccgcccgcacgccagggccacccc

SEQ ID NO: 466428 - DNA, 105 bp, Homo sapiens; identical to SEQ ID NO: 351584
  chr14:72399486-72399591
  hyper
  lymphoid_neoplasm vs. breast,non_cancer

SEQ ID NO: 466429 - DNA, 108 bp, Homo sapiens; identical to SEQ ID NO: 373491
  chr14:75079225-75079333
  hyper
  lymphoid_neoplasm vs. cervical

SEQ ID NO: 466430 - DNA, 536 bp, Homo sapiens
  chr14:81902288-81902824
  hyper
  lymphoid_neoplasm vs. renal
cgtccccagggacacctgttgtcgcctccccactcgggccgatgaagacatcctgggcgtcccaatctcgaagacacccgtcggccagaagtgtctgtgtatggggccaggtgtcgcaggagtcctcctccacccctacctgccttaagcagagtcccctcgtcctcccccaccccgggacgcccgcggctggtggaaacgccgcgcctccgcgtggctcgaccaggcaggctcgggggcgccagggggcacagcggcgctaggacctcgcggccggcccgcccccgcccccgcccccgccccccgcccgctccacctgcggggcccctcttggggggcgcgctcgcctcctgctgcggggcgtgggtgcagttacctgcgccgcggtccgcagggtccccggcgtccgccgaaaggtcgccgcggcaaagccggcttctctggccgcgggatacccacccggccgcactgctctcgccacgatccctcccggccgcagcgccgacgccggctccagactcgagctcgctctgcgc

SEQ ID NO: 466431 - DNA, 141 bp, Homo sapiens; identical to SEQ ID NO: 360503
  chr14:81903005-81903146
  hyper
  lymphoid_neoplasm vs. renal

SEQ ID NO: 466432 - DNA, 551 bp, Homo sapiens; identical to SEQ ID NO: 335000
  chr14:92302201-92302752
  hyper
  lymphoid_neoplasm vs. upper_gi

SEQ ID NO: 466433 - DNA, 4 bp, Homo sapiens
  chr14:92414008-92414012
  hyper
  lymphoid_neoplasm vs. head_and_neck,ovary
cgct

SEQ ID NO: 466434 - DNA, 188 bp, Homo sapiens
  chr14:92980770-92980958
  hyper
  lymphoid_neoplasm vs. bladder_and_urothelial,thyroid
cgctgggcgtggggtcggagacccggacccccgcaactttgggtgcccgcggcccaacagctgaccggccctcctggaccgagggtccactgggcccttttcccgccgcccctctgccctggccgtagacggtgaccttcggaccggccctggtcgagcctagtgcttgggtagggtccagggcgcac

SEQ ID NO: 466435 - DNA, 295 bp, Homo sapiens
  chr14:95235695-95235990
  hyper
cagggaaaaggaggaggcgtgttagagcatccatccgcacacccgccaaagccagtaagagaattcaaaacaaaacaaaacaaaacaaaacccagtttccccgggcaggcactgaattccagttttcgcgaactctggccaaaagtttgcagcaagaagtttgcaaactcctgcgcccgatcggcaaaagcggaggggggagttgcaagaggagcaaagtttgaggaaggtgaattaaccaaccggctccatgggctaaggaccgcagtgggcggcagaggccggagcgagcgcg

SEQ ID NO: 466436 - DNA, 13 bp, Homo sapiens
  chr14:95235977-95235990
  hyper
  lymphoid_neoplasm vs. ovary,prostate,breast
cggagcgagcgcg

SEQ ID NO: 466437 - DNA, 19 bp, Homo sapiens
  chr14:95236506-95236525
  hyper
  lymphoid_neoplasm vs. ovary,prostate,breast
ctctccctcctcccgccct

SEQ ID NO: 466438 - DNA, 267 bp, Homo sapiens
  chr14:95236553-95236820
  hyper
  lymphoid_neoplasm vs. ovary,prostate,breast
acccgcgggtaggacggagctcagaccagctgaacctcttgttggttttatactgagtcgacgtcatcctggatttagttcctggtaatatgcagatgacaaacagaaccagatttggccctttcttttcctttgggtgggggaagagggttggggggagggggagaggtgccaaggggagggggttacaaggcctgaaaagagattgtggattgcgaattaatgaaattaacctaatcttttccattcggcagccgggccgcgggc

SEQ ID NO: 466439 - DNA, 34 bp, Homo sapiens; identical to SEQ ID NO: 360530
  chr14:95236848-95236882
  hyper
  lymphoid_neoplasm vs. ovary,prostate,breast

SEQ ID NO: 466440 - DNA, 76 bp, Homo sapiens
  chr14:99736040-99736116
  hyper
  lymphoid_neoplasm vs. myeloid_neoplasm,head_and_neck, pancreas_gallbladder,multiple_myeloma
cggctctcggccgcccggcagccagtcctctgcggtgactgggcgcgcagccctctcgagctccgcgcgggcagcc

SEQ ID NO: 466441 - DNA, 61 bp, Homo sapiens
  chr14:99736213-99736274
  hyper
  lymphoid_neoplasm vs. myeloid_neoplasm,head_and_neck, pancreas_gallbladder,multiple_myeloma
aaaaaaaaaaaaaaaaaaaaaaaaaaaaaaaaaaggaacggcgacccaggcaccgcgagag

SEQ ID NO: 466442 - DNA, 128 bp, Homo sapiens; identical to SEQ ID NO: 351618
  chr14:99736431-99736559
  hyper
  lymphoid_neoplasm vs. myeloid_neoplasm,head_and_neck, pancreas_gallbladder,multiple_myeloma

SEQ ID NO: 466443 - DNA, 221 bp, Homo sapiens
  chr14:99737178-99737399
  hyper
  lymphoid_neoplasm vs. head_and_neck,upper_gi,sarcoma, colorectal
cgagcgtccagccgggctcggcgcgcacacacacacactcctccagcctgcatgccccctccccggcccggagccggctccgcaggcccccgagcccgaggcgcgtccggctgctcggcgccccaactccccgggctgcaaagaaactttcctatggcccccgccccccgccatgctccaggccgacgccgtagactctgccagccagcgggcggccccgg

SEQ ID NO: 466444 - DNA, 544 bp, Homo sapiens; identical to SEQ ID NO: 351620
  chr14:99737462-99738006
  hyper
  lymphoid_neoplasm vs. head_and_neck,upper_gi,sarcoma, colorectal

SEQ ID NO: 466445 - DNA, 460 bp, Homo sapiens
  chr14:99740032-99740492
  hyper
  lymphoid_neoplasm vs. colorectal,upper_gi, bladder_and_urothelial,pancreas_gallbladder
tcgtcccgaaggtcttgggtggggcgatggcaccaacaatttaacagcgcccagagtccgtgagcgagaacagaaagagatcccttccagtcccataccctaaaaaataataacaataaaatgtgccctggcttgcagttctgtaaactgtgggctccacggtgggcggacgcgaggccgagcggatggagaccgggggcggggcgcggacttgcacctcctcgccctggccgggcaggctgcacccggctgcccacccccaacaccccacctccacgtggtccaaagtctagtagggcctccctcttctgccatccctctcaccgggaaaatctttccaggaaagtggcttaaaaaaaatatgcccacacgcacctttaataaacttctttaagacattcataaactggccatccctactcgcccggactctaaatttgaaagatcaactcgcgctctc

SEQ ID NO: 466446 - DNA, 166 bp, Homo sapiens; identical to SEQ ID NO: 360540
  chr14:99740713-99740879
  hyper
  lymphoid_neoplasm vs. colorectal,upper_gi, bladder_and_urothelial,pancreas_gallbladder

SEQ ID NO: 466447 - DNA, 7 bp, Homo sapiens
  chr14:103745232-103745239
  hyper
  lymphoid_neoplasm vs. anorectal,cervical, myeloid_neoplasm
cggaccc

SEQ ID NO: 466448 - DNA, 8 bp, Homo sapiens
  chr14:103745292-103745300
  hyper
  lymphoid_neoplasm vs. anorectal,cervical, myeloid_neoplasm
cgcgggtc

SEQ ID NO: 466449 - DNA, 86 bp, Homo sapiens; identical to SEQ ID NO: 454188
  chr14:103745819-103745905
  hyper
  lymphoid_neoplasm vs. anorectal,cervical, myeloid_neoplasm

SEQ ID NO: 466450 - DNA, 218 bp, Homo sapiens
  chr14:104582815-104583033
  hyper
  lymphoid_neoplasm vs. upper_gi,bladder_and_urothelial, pancreas_gallbladder
cgtgagggggtagggcgtccctccccccgcgtgggaaatgaggaggcaggtacggggctacccctgtgggctgcggggtgggggttcagggtctgagaagcagaaacctccctccctccagtttcactttctctttacccctccccttccccctcccacgaagttccctttgaagtgagaggggctggggtgggtgtgtccagcccagcccccacacc

SEQ ID NO: 466451 - DNA, 596 bp, Homo sapiens
  chr14:104583110-104583706
  hyper
  lymphoid_neoplasm vs. upper_gi,bladder_and_urothelial, pancreas_gallbladder
cggccaaggtggagccccgggccctccgtgcgcccgagcacccccggcccagacgagacggttcgggcgtggcccggcggggacccagaacccgggaggccaggtgcgcccaggccaggcgctggaggctggggcgccggatggggcggggcggccgctgagtcagggccacccccgcgcgggcgcgcggagcaggtccccgggccgtggaggatcagtcgcgggacctatgggcccgggagccgccccgcccggaaaaaccggtcgggccagcgcggcgcgggcacattccggcgccgggaagggcggctgcgccgcataaaaggcgccgccgcgctggccaccgccgctcggagctcagccgccctgccacgcggggcccgcgggacgaggggacgccggggccagcgaggacgcggcggggctgggcttggcggctgggatcccccagcgccaggcgagggcgtctaaggcgtccggtacggcgtcggggccgggtggctgcagcagggcagggggtgcgcgaccagcggggatctgggcgcaggggccggtccccgggatccgcaggcgacgcgggcggtcccaagggcgtc

SEQ ID NO: 466452 - DNA, 882 bp, Homo sapiens
  chr14:104583216-104584098
  hyper
  lymphoid_neoplasm vs. ovary,upper_gi,breast,sarcoma, bladder_and_urothelial,anorectal
cgcccaggccaggcgctggaggctggggcgccggatggggcggggcggccgctgagtcagggccacccccgcgcgggcgcgcggagcaggtccccgggccgtggaggatcagtcgcgggacctatgggcccgggagccgccccgcccggaaaaaccggtcgggccagcgcggcgcgggcacattccggcgccgggaagggcggctgcgccgcataaaaggcgccgccgcgctggccaccgccgctcggagctcagccgccctgccacgcggggcccgcgggacgaggggacgccggggccagcgaggacgcggcggggctgggcttggcggctgggatcccccagcgccaggcgagggcgtctaaggcgtccggtacggcgtcggggccgggtggctgcagcagggcagggggtgcgcgaccagcggggatctgggcgcaggggccggtccccgggatccgcaggcgacgcgggcggtcccaagggcgtcgggggctcctctctccgcagctcggcgaaccgacggtgttggggactcgcgcgctgggtccagtggttcttaacagttcaacagttctgtagcgcaattgtgaaatgtttaggaccactagacccggcgggcgcggcgacagcgacggagcgtcccacgcgcggcctggagtcagagtcacagtcaggggtgcgccggcgaccaatccaggggagcccacggaccggctccgcgctccaggtcggccgccccatgcgccgcgccccgcagtccccagggcctggctggctccacctgctgccagggaagaccctcggccggagagccaagtgctgctgggaggtggccgggcgtggccgggctgtgctgtgggaaccgctgggtgggggcgc

SEQ ID NO: 466453 - DNA, 341 bp, Homo sapiens
  chr14:104603375-104603716
  hyper
  lymphoid_neoplasm vs. thyroid,myeloid_neoplasm
aggggcgcaggaccggtgctcccgaccgctgcgtgcttctgtgttgcgtgtgtgggtggggggacgggatatagagagtgtgtgtcccggagcagtggagcggcgggaggcggtgctgtctgccggcagtgcggggtggggtttgggtgttgtcctcagtacccagatccagatgtgggctgacgcccgttttcattctccaggctgcgaagagacgggtaggggaagcgcttccggccccccaggctgggtggaaagcgactgcaggcttacggatctcagaaagagtggagagcccctgccactttattccatacccccttgcgttttcgaacccctaa

SEQ ID NO: 466454 - DNA, 353 bp, Homo sapiens
  chr14:104603753-104604106
  hyper
  lymphoid_neoplasm vs. thyroid,myeloid_neoplasm
caccccactttctggggagtgcgtgcgtgggcggggaggcttatccaagtaaaagggggtgggcaaaacggaaagggtcactttgacgtactgagtctctgcgaaggcctcaccgtatgtgccggcagccgcgtgtcctggtctccgccgggtcacgaccttcggagtttccgagtgcgcctcaggcctgggacgcgcggcgctgtctccccagtctcggagccgtgtgcgcagcggccggcagggggcactcgcgtcacggggagcccgcccgccgcgcccgcctggcttgacccgggctttggggctgacccggagcctggcccggagctgcctgcggccgcggatgccgg

SEQ ID NO: 466455 - DNA, 83 bp, Homo sapiens
  chr14:104603633-104603716
  hyper
  lymphoid_neoplasm vs. myeloid_neoplasm,sarcoma,thyroid, breast,anorectal,head_and_neck,ovary
cgactgcaggcttacggatctcagaaagagtggagagcccctgccactttattccatacccccttgcgttttcgaacccctaa

SEQ ID NO: 466456 - DNA, 353 bp, Homo sapiens; identical to SEQ ID NO: 466454
  chr14:104603753-104604106
  hyper
  lymphoid_neoplasm vs. myeloid_neoplasm,sarcoma,thyroid, breast,anorectal,head_and_neck,ovary

SEQ ID NO: 466457 - DNA, 200 bp, Homo sapiens
  chr14:105070705-105070905
  hyper
  lymphoid_neoplasm vs. melanoma
cggggaggtgggtctgggggcgctgggggcatggaaggggcgccgcgccgggagcggcccccacttacccctcgtgtcccttgcagaggaagaagagcgtgcgccaggcgtgcgcggcggccagcagcagagacaggaggctggcgagcaggctgaagcggcaggcggccggcgggccccactcctgcaccgtgaagcgc

SEQ ID NO: 466458 - DNA, 63 bp, Homo sapiens
  chr14:105071236-105071299
  hyper
  lymphoid_neoplasm vs. melanoma
ccgcggacagctcctggtgcgcgcgggccaggagcccggggtccaggggccagagaagggcgg

SEQ ID NO: 466459 - DNA, 36 bp, Homo sapiens; identical to SEQ ID NO: 373572
  chr14:105071396-105071432
  hyper
  lymphoid_neoplasm vs. melanoma

SEQ ID NO: 466460 - DNA, 1 bp, Homo sapiens
  chr14:105330940-105330941
  hyper
  lymphoid_neoplasm vs. colorectal
c

SEQ ID NO: 466461 - DNA, 728 bp, Homo sapiens
  chr14:105330980-105331708
  hyper
  lymphoid_neoplasm vs. colorectal
cgtcgatgcccaccaccatcgcccccagctcagcccagagcgcccggggtcagaggtggagatgtcggacatacgcccagtctggccaggctcgggagggaaaatctgggagcggcctctggaactcaccctgactccttcaccgtccgctcctctttttggcttccggggccaaaggttggggactcgaggcgcggctggagcctacagctcctggagcgtagttaagcgttaacccgctggccctgggccagggcgcggggctgctgtgcgcacccggttccgcccgtcgagctggggccggaccgggaggcgaagcggggggcgctgccgagacgggagggcatggggtctgcgccgggtgcgagatgagccggggaggccagcggggcctgggcggtgggggaaggtgggcctggggcaggggcgggatggcggctcgccaagcctctgccgaccggaccacgcgcggggctaccggggcgggctcacctggcggccgcggacccgccctaacctggtttccggcggggcggcgcggggtgcggcgcggccgggcgggggcggggcgggcgggggcgtgcccggggcggggcgttccgggggcggggctgagcctcccgcagacgtcagggacccgcgcgcgaggccgccggcggccgctctgccgtgggctcggcccgggctgccacgagcgtgcgggcctcgccgggcatgtcctaggcggc

SEQ ID NO: 466462 - DNA, 156 bp, Homo sapiens; identical to SEQ ID NO: 373579
  chr14:105331744-105331900
  hyper
  lymphoid_neoplasm vs. colorectal

SEQ ID NO: 466463 - DNA, 94 bp, Homo sapiens
  chr14:105444359-105444453
  hyper
  lymphoid_neoplasm vs. pancreas_gallbladder
cggccgggaaggcccagaaccacgcgcgagtcccgcaggcgtctccgagtcccccgcccccaaggcccgcactgcgcgcccctggacacgcccc

SEQ ID NO: 466464 - DNA, 134 bp, Homo sapiens; identical to SEQ ID NO: 373581
  chr14:105444808-105444942
  hyper
  lymphoid_neoplasm vs. pancreas_gallbladder

SEQ ID NO: 466465 - DNA, 54 bp, Homo sapiens
  chr15:29130654-29130708
  hyper
  lymphoid_neoplasm vs. multiple_myeloma
cggaggccgcgatccccgagagttcttcgctcgagggttcttcgctctagggtc

SEQ ID NO: 466466 - DNA, 64 bp, Homo sapiens
  chr15:29862439-29862503
  hyper
  lymphoid_neoplasm vs. prostate,multiple_myeloma
gcgggcgcctggctgctgtttcctccaagaaaagtaactccgggaatcagcgcaataggagcgg

SEQ ID NO: 466467 - DNA, 207 bp, Homo sapiens
  chr15:29862582-29862789
  hyper
  lymphoid_neoplasm vs. prostate,multiple_myeloma
ctactcggccccggcgttggccgccggaacttgccgcccgcggtggcgtcccggcggccgcagcgcctagcccccccggcccgcgcagtccccggagcccgtccccgcctggtcgcggacactcaccgagaagcctgcccagaaggggcaggagtggcggacgcgggccgaggtggtgagcgccagcgcggcgaagctgactgccac

SEQ ID NO: 466468 - DNA, 64 bp, Homo sapiens; identical to SEQ ID NO: 466466
  chr15:29862439-29862503
  hyper
  lymphoid_neoplasm vs. renal

SEQ ID NO: 466469 - DNA, 289 bp, Homo sapiens
  chr15:29862582-29862871
  hyper
  lymphoid_neoplasm vs. renal
ctactcggccccggcgttggccgccggaacttgccgcccgcggtggcgtcccggcggccgcagcgcctagcccccccggcccgcgcagtccccggagcccgtccccgcctggtcgcggacactcaccgagaagcctgcccagaaggggcaggagtggcggacgcgggccgaggtggtgagcgccagcgcggcgaagctgactgccacgatgaggcatccgagcgccatctgcgtggccccgagcgccagcacgatgcgggagcggcccgggcactcgcgcaggcgggac

SEQ ID NO: 466470 - DNA, 67 bp, Homo sapiens; identical to SEQ ID NO: 351647
  chr15:29863222-29863289
  hyper
  lymphoid_neoplasm vs. renal

SEQ ID NO: 466471 - DNA, 330 bp, Homo sapiens
  chr15:30113537-30113867
  hyper
  lymphoid_neoplasm vs. liver_bileduct,renal, myeloid_neoplasm,pancreas_gallbladder,colorectal,melanoma, anorectal,bladder_and_urothelial,lung,breast,head_and_neck
cgtaggaatactttgtattacttgtgaaagtttaattcaagttaaattattaaatgttaaagaggttattttcaaagttaccttaaataagtaatacagcatgaaagaaaacccgacctactacgcctcacaggctgagtggagtgttttgcagtctcaaagccttatcgctggcgtgcgcataccgcagggagtgacatcagatcgaaactacagggtttcgccggggaccaaccactcctccaaagacagcagctcccggccagcaggaggtggcaccccaagccccgacccgctgagagccggcttccagcccccgaaccctcactg

SEQ ID NO: 466472 - DNA, 320 bp, Homo sapiens
  chr15:30113984-30114304
  hyper
  lymphoid_neoplasm vs. liver_bileduct,renal, myeloid_neoplasm,pancreas_gallbladder,colorectal,melanoma, anorectal,bladder_and_urothelial,lung,breast,head_and_neck
ccctccccggccgcccccagtgcggcccgcgccgcccccgcccgaggggctccccgcggcccgcggcccgcggcccgcggccccgcgccagccctgcccaccccgccgccccggggcccagacagccgccagcgagggagggcgggacgcgggccagatgccggtgggcgggcggcgacggtcggcccggtctggccctggcggccgcggaggcgctcaccttggcggccgcagctctggcggacatcttgtctctctccagcgccgcgcgaggctcctcggacccgaaactccgcggcgctggcccgcccgctcctcac

SEQ ID NO: 466473 - DNA, 21 bp, Homo sapiens
  chr15:30114349-30114370
  hyper
  lymphoid_neoplasm vs. liver_bileduct,renal, myeloid_neoplasm,pancreas_gallbladder,colorectal,melanoma, anorectal,bladder_and_urothelial,lung,breast,head_and_neck
cgggggcggccggaagggccc

SEQ ID NO: 466474 - DNA, 320 bp, Homo sapiens; identical to SEQ ID NO: 466472
  chr15:30113984-30114304
  hyper
  lymphoid_neoplasm vs. liver_bileduct,melanoma,renal,lung, ovary

SEQ ID NO: 466475 - DNA, 432 bp, Homo sapiens
  chr15:30114349-30114781
  hyper
  lymphoid_neoplasm vs. liver_bileduct,melanoma,renal,lung, ovary
cgggggcggccggaagggcccggcccagggggagggaattcaactcggacaaaagtccgggaagcgcccgccccgcccgggtcttctccacggggcgcgcccgaccggcacctccctccgagcgcggccacccactcggcctcccgcagctttcgcagcccggccacgtcggcctcgcccggtcgcccgcccgtcagcagcacccgtggcctcccggcgtctcctcggaagccggcttcgccacgtaacttcccgggaaccggcggccgccaaggaacgcggcgtccgctggctcagccggcgccggcaactcagcggccacgcaaacctgccggcccggcccactgagcatgcccggcccggcgggggcggggctggacgaggcgaggcgaggcgaggcggggagggggcggggccgcggcgggggagggg

SEQ ID NO: 466476 - DNA, 61 bp, Homo sapiens
  chr15:30114810-30114871
  hyper
  lymphoid_neoplasm vs. liver_bileduct,melanoma,renal,lung, ovary
aagcgcggaaggaaaagccgggtaacccaagtaacttggaagacagtttccgctgccgtgc

SEQ ID NO: 466477 - DNA, 387 bp, Homo sapiens
  chr15:30114394-30114781
  hyper
  lymphoid_neoplasm vs. liver_bileduct,lung,renal,melanoma, uterine,cervical,pancreas_gallbladder,colorectal
cggacaaaagtccgggaagcgcccgccccgcccgggtcttctccacggggcgcgcccgaccggcacctccctccgagcgcggccacccactcggcctcccgcagctttcgcagcccggccacgtcggcctcgcccggtcgcccgcccgtcagcagcacccgtggcctcccggcgtctcctcggaagccggcttcgccacgtaacttcccgggaaccggcggccgccaaggaacgcggcgtccgctggctcagccggcgccggcaactcagcggccacgcaaacctgccggcccggcccactgagcatgcccggcccggcgggggcggggctggacgaggcgaggcgaggcgaggcggggagggggcggggccgcggcgggggagggg

SEQ ID NO: 466478 - DNA, 376 bp, Homo sapiens
  chr15:30114810-30115186
  hyper
  lymphoid_neoplasm vs. liver_bileduct,lung,renal,melanoma, uterine,cervical,pancreas_gallbladder,colorectal
aagcgcggaaggaaaagccgggtaacccaagtaacttggaagacagtttccgctgccgtgcgagtcttcctgtttgtttttatccaaggtctggcagaattcgcccccaaggagaaagcgcctgtgcaccaaagctttccttaagagacttgtccacttgctcctcgacaagccacgcacatcatggggtgagccccatgcatgagtgcggctggaaaggccggcagagccgatacccgacagttgtttccttcactgggcaaacagcatggtcacggctgtcaccgcgtgcctcggcgttgttcccacggaaggcggaatgcattttctgcaaggcgcgtcatggctttcatctccgaggagctccggcagggtc

SEQ ID NO: 466479 - DNA, 210 bp, Homo sapiens
  chr15:32162282-32162492
  hyper
  lymphoid_neoplasm vs. myeloid_neoplasm, bladder_and_urothelial,thyroid,prostate,breast,anorectal, non_cancer,ovary,renal,uterine,cervical,head_and_neck, colorectal,lung,upper_gi,melanoma
cgtctgcaagagccgcgggacccccgacgcgcgcgcacggaccgaggggtcggtcgccccacgcctggcatcacgttccagtgcggacagccaaagggctgagcggaggcagcagccccgacccagcggtagcgccgcgccctgcccgagagaggcgcgccacgccgggccggagccggtggcccgggagcccgcggggtccggagcgga

SEQ ID NO: 466480 - DNA, 472 bp, Homo sapiens
  chr15:32162523-32162995
  hyper
  lymphoid_neoplasm vs. myeloid_neoplasm, bladder_and_urothelial,thyroid,prostate,breast,anorectal, non_cancer,ovary,renal,uterine,cervical,head_and_neck, colorectal,lung,upper_gi,melanoma
ccggggcccgcgccccccgcgtccccgcgccccggccccgcggtcgcccggcctcaacgcccacctgcctcgccacggagctcgggaaggagacggcgccggccccgcgcccggagagcgcacctgcctggtccgcgggcccggccccgccgcccgccggcagcaccgcggccagcgccgtcttacctgccgcgccgcgccgctccgctccgccagcccgcagcgccgcagtcgccgctacccgacttccattttctctcgctttaaaggaaaaccagatcagctgttttgctcccgctcgggctccgcggccccctccccagctgccgctcgcggtcccggtggcctctcctcccccgcctcctcccgcgctccgctccgcccctcgcgcccctccgctccgcccgcggccgcgcacaacgcccgcctcccggctccgcctgctgcctccgggcgcgcgccctcctctgac

SEQ ID NO: 466481 - DNA, 761 bp, Homo sapiens; identical to SEQ ID NO: 345467
  chr15:32162523-32163284
  hyper
  lymphoid_neoplasm vs. colorectal,non_cancer,uterine, ovary,renal,breast,prostate,lung,thyroid,upper_gi, bladder_and_urothelial,cervical,head_and_neck,myeloid_neoplasm, pancreas_gallbladder,anorectal

SEQ ID NO: 466482 - DNA, 24 bp, Homo sapiens
  chr15:33011671-33011695
  hyper
  lymphoid_neoplasm vs. myeloid_neoplasm,thyroid, non_cancer
cctcctcgaccgactccgaatctc

SEQ ID NO: 466483 - DNA, 301 bp, Homo sapiens
  chr15:39872823-39873124
  hyper
  lymphoid_neoplasm vs. liver_bileduct,lung
cgccccgtcggcccatttttctttttacaaaacgggcccagtctctagtatccacctctcgccatcaaccaggcattccgggagatcagctcgcccgaaagcccctgcgccaccccgcgggccctcctaggtggtctccccagccccgtcccttttcgggatgcttgctgatcaccccgagcccgcgtggcgcaagagtacgagcgccgagcccgtgcgcgccaaggctgcgtgggcgggcaccgacttttctgagaagttctagtgctcccaagccccgacccccgcccccttcactttc

SEQ ID NO: 466484 - DNA, 62 bp, Homo sapiens
  chr15:41913266-41913328
  hyper
  lymphoid_neoplasm vs. sarcoma
cgccacactcccataattacccaaaccgtctcattccaagcccaaggaccgggctttcaagg

SEQ ID NO: 466485 - DNA, 362 bp, Homo sapiens
  chr15:41913372-41913734
  hyper
  lymphoid_neoplasm vs. sarcoma
agaggtgcctttcccggcatgctctgcagcacaccgaggggcgccaggcgtatcccggcgtgcatcggggagcgcccaagggcgatggttcccggctcctggagaggcgtgcgaagttaagccggtaggtgcgagcttccttagctttgagcctctggtttctcgtttcctctttatgggtttaaatccataacggcagaaaaggatggccctctaactaccctccctctccgcgtgcgaacgactcggcgccgcttcgagctcggtgccaggtgattagcgggtaggggcgggcttgcgaccagcacgtgacccgaactggcagccaatgactagccgggtggtccagcagcgcgaggatt

SEQ ID NO: 466486 - DNA, 47 bp, Homo sapiens
  chr15:41913957-41914004
  hyper
  lymphoid_neoplasm vs. sarcoma
caggccgaggcgcacccacagctttccccggcgccccggggtgcgac

SEQ ID NO: 466487 - DNA, 199 bp, Homo sapiens
  chr15:41913535-41913734
  hyper
  lymphoid_neoplasm vs. head_and_neck,prostate,melanoma
cgtttcctctttatgggtttaaatccataacggcagaaaaggatggccctctaactaccctccctctccgcgtgcgaacgactcggcgccgcttcgagctcggtgccaggtgattagcgggtaggggcgggcttgcgaccagcacgtgacccgaactggcagccaatgactagccgggtggtccagcagcgcgaggatt

SEQ ID NO: 466488 - DNA, 211 bp, Homo sapiens
  chr15:41913957-41914168
  hyper
  lymphoid_neoplasm vs. head_and_neck,prostate,melanoma
caggccgaggcgcacccacagctttccccggcgccccggggtgcgacgtgttcactgaggttcgaccgggccctgacggcctgagcggtctttcgaagcgcgtgtgcggcctgtaaattctggccgcggcttttcgtggcgtcctgctccgcggtgagcacagacgacaagttctcagcaaaatggctgctggaaagagtcgccaagcagg

SEQ ID NO: 466489 - DNA, 31 bp, Homo sapiens; identical to SEQ ID NO: 360611
  chr15:41914240-41914271
  hyper
  lymphoid_neoplasm vs. head_and_neck,prostate,melanoma

SEQ ID NO: 466490 - DNA, 213 bp, Homo sapiens
  chr15:48009312-48009525
  hyper
  lymphoid_neoplasm vs. sarcoma
cgaaaaggttgcttcgcaggctgcagcacccactgcgagctggatgactgaggcactgggagttgctagaaggagcagctactcagaggtggggagagggagggtgcgcagcagagcgccggagaggagggacgcggaggccaccgaggggtcagcagggccgcggcgccagggtgggggcctccaggcggcgctggccacggttcacccgcg

SEQ ID NO: 466491 - DNA, 212 bp, Homo sapiens
  chr15:48009670-48009882
  hyper
  lymphoid_neoplasm vs. sarcoma
gccgtgcatcggtttgttttgctcctgctctgtcccgctgctgctgctgctgctgcaaggggtggtggcgagtttcaggattctatcaaggaagccaagacctaaggagacagagggatatctatttttacaatatttttctttattttctttcttccttgcgcgtggcaagcttttttttttctttttcttttttcttaccagcctccccc

SEQ ID NO: 466492 - DNA, 121 bp, Homo sapiens
  chr15:48009969-48010090
  hyper
  lymphoid_neoplasm vs. sarcoma
gtgtgtgtgtgtgtgtgtgtgtgcgcgcggtgggggtcggaacctgagatcccgaatcgctgtgtgtgtgtgtgtgtgtgtgtgtgtgtgtgtgtgtgtgtgtgtgttgccactggacagt

SEQ ID NO: 466493 - DNA, 144 bp, Homo sapiens
  chr15:48009738-48009882
  hyper
  lymphoid_neoplasm vs. uterine,melanoma,head_and_neck
cgagtttcaggattctatcaaggaagccaagacctaaggagacagagggatatctatttttacaatatttttctttattttctttcttccttgcgcgtggcaagcttttttttttctttttcttttttcttaccagcctccccc

SEQ ID NO: 466494 - DNA, 121 bp, Homo sapiens; identical to SEQ ID NO: 466492
  chr15:48009969-48010090
  hyper
  lymphoid_neoplasm vs. uterine,melanoma,head_and_neck

SEQ ID NO: 466495 - DNA, 208 bp, Homo sapiens; identical to SEQ ID NO: 351677
  chr15:48010897-48011105
  hyper
  lymphoid_neoplasm vs. head_and_neck

SEQ ID NO: 466496 - DNA, 228 bp, Homo sapiens; identical to SEQ ID NO: 457565
  chr15:53078992-53079220
  hyper
  lymphoid_neoplasm vs. multiple_myeloma

SEQ ID NO: 466497 - DNA, 771 bp, Homo sapiens; identical to SEQ ID NO: 335123
  chr15:57668421-57669192
  hyper
  lymphoid_neoplasm vs. bladder_and_urothelial, pancreas_gallbladder

SEQ ID NO: 466498 - DNA, 377 bp, Homo sapiens
  chr15:61519485-61519862
  hyper
  lymphoid_neoplasm vs. melanoma,sarcoma,prostate,breast, anorectal
cgctcgcattccaaatccaccgtctcagggtctaaatatactctttgcagccaaaagctccccgcacacaaactcaccgagctagcggcaggtccaggcccccagccctcatccccttcccttttgtcccagccctcgccgcccccctcccgctgaaaccgcggttcgccgcggtcaccctttggaaatcgcctttaattaaatgtttttcgcgtgtgtcatcctgatggcttttactgtactcgaattccgtgaatgggaaagcgcctggacagggggtgtggctaaggtggggggggggatactgtaaaacagccagcacatgatcagccatattcctacctccaactacaacatcgagaggaagggagcagttc

SEQ ID NO: 466499 - DNA, 88 bp, Homo sapiens
  chr15:62456599-62456687
  hyper
  lymphoid_neoplasm vs. myeloid_neoplasm,anorectal, multiple_myeloma,non_cancer
cggcgactccttccagcccgcagcgcgcgactcagcagcccgtcggggacgcgcaggaggcggcagcggcggggccccgcagcgagcg

SEQ ID NO: 466500 - DNA, 15 bp, Homo sapiens
  chr15:62456952-62456967
  hyper
  lymphoid_neoplasm vs. myeloid_neoplasm,anorectal, multiple_myeloma,non_cancer
gtccgtgcggccggc

SEQ ID NO: 466501 - DNA, 131 bp, Homo sapiens
  chr15:62457008-62457139
  hyper
  lymphoid_neoplasm vs. myeloid_neoplasm,anorectal, multiple_myeloma,non_cancer
cgcagcgccggggcacggcggcggcccggattggagactcgagcgtgcaaggggccggcagccgcggcgggatgcagaattcggggatgcgattcggcgtgagcactttggcgaaggcgggcttcggcgcg

SEQ ID NO: 466502 - DNA, 257 bp, Homo sapiens; identical to SEQ ID NO: 351695
  chr15:62457296-62457553
  hyper
  lymphoid_neoplasm vs. myeloid_neoplasm,anorectal, multiple_myeloma,non_cancer

SEQ ID NO: 466503 - DNA, 38 bp, Homo sapiens; identical to SEQ ID NO: 351696
  chr15:62684313-62684351
  hyper
  lymphoid_neoplasm vs. colorectal,sarcoma

SEQ ID NO: 466504 - DNA, 163 bp, Homo sapiens
  chr15:69366376-69366539
  hyper
  lymphoid_neoplasm vs. multiple_myeloma,cervical
cggagatgggctgtggagggggacgttgggaactgcccgaccccattctcgccttttcccgctggatgtgcagctttcggaacgtgcaggggcgggagtgtctacaacctaagaaaagggccgcggtggggagcccggagcagggctgggtgcagggagcgct

SEQ ID NO: 466505 - DNA, 65 bp, Homo sapiens; identical to SEQ ID NO: 351714
  chr15:69366730-69366795
  hyper
  lymphoid_neoplasm vs. multiple_myeloma,cervical

SEQ ID NO: 466506 - DNA, 362 bp, Homo sapiens
  chr15:71055275-71055637
  hyper
  lymphoid_neoplasm vs. colorectal,bladder_and_urothelial, breast
cggccgagcgggcgtgggcagcagggcgagcgccgggagaggagagcgacgagggggggtcaacggaaagagcggagtaggggtgccaatcgaggaactttggatttaggaggagggggccagaaccgccccactgaggtttcttccagaagttcggaggcttgggagaaaggggtggggaagagacccgtagaggctcgggtgcggcggcggggaggatccccggggtctctgggctgacggagtctccggcctcagggaggagtcgccagggccgccgaagccgaactggcagaggaaaagcagaggaaggcggcgcgcgaactcgccagcaaaggagggctgcgctgctcccggagcgg

SEQ ID NO: 466507 - DNA, 43 bp, Homo sapiens
  chr15:71055815-71055858
  hyper
  lymphoid_neoplasm vs. colorectal,bladder_and_urothelial, breast
gcagcggctgcagcagaggcggcgcgggctgtaccagccccac

SEQ ID NO: 466508 - DNA, 249 bp, Homo sapiens; identical to SEQ ID NO: 360688
  chr15:71055980-71056229
  hyper
  lymphoid_neoplasm vs. colorectal,bladder_and_urothelial, breast

SEQ ID NO: 466509 - DNA, 115 bp, Homo sapiens
  chr15:71146199-71146314
  hyper
  lymphoid_neoplasm vs. head_and_neck
cacctcccgggccagccgccgcgcctacctgtgcccgcggctcggctcctcctcgctcgcgctgccccagccggggctgaggtaccgggccgggtccccggcgccccgagtctcc

SEQ ID NO: 466510 - DNA, 82 bp, Homo sapiens
  chr15:71146345-71146427
  hyper
  lymphoid_neoplasm vs. head_and_neck
cgtcctcggcctcctggatggcgacgcggatctgcaccgccgtcttgggcccgggccgagcctccccgccggactgggccat

SEQ ID NO: 466511 - DNA, 65 bp, Homo sapiens; identical to SEQ ID NO: 360691
  chr15:71146754-71146819
  hyper
  lymphoid_neoplasm vs. head_and_neck

SEQ ID NO: 466512 - DNA, 194 bp, Homo sapiens
  chr15:71184276-71184470
  hyper
  lymphoid_neoplasm vs. bladder_and_urothelial,upper_gi, lung,cervical,colorectal
cgcgtgtccaggcggcctgcttggtctccctcctctcccctcttaggtgccggggcgggcacccggtgcagggtgggcacggcgcctgccaccagcctcaggcgctgggagaagcgcaggttcttctggataaccgaagagacgtcaaaacaggctggggcaaagtggtcagagcagatgaccgagcggtcatt

SEQ ID NO: 466513 - DNA, 588 bp, Homo sapiens
  chr15:71184499-71185087
  hyper
  lymphoid_neoplasm vs. bladder_and_urothelial,upper_gi, lung,cervical,colorectal
gcacgaagcggtcccagagcagccgcacggcccggtccttgggaaagcggaacagcgacttcccagacttggtggtgttgccgcagtgggcggccacacaacgggccggcatggcggccgtcttcggtgcgcgggagccgggttccctggaccttcgcccttgggcacgctcctcgcagcggcctcggcgaggcaagtcctcccctcctcacctgtccactccgggtcgggattgtttccttccctacctctggtcaccggaagtggcgatctggggcccccaatgggagggctctttgatatcttcctcctcctcctccctgcgctgctccccaggagccagtggacacaagcagagggatacaaatttcgcgcgggcagcgctgaggtgggccgtaaagaggaacggaccggaagtggtggtggttatagcaaccagtgtggccagcctcttccccagcttatcctcctcccaatactcccgctctgtttttatgaggctgggaaaatagaacgaggaagtggtgacgcactgggctctcacgaatacaactagaagctgcaacgactgtgtggctctatcgattc

SEQ ID NO: 466514 - DNA, 666 bp, Homo sapiens
  chr15:71184600-71185266
  hyper
  lymphoid_neoplasm vs. lung,colorectal,cervical,breast, bladder_and_urothelial,upper_gi
cgggccggcatggcggccgtcttcggtgcgcgggagccgggttccctggaccttcgcccttgggcacgctcctcgcagcggcctcggcgaggcaagtcctcccctcctcacctgtccactccgggtcgggattgtttccttccctacctctggtcaccggaagtggcgatctggggcccccaatgggagggctctttgatatcttcctcctcctcctccctgcgctgctccccaggagccagtggacacaagcagagggatacaaatttcgcgcgggcagcgctgaggtgggccgtaaagaggaacggaccggaagtggtggtggttatagcaaccagtgtggccagcctcttccccagcttatcctcctcccaatactcccgctctgtttttatgaggctgggaaaatagaacgaggaagtggtgacgcactgggctctcacgaatacaactagaagctgcaacgactgtgtggctctatcgattcgggagaggtccagaccggaaatggtcgtttccatggtaaccctgagcaggttgcctgggagatgacctctttcgggtctctttgaatctccgctgtagcgtcacctggaaggcagatctaacagagaacctggactgtctcctatcatgattcccgggaaatatcgctctgtttctggc

SEQ ID NO: 466515 - DNA, 127 bp, Homo sapiens; identical to SEQ ID NO: 351717
  chr15:71185295-71185422
  hyper
  lymphoid_neoplasm vs. lung,colorectal,cervical,breast, bladder_and_urothelial,upper_gi

SEQ ID NO: 466516 - DNA, 588 bp, Homo sapiens
  chr15:71407569-71408157
  hyper
  lymphoid_neoplasm vs. lung,thyroid,non_cancer,renal, colorectal,breast,bladder_and_urothelial,prostate, liver_bileduct,sarcoma,head_and_neck,melanoma,upper_gi,uterine, ovary,pancreas_gallbladder,anorectal
cgccccctcccgccctcgtggcctctgtctagaccgtactccctcctactgggtgatgtctcttcccctgggacccagggaccatcccgttgttgacctccggggtcaggggtgcggatgggggccggcccttcccgcggtcgccgccagggggcggcaggagcggctccagatgacagcgggaggccgcaagaggggagggaggaaggaccgagggagcgcggatcccgctctcggatcgcaaactctgagccagagctctccgcgcgcgcctgaaccgctggccgcccgcgcagcccgacgcggaatcggggcacagcgggagcccgtgcagggcgggcgcggggcggctgggcggcggtggcggccgtccatgcggcggcgctcggggctgcccggcgccgggaaccacgcgggggcgaggcgaggcgaggcggccgccggtcgctccgggacgcggaccgccaggtgagcagagccgcgcgccccgcgtcccctgcgcgccgcccgcgcggccccgacccggcttccgctgcccaggctccggctcccgctctctggccggcggggcgggctggcgcgggctac

SEQ ID NO: 466517 - DNA, 321 bp, Homo sapiens
  chr15:71407836-71408157
  hyper
  lymphoid_neoplasm vs. melanoma,lung,colorectal,thyroid, breast,upper_gi,bladder_and_urothelial,non_cancer,head_and_neck, liver_bileduct,uterine,renal,sarcoma,prostate,ovary, pancreas_gallbladder
cgcgcctgaaccgctggccgcccgcgcagcccgacgcggaatcggggcacagcgggagcccgtgcagggcgggcgcggggcggctgggcggcggtggcggccgtccatgcggcggcgctcggggctgcccggcgccgggaaccacgcgggggcgaggcgaggcgaggcggccgccggtcgctccgggacgcggaccgccaggtgagcagagccgcgcgccccgcgtcccctgcgcgccgcccgcgcggccccgacccggcttccgctgcccaggctccggctcccgctctctggccggcggggcgggctggcgcgggctac

SEQ ID NO: 466518 - DNA, 5 bp, Homo sapiens
  chr15:71408598-71408603
  hyper
  lymphoid_neoplasm vs. melanoma,lung,colorectal,thyroid, breast,upper_gi,bladder_and_urothelial,non_cancer,head_and_neck, liver_bileduct,uterine,renal,sarcoma,prostate,ovary, pancreas_gallbladder
tttcc

SEQ ID NO: 466519 - DNA, 118 bp, Homo sapiens; identical to SEQ ID NO: 335168
  chr15:72612103-72612221
  hyper
  lymphoid_neoplasm vs. bladder_and_urothelial

SEQ ID NO: 466520 - DNA, 448 bp, Homo sapiens; identical to SEQ ID NO: 351720
  chr15:73660925-73661373
  hyper
  lymphoid_neoplasm vs. pancreas_gallbladder,breast,renal, ovary,uterine

SEQ ID NO: 466521 - DNA, 987 bp, Homo sapiens; identical to SEQ ID NO: 373730
  chr15:73976461-73977448
  hyper
  lymphoid_neoplasm vs. pancreas_gallbladder

SEQ ID NO: 466522 - DNA, 61 bp, Homo sapiens; identical to SEQ ID NO: 457569
  chr15:79383268-79383329
  hyper
  lymphoid_neoplasm vs. breast

SEQ ID NO: 466523 - DNA, 60 bp, Homo sapiens; identical to SEQ ID NO: 459443
  chr15:83951722-83951782
  hyper
  lymphoid_neoplasm vs. head_and_neck,cervical

SEQ ID NO: 466524 - DNA, 228 bp, Homo sapiens; identical to SEQ ID NO: 459444
  chr15:83952822-83953050
  hyper
  lymphoid_neoplasm vs. anorectal

SEQ ID NO: 466525 - DNA, 76 bp, Homo sapiens; identical to SEQ ID NO: 373784
  chr15:93616753-93616829
  hyper
  lymphoid_neoplasm vs. bladder_and_urothelial

SEQ ID NO: 466526 - DNA, 461 bp, Homo sapiens
  chr15:96873798-96874259
  hyper
  lymphoid_neoplasm vs. cervical,colorectal
cgcgcgcgcgcctggccaggccaaccccggctgctgccttataaggcgcgccgtcgccatggcaacgtgcgctaagttgcagcagtcgtgtcaaagttcactatatagagagctcagtgagctgatcgcggagaagccacttctgccagccccggcgcctataaatcgcattccctcccgcgcccccctttttagcatatttgatcactttgattctctgttcttttctctccgcggtgtgtgtgtgcgtgcgcgcgtgtgtgttttcttcttctcctcctcctctccccgagttgcctcctttctccgggtgccgtactgccttttttcccctctttcattctttctctccgtctttttctcccccctctgcgcacgaaggatgtgcttctaggtggtgatctgccctcctctctctcttttatcatttctcccccgccgccggcgagttgactctttcc

SEQ ID NO: 466527 - DNA, 30 bp, Homo sapiens
  chr15:96874333-96874363
  hyper
  lymphoid_neoplasm vs. cervical,colorectal
cagcggcggcggcggcgctagacgcagcgg

SEQ ID NO: 466528 - DNA, 159 bp, Homo sapiens; identical to SEQ ID NO: 351748
  chr15:96874514-96874673
  hyper
  lymphoid_neoplasm vs. cervical,colorectal

SEQ ID NO: 466529 - DNA, 98 bp, Homo sapiens
  chr15:100881161-100881259
  hyper
  lymphoid_neoplasm vs. breast,prostate,non_cancer,uterine, myeloid_neoplasm
cgccccacccccaccctccacggcgaccactctgcgtcgcaacagaccggacgggccgacccggaggtggcgcgggcagtaccaggccgccggcggcg

SEQ ID NO: 466530 - DNA, 19 bp, Homo sapiens
  chr15:100882092-100882111
  hyper
  lymphoid_neoplasm vs. breast,prostate,non_cancer,uterine, myeloid_neoplasm
gccgtcacacatggtaccc

SEQ ID NO: 466531 - DNA, 468 bp, Homo sapiens; identical to SEQ ID NO: 345483
  chr15:100882092-100882560
  hyper
  lymphoid_neoplasm vs. melanoma,uterine,prostate,renal, breast,non_cancer,myeloid_neoplasm,ovary,thyroid,head_and_neck

SEQ ID NO: 466532 - DNA, 62 bp, Homo sapiens
  chr15:102028780-102028842
  hyper
  lymphoid_neoplasm vs. pancreas_gallbladder,upper_gi
cgacaacccagcggtgtagacattgccactgactgcaaaggagcttgtcaggggagcgactt

SEQ ID NO: 466533 - DNA, 503 bp, Homo sapiens
  chr15:102028992-102029495
  hyper
  lymphoid_neoplasm vs. pancreas_gallbladder,upper_gi
aggctcccggccatctacccccgggagccgcggacaccgagggagcgcgagtccccgagacgccgggccacgctcatgtcacccaagcagcggccgcggccgccttggcgcgcgcaccgggtccggagctcgcgccgcccgtcgagggcagaggggccgctcccccgcgggggagagccgggtgggcgcccaggacccagcggcggacggcgcgcgacgcctgaggcagcccagactcccccggagcccggcaggtgtccgcgccgccccggcttctgaggccacacttccgagcgcggggttgggcggcactgccgggggacttgcggtcggcgcgccggacctgcgtgggcgcccacgcgggaccccagtcccccccaccccgccgagtgtcccgcgcgcgcccccccgggcgacacccccccccgcagggcgccccggccgcccgccgtccccaagcggtcccggagccttcccacgcgcgcgcggggccggggccgggc

SEQ ID NO: 466534 - DNA, 262 bp, Homo sapiens
  chr15:102029233-102029495
  hyper
  lymphoid_neoplasm vs. sarcoma,bladder_and_urothelial, prostate,pancreas_gallbladder,breast,liver_bileduct,upper_gi, colorectal,uterine
cggagcccggcaggtgtccgcgccgccccggcttctgaggccacacttccgagcgcggggttgggcggcactgccgggggacttgcggtcggcgcgccggacctgcgtgggcgcccacgcgggaccccagtcccccccaccccgccgagtgtcccgcgcgcgcccccccgggcgacacccccccccgcagggcgccccggccgcccgccgtccccaagcggtcccggagccttcccacgcgcgcgcggggccggggccgggc

SEQ ID NO: 466535 - DNA, 142 bp, Homo sapiens; identical to SEQ ID NO: 351763
  chr15:102030030-102030172
  hyper
  lymphoid_neoplasm vs. sarcoma,bladder_and_urothelial, prostate,pancreas_gallbladder,breast,liver_bileduct,upper_gi, colorectal,uterine

SEQ ID NO: 466536 - DNA, 40 bp, Homo sapiens
  chr16:1967780-1967820
  hyper
cggtcccaaccccactgcccggagcgcacccctgctccct

SEQ ID NO: 466537 - DNA, 224 bp, Homo sapiens
  chr16:1967909-1968133
  hyper
accggtaccaggcgaggccgcgctcgtagcacctgtcgaagaagtggggctcagagcccagcgcgcggacgtcggggtgcagccgcagaaactccagcagggcgcgcgtgccgcccttcttcacgccaacgatgagcgcttgcgggaagcgccggcggccgggaccgctggccaaaggcaggccgggtgctcccgggcggtggacggagctggacggctcggag

SEQ ID NO: 466538 - DNA, 30 bp, Homo sapiens
  chr16:2070510-2070540
  hyper
  lymphoid_neoplasm vs. head_and_neck
cggccttgctgtgttctcgttagagacttc

SEQ ID NO: 466539 - DNA, 283 bp, Homo sapiens
  chr16:4165534-4165817
  hyper
  lymphoid_neoplasm vs. sarcoma,myeloid_neoplasm,upper_gi, breast,renal,colorectal
cgcctagaggcccgggacctgctcctgtcctaaggggcggctccagcacgcgacctggacaggcaccatctgttcctgtggttcccggctcagcggtgctcccaccgcccccaccgcccccaccttcgaggcgcacgagaaccgctcgggacggacctagaacgcccgggggtccccgccgcgtggccgccgtggctccgggaccgctttgctcgctcgccttccgcgcctctcgccccgagggtggcctccgcgccgcgcggcttctcctcctcgcgcgctc

SEQ ID NO: 466540 - DNA, 648 bp, Homo sapiens
  chr16:4165852-4166500
  hyper
  lymphoid_neoplasm vs. sarcoma,myeloid_neoplasm,upper_gi, breast,renal,colorectal
accttgagcgctcccagccccgcgagccgcctgcgcacaaacaactccgctggcggcgcggagccctccatcctgcaggagccgcgctccgatgcgtcaaaggcggcgcgcggccggccccgggcccggaccccgacccggagcagcgagcttcggcgggcgcccccggctcgcgctccccggccgccccccgcgctccgggccggccctgcccgcggcggcgggcgctgggggtgggggcgccccgggctgcgagtgcgcggagcccgtcggcgcggcccgtctagtggggcctgcttccccccgagtgcgccgccgctcccgccgcggccgcagctgtcccgggaccgagcgcgtggaaccacggacgcgggcccctcgccgggcggcggtgcagacgctgccgcagagccgggctcccgcgacgccggccgggacgcccgcccgcccgcgcccacgccgggggccgcctccccgagctagagatgcggccgccgccgcgcccgccgccgtgtcccccgcggccgctgcctcatgtcggaagagctgccgccgccaccatctccggcccctgccccgcccgctgtcactgacagacgcgcgcccgcgccgcccctcgcccagccgcagcgcgcacgcgcggcccgc

SEQ ID NO: 466541 - DNA, 961 bp, Homo sapiens
  chr16:4166005-4166966
  hyper
  lymphoid_neoplasm vs. cervical,liver_bileduct,upper_gi, pancreas_gallbladder
cggcgggcgcccccggctcgcgctccccggccgccccccgcgctccgggccggccctgcccgcggcggcgggcgctgggggtgggggcgccccgggctgcgagtgcgcggagcccgtcggcgcggcccgtctagtggggcctgcttccccccgagtgcgccgccgctcccgccgcggccgcagctgtcccgggaccgagcgcgtggaaccacggacgcgggcccctcgccgggcggcggtgcagacgctgccgcagagccgggctcccgcgacgccggccgggacgcccgcccgcccgcgcccacgccgggggccgcctccccgagctagagatgcggccgccgccgcgcccgccgccgtgtcccccgcggccgctgcctcatgtcggaagagctgccgccgccaccatctccggcccctgccccgcccgctgtcactgacagacgcgcgcccgcgccgcccctcgcccagccgcagcgcgcacgcgcggcccgcgctcgccgccaccgcctcctggccccggacacgcgcacgggccgcgcgccgccccgccttggtgcgcgcgctgggctggggctgcggggcggggcggggcggggcggggcgcgcgctcggctccgccccccgccccgggcggcgccgcttctaggcggcgggctgtggccgctgtccgcgctccgggcgctgtgggcccgccctccctcggcgtcccagaggccgcgcgccgcccggggtcccgaccctgcggagagacctgaaggcgcctgccgtggaagaagccgctggccgcaacgtttgggaaatcaaaatgttgccttcccactcggcacgcctttgggataaatcgaagtttccaaccgttggatttccctcccgggaggctccccttgctctgtaagcaatgaatgcgggccccggggcactcggcctgccctggacctgctcacggggcgaccttcac

SEQ ID NO: 466542 - DNA, 664 bp, Homo sapiens; identical to SEQ ID NO: 335281
  chr16:5007944-5008608
  hyper
  lymphoid_neoplasm vs. pancreas_gallbladder

SEQ ID NO: 466543 - DNA, 380 bp, Homo sapiens; identical to SEQ ID NO: 373861
  chr16:23724334-23724714
  hyper

SEQ ID NO: 466544 - DNA, 167 bp, Homo sapiens; identical to SEQ ID NO: 360802
  chr16:25704644-25704811
  hyper
  lymphoid_neoplasm vs. melanoma

SEQ ID NO: 466545 - DNA, 33 bp, Homo sapiens; identical to SEQ ID NO: 335318
  chr16:31483764-31483797
  hyper
  lymphoid_neoplasm vs. pancreas_gallbladder

SEQ ID NO: 466546 - DNA, 66 bp, Homo sapiens
  chr16:49316711-49316777
  hyper
  lymphoid_neoplasm vs. myeloid_neoplasm,thyroid
cttttctgttttgcacttaaaatttacattttgcatccgtactttttatttactgtgcacccttac

SEQ ID NO: 466547 - DNA, 156 bp, Homo sapiens; identical to SEQ ID NO: 351799
  chr16:49316844-49317000
  hyper
  lymphoid_neoplasm vs. myeloid_neoplasm,thyroid

SEQ ID NO: 466548 - DNA, 756 bp, Homo sapiens; identical to SEQ ID NO: 335327
  chr16:52579636-52580392
  hyper
  lymphoid_neoplasm vs. liver_bileduct,upper_gi, bladder_and_urothelial

SEQ ID NO: 466549 - DNA, 781 bp, Homo sapiens; identical to SEQ ID NO: 360821
  chr16:54316061-54316842
  hyper

SEQ ID NO: 466550 - DNA, 72 bp, Homo sapiens
  chr16:54318434-54318506
  hyper
  lymphoid_neoplasm vs. bladder_and_urothelial
cgagcgaaggcggcggcggcagccgggtggcccgcggctccgggaagtcccagcaggtgcggaggggcagag

SEQ ID NO: 466551 - DNA, 16 bp, Homo sapiens
  chr16:54318750-54318766
  hyper
  lymphoid_neoplasm vs. bladder_and_urothelial
tgggcttctgcagggc

SEQ ID NO: 466552 - DNA, 46 bp, Homo sapiens
  chr16:54318853-54318899
  hyper
  lymphoid_neoplasm vs. bladder_and_urothelial
cgctggagccagactcaggaccggtagtggccggtcctctaagccc

SEQ ID NO: 466553 - DNA, 302 bp, Homo sapiens
  chr16:54319053-54319355
  hyper
  lymphoid_neoplasm vs. bladder_and_urothelial
cagccaggccctcgccccccgtgtcctcctcctcccccccgagctcctcctcctccagctctagctcgcgtttgccgtcctcctcgtcctcctcttcgtcttcctcctcgcgctcgctcccataagcgtttccctcctcgtcagtgcggctgcgaggcgcccaagtcatcttattctccttcttgaggcgccggcgcgcgttggcgaaccaggtggacacctgggtgagggtcatcttggtgatgatggccagcatgatcttctcgcccttggtggggtaggggttcttgcggtgctcgttg

SEQ ID NO: 466554 - DNA, 727 bp, Homo sapiens; identical to SEQ ID NO: 351800
  chr16:54319649-54320376
  hyper
  lymphoid_neoplasm vs. cervical,lung,sarcoma

SEQ ID NO: 466555 - DNA, 860 bp, Homo sapiens
  chr16:54319880-54320740
  hyper
  lymphoid_neoplasm vs. ovary
cgccgctgccgccagcggcccccgggcgctcggacgggtaaagcgggcggatgtattggtatcccagctgggggaaggacatggtggcccgcggggcacggacggagaggggggccgacccccgggccgcccagctcagcgccgcccgcgggctccggcgcgcatcgggggctgggccgggcttggggccgcgctgccgcccgcgctgcgctgtgctccgcgttcgcctattgatctgctccgcggcggcgacggcggcggcgagggcggcggcgaggagccaggtcaggtccgaacagattggcggagattcccggggctccgggctctgattgacatttctacggggcgcaagcccctcctctctgcgccgcgctccctcctctcggccgccggagctgcctctgcccgctcctcgctcctcactgccctcctctccccagcagtgtcgcgcctcgcttccttcgccctcctctagttttcactccccctcctcgcccttcctctcccctcccctctccgcactcctcttccccccaggatcgcttccgctgcttcgggctcctgcactgccctggacgctatgaaactctcctttctcctctccccttctctttccctttctcacgagggcttttgctctccggtccgttcccttcacttcttcctttctcactacttctattttgtaaatctctctctttactcacacgatactccccgcgacctttccagcctctgcgccctgggctaagtaaggcagccaaaagttgtggacacttagggtgccgcgcggggggtgtgtgtcggtgtctgtctgtccatccccgcccttccaccccctccctcgcctttcccca

SEQ ID NO: 466556 - DNA, 340 bp, Homo sapiens
  chr16:54320400-54320740
  hyper
  lymphoid_neoplasm vs. sarcoma,cervical,myeloid_neoplasm
cgcactcctcttccccccaggatcgcttccgctgcttcgggctcctgcactgccctggacgctatgaaactctcctttctcctctccccttctctttccctttctcacgagggcttttgctctccggtccgttcccttcacttcttcctttctcactacttctattttgtaaatctctctctttactcacacgatactccccgcgacctttccagcctctgcgccctgggctaagtaaggcagccaaaagttgtggacacttagggtgccgcgcggggggtgtgtgtcggtgtctgtctgtccatccccgcccttccaccccctccctcgcctttcccca

SEQ ID NO: 466557 - DNA, 207 bp, Homo sapiens
  chr16:54321080-54321287
  hyper
  lymphoid_neoplasm vs. sarcoma,cervical,myeloid_neoplasm
gctcgcacctctcgactcccggccactttcagcagcttagggagggagctagcagccggcgtgggggtggggagcgagggagtgcgtcctaacagagtctccagaggccacctcgctgccttgcgggggcgaggcagcccccaacccagcaggaccaaacccagagattagccacttaacgccgcccccgggtccgtgtgcgaatcc

SEQ ID NO: 466558 - DNA, 207 bp, Homo sapiens; identical to SEQ ID NO: 466557
  chr16:54321080-54321287
  hyper
  lymphoid_neoplasm vs. cervical

SEQ ID NO: 466559 - DNA, 230 bp, Homo sapiens
  chr16:54962422-54962652
  hyper
  lymphoid_neoplasm vs. cervical,lung,melanoma,renal
cggaaagccgtgtcccggacgagagccgcggcgacgaagggaacaggcgtggacagaggagccacgcccacgcgcgcccgccccgaaccccgacacccggagaggctcgaccggcgccgacgcggcccgaggcccaggccctagcccacgggacgtctggtcgggcgcggggcaccgccgcgtccgttcggcccacgaggggacacgactagaggggcggacggcgcggc

SEQ ID NO: 466560 - DNA, 367 bp, Homo sapiens; identical to SEQ ID NO: 351803
  chr16:54962936-54963303
  hyper
  lymphoid_neoplasm vs. cervical,lung,melanoma,renal

SEQ ID NO: 466561 - DNA, 161 bp, Homo sapiens
  chr16:55689618-55689779
  hyper
  lymphoid_neoplasm vs. prostate
tggagagtctgtcactcgctccccgtggtgggagatcagaggcctggtgtccttgggagcggcgagcggtgctcggcgcaggatagaaagggagtgcgcgcccgagtcccccagatccctgggaacccgcgccaccctcccgcccctgcccatccccggcc

SEQ ID NO: 466562 - DNA, 25 bp, Homo sapiens
  chr16:55689852-55689877
  hyper
  lymphoid_neoplasm vs. prostate
cgttacctggggcgcaggctacatt

SEQ ID NO: 466563 - DNA, 165 bp, Homo sapiens; identical to SEQ ID NO: 455735
  chr16:56671950-56672115
  hyper
  lymphoid_neoplasm vs. multiple_myeloma

SEQ ID NO: 466564 - DNA, 232 bp, Homo sapiens
  chr16:57318148-57318380
  hyper
  lymphoid_neoplasm vs. pancreas_gallbladder,uterine
cgtccgtgcgggaagcgccctaggggtacgcgcagcgcgtcggtgacagtgtgagcccgggtggggagcgcaaggttcgcgaaaaatgaacgcagcgccggagtccctcacccatcctggccggaccgggagcccccggccaaccccgtgggcccgcgcgtgctctcaccagctgcagcagcatgagcgccccgaggcgggagcgcacgaagcccaggtccgggcgcagcgc

SEQ ID NO: 466565 - DNA, 204 bp, Homo sapiens; identical to SEQ ID NO: 360846
  chr16:57318412-57318616
  hyper
  lymphoid_neoplasm vs. pancreas_gallbladder,uterine

SEQ ID NO: 466566 - DNA, 677 bp, Homo sapiens
  chr16:62069435-62070112
  hyper
  lymphoid_neoplasm vs. multiple_myeloma
agctgagccttggcccgcagccctgccgcgggggtcgccctccctcgcctcggagatgaggcggtgcagaaaaccagccatagaccactcgggccccctcgcctccttttttccctggcttgcaccctccgcacagcgggctgcaggtgcttcccattcaccgcacggaccccgcagtgaaggcgcgcggctgcagccgcgcctgcctgcgttgggaagcggcgaaatagccaagtcgccgcagggaaggaaaccggcaggaaaactggaggggcacagcctggagcttgctactctctaggatctgttgtcaaagcagtttgcaaaaacagtcaggcaaaaccttgaggcgtacgtacgttatcacccacggatatcgcgaaagacacagcttagcccagagcctatgctaagaaccctcatccaccatctgaggggcaggaggcgcgcaaggtgtccgaaggggcatgggaattcctataagaaacggtcccttctggatagtcggaacatagaggaaaacgggggtgggttaggggaacacttactcttgtggggccctgcgctggcgaatgtcaagcctccaggttcacaaatggctggaggtgctcggggttagctcccgagggcggcaagcgccgaccggtcctcgctcgctaggcaggcgcctccggatt

SEQ ID NO: 466567 - DNA, 1 bp, Homo sapiens
  chr16:62070245-62070246
  hyper
  lymphoid_neoplasm vs. multiple_myeloma
c

SEQ ID NO: 466568 - DNA, 206 bp, Homo sapiens
  chr16:65157317-65157523
  hyper
  lymphoid_neoplasm vs. prostate
gtttgaaagggctagaggggaggagacgggcccaggagttaacggaaaaagaggccgaaaacggaagagaaagcttgggatcctgagcgcatggggaaggaaccccagtgcggggctaaggcaagagcggccgagccctgccctccagctcctggtcaccagcccgcgggtcccgagcgcccgcagccgcccgggtttccacacgg

SEQ ID NO: 466569 - DNA, 2 bp, Homo sapiens
  chr16:67427309-67427311
  hyper
  lymphoid_neoplasm vs. cervical
cg

SEQ ID NO: 466570 - DNA, 151 bp, Homo sapiens; identical to SEQ ID NO: 373928
  chr16:67427472-67427623
  hyper
  lymphoid_neoplasm vs. cervical

SEQ ID NO: 466571 - DNA, 709 bp, Homo sapiens; identical to SEQ ID NO: 360868
  chr16:68771324-68772033
  hyper
  lymphoid_neoplasm vs. liver_bileduct,upper_gi

SEQ ID NO: 466572 - DNA, 909 bp, Homo sapiens; identical to SEQ ID NO: 360869
  chr16:71659877-71660786
  hyper
  lymphoid_neoplasm vs. upper_gi

SEQ ID NO: 466573 - DNA, 180 bp, Homo sapiens
  chr16:79633613-79633793
  hyper
  lymphoid_neoplasm vs. liver_bileduct,prostate
cgtgctcatgggggtggaggacagcgagcccccggcgatgagacggccgcactggctgatgatgcggtcggtctccaccggttcctttttcacttcaaacttcatcagatcgaagtcattaacatattccatggccaggggactggtgggcaggtcggagttgctcattgccagttctga

SEQ ID NO: 466574 - DNA, 98 bp, Homo sapiens; identical to SEQ ID NO: 360878
  chr16:79633843-79633941
  hyper
  lymphoid_neoplasm vs. liver_bileduct,prostate

SEQ ID NO: 466575 - DNA, 180 bp, Homo sapiens; identical to SEQ ID NO: 466573
  chr16:79633613-79633793
  hyper
  lymphoid_neoplasm vs. liver_bileduct,breast, head_and_neck

SEQ ID NO: 466576 - DNA, 492 bp, Homo sapiens
  chr16:79633843-79634335
  hyper
  lymphoid_neoplasm vs. liver_bileduct,breast, head_and_neck
gctgcaggagaggggccagcgggctgtgctgggtggccagcgggtgagccagcttgccgggctggggcgcttctagcttgcgcggcggtggctggcccgaaacctccgagcgcgctcacacacacacccccccgccctgcccgcgccccccgcgcccgccctccctcccccctgctcacgccaatgtgctccctcgctcgccccggcccctccttgctcgctcgcctccttgcgcgccgagccggcggcttcaggctcgggaagatcctccgcgagctgcggtggcggcggtggtggctgcggcggcgaagctggaggagcccggcccggtgcgcggcgtcccccgctcgccgctccgctgcgcgctttgcataaggaagggctcgcctcgccggcccgggctgcaggcagggcgcgcgcggcgtccgctcggggctggaggcgcggcgggcgtctgtccgggcggcgcgggccttggcacgggggagttaa

SEQ ID NO: 466577 - DNA, 46 bp, Homo sapiens
  chr16:79634364-79634410
  hyper
  lymphoid_neoplasm vs. liver_bileduct,breast, head_and_neck
ttggctctctttattattttttttctttcctctctctccctcgcgc

SEQ ID NO: 466578 - DNA, 386 bp, Homo sapiens
  chr16:79633949-79634335
  hyper
  lymphoid_neoplasm vs. renal,liver_bileduct,breast, head_and_neck
cgagcgcgctcacacacacacccccccgccctgcccgcgccccccgcgcccgccctccctcccccctgctcacgccaatgtgctccctcgctcgccccggcccctccttgctcgctcgcctccttgcgcgccgagccggcggcttcaggctcgggaagatcctccgcgagctgcggtggcggcggtggtggctgcggcggcgaagctggaggagcccggcccggtgcgcggcgtcccccgctcgccgctccgctgcgcgctttgcataaggaagggctcgcctcgccggcccgggctgcaggcagggcgcgcgcggcgtccgctcggggctggaggcgcggcgggcgtctgtccgggcggcgcgggccttggcacgggggagttaa

SEQ ID NO: 466579 - DNA, 395 bp, Homo sapiens
  chr16:79634364-79634759
  hyper
  lymphoid_neoplasm vs. renal,liver_bileduct,breast, head_and_neck
ttggctctctttattattttttttctttcctctctctccctcgcgcgctctctacctctgtgcaaagtgcaaggcagaggtgcagcccgactggaggagagggaggggggagtttagttctttcttgcctttttttaaaaaagcaaaatagcgaagtcctggggaaagacgaggcagagagcaaaggggggagggggaggccaagccgacaagcagcccgagctacagctagaagatgaaaaaagattttaaagcctctgatccagcaagaagagtttaaagcaattgctgagttttatagcactcgtgacgtcaggtccaaatgagaaattgactggcactccgggccaatgggaggcggcgagagcggccgcgattagcataatagtatagaa

SEQ ID NO: 466580 - DNA, 308 bp, Homo sapiens
  chr16:79634451-79634759
  hyper
  lymphoid_neoplasm vs. renal,liver_bileduct,head_and_neck
cgactggaggagagggaggggggagtttagttctttcttgcctttttttaaaaaagcaaaatagcgaagtcctggggaaagacgaggcagagagcaaaggggggagggggaggccaagccgacaagcagcccgagctacagctagaagatgaaaaaagattttaaagcctctgatccagcaagaagagtttaaagcaattgctgagttttatagcactcgtgacgtcaggtccaaatgagaaattgactggcactccgggccaatgggaggcggcgagagcggccgcgattagcataatagtatagaa

SEQ ID NO: 466581 - DNA, 86 bp, Homo sapiens
  chr16:79804157-79804243
  hyper
  lymphoid_neoplasm vs. sarcoma,myeloid_neoplasm,anorectal, colorectal,breast,renal,bladder_and_urothelial,non_cancer, prostate,uterine
cgtgtgtgcgtgtgtgcgtgtgttcaagggctgggggctcaattgtgagaggtggcccaggggccggttagagactgggaaggacg

SEQ ID NO: 466582 - DNA, 102 bp, Homo sapiens
  chr16:79804457-79804559
  hyper
  lymphoid_neoplasm vs. sarcoma,myeloid_neoplasm,anorectal, colorectal,breast,renal,bladder_and_urothelial,non_cancer, prostate,uterine
cgcgcccccagccccgccccgccttaaaaaaaaaaaaaaaaaagaagaagagaaagagccgccgggagaagcgcggacgccgccgcttcccgggctccagcc

SEQ ID NO: 466583 - DNA, 97 bp, Homo sapiens; identical to SEQ ID NO: 351841
  chr16:79804596-79804693
  hyper
  lymphoid_neoplasm vs. sarcoma,myeloid_neoplasm,anorectal, colorectal,breast,renal,bladder_and_urothelial,non_cancer, prostate,uterine

SEQ ID NO: 466584 - DNA, 190 bp, Homo sapiens; identical to SEQ ID NO: 360893
  chr16:84853661-84853851
  hyper
  lymphoid_neoplasm vs. ovary,upper_gi

SEQ ID NO: 466585 - DNA, 816 bp, Homo sapiens; identical to SEQ ID NO: 351849
  chr16:85202563-85203379
  hyper
  lymphoid_neoplasm vs. renal,ovary,lung,prostate, colorectal

SEQ ID NO: 466586 - DNA, 513 bp, Homo sapiens
  chr16:85202887-85203400
  hyper
  lymphoid_neoplasm vs. renal,prostate
cgccgcgttccgggcgcgctcgccgcggcgccgcctcggcccgcgccgccgccggggggtgctcggcaggcccgggggggcgccgctgcgaggggccgtgcgcccgcgcccgcgccggccgcccgccgccaaactttgcggcgcgcacacatgctccaagttgggcgcggcggcggcggcctgggcgggagctgagggcggcccggggcgcgcgggggcccgggcgggcggcgcggcgcggccatgagcgggcggccggccccggtctcccgcaagcagcggctcatggcagccgtgggcgagcgggctgcgggcggcgcgccgctctcctgcttcatctgcggcggcggcatcgggcgcggcaaggagctgaagctgcaggtgaagcagccggcggcgggcgcggggaccccggcgcagcccttcttcccgttcctgcagcagcaggagccggcgcccggcgcgcgcgagctgtccccggccgacggctgcgtgttggtgtgcgccgtgtgc

SEQ ID NO: 466587 - DNA, 100 bp, Homo sapiens; identical to SEQ ID NO: 360895
  chr16:85203606-85203706
  hyper
  lymphoid_neoplasm vs. renal,prostate

SEQ ID NO: 466588 - DNA, 246 bp, Homo sapiens
  chr16:86531701-86531947
  hyper
  lymphoid_neoplasm vs. thyroid
cggcccgcacccgaccaaattttaaaaattgggagggttttggggactgcaatggaaaatcagctggccccggccccagactccgtctacactggcacagacaggtggagtacaaagccggcttcctggatgattcaggccccaaatcgtaggtagaaatgtgcaagtaatggaccttcgatctgctttccctcccttagcacataatccgtagtattcgctgtttcccgttgcccctatagacac

SEQ ID NO: 466589 - DNA, 389 bp, Homo sapiens; identical to SEQ ID NO: 335407
  chr16:86609636-86610025
  hyper
  lymphoid_neoplasm vs. cervical,ovary

SEQ ID NO: 466590 - DNA, 802 bp, Homo sapiens; identical to SEQ ID NO: 345501
  chr16:87525701-87526503
  hyper
  lymphoid_neoplasm vs. cervical,upper_gi,renal,prostate, breast,lung,uterine,sarcoma,colorectal,ovary,non_cancer, head_and_neck,bladder_and_urothelial

SEQ ID NO: 466591 - DNA, 505 bp, Homo sapiens; identical to SEQ ID NO: 335410
  chr16:87526565-87527070
  hyper
  lymphoid_neoplasm vs. head_and_neck,lung,ovary, pancreas_gallbladder,renal,upper_gi,breast,cervical,thyroid, melanoma,colorectal,bladder_and_urothelial,uterine,prostate, non_cancer,anorectal,multiple_myeloma,myeloid_neoplasm,
  CONT. FROM ABOVE: liver_bileduct

SEQ ID NO: 466592 - DNA, 60 bp, Homo sapiens; identical to SEQ ID NO: 462521
  chr16:87635912-87635972
  hyper
  lymphoid_neoplasm vs. melanoma

SEQ ID NO: 466593 - DNA, 190 bp, Homo sapiens; identical to SEQ ID NO: 462522
  chr16:87636008-87636198
  hyper
  lymphoid_neoplasm vs. melanoma

SEQ ID NO: 466594 - DNA, 83 bp, Homo sapiens; identical to SEQ ID NO: 360908
  chr16:87637320-87637403
  hyper
  lymphoid_neoplasm vs. sarcoma,anorectal,myeloid_neoplasm

SEQ ID NO: 466595 - DNA, 9 bp, Homo sapiens
  chr16:89268343-89268352
  hyper
  lymphoid_neoplasm vs. thyroid
cgggggcgt

SEQ ID NO: 466596 - DNA, 2 bp, Homo sapiens
  chr16:89268533-89268535
  hyper
  lymphoid_neoplasm vs. thyroid
tc

SEQ ID NO: 466597 - DNA, 3 bp, Homo sapiens
  chr16:89268811-89268814
  hyper
  lymphoid_neoplasm vs. prostate
cgc

SEQ ID NO: 466598 - DNA, 2 bp, Homo sapiens
  chr16:89268991-89268993
  hyper
  lymphoid_neoplasm vs. prostate
cc

SEQ ID NO: 466599 - DNA, 425 bp, Homo sapiens; identical to SEQ ID NO: 360915
  chr16:89323587-89324012
  hyper
  lymphoid_neoplasm vs. colorectal,prostate,uterine

SEQ ID NO: 466600 - DNA, 159 bp, Homo sapiens; identical to SEQ ID NO: 460767
  chr17:1901335-1901494
  hyper
  lymphoid_neoplasm vs. pancreas_gallbladder

SEQ ID NO: 466601 - DNA, 100 bp, Homo sapiens; identical to SEQ ID NO: 351869
  chr17:1901970-1902070
  hyper
  lymphoid_neoplasm vs. pancreas_gallbladder

SEQ ID NO: 466602 - DNA, 206 bp, Homo sapiens
  chr17:2658616-2658822
  hyper
  lymphoid_neoplasm vs. colorectal,pancreas_gallbladder
cgagtagtttacttctttaggcatcacttcctgggtagaacgggtttcctaagggagtaaggcacagaacgaggcaatgggccgcctggtctctccgcgcgtcagtaggactcggggaaccagactccgcccagtgctccccagaaacccggctcctcggcgcggcggggagagacccggacggggagaggccgctgtcccgcccg

SEQ ID NO: 466603 - DNA, 256 bp, Homo sapiens; identical to SEQ ID NO: 291880
  chr17:2658859-2659115
  hyper
  lymphoid_neoplasm vs. colorectal,pancreas_gallbladder

SEQ ID NO: 466604 - DNA, 440 bp, Homo sapiens; identical to SEQ ID NO: 360932
  chr17:2756601-2757041
  hyper
  lymphoid_neoplasm vs. pancreas_gallbladder

SEQ ID NO: 466605 - DNA, 965 bp, Homo sapiens; identical to SEQ ID NO: 360956
  chr17:9548277-9549242
  hyper
  lymphoid_neoplasm vs. liver_bileduct

SEQ ID NO: 466606 - DNA, 731 bp, Homo sapiens
  chr17:9548765-9549496
  hyper
  lymphoid_neoplasm vs. head_and_neck
cgtgccgccggattcccgcgcggggcggggctgccccgcccttggctccgcctccgccccgtccccgcacacctggcccgcaggtagccggcaccaggagccttagagaagctgtagggcctgctggccgctcgtccgcctcgcgcccgggggctccgcgcctggagctgcgccggcggcagccatggacctgggccccggggacgcggcaggagggggaccgctcgcgccccggccccgccgccgccgctccctgcgccgcctgttcagccgcttcctgctggcgctgggcagccgctcacgccccggggactcaccgccccggccccagccgggacactgtgatggcgacggtgaggggggcttcgcctgcgccccgggcccagttccagcggcccccgggagccccggggaggaacgcccgcccggaccccagccccagctccagctccccgccggcgatggggcgcggccgccgggcgctcagggcttgaagaaccacggcaacacctgtttcatgaacgcggtggtgcagtgtctcagcaacaccgacctgctggccgagttcctggcgctggggcgctaccgggcggctccgggccgcgccgaggtcaccgagcagctggcggcgctggtgcgcgcgctctggactcgcgaatacacgccccaactttccgcggagttcaaggtaggcagcgctgcgccgccgaccgccctgtccccctggtttc

SEQ ID NO: 466607 - DNA, 267 bp, Homo sapiens
  chr17:15244586-15244853
  hyper
  lymphoid_neoplasm vs. ovary
tgggcatcccttgaaaacccttgaaaagcatcagaaaggtaaattacgaggaaaccaacgtctgggtgggaggtgcctgtggatttgtacggtttttatttggaaggaaaagtgaagatcgcggggaggaattgcagggtgtccgcgacctcccgcgatcctgaggcgagaagttggagtcctggttggcgaagggggatcctttggggtagtcctagaggcaggctagagtcagcgagaccactcacctgtcggcggatgcccggc

SEQ ID NO: 466608 - DNA, 416 bp, Homo sapiens
  chr17:19770859-19771275
  hyper
  lymphoid_neoplasm vs. ovary,uterine,pancreas_gallbladder
gggcggactctcatgccgagagaccggagcggaaactggggaagctgccgcgcggagccagggtcagcgaggcccggcccggcccctgccgctcatggcccggcctgccgccggccgctggctgtctggcgaagcggcctcggcgctgccgggccaggggtgccgtcaccgtcactgtgcgcgcccagagccgcacacgcgctctgaggcagtgaggggcccggtactctccatccccagctcgtcgggcctcctcggccctccccgctcggggcgctgctgcgacggcgacggccgccgccctagaacccgcaccgccgcggccccgcgcttccccgcctcgcggcggcgcccaacgccctcgcgcgcgctacccgctcccgcgcgactggctgccctccgcgacgtccgcgcgc

SEQ ID NO: 466609 - DNA, 79 bp, Homo sapiens
  chr17:32907146-32907225
  hyper
  lymphoid_neoplasm vs. multiple_myeloma
cccctctgcatcttacagcgtttatggtcatcaagctggagtcgacgtcctgggcaggaagggctcggggcagggcgca

SEQ ID NO: 466610 - DNA, 146 bp, Homo sapiens; identical to SEQ ID NO: 360999
  chr17:32909146-32909292
  hyper
  lymphoid_neoplasm vs. melanoma,multiple_myeloma

SEQ ID NO: 466611 - DNA, 86 bp, Homo sapiens
  chr17:36101946-36102032
  hyper
  lymphoid_neoplasm vs. sarcoma
cgtgtgttcaccgggaagagccgggagagctggttatttttgtttgtttgtttgaaaacacagctcaggttcagaggttccctaac

SEQ ID NO: 466612 - DNA, 203 bp, Homo sapiens
  chr17:36102080-36102283
  hyper
  lymphoid_neoplasm vs. sarcoma
aagcgcaggtgtcaaacgccggccgcggcgcccgcagggtccgtcccgcacgctccttctcaaacaatgactttgctgcccacgagcagagaagcctggactccagcgcagtccgcagcgcgttcgttaaggagcccaacttcggcttcttagaatgcagcccactttctagacgcccccggcgcacctgcctcgaggccgcg

SEQ ID NO: 466613 - DNA, 280 bp, Homo sapiens
  chr17:39683530-39683810
  hyper
  lymphoid_neoplasm vs. pancreas_gallbladder,cervical
cgaatgggccccagggcgggagagtgggaggaggccaaagcctgagagggatgaacactagacccttccggccagagaaacggaatgcaggaggccctacgctgcggtggcagagggggcaagactggccccgggtggaccagatcaccaaagccaaactctcgcatcttcctgcggcagcgcggcccctggcctagacctctgggcactctacagccgggtcccatctcctcccactcttcaggcctcgctgacccgcgtcccttcttcgtcccggggc

SEQ ID NO: 466614 - DNA, 487 bp, Homo sapiens
  chr17:39683839-39684326
  hyper
  lymphoid_neoplasm vs. pancreas_gallbladder,cervical
ccccacccacttatctgccctgcccagttctcctcccctttccaccaccccggcctctgcatccagccccgaggtcctgccccgcacgtctcctgtccccctttactcggccccacctgtggaccttcccacgtcctaacgggctcctgcccgccgccccgcctggaacctcgcccggcccgcggggctgggtttccgcggcaggtgcactgcacttcccgcggccgggcctccgcccaccttgtcccgcaggtcctggatggtcgtgtagtagtggctgtagtcgcgggagggcccaggcccctgcttctggtaccagtcgcggatcttcacctctagctcgccgttggccgcctccagggcgcgcaccttgtccaggtaggaggccaggcggtcgttgaggttctgcatggttagcttctcgttgcccgccagcagcccgtcggacgcggtcaggacgccgccgtagccgccgccgtaggccccc

SEQ ID NO: 466615 - DNA, 744 bp, Homo sapiens
  chr17:39683889-39684633
  hyper
  lymphoid_neoplasm vs. cervical
cggcctctgcatccagccccgaggtcctgccccgcacgtctcctgtccccctttactcggccccacctgtggaccttcccacgtcctaacgggctcctgcccgccgccccgcctggaacctcgcccggcccgcggggctgggtttccgcggcaggtgcactgcacttcccgcggccgggcctccgcccaccttgtcccgcaggtcctggatggtcgtgtagtagtggctgtagtcgcgggagggcccaggcccctgcttctggtaccagtcgcggatcttcacctctagctcgccgttggccgcctccagggcgcgcaccttgtccaggtaggaggccaggcggtcgttgaggttctgcatggttagcttctcgttgcccgccagcagcccgtcggacgcggtcaggacgccgccgtagccgccgccgtaggcccccgaggaggacgaggacacaaagcgggcggaggacacggatacgccgcggccgccggagcccccgtgaatgctgggcgcgcgaaaggcgacccccggcccaaaacgcacggagccgccgcccaggcctccgaaggacgacgtggccgacgactggcgatagctgtaggaagtcatggcgaggcggagcacggacggagcaaccctggtctcagaagctgcgattcgcgggaggagcggcgaggccctcacctggcgccttttatgcccgcggccggtggaggggggaagggaggaatggtgtcaggggc

SEQ ID NO: 466616 - DNA, 188 bp, Homo sapiens
  chr17:42061046-42061234
  hyper
  lymphoid_neoplasm vs. upper_gi,pancreas_gallbladder
cgctccccggggccgggtcttaggcgcacattggctcgcggtgcacgtccactctcctgtaggctcgtgcccttgacatatccggggctgtcacagtcccatgccccgaccccgaccccgcgcgagtctgcttgatgacgtcgctgtcgcaccccaccggcctccccgggtcctccccaggcgcgcgc

SEQ ID NO: 466617 - DNA, 149 bp, Homo sapiens; identical to SEQ ID NO: 351942
  chr17:42061420-42061569
  hyper
  lymphoid_neoplasm vs. upper_gi,pancreas_gallbladder

SEQ ID NO: 466618 - DNA, 83 bp, Homo sapiens; identical to SEQ ID NO: 361058
  chr17:44919338-44919421
  hyper
  lymphoid_neoplasm vs. bladder_and_urothelial

SEQ ID NO: 466619 - DNA, 39 bp, Homo sapiens
  chr17:45500788-45500827
  hyper
  lymphoid_neoplasm vs. liver_bileduct
cgtcggctgcgcccgcggcccggggcggagttggccacc

SEQ ID NO: 466620 - DNA, 380 bp, Homo sapiens
  chr17:45500865-45501245
  hyper
  lymphoid_neoplasm vs. liver_bileduct
cgcaggtggctcctccttcgcttctcccgatccccggccgtgccaggcacggtgccggctgccgagggaacgcctttgtgcccggtcctgggaacccgcgacggccgccgcgcgccccggtccattgtttcgcttctctgggttccaggtaggtgcgggcggcgcgcggggtccgcacgacgtgtcaccccggcggttggggcgccgggacccgcgggcgccggcaggggcgttcccgggcgcacggcggcggtgcagcacctgaagcggtggtggtcggccagcggcggcctcctgcacctcaccctcctgcaccttaccctcctgctgagctttgctgggctccgtgtagacctagacctttacctgctactgccgcc

SEQ ID NO: 466621 - DNA, 55 bp, Homo sapiens; identical to SEQ ID NO: 351978
  chr17:46832887-46832942
  hyper
  lymphoid_neoplasm vs. multiple_myeloma

SEQ ID NO: 466622 - DNA, 456 bp, Homo sapiens
  chr17:48711989-48712445
  hyper
  lymphoid_neoplasm vs. pancreas_gallbladder
cgactcctggactgttagcctcggtatttagagagacatccccctggcttggcccaggggccgctcgcaggggctgtcgccgtgccaagggcccccccacctctgccccaaagtccctcccagggaggcgctgtcgcaacccgcgggacgggggcagggagaccggacccagaggcactggggtagggctcggcagggcgggtccgggcggagcgcggggtgcggagggcggaggcggctccggcgcccgctctgcccgccgctgggtccgaccgcgctcgccttccttgcagccgcgcctcggccccatggacgccctgtgcggttccggggagctcggctccaagttctgggtaaggcgcggggctccggggtcactgcgcgggggccagggtcggccggcttcgcccggtccccgccgcctgccttcccgcggggccggcaggtatcccggga

SEQ ID NO: 466623 - DNA, 102 bp, Homo sapiens; identical to SEQ ID NO: 374205
  chr17:48712602-48712704
  hyper
  lymphoid_neoplasm vs. pancreas_gallbladder

SEQ ID NO: 466624 - DNA, 731 bp, Homo sapiens
  chr17:52977560-52978291
  hyper
  lymphoid_neoplasm vs. head_and_neck
cgcacacctcccctcccggatctctaggacaaaggcaggtcgagggtaaatatttctagttattcagtatattcagtggctaactatttattttgtgggtaccagacaccgacataatcggttacgtccttcccttaattctcataattctgaggtttgtgttattaaccccctattatctttggtctacccagggcagccaaagaggcgcagagaagaatgacaaggtgcccagcaagcggcaggatcaaagcctgggtctctaattcccaggctggagattctgggctgcctgctcctcctgcacggggcgaaaagcccacctgggatccgagcgggcggccgcgccactctcgcaggctccatacacccgccactacccgcctgtaccacctgcagccggcagcgcagcctcctcgcgggtcccgcagggcgcgctgcaggtgcgctgggcgtcccgaagccccgccctcgcgtccctgccccgcgcccagctcctcacgctcggtgcccgcgccccgcagcggcagcgcagaacgcaccgcctctgccagagcccgggaagcgctcgggcgaagaggaggagccaagggtaccgagcgggtggagtcgggagccggagagcggtggaggcggatttcctgggcccggccctctggcgctaccatggcgtttggcaagagtcaccgggatccctacgcgacctccgtgggccacctcataggtaagga

SEQ ID NO: 466625 - DNA, 235 bp, Homo sapiens; identical to SEQ ID NO: 457617
  chr17:54673684-54673919
  hyper

SEQ ID NO: 466626 - DNA, 281 bp, Homo sapiens; identical to SEQ ID NO: 361100
  chr17:54674073-54674354
  hyper

SEQ ID NO: 466627 - DNA, 669 bp, Homo sapiens; identical to SEQ ID NO: 335649
  chr17:64187889-64188558
  hyper
  lymphoid_neoplasm vs. upper_gi,pancreas_gallbladder, colorectal,ovary,liver_bileduct,uterine

SEQ ID NO: 466628 - DNA, 675 bp, Homo sapiens; identical to SEQ ID NO: 352002
  chr17:64298985-64299660
  hyper
  lymphoid_neoplasm vs. renal,ovary,uterine,sarcoma, upper_gi

SEQ ID NO: 466629 - DNA, 4 bp, Homo sapiens
  chr17:64960741-64960745
  hyper
  lymphoid_neoplasm vs. melanoma,sarcoma,ovary, bladder_and_urothelial,breast,uterine,non_cancer, myeloid_neoplasm
cggg

SEQ ID NO: 466630 - DNA, 61 bp, Homo sapiens
  chr17:64961305-64961366
  hyper
  lymphoid_neoplasm vs. melanoma,sarcoma,ovary, bladder_and_urothelial,breast,uterine,non_cancer, myeloid_neoplasm
acacacgcgcgcgcgcgcgcgcgcacacacacacacgcgcacacactgcccggcgcgcggg

SEQ ID NO: 466631 - DNA, 81 bp, Homo sapiens
  chr17:64961625-64961706
  hyper
  lymphoid_neoplasm vs. melanoma,sarcoma,ovary, bladder_and_urothelial,breast,uterine,non_cancer, myeloid_neoplasm
aggtggaggctggcgagggggcgggaggaggctggggttggggggagcggacgggagggggggaggggttgcttggcaacc

SEQ ID NO: 466632 - DNA, 61 bp, Homo sapiens; identical to SEQ ID NO: 466630
  chr17:64961305-64961366
  hyper
  lymphoid_neoplasm vs. ovary,head_and_neck,breast,uterine, non_cancer,sarcoma

SEQ ID NO: 466633 - DNA, 203 bp, Homo sapiens
  chr17:64961625-64961828
  hyper
  lymphoid_neoplasm vs. ovary,head_and_neck,breast,uterine, non_cancer,sarcoma
aggtggaggctggcgagggggcgggaggaggctggggttggggggagcggacgggagggggggaggggttgcttggcaaccggtgtctgtgctattgctatgggaactggccatcctggggcggggccggccgggggcggggcgcgtcggtgccgctgggcgctttctacaggctcgggctgaggggtgggggcagaagtagg

SEQ ID NO: 466634 - DNA, 83 bp, Homo sapiens; identical to SEQ ID NO: 347465
  chr17:64962141-64962224
  hyper
  lymphoid_neoplasm vs. ovary,head_and_neck,breast,uterine, non_cancer,sarcoma

SEQ ID NO: 466635 - DNA, 50 bp, Homo sapiens
  chr17:68164458-68164508
  hyper
  lymphoid_neoplasm vs. renal
cgactgcgccgtccacaataccagctagtttgctgaattagttcagcgac

SEQ ID NO: 466636 - DNA, 197 bp, Homo sapiens
  chr17:68164537-68164734
  hyper
  lymphoid_neoplasm vs. renal
ctgcacaaaagacacatttgatcgctcgagaaaataaacatttaaaaaactcagtggaaagaaagactcctaaaatatatcctgtcctttaggagcaaagcttcgttaggacaccgaagtactcagaaataataggcacttactcttcggtttacacacacacacacacacacacacacggattagtttataaagtt

SEQ ID NO: 466637 - DNA, 205 bp, Homo sapiens; identical to SEQ ID NO: 454239
  chr17:68164928-68165133
  hyper
  lymphoid_neoplasm vs. renal

SEQ ID NO: 466638 - DNA, 205 bp, Homo sapiens; identical to SEQ ID NO: 454239
  chr17:68164928-68165133
  hyper
  lymphoid_neoplasm vs. renal,anorectal

SEQ ID NO: 466639 - DNA, 722 bp, Homo sapiens
  chr17:70588172-70588894
  hyper
  lymphoid_neoplasm vs. bladder_and_urothelial
cgcttggaggcagggggatgactaaaatgacctccaagaagatgtcaattacaagaacaaaaatttcaacccggaatctcgagaccttcgaaaaacgacgcggaggaaaaaaggaaagaaagaaaagaaagtaaatcagatcccttccccgaaccgcagggaaacttacctccagcttggcgacccagctgttaagcagaacaaatcaatccacggatggagaagaggtcgtgggtcttctgagcccagctgatacacaccaagtaatccacgttaaggggtccgcagccccccacccaattccccactttccatccaaggccaaagagcagccagaccctgtcctctgcgctccagactcgcggaggtcgcgggcgggggtcctcaggcggccgccttctcgtccccaggggtgggcgcgcgacgcgggcagggaccgggcgcccggaggaccaagcgagcgcatcccgcctactcgtgctgggacatcacccagcctggacgccgctcctcgcctttcttccccgcgcatcgccagcgccaaccaaagatccccgccgggaaagcctctctgccaagctggaaagcgctgaaggcggatcgtctctcagacttgggtttgcaggttcacaaggcccgggaggcttacggtgggcgcctgcctaacagagggtccttgcggagaagcgcagaacgacaaatgccagaggcggtgaccgcgt

SEQ ID NO: 466640 - DNA, 63 bp, Homo sapiens
  chr17:72427030-72427093
  hyper
  lymphoid_neoplasm vs. colorectal,pancreas_gallbladder, liver_bileduct,ovary,bladder_and_urothelial,renal,lung, anorectal,upper_gi
cgcgggcgctcagggttgagcaaacactccgggccgcccgccccgccaccagctggctccgac

SEQ ID NO: 466641 - DNA, 220 bp, Homo sapiens
  chr17:72427594-72427814
  hyper
  lymphoid_neoplasm vs. colorectal,pancreas_gallbladder, liver_bileduct,ovary,bladder_and_urothelial,renal,lung, anorectal,upper_gi
tgaaggctaattaggacaagtcggagcagggaacggggacgccgggaggggagagcgcgctccgagttgggcagaacctggaacggtcacaggaaacccgggcgcggggtagtcgggccgagggggacctttgcccacggtccagagtggtctggactcggcccacgcgtgagaggagcgcttggtgacgatcccacgtacgcttggtgactggtggagg

SEQ ID NO: 466642 - DNA, 220 bp, Homo sapiens; identical to SEQ ID NO: 466641
  chr17:72427594-72427814
  hyper
  lymphoid_neoplasm vs. liver_bileduct, bladder_and_urothelial,colorectal,renal,lung,ovary,cervical

SEQ ID NO: 466643 - DNA, 333 bp, Homo sapiens
  chr17:72427999-72428332
  hyper
  lymphoid_neoplasm vs. liver_bileduct, bladder_and_urothelial,colorectal,renal,lung,ovary,cervical
gaaggtgacaaaggctaggtgtcccccacggagacgcgccaaggtagccccgcgcgtgtccgtaggcgcgctctctggaagacgcggtggggggtgcgcagggctgcaccctcacaccaattgccccggcgaaggccgagcccagaaagtgagtgcgcgtgagtgtgcgcgcgcccgcatgcgggggcgtggcagtcaacagcaacaacccacacgccggcagggccagaaactcccatctccctcaccagccggaaagtacgagtcggctcagcctggaggtgagtcggggcggggagggccgggcaggctttgttcctgtgtaaacggagc

SEQ ID NO: 466644 - DNA, 333 bp, Homo sapiens; identical to SEQ ID NO: 466643
  chr17:72427999-72428332
  hyper
  lymphoid_neoplasm vs. pancreas_gallbladder,prostate, ovary,upper_gi,cervical,lung,liver_bileduct

SEQ ID NO: 466645 - DNA, 341 bp, Homo sapiens
  chr17:72428489-72428830
  hyper
  lymphoid_neoplasm vs. pancreas_gallbladder,prostate, ovary,upper_gi,cervical,lung,liver_bileduct
cggtcccagggagaggcaggccctgcgtcccggcccgggccccgccatcccagccaggaccgggcctggcccagcgccccgcgccgcgtccctcccacccccgcccgccccccgcctggggctggagttggccccaaacgctgcgctggagcggggccggcggcgagtcccaggtaagggctgctgccttcccgctccgccgcccggaagagtcgggtcgggacggcggggagtgggcgagggcagaggcggggggactggacatcctgcgggctggggacgccgcgccaactccgctcggtcgctgaaagttttcaaacccgagccggctggggactggg

SEQ ID NO: 466646 - DNA, 69 bp, Homo sapiens; identical to SEQ ID NO: 352015
  chr17:72428872-72428941
  hyper
  lymphoid_neoplasm vs. pancreas_gallbladder,prostate, ovary,upper_gi,cervical,lung,liver_bileduct

SEQ ID NO: 466647 - DNA, 360 bp, Homo sapiens
  chr17:72449954-72450314
  hyper
  lymphoid_neoplasm vs. head_and_neck,pancreas_gallbladder, colorectal,myeloid_neoplasm,upper_gi,bladder_and_urothelial, sarcoma,prostate
cggtggcttgcctcacccccaactccaccgacggcaggagagggtccgcgggggcccgggcccagggaaggttttacgctccgtccttaacccagcgtcctaacctgacccggctgggagagggggcggggccccggaaccccacccgcagacagcccactcccccgcacgcacctgggttgggggaggtggggggcggtggggggcagtgaaggtggggggaggtgggggtgggcccgagcagccggcgcgcccacgtgcctctcccgcgagggcccggccaccccagctccagccaacccgaggccgcctctcgtgccccaccccaagccccgccccggcccctgcaacccgatcctc

SEQ ID NO: 466648 - DNA, 336 bp, Homo sapiens; identical to SEQ ID NO: 347467
  chr17:72450330-72450666
  hyper
  lymphoid_neoplasm vs. head_and_neck,pancreas_gallbladder, colorectal,myeloid_neoplasm,upper_gi,bladder_and_urothelial, sarcoma,prostate

SEQ ID NO: 466649 - DNA, 24 bp, Homo sapiens
  chr17:72667260-72667284
  hyper
  lymphoid_neoplasm vs. sarcoma
cgtggtgacggagatgcccgttcg

SEQ ID NO: 466650 - DNA, 8 bp, Homo sapiens
  chr17:72667681-72667689
  hyper
  lymphoid_neoplasm vs. sarcoma
cgcagagc

SEQ ID NO: 466651 - DNA, 42 bp, Homo sapiens; identical to SEQ ID NO: 464314
  chr17:77788305-77788347
  hyper
  lymphoid_neoplasm vs. anorectal,myeloid_neoplasm

SEQ ID NO: 466652 - DNA, 234 bp, Homo sapiens; identical to SEQ ID NO: 464315
  chr17:77788400-77788634
  hyper
  lymphoid_neoplasm vs. anorectal,myeloid_neoplasm

SEQ ID NO: 466653 - DNA, 258 bp, Homo sapiens
  chr17:77814493-77814751
  hyper
  lymphoid_neoplasm vs. anorectal
cggcccgaggggcaggggcaggggcgcgcctggcctggggtgtgtctgggccccggctccgggctcttgaaggaccgcgagcaggaggcttgcgcaatcccttggctgagcgtccacggagaaagaaaaagagcaaaagcagagcgagagtggagcgagggatgggggcgggcaaagagccatccgggtctccaccaccgccctgacacgcgacccggctgtctgttggggaccgcacgggggctcgggcgagcaggg

SEQ ID NO: 466654 - DNA, 222 bp, Homo sapiens
  chr17:77814929-77815151
  hyper
  lymphoid_neoplasm vs. anorectal
ggggtgtaggggtgacggttgtcttctggtgacagcagaggtgttgggtttgcgactgatctctaacgagcttgaggcgcaaacctaggattccctgagtgttggggtgcggcgggggggcaagcaaggtgggacgacgcctgcctggtttccctgactagttgcggggggtgggggccggctctcaggggccaccagaagctgggtgggtgtacaggaaaa

SEQ ID NO: 466655 - DNA, 754 bp, Homo sapiens
  chr17:79008842-79009596
  hyper
  lymphoid_neoplasm vs. pancreas_gallbladder,lung,ovary, uterine,colorectal,breast,upper_gi,prostate,cervical,anorectal, renal,non_cancer
cgggggcggtgatgcgggcgcaacgggggcgggacgcaggggcggggactgccgcggggcggggcctgaggcggctataaaggtggccgccgccggacgccgggctctgtggttcgggtccgctttcgtctccgtcctgctgccgttaccgccgctgctgccgccgcttgcgtcccccgctccggtctgtggtgcagccgggacccaggaccatgtctctgtctcgctcagaggagatgcaccggctcacggaaaatgtctataaggtgagcgccccccggcgccgagctgagcccgctccgtgtgcgcctgggtcgcgcgccgcccgcgcgcccgagcccgaccagggcggccccggggccgcgcgccgggccaggaggctgggactttgggggtcttcccggcgcggccacccgggacccgggctgctggggtggtgagcccggcgccggccgctcacaggtggccacccccgcccgggcccccccatcccatgcgcgccgcggcccggtcagtccccagccccaggcccggggagcactccccgctccgacggccctgctcggcccccgcgcgctcgccttggcgtcggcgggaacggagccgcgcgccgggccccggaagccctcggaccggtcggggtcgtagcacacccgggcagggccggggcggcgggggcggcgggcccaggggttgcggcggccaggacggcatgggggctgtctgaaggccgcggtcggcgcggtggcaccgt

SEQ ID NO: 466656 - DNA, 43 bp, Homo sapiens; identical to SEQ ID NO: 352039
  chr17:79009691-79009734
  hyper
  lymphoid_neoplasm vs. pancreas_gallbladder,lung,ovary, uterine,colorectal,breast,upper_gi,prostate,cervical,anorectal, renal,non_cancer

SEQ ID NO: 466657 - DNA, 284 bp, Homo sapiens
  chr17:79317890-79318174
  hyper
  lymphoid_neoplasm vs. head_and_neck
agcaggaggggcgaggagacttgcgcagtcagggagccgcgaaccccgagtctcggtcctcgaaggcggcaggagaaaccgcgcgctgtgccccgacctctctcgccctggccaaccgcgacttgggacgagctggaggagcttcccccgggctccggacgcccgcgccgaaaaccgggccatgggtaccaaacccgactctaggcggtcattcactttgtccccacccaaactctgatgagctatttgggagtgcgcggggactgggaagtgagggactttta

SEQ ID NO: 466658 - DNA, 26 bp, Homo sapiens
  chr17:79318209-79318235
  hyper
  lymphoid_neoplasm vs. head_and_neck
ccacccatcttgcctccttcgcctcc

SEQ ID NO: 466659 - DNA, 620 bp, Homo sapiens
  chr17:80655727-80656347
  hyper
  lymphoid_neoplasm vs. upper_gi,colorectal
cttccgcacgcgagtcacctgtgctccttcctctcccccggacacgcgggacccctggcctcgggaccggaccctggtctcccctcccctccgacccacgcgcagacccagcacctgggcgcctgctcgccgcgctccgccccaggagccccggagctcgcgtcccctcccgcccctcctgccccgcggccgaacgcgcacttgcggactcgagcccccgccccgggtccccacagcagcggccccaggtcgggaggagcccagcgcccggcccagccgcgggctcccgctgcgcgcagactgcggagaaggatggagactgcgccgcggggcctcgagtggaactgggggtgcaacagggacgccgcagcacgagggccagggccgggcggagaaaggcccgcccgcgaaccgcgctcctcctcagccccgcgcccccggaccgggactcctaccctccccggccacgcgccccggcctcttcccgacccctgcccggtctcgcgtccccggacccggacccccacccgcaccccctccccagccccgcgcccctccccggccccgcgcccgcaccccggcacgccctccgcccgcgctcacccgccgggtggccgtac

SEQ ID NO: 466660 - DNA, 991 bp, Homo sapiens
  chr17:80655854-80656845
  hyper
  lymphoid_neoplasm vs. colorectal
cgccgcgctccgccccaggagccccggagctcgcgtcccctcccgcccctcctgccccgcggccgaacgcgcacttgcggactcgagcccccgccccgggtccccacagcagcggccccaggtcgggaggagcccagcgcccggcccagccgcgggctcccgctgcgcgcagactgcggagaaggatggagactgcgccgcggggcctcgagtggaactgggggtgcaacagggacgccgcagcacgagggccagggccgggcggagaaaggcccgcccgcgaaccgcgctcctcctcagccccgcgcccccggaccgggactcctaccctccccggccacgcgccccggcctcttcccgacccctgcccggtctcgcgtccccggacccggacccccacccgcaccccctccccagccccgcgcccctccccggccccgcgcccgcaccccggcacgccctccgcccgcgctcacccgccgggtggccgtacggggactcggccgcgccatcctgcaggctcgccaggatctcgcccttgcccacgtcgctgtcgcccaccagcaggaacttgagcagaaagtcgtaggcccggaccgggctgcccagggcgctcatcgtgacggcccggcgcccccacccatgcccggcctgcggggctgagcgcagaggcggcggcccggccccgagaggcgccgcgcgggccccgagtccttgctcgcctccggccccgccccgccgcccagcgctgacagcgcgcatccccgcccggccccgccattggtggaccgcagttgctagggcagctgcgcgctttcactggcttggttgtccgtccatcttactctcgtcaccgcctccgggctgtcgcccacccgcccctcctgaaaggtcgctgtcaccacagccaatggaggcccggagacggggcaggggcggagccagaacaagcaggaggcggggactctgctcccgcagccaatggcggggc

SEQ ID NO: 466661 - DNA, 340 bp, Homo sapiens
  chr17:80692978-80693318
  hyper
  lymphoid_neoplasm vs. liver_bileduct
cgtgtatgcatgcatgggcgcgcgtgggcattcctgtgtctcaagtccctttcccaggacatcctggaatcagcagccccaccctgggccgggtcagcgcgtgccatcggagcccccacgtcagcctctctctccgatcggcacctggcgtcccagtgcgcaagccccacgtcatcacgggggccgctgggcccggcctggtctgcagtgtgggaagccggccaggcctgtgaccagcgcccgggccgagggccggacctgcgtccgctgcggggcagggataccgggtccctgcagggagctcaagccccagcgcgcccgcgaagagctgcgcggactc

SEQ ID NO: 466662 - DNA, 285 bp, Homo sapiens; identical to SEQ ID NO: 374309
  chr17:80693554-80693839
  hyper
  lymphoid_neoplasm vs. liver_bileduct

SEQ ID NO: 466663 - DNA, 443 bp, Homo sapiens; identical to SEQ ID NO: 361178
  chr17:81036717-81037160
  hyper
  lymphoid_neoplasm vs. pancreas_gallbladder,lung

SEQ ID NO: 466664 - DNA, 239 bp, Homo sapiens
  chr18:499804-500043
  hyper
  lymphoid_neoplasm vs. prostate
cggcctgcagaggacaccgcgcagggggcgactaaccagctgaggtgtgtcaccccaaaacaccagtgggcacaccccaaggcgggcacgtggaagggacgcggaaccgagggcaactattttccagtcggtgaatctgatggagaaagatgccaaatgcacttcccgagccagctgaactcctcgggcacctaatcattgccagatgtggcgagggcgcacggagaacatccccagtc

SEQ ID NO: 466665 - DNA, 763 bp, Homo sapiens
  chr18:811501-812264
  hyper
  lymphoid_neoplasm vs. upper_gi,head_and_neck, pancreas_gallbladder,lung,sarcoma,ovary,bladder_and_urothelial, uterine,breast,renal
cgaacgcaacgggaggcggagtggcatgattccgtaaaagtggacgctgaatggtaaatttcccaacccccaacccaaaacaaaggaaaactttaaacatgttgcggttttcaatcaaaccaagtaaagccagaaaggctcatccactcgccccacacacccgctcctctccccgcacagctgctaccggcgtcggccgatacacagacccccagcctttaggacccaaaggggccgcttccctcgcccctacttcggccgtaggggcaaaaataaacctctcctccccgtcgccgggcggtccacacgaccccaaagacaaggggtggggagtgtccccacgcccctggaacctcaggtcggacttgggcgggacccggcaggtctggacagggcagagaccgagtcaggggcgagcaggtagcgcggggaacgagacaagcccgccgggcgatccgggggaggggagaagtttcttcccaacttcccgactcgggcccgcgggggcggggaaccgcggcggcggcggcggcggcggctccgggcgctggggcctagccctgtccgggcagaggtggaaccctccgcccgcggggccccaccgggtccttacctgtcctccggccgcgctctcatgagtcgctgctaccgcagctcgaggtggcggagggcggaggcgaggcccgcgggccctctccctcctccacctcctcgtcccggggcgcccggcggcagcaacgacggcagagccggcccgggacgc

SEQ ID NO: 466666 - DNA, 919 bp, Homo sapiens
  chr18:811789-812708
  hyper
  lymphoid_neoplasm vs. upper_gi,bladder_and_urothelial, head_and_neck,lung,pancreas_gallbladder,ovary,breast,prostate, colorectal,renal
cgtcgccgggcggtccacacgaccccaaagacaaggggtggggagtgtccccacgcccctggaacctcaggtcggacttgggcgggacccggcaggtctggacagggcagagaccgagtcaggggcgagcaggtagcgcggggaacgagacaagcccgccgggcgatccgggggaggggagaagtttcttcccaacttcccgactcgggcccgcgggggcggggaaccgcggcggcggcggcggcggcggctccgggcgctggggcctagccctgtccgggcagaggtggaaccctccgcccgcggggccccaccgggtccttacctgtcctccggccgcgctctcatgagtcgctgctaccgcagctcgaggtggcggagggcggaggcgaggcccgcgggccctctccctcctccacctcctcgtcccggggcgcccggcggcagcaacgacggcagagccggcccgggacgcgttacttcaggaggagggagttcccgggctccccacgcctcggcctcactctccacctcctccgccccccccccccggccccgccccctgacttctagcgggggcgggggctgcgggtacctgcgcgcgccgccgtccgctcaccggaactcgggccacgccggcccggctccggggcccccagccttccggcgcctacgcccccgtcaggtcccctccgcgggctccgggccgctttgctgtggtcaggataggcgaccggtccgtgtcacttctcccgacccaacatggcggcggggtccggggcggattcccgggggcggtgcaggccgagggggcgtgaggaggaggtgcttccctgcccggagagcaggcccgcggcgtcccttcccacccgcgaacccaccgacgctcggctgccgcggagattgaatggagcgctcc

SEQ ID NO: 466667 - DNA, 529 bp, Homo sapiens
  chr18:812288-812817
  hyper
  lymphoid_neoplasm vs. colorectal,head_and_neck,upper_gi, breast,lung,anorectal,pancreas_gallbladder
cgggctccccacgcctcggcctcactctccacctcctccgccccccccccccggccccgccccctgacttctagcgggggcgggggctgcgggtacctgcgcgcgccgccgtccgctcaccggaactcgggccacgccggcccggctccggggcccccagccttccggcgcctacgcccccgtcaggtcccctccgcgggctccgggccgctttgctgtggtcaggataggcgaccggtccgtgtcacttctcccgacccaacatggcggcggggtccggggcggattcccgggggcggtgcaggccgagggggcgtgaggaggaggtgcttccctgcccggagagcaggcccgcggcgtcccttcccacccgcgaacccaccgacgctcggctgccgcggagattgaatggagcgctccgattctgcccctctgcctttctctgttccttggcccagctctcagtagtggccagggctttggggcttgcttttgtgggggaggacggggttgagtttttttggttggc

SEQ ID NO: 466668 - DNA, 190 bp, Homo sapiens; identical to SEQ ID NO: 347475
  chr18:812869-813059
  hyper
  lymphoid_neoplasm vs. colorectal,head_and_neck,upper_gi, breast,lung,anorectal,pancreas_gallbladder

SEQ ID NO: 466669 - DNA, 41 bp, Homo sapiens
  chr18:5543478-5543519
  hyper
  lymphoid_neoplasm vs. myeloid_neoplasm,thyroid
cgcgctcgcccccagcccgaggggcaacttaaaacatggcg

SEQ ID NO: 466670 - DNA, 20 bp, Homo sapiens
  chr18:5543528-5543548
  hyper
  lymphoid_neoplasm vs. myeloid_neoplasm,thyroid
ggggatttgtgcaaattggc

SEQ ID NO: 466671 - DNA, 6 bp, Homo sapiens
  chr18:7116852-7116858
  hyper
  lymphoid_neoplasm vs. prostate
cgcccg

SEQ ID NO: 466672 - DNA, 24 bp, Homo sapiens
  chr18:7117297-7117321
  hyper
  lymphoid_neoplasm vs. prostate
aacccccggcgccccgctccgggc

SEQ ID NO: 466673 - DNA, 149 bp, Homo sapiens
  chr18:7117374-7117523
  hyper
  lymphoid_neoplasm vs. prostate
cgaagtcccgcaaaagccagaggcgaggctgggctttaaccccaaagcccgaggaggttaaagcctaagcctgcaaagagcgggcagcgtccggcaggagcggcgtccccatccagccctccccggcaagcgcgggagacccacgtggc

SEQ ID NO: 466674 - DNA, 26 bp, Homo sapiens
  chr18:7566557-7566583
  hyper
  lymphoid_neoplasm vs. renal,sarcoma,myeloid_neoplasm, liver_bileduct,thyroid,lung,bladder_and_urothelial
cgccttccgtgtactgcctgcggctc

SEQ ID NO: 466675 - DNA, 217 bp, Homo sapiens
  chr18:7566793-7567010
  hyper
  lymphoid_neoplasm vs. renal,sarcoma,myeloid_neoplasm, liver_bileduct,thyroid,lung,bladder_and_urothelial
ctcgcagccctccggagcctcagcgatctcctggctcgcttttcccgcagccgccgagcagcgcaggcccggcgactccgggtgcagctggccctgtgcggtgacatcgccgtccggcgccaggctcgaagccgcctggccgcgcccgcggggtcgcaggccgctggtcccgcccggccgcgctcacaaactactcgcggctcgtgacccgggacaa

SEQ ID NO: 466676 - DNA, 137 bp, Homo sapiens
  chr18:7567335-7567472
  hyper
  lymphoid_neoplasm vs. renal,sarcoma,myeloid_neoplasm, liver_bileduct,thyroid,lung,bladder_and_urothelial
ccgcgcgcagccggcgcgggctcggtcatcggcgcgccgccgcccggggctgggcttggggctgcctgtggagaggcggcgggcggaacgcgcgcggccacggccacggccaccgccacggccacggccggcagctc

SEQ ID NO: 466677 - DNA, 22 bp, Homo sapiens
  chr18:7566988-7567010
  hyper
  lymphoid_neoplasm vs. renal,melanoma,lung, myeloid_neoplasm,prostate,sarcoma,uterine,thyroid,non_cancer, anorectal
cgcggctcgtgacccgggacaa

SEQ ID NO: 466678 - DNA, 416 bp, Homo sapiens
  chr18:7567335-7567751
  hyper
  lymphoid_neoplasm vs. renal,melanoma,lung, myeloid_neoplasm,prostate,sarcoma,uterine,thyroid,non_cancer, anorectal
ccgcgcgcagccggcgcgggctcggtcatcggcgcgccgccgcccggggctgggcttggggctgcctgtggagaggcggcgggcggaacgcgcgcggccacggccacggccaccgccacggccacggccggcagctcgggtcccgggtcccgggcaggggaaggggagaggcggcgagctcagcaaccggaaccgagggaagattttggctccgcgggctcgccctccgctccctctgccagcggcgccagacgccgagtggggccagggacaggggaggaggacccaggaccctgtgcccgcgcccctggagccgctggagttcggacttctgcaactgttggcactttgggggcttggcttagcgctctgctgtttacccgtctctcctcgctgcctcggaaccaaagctcccg

SEQ ID NO: 466679 - DNA, 273 bp, Homo sapiens; identical to SEQ ID NO: 459494
  chr18:7567478-7567751
  hyper
  lymphoid_neoplasm vs. liver_bileduct,renal, bladder_and_urothelial

SEQ ID NO: 466680 - DNA, 1 bp, Homo sapiens
  chr18:10454592-10454593
  hyper
  lymphoid_neoplasm vs. lung,myeloid_neoplasm,thyroid, sarcoma,prostate
c

SEQ ID NO: 466681 - DNA, 293 bp, Homo sapiens; identical to SEQ ID NO: 352062
  chr18:10455170-10455463
  hyper
  lymphoid_neoplasm vs. lung,myeloid_neoplasm,thyroid, sarcoma,prostate

SEQ ID NO: 466682 - DNA, 61 bp, Homo sapiens; identical to SEQ ID NO: 374343
  chr18:11752769-11752830
  hyper
  lymphoid_neoplasm vs. thyroid

SEQ ID NO: 466683 - DNA, 41 bp, Homo sapiens
  chr18:18821658-18821699
  hyper
  lymphoid_neoplasm vs. liver_bileduct, pancreas_gallbladder,breast
cgagttcacgcttggggctcttcagccgccgtccagtgaac

SEQ ID NO: 466684 - DNA, 108 bp, Homo sapiens
  chr18:19748747-19748855
  hyper
  lymphoid_neoplasm vs. lung
cgtacatgacgacccgagttaaagttcccaaaggtcagctggggaatgttgtcttgaggttcccgaaaccaccacgacctgagccgtagcatcccgagatagggtcgg

SEQ ID NO: 466685 - DNA, 526 bp, Homo sapiens
  chr18:19748884-19749410
  hyper
  lymphoid_neoplasm vs. lung
tcagggcaaaaagcgcatttgctgtgaaggggctaggcgggggttggggggcgggggggcgcagagcacgttcccccttccttctgggggcgtgctgacccaaggtctggagcgcccctcccgccgcggcggcggcgcgggactgtgcactgccaactcctcccgtgccaaggctccctccccctccctcgtgtgggtgtgtgtgtgcgactgcgggagcgggagggtgcaccgccgctggatgggtgcgggtcgctagccaggtcaggcgttctgtggcctccgcccctcccccggggtccctgggctcggtgccccccgggtggactcgcccccactccggggacagggcttgcggctcagcccacgcccgcaggcagcgcggctctcattgtctgcctgggcggcgcgctcccctcccccctcgccgtcccctccccaccctcttttctctcctcccctcgatccctcctcctcctcttcacctccagcgcccagctgctcgctgagcgcagttccgacccac

SEQ ID NO: 466686 - DNA, 94 bp, Homo sapiens
  chr18:19749446-19749540
  hyper
  lymphoid_neoplasm vs. lung
gctcggtgagtccaatcaggagcccaggctgcagttttccggcagagcagtaagaggcgcctcctctctcctttttattcaccagcagcgcggc

SEQ ID NO: 466687 - DNA, 363 bp, Homo sapiens
  chr18:19749047-19749410
  hyper
  lymphoid_neoplasm vs. sarcoma,colorectal,thyroid, liver_bileduct,uterine
cgtgccaaggctccctccccctccctcgtgtgggtgtgtgtgtgcgactgcgggagcgggagggtgcaccgccgctggatgggtgcgggtcgctagccaggtcaggcgttctgtggcctccgcccctcccccggggtccctgggctcggtgccccccgggtggactcgcccccactccggggacagggcttgcggctcagcccacgcccgcaggcagcgcggctctcattgtctgcctgggcggcgcgctcccctcccccctcgccgtcccctccccaccctcttttctctcctcccctcgatccctcctcctcctcttcacctccagcgcccagctgctcgctgagcgcagttccgacccac

SEQ ID NO: 466688 - DNA, 419 bp, Homo sapiens
  chr18:19749446-19749865
  hyper
  lymphoid_neoplasm vs. sarcoma,colorectal,thyroid, liver_bileduct,uterine
gctcggtgagtccaatcaggagcccaggctgcagttttccggcagagcagtaagaggcgcctcctctctcctttttattcaccagcagcgcggcgcagaccccggactcgcgctcgcccgctggcgccctcggcttctctccgcgcctgggagcaccctccgccgcggccgttctccatgcgcagcgcccgcccgaggttcggctgcttcctcctcgcgcgatctccccgctttcctcccctccacccctactcgtcgcgggcccctggcctccggctctccggccctctccaggccgcggtcggctccgacggtgtttccctccttccctccgggcgggctgaggcggctcccaggctcccgggacaccgcggaccaacttctagtctctttttctctcctcgaagcgcttatctgcg

SEQ ID NO: 466689 - DNA, 115 bp, Homo sapiens
  chr18:19749924-19750039
  hyper
  lymphoid_neoplasm vs. sarcoma,colorectal,thyroid, liver_bileduct,uterine
cagagaaacttctttcttgctatctagccaggtctgtgtgtgggcattaattttagtgtggtaatctccgatgagccgaggcgatttggaagagcagcctggaggaggccagccc

SEQ ID NO: 466690 - DNA, 317 bp, Homo sapiens
  chr18:19749548-19749865
  hyper
  lymphoid_neoplasm vs. colorectal
cggactcgcgctcgcccgctggcgccctcggcttctctccgcgcctgggagcaccctccgccgcggccgttctccatgcgcagcgcccgcccgaggttcggctgcttcctcctcgcgcgatctccccgctttcctcccctccacccctactcgtcgcgggcccctggcctccggctctccggccctctccaggccgcggtcggctccgacggtgtttccctccttccctccgggcgggctgaggcggctcccaggctcccgggacaccgcggaccaacttctagtctctttttctctcctcgaagcgcttatctgcg

SEQ ID NO: 466691 - DNA, 385 bp, Homo sapiens
  chr18:19749924-19750309
  hyper
  lymphoid_neoplasm vs. colorectal
cagagaaacttctttcttgctatctagccaggtctgtgtgtgggcattaattttagtgtggtaatctccgatgagccgaggcgatttggaagagcagcctggaggaggccagcccggctgcatttcacctccctcccccactcgctccgagtctccctgtcattcttcctgctctcccatttggggtcgcctcggctctggggcggtctcacgctcccccctccccagcccgttgcgttccccctccttttctctgctctccgctccaccccgctacgtccgattccggaacggtccggcgtttctgctgctggagatgaccgcggggtgggccgggtggcccggccggcgtgagcgcgcacgctggtggctgcaggcgcgggcc

SEQ ID NO: 466692 - DNA, 15 bp, Homo sapiens
  chr18:19750346-19750361
  hyper
  lymphoid_neoplasm vs. colorectal
ggctggcgattcccg

SEQ ID NO: 466693 - DNA, 150 bp, Homo sapiens
  chr18:19750390-19750540
  hyper
  lymphoid_neoplasm vs. colorectal
gggaaggacccagactgctgcccccgccctggcgtcccactttccctgggccgagttgcatttctctctggggctcgcgttcgggctggtcagcgcagtccgggaagctctgggagagccaatataggagaacgcggcggtttcgttttc

SEQ ID NO: 466694 - DNA, 243 bp, Homo sapiens
  chr18:19750066-19750309
  hyper
  lymphoid_neoplasm vs. cervical,pancreas_gallbladder, colorectal,sarcoma,upper_gi,renal,myeloid_neoplasm,thyroid, breast,non_cancer,lung,ovary,liver_bileduct
cgctccgagtctccctgtcattcttcctgctctcccatttggggtcgcctcggctctggggcggtctcacgctcccccctccccagcccgttgcgttccccctccttttctctgctctccgctccaccccgctacgtccgattccggaacggtccggcgtttctgctgctggagatgaccgcggggtgggccgggtggcccggccggcgtgagcgcgcacgctggtggctgcaggcgcgggcc

SEQ ID NO: 466695 - DNA, 15 bp, Homo sapiens
  chr18:19750346-19750361
  hyper
  lymphoid_neoplasm vs. cervical,pancreas_gallbladder, colorectal,sarcoma,upper_gi,renal,myeloid_neoplasm,thyroid, breast,non_cancer,lung,ovary,liver_bileduct
ggctggcgattcccg

SEQ ID NO: 466696 - DNA, 350 bp, Homo sapiens
  chr18:19750390-19750740
  hyper
  lymphoid_neoplasm vs. cervical,pancreas_gallbladder, colorectal,sarcoma,upper_gi,renal,myeloid_neoplasm,thyroid, breast,non_cancer,lung,ovary,liver_bileduct
gggaaggacccagactgctgcccccgccctggcgtcccactttccctgggccgagttgcatttctctctggggctcgcgttcgggctggtcagcgcagtccgggaagctctgggagagccaatataggagaacgcggcggtttcgttttcggggacaggttgccttccttacgcgaagggttttcccgtggggaaccctcaccccgaggcatttcgggagaggggcatccgcagagaggcgggatgcggcggtgccgacacgcacagctacttaaattcttttgtgtgtcatcagcccgggggagacactttagggcggaaggaaagcctcagccagcttctgcagatca

SEQ ID NO: 466697 - DNA, 224 bp, Homo sapiens; identical to SEQ ID NO: 345544
  chr18:19750806-19751030
  hyper
  lymphoid_neoplasm vs. cervical,pancreas_gallbladder, colorectal,sarcoma,upper_gi,renal,myeloid_neoplasm,thyroid, breast,non_cancer,lung,ovary,liver_bileduct

SEQ ID NO: 466698 - DNA, 469 bp, Homo sapiens; identical to SEQ ID NO: 335766
  chr18:19928416-19928885
  hyper
  lymphoid_neoplasm vs. colorectal

SEQ ID NO: 466699 - DNA, 271 bp, Homo sapiens
  chr18:21269079-21269350
  hyper
  lymphoid_neoplasm vs. pancreas_gallbladder, multiple_myeloma
cgactcaacacttggctgggaaatcgaaatgtctttgatgtgagttctgtaggtagtggcagtttcctctgctctcaaccaaattcgtttacaagcctcctttactcttaggtcacaggtggcttttctggctttgacctgagcggtgagtatccagagaggagaacgatctaattaatttctgtcctggcgcctggagggttcgaagatcccaggctcccgttcccgccgcctgggtgggagcccgggaacgcctctcccattccccgcc

SEQ ID NO: 466700 - DNA, 34 bp, Homo sapiens
  chr18:21269390-21269424
  hyper
  lymphoid_neoplasm vs. pancreas_gallbladder, multiple_myeloma
ctgctggcgcgcggctgagcgctgtcagttcctg

SEQ ID NO: 466701 - DNA, 186 bp, Homo sapiens
  chr18:21269740-21269926
  hyper
  lymphoid_neoplasm vs. pancreas_gallbladder, multiple_myeloma
tgcggggcgaccgctcgggatcccggggccgcggccgggctcagccttcacccgacttacttcaacctggccgaggcggcgaggatttgggccaccgccacctgcggggagaggggacccggcgaggggaggccccagcccgagctctactgcaagttggtcgggggccccaccgccccaggcagc

SEQ ID NO: 466702 - DNA, 213 bp, Homo sapiens
  chr18:21269740-21269953
  hyper
  lymphoid_neoplasm vs. cervical
tgcggggcgaccgctcgggatcccggggccgcggccgggctcagccttcacccgacttacttcaacctggccgaggcggcgaggatttgggccaccgccacctgcggggagaggggacccggcgaggggaggccccagcccgagctctactgcaagttggtcgggggccccaccgccccaggcagcggccacaccatccaggtgagggcctcg

SEQ ID NO: 466703 - DNA, 174 bp, Homo sapiens; identical to SEQ ID NO: 204924
  chr18:21270135-21270309
  hyper
  lymphoid_neoplasm vs. cervical

SEQ ID NO: 466704 - DNA, 72 bp, Homo sapiens
  chr18:21851454-21851526
  hyper
  lymphoid_neoplasm vs. head_and_neck,renal
cgtccaactattcttggatctactcacatccctggatcaagtctggccgccctccccgctccgtcccccggc

SEQ ID NO: 466705 - DNA, 760 bp, Homo sapiens; identical to SEQ ID NO: 361227
  chr18:21851561-21852321
  hyper
  lymphoid_neoplasm vs. head_and_neck,renal

SEQ ID NO: 466706 - DNA, 378 bp, Homo sapiens; identical to SEQ ID NO: 452942
  chr18:25756118-25756496
  hyper
  lymphoid_neoplasm vs. melanoma

SEQ ID NO: 466707 - DNA, 105 bp, Homo sapiens; identical to SEQ ID NO: 352078
  chr18:25756986-25757091
  hyper
  lymphoid_neoplasm vs. melanoma

SEQ ID NO: 466708 - DNA, 42 bp, Homo sapiens; identical to SEQ ID NO: 452945
  chr18:25757146-25757188
  hyper
  lymphoid_neoplasm vs. liver_bileduct

SEQ ID NO: 466709 - DNA, 291 bp, Homo sapiens
  chr18:28622129-28622420
  hyper
  lymphoid_neoplasm vs. multiple_myeloma
gagggggcagcccctaaatcccttttcaagtctgtgctttgagctctcagggatcctctccacccaaaggcgccctccaaccaccatcaccaccagctccaccacctggggagaagcgtgaatcccaaccccctgcccaacccgcgacggcgcccgccagagcgcagcgaagcctgagcgcgactcagaattccaacaatcgaacaccttgtctcaaaacaaaaagctcagtccagagtcgacccgcaaacacacgttttctctcctcactcctgcaggcccgaacttggg

SEQ ID NO: 466710 - DNA, 359 bp, Homo sapiens
  chr18:29077773-29078132
  hyper
  lymphoid_neoplasm vs. colorectal,cervical
cgcgctacccaggtcgagccccgccaggaggctccctcctcccgccattctccagagagtagggggtcgggaaggagagaacggcggggcggggcctgccacccacagtccccaacccaaggacgtcacggtcccaggtgcgagtgcgagcgggcgggagtccaccccgcgcctccctcctctgctgaactccccacctctgtaaaagcggcccgggccggcccccggctccattttctcgcggcggccacacctggagccgcgcctttgggttgggctgggctgggccgcgcaaccgccacgggaagacagccctcggggcggggagggagagggtggccgggccggggggaggccgg

SEQ ID NO: 466711 - DNA, 404 bp, Homo sapiens; identical to SEQ ID NO: 361235
  chr18:29078255-29078659
  hyper
  lymphoid_neoplasm vs. colorectal,cervical

SEQ ID NO: 466712 - DNA, 147 bp, Homo sapiens
  chr18:31157947-31158094
  hyper
  lymphoid_neoplasm vs. uterine,sarcoma
cggcctgagcgggacagcgggaagcgggtggaacggcctgcacggagtgggcagcgccccaggaatttgggggctgagttggagggagaggggtctcgcgagggtttcagggcgtggctggagtagggggcgcgcggcgagtgtgca

SEQ ID NO: 466713 - DNA, 332 bp, Homo sapiens
  chr18:31158158-31158490
  hyper
  lymphoid_neoplasm vs. uterine,sarcoma
cgcgtcgccattccccgtgacgtcagagtgtattgttgtgagcggggccgagcggagcatccccggagctgtcaccgcagcggccgcggcggtggcgcagcgcgagccccgcacgagcgagcccggccggcgccgcccccgcccctggcccgggccccgctgctgccgccgcccccgcccccggcccgcccgccgcgcgccgccgccgccgccgtcgcgcgcccccacccactccaccccaccccctcgctccatccctcccacccgccgccgccgccgccgccgccgccgccgccgccgccgccaccgcccgcgcgcctccccccgcggag

SEQ ID NO: 466714 - DNA, 85 bp, Homo sapiens
  chr18:31158405-31158490
  hyper
  lymphoid_neoplasm vs. multiple_myeloma,ovary
cgctccatccctcccacccgccgccgccgccgccgccgccgccgccgccgccgccgccaccgcccgcgcgcctccccccgcggag

SEQ ID NO: 466715 - DNA, 96 bp, Homo sapiens; identical to SEQ ID NO: 361243
  chr18:31159050-31159146
  hyper
  lymphoid_neoplasm vs. multiple_myeloma,ovary

SEQ ID NO: 466716 - DNA, 8 bp, Homo sapiens
  chr18:31739025-31739033
  hyper
  lymphoid_neoplasm vs. multiple_myeloma
cgggttgc

SEQ ID NO: 466717 - DNA, 208 bp, Homo sapiens
  chr18:31802468-31802676
  hyper
  lymphoid_neoplasm vs. prostate,bladder_and_urothelial
cgctagcgctacattcgggctttatgccaataaggagacactgtagactatcgatcagactcgtctgctctcagagcgtgcggccgggcttccagcctggcctttaggcgcggtggcggcggtgggacacgcgccaggcgcccagagaaggacatgggacaatggcccagcccgaggacgccagacgccgccgcccgacccggggaag

SEQ ID NO: 466718 - DNA, 201 bp, Homo sapiens
  chr18:31803102-31803303
  hyper
  lymphoid_neoplasm vs. prostate,bladder_and_urothelial
gctggacgatccgttcgtattttttacgggtcaccgtcttggtcttgcctgagtccccgtaagtcctgaggcaccagtcctggaactggcggtacatgtcgcgctcgctctccatgttccccgcgctcggccgctggccggatgctcccagcgcacttcgcacctgttcaccctaggctcatgaaaaatgcagccccggcc

SEQ ID NO: 466719 - DNA, 3 bp, Homo sapiens
  chr18:35065858-35065861
  hyper
  lymphoid_neoplasm vs. multiple_myeloma
ccc

SEQ ID NO: 466720 - DNA, 4 bp, Homo sapiens
  chr18:35145982-35145986
  hyper
  lymphoid_neoplasm vs. multiple_myeloma
cgtt

SEQ ID NO: 466721 - DNA, 412 bp, Homo sapiens
  chr18:35146241-35146653
  hyper
  lymphoid_neoplasm vs. multiple_myeloma
gaggcgctgagattccgggcccggcggccgcggggagcgggtgtccgtgaggagccgggcagccggcctcctctctttgccttttgggggttctttttgtaatagcagcaggtgcaactttttgtattttaaaaatagtgatttttattttcgtgtgggtatgtaggggggctttatccaccaagctatgctctattagggcgccaggcgggcgaagcaaaggcagggatggcgggcggggcggcggcggaggtggaatgggcgcttttttcttccatctggctttatttatttatttagactagaaaagcgagccggcttggagggagtccgcccggggatccgagcgcgcattcatcagtgtcgagagaaaaaaagctacataaatatatattatgtggataaatctata

SEQ ID NO: 466722 - DNA, 190 bp, Homo sapiens; identical to SEQ ID NO: 361257
  chr18:43914608-43914798
  hyper
  lymphoid_neoplasm vs. bladder_and_urothelial,sarcoma, anorectal

SEQ ID NO: 466723 - DNA, 275 bp, Homo sapiens
  chr18:43914608-43914883
  hyper
  lymphoid_neoplasm vs. head_and_neck
gatcgaaaggagaaagatacatgaccgtgtgtgtgtgtgtgtgtgtgtgtgtgtgtgtgtgtgtgtgtgtgagagagagagagagcgcgcgcgcgagagcatgcttggttttctgtggtttgctttttttgaggtatatgtgtgttttgtgttatgtgtgttttgtattcattttttgttcattagtaccgatggctggctagctgggacctgggtctctgccctatcccatgccccagcccccaccctctcgtgggcacttgcacgattttcca

SEQ ID NO: 466724 - DNA, 62 bp, Homo sapiens
  chr18:44786792-44786854
  hyper
  lymphoid_neoplasm vs. renal,sarcoma,melanoma
cggagacggggctaggggtgcacccttcgtcccggtcagctcttgcggctgcctacgttcct

SEQ ID NO: 466725 - DNA, 238 bp, Homo sapiens
  chr18:45534410-45534648
  hyper
  lymphoid_neoplasm vs. pancreas_gallbladder,colorectal
cggccgggagtcgggtctctgccagcccagcgctcggaatggagctttgtggggctggggaagcaacctttgccaatgggaagggggtgtcacagcgcctcattccctcccagcttgcgctcctcggaataatctccaacagcgtgcctagaagcacagctgcttttgtttcgggcgtcggtgcttcccagaatcccggtgcccggacccagccgccgaaccgaccccgccccgccgc

SEQ ID NO: 466726 - DNA, 261 bp, Homo sapiens
  chr18:45534675-45534936
  hyper
  lymphoid_neoplasm vs. pancreas_gallbladder,colorectal
cgagcggcggccacgcgggggcgctgggccgggggcgggggccagggctgggggtggggcgcgcccccgggccacctcccccgcccctcccggctcctccccgctcctcctcccatgccccggcccccgcctcgcagctgggctcggactcaggcttagccgcagtctgtgagcctcctccccgcacctggccggccaggccagcccagcctacttgtctcgctgcgcccggctgctgcctccgctccaggggtcggcgcc

SEQ ID NO: 466727 - DNA, 41 bp, Homo sapiens; identical to SEQ ID NO: 361264
  chr18:45534976-45535017
  hyper
  lymphoid_neoplasm vs. pancreas_gallbladder,colorectal

SEQ ID NO: 466728 - DNA, 233 bp, Homo sapiens
  chr18:45662351-45662584
  hyper
  lymphoid_neoplasm vs. upper_gi,uterine,cervical, multiple_myeloma,lung
caggacaacggaagccaggaacagaaaggagcgaccctggagccctcaccacagagcacggcgtgggggacccgacgctggatgctccgcgcggggtgggcggcgggcaggggggcgtgggtgctgggttagggggaagctctctccatcgtccttcccaggccagccccgcggccgctgcgcccgcctgcaggaactcaggcgctccagtgggtgacgccggcccgggcgcc

SEQ ID NO: 466729 - DNA, 69 bp, Homo sapiens
  chr18:45663079-45663148
  hyper
  lymphoid_neoplasm vs. upper_gi,uterine,cervical, multiple_myeloma,lung
gcagagttccagatcctctctcctatttcggaagaggtgcgtggccccacgccccgcaggagctccggc

SEQ ID NO: 466730 - DNA, 259 bp, Homo sapiens
  chr18:45663079-45663338
  hyper
  lymphoid_neoplasm vs. multiple_myeloma,uterine
gcagagttccagatcctctctcctatttcggaagaggtgcgtggccccacgccccgcaggagctccggcgaggctgggggagttgaacgctttgcggacgccgccacccgcgccagccagagccgccccgcggccacccggccacagggtccccgcagcgcgtagcgagaatgcccgcagcgctctcccggccgcccggaagggcttcctcccccaccccctccccacggcccggccgctgggctccccagagccccga

SEQ ID NO: 466731 - DNA, 796 bp, Homo sapiens; identical to SEQ ID NO: 335809
  chr18:45687770-45688566
  hyper
  lymphoid_neoplasm vs. liver_bileduct,head_and_neck, breast,upper_gi,lung,anorectal

SEQ ID NO: 466732 - DNA, 165 bp, Homo sapiens
  chr18:45934609-45934774
  hyper
  lymphoid_neoplasm vs. pancreas_gallbladder,lung
cgcttttctttggctcctcctggccttcatcctagtaaaaccagacaagcaaccggaaaaacaaagcagcacagcggccagagacaattcgctttcaacggagcaagagacgtacacaccttgagagaagacgcacgcagttcccgtgcgtgtcgctgggaacag

SEQ ID NO: 466733 - DNA, 222 bp, Homo sapiens
  chr18:45934810-45935032
  hyper
  lymphoid_neoplasm vs. pancreas_gallbladder,lung
caggctcggcttcacttgtccgaggcttggaggaactgtgtgcgtgcgcccatttcccccagcttcccgacttgacagcagcaaggatctttgagtcctgcatgagcgacacctcgggcaaggactgtactctgctcagatctcatcgagaggtgctggatcccagcctttccagctcattttccaattttcaagaaaagacagcgcgaagtgagactgcaa

SEQ ID NO: 466734 - DNA, 144 bp, Homo sapiens
  chr18:45935196-45935340
  hyper
  lymphoid_neoplasm vs. pancreas_gallbladder,lung
ccagccccgcgcgccacttcgctccgggccgcggtgccagccaggaggcgcggcgcccgctcgctggctcgctctccgctggctctcccctccctccttccctccctccctcctcccgcctcctccgttgcatggctgccgcac

SEQ ID NO: 466735 - DNA, 155 bp, Homo sapiens
  chr18:45934877-45935032
  hyper
  lymphoid_neoplasm vs. lung,ovary,anorectal,breast, pancreas_gallbladder
cgacttgacagcagcaaggatctttgagtcctgcatgagcgacacctcgggcaaggactgtactctgctcagatctcatcgagaggtgctggatcccagcctttccagctcattttccaattttcaagaaaagacagcgcgaagtgagactgcaa

SEQ ID NO: 466736 - DNA, 660 bp, Homo sapiens; identical to SEQ ID NO: 352093
  chr18:45935196-45935856
  hyper
  lymphoid_neoplasm vs. lung,ovary,anorectal,breast, pancreas_gallbladder

SEQ ID NO: 466737 - DNA, 994 bp, Homo sapiens
  chr18:45935359-45936353
  hyper
  lymphoid_neoplasm vs. pancreas_gallbladder, bladder_and_urothelial,uterine
cgcagccccccgcctcctgcccaccgcgcggagggcgcccctgctccagccggcgccccaaggcgcgcggaccgccggcctcctagcaacggcccccgcaatcgctttccggcgcagcccaagcaaagccacccgcccgccgccccgcgacctcccgaactgcctcggctgccgaggtgctgtggagatcgcgaccccggcagccggcgcccgagcccggcgcgcgaagccgctcacctccgcgcgccgccggccctgcgcgcctcccgcacttggctccgggacgcagtcctggcgtcctccttcgccgccggtgtccgccggtccctgcgcgcccgagcctcgccggccgcgccgctgtcagagtctcgtggcggggctgcgccggcgggtatggagctgagcggcggcagcgggcgagcgggcagctcctccctccccgcgccgcgcctccgccctccccgcgccccgcctcccgcgccgcggctgtcagccccgcgccccgcgccccgcgcccgcgccgccggctcggggggcgcacagggctaaagggcccggatgtgtgcggtcgcctgtcgctcgcgcccgccccctccccgccgcgcggcacatgcacttgctgcgccgcagcccccgcccggctccgctaatttctattttgacagtaactgtggcgagtgggcggcgcggcggggggcgcccgggactggcggaggctgcgggcgggagtcaggacccgacgcggaggcggagtgggggggccgggcaccgccaccaaccgctcggggctccgcgtcttttctctttctttccttttttctctctgcctcctccaggatttaaagggacagccccggcagaggcgagggggccaggcggccgccgtttctccggtctcctgacgccctctgcggcccggccggacccgcccgcacccccagcgcaggcttgggaccgccgggtatttttaggtccacacccgacccggggcagc

SEQ ID NO: 466738 - DNA, 994 bp, Homo sapiens
  chr18:45935857-45936851
  hyper
  lymphoid_neoplasm vs. pancreas_gallbladder,anorectal, breast,head_and_neck,uterine,colorectal,ovary
cgccccgcgccccgcgcccgcgccgccggctcggggggcgcacagggctaaagggcccggatgtgtgcggtcgcctgtcgctcgcgcccgccccctccccgccgcgcggcacatgcacttgctgcgccgcagcccccgcccggctccgctaatttctattttgacagtaactgtggcgagtgggcggcgcggcggggggcgcccgggactggcggaggctgcgggcgggagtcaggacccgacgcggaggcggagtgggggggccgggcaccgccaccaaccgctcggggctccgcgtcttttctctttctttccttttttctctctgcctcctccaggatttaaagggacagccccggcagaggcgagggggccaggcggccgccgtttctccggtctcctgacgccctctgcggcccggccggacccgcccgcacccccagcgcaggcttgggaccgccgggtatttttaggtccacacccgacccggggcagcggtgcggcagagatgggctctgccgacccggggcagcggtgcggcagagatgggctctgccgccccggcgcacggctatttttacagagtccgatgggggaggaaataaaacaactcggcaactgcttttctacccgaaagtcgggagcaaggagtgggggcgagaagttaagtttcccaaatgctctcggcactccagcgagcgcaccaagacgcctagccagcacctgaaaccgcaagcttgccgcaccccggggcgccgaatctcagcgggcaatcgcgctcggcggcgctgcggcccggagtccccacccctctggagccttgggccccgcactccgcaccccacacgccggggagcagccgctggccgcccgtcactccccgggtcggcctggaaggcggccttccgaagcgtccaatcaccgcgcaacaatgccaacgggcgggcccggggagggcttgtccccgccccgtcccgccgggccccgccccctc

SEQ ID NO: 466739 - DNA, 725 bp, Homo sapiens
  chr18:45936357-45937082
  hyper
  lymphoid_neoplasm vs. anorectal,head_and_neck,cervical, breast,colorectal,uterine,ovary,pancreas_gallbladder,prostate, non_cancer,lung,renal,upper_gi
cggcagagatgggctctgccgacccggggcagcggtgcggcagagatgggctctgccgccccggcgcacggctatttttacagagtccgatgggggaggaaataaaacaactcggcaactgcttttctacccgaaagtcgggagcaaggagtgggggcgagaagttaagtttcccaaatgctctcggcactccagcgagcgcaccaagacgcctagccagcacctgaaaccgcaagcttgccgcaccccggggcgccgaatctcagcgggcaatcgcgctcggcggcgctgcggcccggagtccccacccctctggagccttgggccccgcactccgcaccccacacgccggggagcagccgctggccgcccgtcactccccgggtcggcctggaaggcggccttccgaagcgtccaatcaccgcgcaacaatgccaacgggcgggcccggggagggcttgtccccgccccgtcccgccgggccccgccccctcggagtctgtcggggcaggagaatctcgctgggacgccgagtgctcagcggtgctggaagccacgaagggccagtgcgaggggaggaggaagggtcctggccctggagagggcgtgagcgttctcgggcgaggcgacacttgggcagatgttccctccagctacgggccggggaaactcgagctggctttgcctcctacctttttgcagtccacccctctgcgctccagaca

SEQ ID NO: 466740 - DNA, 75 bp, Homo sapiens; identical to SEQ ID NO: 347503
  chr18:45937111-45937186
  hyper
  lymphoid_neoplasm vs. anorectal,head_and_neck,cervical, breast,colorectal,uterine,ovary,pancreas_gallbladder,prostate, non_cancer,lung,renal,upper_gi

SEQ ID NO: 466741 - DNA, 358 bp, Homo sapiens; identical to SEQ ID NO: 457647
  chr18:47087704-47088062
  hyper
  lymphoid_neoplasm vs. pancreas_gallbladder

SEQ ID NO: 466742 - DNA, 220 bp, Homo sapiens
  chr18:47719964-47720184
  hyper
  lymphoid_neoplasm vs. pancreas_gallbladder
cgggcgggtgtcccgggaatcgcatacccacgcaacgcgcgtggacaccacacgcacacacaactctgcatggaggcgtgtgcataggcactgttaaacgtgttttggccacccaagaagacgaacaggaaaaccaggcattggactatccaaaacttgttttcttaaaggtgcatagggcacatgtgaagaaaaggcctttgcccctctcactactgac

SEQ ID NO: 466743 - DNA, 174 bp, Homo sapiens
  chr18:47720319-47720493
  hyper
  lymphoid_neoplasm vs. pancreas_gallbladder
cccgattcggagcacccagcctcacacatcccttctgaccttgaaggcatcctgaaactcacaccctgctcccggttcgactttactccaaccccctccccgcagtcactgaagccctctttgtaccaaagaggccgcgtcaaaacatccatccccagcaaattcacaatgctc

SEQ ID NO: 466744 - DNA, 280 bp, Homo sapiens
  chr18:47720522-47720802
  hyper
  lymphoid_neoplasm vs. pancreas_gallbladder
acccctctacccattgcttaccctcactccatccagccgccgcgccctcacgccaggttgtctcctccctctccaccaagtccagaacccccacctctcccaagtccagggttccctgttgtgggtatgcgggaggaaaggacgcctcggaggcgcgccctcgagagccggcgccgcagagcccctggggtggggtccacggcggggacaggggacagcagcgggagcaccgcgggggcccgtcccgcgcacggcgctcagagctggcagggtcgccctg

SEQ ID NO: 466745 - DNA, 102 bp, Homo sapiens
  chr18:47720391-47720493
  hyper
  lymphoid_neoplasm vs. uterine,pancreas_gallbladder, head_and_neck,breast,liver_bileduct
cggttcgactttactccaaccccctccccgcagtcactgaagccctctttgtaccaaagaggccgcgtcaaaacatccatccccagcaaattcacaatgctc

SEQ ID NO: 466746 - DNA, 280 bp, Homo sapiens; identical to SEQ ID NO: 466744
  chr18:47720522-47720802
  hyper
  lymphoid_neoplasm vs. uterine,pancreas_gallbladder, head_and_neck,breast,liver_bileduct

SEQ ID NO: 466747 - DNA, 436 bp, Homo sapiens; identical to SEQ ID NO: 347511
  chr18:47720908-47721344
  hyper
  lymphoid_neoplasm vs. uterine,pancreas_gallbladder, head_and_neck,breast,liver_bileduct

SEQ ID NO: 466748 - DNA, 831 bp, Homo sapiens; identical to SEQ ID NO: 374432
  chr18:47720908-47721739
  hyper
  lymphoid_neoplasm vs. head_and_neck

SEQ ID NO: 466749 - DNA, 354 bp, Homo sapiens
  chr18:52495540-52495894
  hyper
  lymphoid_neoplasm vs. upper_gi,pancreas_gallbladder
cgagaggagtgtgtttctcactgcagcagttgagtcaccagcaagacttgcctgaggtgagctccgcacatccgcgttgggacttgcagacacgccttcttctcacacaaaccttacccagccccgccgccgcggcggactccgagggtggtgccaccagccctgccactcgcagtcctgacgggcaggggctgcggaccgcccggccttggacccatccggagccacaggttggaggagataagtagctgtccccgtgctcatcgccctgtggagcagatcctgtctccttgctgacggtggagcccgggagttccagggcttgggaaggggaaggaaacctctctgaaatct

SEQ ID NO: 466750 - DNA, 50 bp, Homo sapiens; identical to SEQ ID NO: 361286
  chr18:52496020-52496070
  hyper
  lymphoid_neoplasm vs. upper_gi,pancreas_gallbladder

SEQ ID NO: 466751 - DNA, 155 bp, Homo sapiens
  chr18:55020285-55020440
  hyper
  lymphoid_neoplasm vs. melanoma,ovary
cgggaatttggttgatggggtgtttggggaagggaaggcgtgggggaggggtgttttggcctctccgagactctttgggccagataactgcgcggtccttccactcctctctctaattctcccttccccctccctgttattttttttttaaccca

SEQ ID NO: 466752 - DNA, 118 bp, Homo sapiens; identical to SEQ ID NO: 352107
  chr18:55021430-55021548
  hyper
  lymphoid_neoplasm vs. melanoma

SEQ ID NO: 466753 - DNA, 911 bp, Homo sapiens
  chr18:55102427-55103338
  hyper
  lymphoid_neoplasm vs. upper_gi
cgagccgtcagccaaacctgaaaagtgcggccccgccccctccacagccactggtagcttcccgtggaaggcccgcctcccggggcagctgcggcctcggagtggttgcgcttggcgcccgtcgggcgtggccccgccccaggtccgggagggtaggttggctgccccggcgagcggcagagcccttctggacagctcccgctcacccaaacagaagacgtcggcgccggagcgggctcggacatggcgaggctgcgagccggcccgagcggcggggcccggtgatccctccctccctccccgtcccctcccctctcccgcacgcacgccccgtccgcccccaccccgcccccaccccgggcgagcccgcccgcagcccggggcgcacacccgcacgcgcactcctctccactcactcccgcgcccgcccccactcccgcagccgagccccgccacgcgcgccttgcccgcccgccggccgcccccgccgcccccgccgcccccgggccctgatggactgaatgaaggctgcctacaccgcctatcgatgcctcaccaaagacctagaaggctgcgccatgaacccggagctgacaatggaaagtctgggcactttgcacgggccggccggcggcggcagtggcgggggcggcggcgggggcggcgggggcggcggcgggggcccgggccatgagcaggagctgctggccagccccagcccccaccacgcgggccgcggcgccgctggctcgctgcggggccctccgccgcctccaaccgcgcaccaggagctgggcacggcggcagcggcggcagcggcggcgtcgcgctcggccatggtcaccagcatggcctcgatcctggacggcggcgactaccggcccgagctctccatcccgctgcaccacgcc

SEQ ID NO: 466754 - DNA, 153 bp, Homo sapiens
  chr18:57363523-57363676
  hyper
  lymphoid_neoplasm vs. multiple_myeloma
cgaaagcagccacccgtgtttgctatgccccactgtttacacccaaaatccaatccaatctccttcacagacttccacacaagtatttcagggagcggcaaccatcctcaggatctcagggcacacaccctagacgcaaagtcagttgctcag

SEQ ID NO: 466755 - DNA, 20 bp, Homo sapiens
  chr18:57364980-57365000
  hyper
  lymphoid_neoplasm vs. multiple_myeloma
tgcaccagggtctcacgacc

SEQ ID NO: 466756 - DNA, 252 bp, Homo sapiens
  chr18:78004742-78004994
  hyper
  lymphoid_neoplasm vs. head_and_neck,breast, liver_bileduct,lung,pancreas_gallbladder,ovary,non_cancer
catcccacggcccgggcccccagagcccccccacggccccgaatccgagcagcccctggccctcaactcgccccggaaaggccgccctcccctccaatgtgtggcgcgccccgatcgcctctcactcgtggaacaaaagagcagctcccgcggagcgggtccagagtctgcccggactgtccgatggccctcggccctctgagcgccgcggctgccgggctttgtgtccgcgcggggggcgggaaggacggc

SEQ ID NO: 466757 - DNA, 34 bp, Homo sapiens
  chr18:78005051-78005085
  hyper
  lymphoid_neoplasm vs. head_and_neck,breast, liver_bileduct,lung,pancreas_gallbladder,ovary,non_cancer
tcgccggcgcctgtcgcctccacgccgccccagt

SEQ ID NO: 466758 - DNA, 206 bp, Homo sapiens
  chr18:78005162-78005368
  hyper
  lymphoid_neoplasm vs. head_and_neck,breast, liver_bileduct,lung,pancreas_gallbladder,ovary,non_cancer
gctcttgacttccactgcgctgcaatcgtagaatcgcaaggtctgagacttgtgaaaacttcggttcatggtttcggccccggtcagcctcgccgtcgccctcgctcctcaggggccgcagaaagactcccgggggcggcgcccccaggccccggccccggccccggcccgcgctcgcttggccggcgggctgctcccggtgctgc

SEQ ID NO: 466759 - DNA, 104 bp, Homo sapiens
  chr18:78004890-78004994
  hyper
  lymphoid_neoplasm vs. bladder_and_urothelial,anorectal, cervical,head_and_neck,thyroid,breast,prostate,melanoma,lung, non_cancer
cgcggagcgggtccagagtctgcccggactgtccgatggccctcggccctctgagcgccgcggctgccgggctttgtgtccgcgcggggggcgggaaggacggc

SEQ ID NO: 466760 - DNA, 34 bp, Homo sapiens; identical to SEQ ID NO: 466757
  chr18:78005051-78005085
  hyper
  lymphoid_neoplasm vs. bladder_and_urothelial,anorectal, cervical,head_and_neck,thyroid,breast,prostate,melanoma,lung, non_cancer

SEQ ID NO: 466761 - DNA, 406 bp, Homo sapiens
  chr18:78005162-78005568
  hyper
  lymphoid_neoplasm vs. bladder_and_urothelial,anorectal, cervical,head_and_neck,thyroid,breast,prostate,melanoma,lung, non_cancer
gctcttgacttccactgcgctgcaatcgtagaatcgcaaggtctgagacttgtgaaaacttcggttcatggtttcggccccggtcagcctcgccgtcgccctcgctcctcaggggccgcagaaagactcccgggggcggcgcccccaggccccggccccggccccggcccgcgctcgcttggccggcgggctgctcccggtgctgcgggcccgagctgggctggccgcgcgcctcagggactccaggggccgcgcgcgggaggagcgcgggggacgccggcgcgcgccgccccacctcccggcgcccgcgcccgcgccccgccccgcccccgagccccggaggacccgcccatatccccgcccacagccccgccccgcgctccggaggacccgccacaccacgccc

SEQ ID NO: 466762 - DNA, 5 bp, Homo sapiens
  chr18:78005665-78005670
  hyper
  lymphoid_neoplasm vs. bladder_and_urothelial,anorectal, cervical,head_and_neck,thyroid,breast,prostate,melanoma,lung, non_cancer
gtctc

SEQ ID NO: 466763 - DNA, 372 bp, Homo sapiens
  chr19:290594-290966
  hyper
  lymphoid_neoplasm vs. lung,upper_gi,cervical, myeloid_neoplasm,head_and_neck
cggcctttgttcccgggaccctgcgggaggggggcctcgggatgcccattccgccagtgtggcccgcaaacccgccggacaggtttggttctcctggcctcccggccccccgccaccccgttcacccgaagcctgggacccagccttcatccccagtgtctcccccgcccgagccagcagggcggctgggcctccccgcacgtgcacgggttcgaatcccgccgacgcaccgggtgccaggaccgagggtcagccctctccgcgcgcagcgggagcgcccaccccaggggcggaggcgcggacgtcctgccggggtaacccgcggccgcccccacctcccgggcccgcgtgactcacctcccaggccaggcg

SEQ ID NO: 466764 - DNA, 343 bp, Homo sapiens; identical to SEQ ID NO: 361328
  chr19:291052-291395
  hyper
  lymphoid_neoplasm vs. lung,upper_gi,cervical, myeloid_neoplasm,head_and_neck

SEQ ID NO: 466765 - DNA, 179 bp, Homo sapiens; identical to SEQ ID NO: 352124
  chr19:460121-460300
  hyper
  lymphoid_neoplasm vs. pancreas_gallbladder,lung, head_and_neck,upper_gi,colorectal

SEQ ID NO: 466766 - DNA, 147 bp, Homo sapiens
  chr19:460529-460676
  hyper
  lymphoid_neoplasm vs. upper_gi,liver_bileduct
cgcacgacgtaggagaccccgggccccaggaccctggcgtcggggtgtagccagccgtgcgcgggtttgtggatgaagctgcccttccggatccactcggcggcggcggcggcgtccccggaccccgccgccccccgcccgccccgc

SEQ ID NO: 466767 - DNA, 406 bp, Homo sapiens
  chr19:460726-461132
  hyper
  lymphoid_neoplasm vs. upper_gi,liver_bileduct
gggcgcggcgcagcggggctcgcaggcgcccaggacggcggccgccagcgccgggacgccccccgggcccgccggctcgggttgggggtccgcgccccccgaggccccagccgcccgcgccgccgccgggccgcggcccaggaagccgcccggggccgcgaacttccactgcggcattcggggcagcaacgcgcagaaggtggtgggcgcctcgggctcggggggcgcggggggcgccgggggcgcgcgcccgcccggaccctgcgtcatggccgcggccgcccgacggagcccgaccgggcgctgcgcctggcgcggaggaagccctcccgctccgcccgctccctcccgccccccggcccggtgatgtcatccgcccggcccagcgcgcagccgcggggggctg

SEQ ID NO: 466768 - DNA, 141 bp, Homo sapiens; identical to SEQ ID NO: 352127
  chr19:461187-461328
  hyper
  lymphoid_neoplasm vs. upper_gi,liver_bileduct

SEQ ID NO: 466769 - DNA, 260 bp, Homo sapiens
  chr19:460872-461132
  hyper
  lymphoid_neoplasm vs. lung
cgcccggggccgcgaacttccactgcggcattcggggcagcaacgcgcagaaggtggtgggcgcctcgggctcggggggcgcggggggcgccgggggcgcgcgcccgcccggaccctgcgtcatggccgcggccgcccgacggagcccgaccgggcgctgcgcctggcgcggaggaagccctcccgctccgcccgctccctcccgccccccggcccggtgatgtcatccgcccggcccagcgcgcagccgcggggggctg

SEQ ID NO: 466770 - DNA, 602 bp, Homo sapiens
  chr19:461187-461789
  hyper
  lymphoid_neoplasm vs. lung
actgaggccctccgaggacaccgggcgctggcctggaacccgcagccaaggcgggacggggctttgaacccagaaccccgtcagcgaccctccccgctgcgccccccacccccgcccgccgcccaagttcgcagaaggaccgagctggagaagcttagaaattccacatcccttctttcccctatttcctagtggggaaactgaggccccgggaggcgcggccagggaaaagagaaccccagaccctaaggtcagcccctccctctccgttgttgcagctagaaggtaccttagggtcacccctatttcttagtggggaaactgaggcgcggggaggggaaggggcgcggccgagggctcacagacgaagctcaaacccaggagtgccggctcgggggtggggggggggggcggggctaggagcggagccgggcccctgctctgcggcctgtcccggcctcagtttctccggctgtaactcaggggagcgggctggagggtcgcggcccttcttccctcacttctggggagcccagtcccgcaccagctcatctgagctctgggcctcagcctcccaggccggtcgctccatccccagcctc

SEQ ID NO: 466771 - DNA, 8 bp, Homo sapiens
  chr19:461846-461854
  hyper
  lymphoid_neoplasm vs. lung
cagaaaac

SEQ ID NO: 466772 - DNA, 393 bp, Homo sapiens
  chr19:461396-461789
  hyper
  lymphoid_neoplasm vs. lung,myeloid_neoplasm
cgggaggcgcggccagggaaaagagaaccccagaccctaaggtcagcccctccctctccgttgttgcagctagaaggtaccttagggtcacccctatttcttagtggggaaactgaggcgcggggaggggaaggggcgcggccgagggctcacagacgaagctcaaacccaggagtgccggctcgggggtggggggggggggcggggctaggagcggagccgggcccctgctctgcggcctgtcccggcctcagtttctccggctgtaactcaggggagcgggctggagggtcgcggcccttcttccctcacttctggggagcccagtcccgcaccagctcatctgagctctgggcctcagcctcccaggccggtcgctccatccccagcctc

SEQ ID NO: 466773 - DNA, 285 bp, Homo sapiens
  chr19:461846-462131
  hyper
  lymphoid_neoplasm vs. lung,myeloid_neoplasm
cagaaaacggggtgtcactgtcaccccgggacccagcctcctggcccgacttggctggagctcccctgcacctgccccgccccaagcagggctgattgccgggaacaaagggaggggccgggacgcgctggcaggtggggagggagggaggggcgaggctgcccggagcccgatcgataattcaggggatgagatcacagccggcgccgcccgcggggccggggaggtgggggaggggagcgaggcgcgcggtcgcgatcggccgtctctgccgcggcgcgtgtc

SEQ ID NO: 466774 - DNA, 22 bp, Homo sapiens
  chr19:462160-462182
  hyper
  lymphoid_neoplasm vs. lung,myeloid_neoplasm
agcagatcgtgggcgcgattgg

SEQ ID NO: 466775 - DNA, 250 bp, Homo sapiens
  chr19:1491131-1491381
  hyper
  lymphoid_neoplasm vs. ovary,liver_bileduct,renal
cggggggccgggggcggacaccggcgcggggccggagcatcgcggctcaggctgcgggaaagcggtgcgcgtgcagcggggtgggtgccctggtccgcgggcgagctcgagcagccaaccccgggcgcgtcggggccatggacggcctgaggcagcgcgtggagcacttcctggagcaaaggaacctggtcaccgaagtgctgggggcgctggaggccaagaccggggtggagaagcggtatctggctgc

SEQ ID NO: 466776 - DNA, 296 bp, Homo sapiens; identical to SEQ ID NO: 293267
  chr19:1491429-1491725
  hyper
  lymphoid_neoplasm vs. ovary,liver_bileduct,renal

SEQ ID NO: 466777 - DNA, 192 bp, Homo sapiens
  chr19:1675929-1676121
  hyper
  lymphoid_neoplasm vs. liver_bileduct, bladder_and_urothelial
cgccgcctcggggttatcgatcgcagccttggaaacgcgattagattatcccggctgggaacggcagcctggcgggggccgcgcgggggaagcgcgccgcttcttgtaaacggttccccgaagggcgctgggccaggggcctgggagggggctcgttcccggtggggggggcgtcccggtgcggcgcggccc

SEQ ID NO: 466778 - DNA, 192 bp, Homo sapiens
  chr19:1718944-1719136
  hyper
  lymphoid_neoplasm vs. anorectal
cgatgggagcgggggcccaggctgcggtttacactgaatccacaaaaatcaccgaagcttgaaaagtgctcaataagccatcgatcgctctctgctgatcggtgccgccgccgcagcggggctggggggaaaggcggggcgagcagacccaggctccctgcctgtgccccacgcgggaccgcggccctgcat

SEQ ID NO: 466779 - DNA, 99 bp, Homo sapiens
  chr19:1725428-1725527
  hyper
  lymphoid_neoplasm vs. bladder_and_urothelial,prostate, pancreas_gallbladder,liver_bileduct,melanoma,uterine,breast
cgggtggtgggaacgggattggaatcccgactgtggggcccctgcggccacctccaggatacagcggaccccgatgaagccctggcctgggtgctgggg

SEQ ID NO: 466780 - DNA, 281 bp, Homo sapiens
  chr19:1748599-1748880
  hyper
  lymphoid_neoplasm vs. multiple_myeloma, pancreas_gallbladder,prostate,anorectal
cgctgcagccttgctcgggtcccctagcccggcgcctccgcaaaccaacccaccgcgggccgccgagccccgctccgggatccgccggctgcctccatcccagaagagtgcgcagagaattaaatctagatatttacatgtttaatggctaaaggagcctgtcttctggcagggcagggagggcgctcaggtggtttaactcagcgccgggatcccgctcagctgcgggggccgcgaaccccgccgctgggccgacgattgggcccctccggagcgcggcg

SEQ ID NO: 466781 - DNA, 350 bp, Homo sapiens
  chr19:1748939-1749289
  hyper
  lymphoid_neoplasm vs. multiple_myeloma, pancreas_gallbladder,prostate,anorectal
ctgtcagccgagccctggagtggggcgttctccaggcccccaacccctgatccaggccgttcccctcccgcgcaccctccggcgggggctgcagcccgcgcccctcgccgccaagccccattttcccacagtgcaaactgcagcaaacgaactggttttctcctgagcgcacgctgcggggagacgattccaacggcgtccagtgaggaggggcccaggcctgcgagacggggcgcgttcctgtccccagacccctccggctgcgcctcaacccccagcccggctctctgacctgcatcggtcgggccgggcacagaggaggcaaagcaggcggaggccgcgagaggaga

SEQ ID NO: 466782 - DNA, 70 bp, Homo sapiens; identical to SEQ ID NO: 352140
  chr19:1749318-1749388
  hyper
  lymphoid_neoplasm vs. multiple_myeloma, pancreas_gallbladder,prostate,anorectal

SEQ ID NO: 466783 - DNA, 350 bp, Homo sapiens; identical to SEQ ID NO: 466781
  chr19:1748939-1749289
  hyper
  lymphoid_neoplasm vs. melanoma,sarcoma

SEQ ID NO: 466784 - DNA, 201 bp, Homo sapiens
  chr19:1749318-1749519
  hyper
  lymphoid_neoplasm vs. melanoma,sarcoma
ccttcccctcgggcaccctcggacgcccccgccccagcgtgttactttctagatggggaaactgaggcgcggccagggcgatgcggcggaagtcccgcgcccggccgtctcccgcgcctgccagacagagccccgagaagagggcatagaattccctcctctaattgtgtcccagaactctgggacgacggaggccaagct

SEQ ID NO: 466785 - DNA, 221 bp, Homo sapiens
  chr19:1749556-1749777
  hyper
  lymphoid_neoplasm vs. melanoma,sarcoma
caacccctccgctccccggccagccgcggccgcccagcctcggtgccccggcgcaaacaagcgcggtgtttgccgagcgcgaggcgggcggcgcggcccgagagcgatgaggattcgatggagccgctcgccgcggcgggggcaacggagcccgggcgggcgcggggatcgatcgggcacagctgtcgcctaagagcccgcgggagcatccacccgcgggc

SEQ ID NO: 466786 - DNA, 123 bp, Homo sapiens
  chr19:1749396-1749519
  hyper
  lymphoid_neoplasm vs. upper_gi,myeloid_neoplasm, pancreas_gallbladder
cgatgcggcggaagtcccgcgcccggccgtctcccgcgcctgccagacagagccccgagaagagggcatagaattccctcctctaattgtgtcccagaactctgggacgacggaggccaagct

SEQ ID NO: 466787 - DNA, 221 bp, Homo sapiens; identical to SEQ ID NO: 466785
  chr19:1749556-1749777
  hyper
  lymphoid_neoplasm vs. upper_gi,myeloid_neoplasm, pancreas_gallbladder

SEQ ID NO: 466788 - DNA, 287 bp, Homo sapiens; identical to SEQ ID NO: 459502
  chr19:1753216-1753503
  hyper
  lymphoid_neoplasm vs. myeloid_neoplasm,prostate,ovary, anorectal,cervical,upper_gi,melanoma,uterine

SEQ ID NO: 466789 - DNA, 197 bp, Homo sapiens; identical to SEQ ID NO: 361357
  chr19:1754950-1755147
  hyper
  lymphoid_neoplasm vs. myeloid_neoplasm,thyroid,upper_gi, cervical,non_cancer

SEQ ID NO: 466790 - DNA, 228 bp, Homo sapiens
  chr19:1754950-1755178
  hyper
  lymphoid_neoplasm vs. ovary
aagccccgcccgtgcgccccggcagcccgggaccccctatcaggaagctagaccgcgatccgcgccgctgcccgtttgtaccgttgccaaaagggagaaagggattgtgccgcctccccgccccccggtcgccgcttctgcccctttcgggagcgcgtaggggttctctagtccttgttagactgctgggaggctccgagcctctccccaagcagccctcagggaagc

SEQ ID NO: 466791 - DNA, 378 bp, Homo sapiens; identical to SEQ ID NO: 293287
  chr19:1755227-1755605
  hyper
  lymphoid_neoplasm vs. ovary

SEQ ID NO: 466792 - DNA, 166 bp, Homo sapiens; identical to SEQ ID NO: 361358
  chr19:1758062-1758228
  hyper
  lymphoid_neoplasm vs. ovary,thyroid

SEQ ID NO: 466793 - DNA, 107 bp, Homo sapiens; identical to SEQ ID NO: 335912
  chr19:4432865-4432972
  hyper
  lymphoid_neoplasm vs. cervical,liver_bileduct,upper_gi, renal,breast

SEQ ID NO: 466794 - DNA, 355 bp, Homo sapiens; identical to SEQ ID NO: 335916
  chr19:5536543-5536898
  hyper
  lymphoid_neoplasm vs. bladder_and_urothelial

SEQ ID NO: 466795 - DNA, 416 bp, Homo sapiens; identical to SEQ ID NO: 374563
  chr19:5567703-5568119
  hyper
  lymphoid_neoplasm vs. renal

SEQ ID NO: 466796 - DNA, 323 bp, Homo sapiens
  chr19:10024009-10024332
  hyper
  lymphoid_neoplasm vs. melanoma,anorectal, myeloid_neoplasm,thyroid,breast,non_cancer
cgtcccctacccaggcgtgccgggcagggtcgtgggaagcacaggggtagagggggacaggtgggggccccgggggctgcggcggcggcagcggctgtggcgcgggtaccacgccccccgggagcgccccccgcgcggcggccactcacgattttctcagaggcgcccgcacgggacacggtgccgttgagccccacgagcgagggcagcgtctgcgacatccagttggtgaccatggccatggtgctcagcacggccccgatcttgagcagcggcaccgacatcgcgcctccgcctcatgccccgcggccgcccgccgcgcg

SEQ ID NO: 466797 - DNA, 2 bp, Homo sapiens
  chr19:10024583-10024585
  hyper
  lymphoid_neoplasm vs. melanoma,anorectal, myeloid_neoplasm,thyroid,breast,non_cancer
cc

SEQ ID NO: 466798 - DNA, 146 bp, Homo sapiens; identical to SEQ ID NO: 335953
  chr19:11466008-11466154
  hyper
  lymphoid_neoplasm vs. melanoma,bladder_and_urothelial, lung,renal,upper_gi,anorectal,pancreas_gallbladder,uterine, non_cancer,cervical,breast,thyroid,prostate,myeloid_neoplasm

SEQ ID NO: 466799 - DNA, 301 bp, Homo sapiens
  chr19:11590392-11590693
  hyper
  lymphoid_neoplasm vs. ovary,anorectal
cgcccccgggatacgcccgggctgccgagtgggaatccgagggctcgggcgaggccgggcccccggggccctgggggcggggcctagatgggcgtgcccgggcgtggccaggcagggcgtggcagggcgggaggggctgcgcgctcgggagctgaccagctccgtggctgctgaaagcaccgagcgcggggctagcggtgcgggcgagcaggcgggcgggccgcgctcaaggtcacctcgcggcccagagccttggcgaggtggggagcctggacctggcctaagggggctgtctcggcct

SEQ ID NO: 466800 - DNA, 2 bp, Homo sapiens
  chr19:15619593-15619595
  hyper
  lymphoid_neoplasm vs. anorectal,thyroid,uterine, non_cancer,bladder_and_urothelial,breast,ovary
ac

SEQ ID NO: 466801 - DNA, 3 bp, Homo sapiens
  chr19:17137471-17137474
  hyper
  lymphoid_neoplasm vs. multiple_myeloma,prostate
gcc

SEQ ID NO: 466802 - DNA, 37 bp, Homo sapiens
  chr19:19383975-19384012
  hyper
  lymphoid_neoplasm vs. colorectal
cgctcagcgacagcgccgcgatcttgccggccagcgg

SEQ ID NO: 466803 - DNA, 5 bp, Homo sapiens
  chr19:19651122-19651127
  hyper
  lymphoid_neoplasm vs. non_cancer
cgacc

SEQ ID NO: 466804 - DNA, 61 bp, Homo sapiens; identical to SEQ ID NO: 455841
  chr19:30718934-30718995
  hyper
  lymphoid_neoplasm vs. non_cancer,thyroid,melanoma, prostate

SEQ ID NO: 466805 - DNA, 61 bp, Homo sapiens; identical to SEQ ID NO: 455841
  chr19:30718934-30718995
  hyper
  lymphoid_neoplasm vs. thyroid,prostate,non_cancer, melanoma,renal,myeloid_neoplasm,uterine

SEQ ID NO: 466806 - DNA, 59 bp, Homo sapiens; identical to SEQ ID NO: 462632
  chr19:31839508-31839567
  hyper
  lymphoid_neoplasm vs. sarcoma,anorectal

SEQ ID NO: 466807 - DNA, 234 bp, Homo sapiens
  chr19:31841177-31841411
  hyper
  lymphoid_neoplasm vs. prostate,bladder_and_urothelial, non_cancer,myeloid_neoplasm,ovary
cccccaggacccgccgtagccacttcccccaattttttttccccggacaaactttcctgggcccgtcccgggggtcggtgtgggagggggttccttcaagtttcctctcctgactttgggatgatcagggtccctccaccccgcccctcgcccccgggagccgggccgcgccccccatccacggcgcgggccgatcctagggcgggacgggggcgggagaaggaaaccgggctc

SEQ ID NO: 466808 - DNA, 234 bp, Homo sapiens; identical to SEQ ID NO: 466807
  chr19:31841177-31841411
  hyper
  lymphoid_neoplasm vs. thyroid,prostate,non_cancer,renal, cervical

SEQ ID NO: 466809 - DNA, 326 bp, Homo sapiens
  chr19:31841583-31841909
  hyper
  lymphoid_neoplasm vs. thyroid,prostate,non_cancer,renal, cervical
ggctgggcggcgtgggcggcggggcgacgcgggctcacttacgggcggcggtgagggcgcgggtgggccggagctcatgcgggcgacccccgggcggcggcggctgagcgggagccggagcccgagcggcgcgggcggcggcgcatcgatgcgctgcgggctcgattgcgtctccctgggccagctctcaggccgggaatggggcggccgcgccggggccggctccgggcgctgccgggcggcggctgctggagcgcgggggcggcctccgggcccactatccccgaggcggccctgcgcccgggcgcgccggctggggctctggc

SEQ ID NO: 466810 - DNA, 326 bp, Homo sapiens; identical to SEQ ID NO: 466809
  chr19:31841583-31841909
  hyper
  lymphoid_neoplasm vs. thyroid,prostate,non_cancer, cervical

SEQ ID NO: 466811 - DNA, 309 bp, Homo sapiens
  chr19:33685236-33685545
  hyper
  lymphoid_neoplasm vs. lung,renal,head_and_neck, bladder_and_urothelial
acagacccacggacgctctaccggcggcacccggccgggcgggctgggcgcagcgcggggcggcccggggacgccggggccgggcgggctgcgcgccgcggggcatgggcgcgccgggggtccccgggcccaggccggccgcggcggggctcccggggcgcgggggcagcggcgggcgggggtcttccctggcggccgccgctgagcccccgcagggcccgtgacgccgcggccgatgtggccgcgcgcgccctacgggcctgcaccgccaccgcacaaagacgcctcgggagccgccgcctgcacccg

SEQ ID NO: 466812 - DNA, 250 bp, Homo sapiens
  chr19:33685653-33685903
  hyper
  lymphoid_neoplasm vs. lung,renal,head_and_neck, bladder_and_urothelial
ggggcaggaggcggcgcccgcgggcggccgggcccggcatggagaagcgcgcggccgcggggctggagggcgcgccgggcgcccgggcgcagctggccgtcgtctgtctgggtgagtgggccgcgcgggccgggcaggtccgggtcccccgcatggcagtccgcgccgcgccctgaccgacctcctctccggccgcggcatcccgagccccccaccgcggtggctcccgcgcggagacccagagaggggc

SEQ ID NO: 466813 - DNA, 123 bp, Homo sapiens; identical to SEQ ID NO: 361535
  chr19:33686020-33686143
  hyper
  lymphoid_neoplasm vs. lung,renal,head_and_neck, bladder_and_urothelial

SEQ ID NO: 466814 - DNA, 299 bp, Homo sapiens
  chr19:33791861-33792160
  hyper
  lymphoid_neoplasm vs. pancreas_gallbladder,breast, anorectal,head_and_neck,non_cancer,upper_gi,thyroid, myeloid_neoplasm,uterine
cgggaaggaggcaggaaacctccaaataaaatgacaaggcacgatttgctccccctactcagtaggcattggagcggtgagtttgcatttccaaggcacaaggttatcctaaatactagagttgccgggctcccagctcagccccaagaattctcccctcctcgcagggagaagccaccgcctggccccctcatcttagacgcaccaagtccggcgcagaggaagggaggggacacgcggagcaggccaggctttcaggaggcaccggaatctcctagtcctggctcgcacggctcggg

SEQ ID NO: 466815 - DNA, 197 bp, Homo sapiens
  chr19:33792630-33792827
  hyper
  lymphoid_neoplasm vs. pancreas_gallbladder,breast, anorectal,head_and_neck,non_cancer,upper_gi,thyroid, myeloid_neoplasm,uterine
cgtgggcggcggcgtggggtgaccgggctgcaggtgcatggtggtctggccgcagtgcgcgatctggaactgcaggtgcggggcggccaggtgcgcgggcggcgggtgcgggtgcgggtgcgagggcggcggcggcggcggcggctggtaagggaagaggccggccagcgccagctgcttggcttcatcctcctcgc

SEQ ID NO: 466816 - DNA, 710 bp, Homo sapiens
  chr19:33792630-33793340
  hyper
  lymphoid_neoplasm vs. pancreas_gallbladder,head_and_neck, anorectal,colorectal,uterine,breast,ovary,myeloid_neoplasm,lung, non_cancer,thyroid
cgtgggcggcggcgtggggtgaccgggctgcaggtgcatggtggtctggccgcagtgcgcgatctggaactgcaggtgcggggcggccaggtgcgcgggcggcgggtgcgggtgcgggtgcgagggcggcggcggcggcggcggctggtaagggaagaggccggccagcgccagctgcttggcttcatcctcctcgcggggctcctgcttgatcaccagcggccgcagcgccggcgccccgacgcgctcgtacaggggctccagcctgccgtccaggtagccggcggccgcgcagccgtagccgggcgggggcccgtgcgctcccccgggcatgacggcgccgccggggcccgcgggcgcgcccgggtagtcaaagtcgccgccgccgccgccgcccgtggggcccacggccgccttggccttctcctgctgccggctgtgctggaacaggtcggccaggaactcgtcgttgaaggcggccgggtcgatgtaggcgctgatgtcgatggacgtctcgtgctcgcagatgccgcccagcggctccggggcggcaggtggggcgggaggctgcgcggggcccgcgccccggggaaagccgaaggcggcgctgctgggcgcgtgcggggggctctgcaggtggctgctcatcgggggccgcggctccgcctcgtagaagtcggccgactccatgggggagttagagttctccc

SEQ ID NO: 466817 - DNA, 974 bp, Homo sapiens
  chr19:33792849-33793823
  hyper
  lymphoid_neoplasm vs. uterine,breast,colorectal,cervical, thyroid,pancreas_gallbladder,upper_gi,ovary
cggccgcagcgccggcgccccgacgcgctcgtacaggggctccagcctgccgtccaggtagccggcggccgcgcagccgtagccgggcgggggcccgtgcgctcccccgggcatgacggcgccgccggggcccgcgggcgcgcccgggtagtcaaagtcgccgccgccgccgccgcccgtggggcccacggccgccttggccttctcctgctgccggctgtgctggaacaggtcggccaggaactcgtcgttgaaggcggccgggtcgatgtaggcgctgatgtcgatggacgtctcgtgctcgcagatgccgcccagcggctccggggcggcaggtggggcgggaggctgcgcggggcccgcgccccggggaaagccgaaggcggcgctgctgggcgcgtgcggggggctctgcaggtggctgctcatcgggggccgcggctccgcctcgtagaagtcggccgactccatgggggagttagagttctcccggcatggcgagcctcggcggcctccagcctgcgcggggcgtcgccgccgcccacccggagaccctgctcgcccgcgcccgcgcacctccgggtcgcgaatggcccggcccgcgccggcccagcttttatacccggcaggccgcgtcgccccctagagtccgaggcggcctctgtccccgggctgcggcggcgcggcgcctgctgggtcctagcgcgcggccggcatggggcggcgaaccagcgcggcacagcgccgcgctccccaggcaggccgcggcgcaacgcccaccgcctccagcgcgcccagcagagccgcggcgctcgctccaagctccgcccccggcccggccgtcgcccccgcgcccacgtggtcggtagcgggggccccctcctcctgcctgccctaggcgcccgtatccagccacggccgggagcccaggagtatcccgaggctgcacggggtaggggtggggggcggagggc

SEQ ID NO: 466818 - DNA, 530 bp, Homo sapiens
  chr19:33793347-33793877
  hyper
  lymphoid_neoplasm vs. pancreas_gallbladder,uterine, breast,ovary,upper_gi,lung
cgagcctcggcggcctccagcctgcgcggggcgtcgccgccgcccacccggagaccctgctcgcccgcgcccgcgcacctccgggtcgcgaatggcccggcccgcgccggcccagcttttatacccggcaggccgcgtcgccccctagagtccgaggcggcctctgtccccgggctgcggcggcgcggcgcctgctgggtcctagcgcgcggccggcatggggcggcgaaccagcgcggcacagcgccgcgctccccaggcaggccgcggcgcaacgcccaccgcctccagcgcgcccagcagagccgcggcgctcgctccaagctccgcccccggcccggccgtcgcccccgcgcccacgtggtcggtagcgggggccccctcctcctgcctgccctaggcgcccgtatccagccacggccgggagcccaggagtatcccgaggctgcacggggtaggggtggggggcggagggcgagtcttggtcttgagctgctggggcgcggattctctttcaaagccagaaccag

SEQ ID NO: 466819 - DNA, 369 bp, Homo sapiens; identical to SEQ ID NO: 352280
  chr19:33793960-33794329
  hyper
  lymphoid_neoplasm vs. pancreas_gallbladder,uterine, breast,ovary,upper_gi,lung

SEQ ID NO: 466820 - DNA, 49 bp, Homo sapiens; identical to SEQ ID NO: 352281
  chr19:34114303-34114352
  hyper
  lymphoid_neoplasm vs. prostate

SEQ ID NO: 466821 - DNA, 117 bp, Homo sapiens
  chr19:34972067-34972184
  hyper
  lymphoid_neoplasm vs. cervical
cgcgaggaccagtccccaaccaacccgctcctagttctgggcgccttccccagcagtcagatgggggcttcagaggccggtgcgcggccacatggccccgggccaggcagggggtcg

SEQ ID NO: 466822 - DNA, 192 bp, Homo sapiens
  chr19:41698920-41699112
  hyper
ccaagccccgcgtaaacctgggtgacctcggagacatccgttggagcatgagttcccgacatcaggcggcggcggtggtccgggagaaacccggcggcggggagataagcctgcccaggaggcagggggctgggctagctgccccgccccgcgcctgacttcgttggggagggagacgcccggctcccgccc

SEQ ID NO: 466823 - DNA, 158 bp, Homo sapiens; identical to SEQ ID NO: 361606
  chr19:41699206-41699364
  hyper

SEQ ID NO: 466824 - DNA, 377 bp, Homo sapiens
  chr19:41732035-41732412
  hyper
  lymphoid_neoplasm vs. liver_bileduct, pancreas_gallbladder
cggctctggctccgcgcccccgaagccggccggaagcgctggggtggggaggtgcccccggtgactcacgcgggggcaggaatgctgcggtcggaacgggacccggctccagaacccacctccagccccagggcttctccggccggcggcgccagctcccgcgcgctgaccctggcggggccccacgtgccaggtggctggacccgacccaggctccccgcccccactcgggccgcccgcccgggactgtactgtttctcctccgggcggcgcgggggctgcgggcgcggggccttcagggcgcggaggctgcgggagcgggcacctgaccttgtctgggaacggccacctaggaagccgcgactgaggagctcccc

SEQ ID NO: 466825 - DNA, 114 bp, Homo sapiens; identical to SEQ ID NO: 374800
  chr19:41732441-41732555
  hyper
  lymphoid_neoplasm vs. liver_bileduct, pancreas_gallbladder

SEQ ID NO: 466826 - DNA, 109 bp, Homo sapiens
  chr19:44302742-44302851
  hyper
  lymphoid_neoplasm vs. head_and_neck
cgggtcgggtgctggcaagagagcgtagatgcacactcaggcagtggtaccctggcacagtcgtgcgggctgcgcactgcgccagagcccgcgcctagcacgtctcggg

SEQ ID NO: 466827 - DNA, 33 bp, Homo sapiens; identical to SEQ ID NO: 361613
  chr19:44303168-44303201
  hyper
  lymphoid_neoplasm vs. head_and_neck

SEQ ID NO: 466828 - DNA, 151 bp, Homo sapiens
  chr19:45146966-45147117
  hyper
  lymphoid_neoplasm vs. liver_bileduct, pancreas_gallbladder
cggcaaccgcgagccgttagtaagttgctgaatctctccgtgtgcctccgtttcctcacctggaatgtgggcgacctcacacaggaagccgcctcttctagtgggcaccgacggagcgagcgcgcgtctgcagcgggactgagcgccggga

SEQ ID NO: 466829 - DNA, 333 bp, Homo sapiens
  chr19:45147367-45147700
  hyper
  lymphoid_neoplasm vs. liver_bileduct, pancreas_gallbladder
gggaggcccagctgctcggagcaactggcatggcccgagccatggccgccgcgtggccgctgctgctggtggcgctactggtgctgtcctggccacccccaggaaccggtgagtgacccccgcgcagtccggtggcccctgtctggctcccgctccgcatccaggccgggtacttgcccccttgggttcccgaagatgacggccccgccgcggcgccacccaccccccatctctgccccggggttggaaggaacacggtgcgagggtgcgagggcaggaccctcctcttggccacccggagagcggtcggagttgggtacagaaattcctcga

SEQ ID NO: 466830 - DNA, 95 bp, Homo sapiens; identical to SEQ ID NO: 352328
  chr19:45147734-45147829
  hyper
  lymphoid_neoplasm vs. liver_bileduct, pancreas_gallbladder

SEQ ID NO: 466831 - DNA, 725 bp, Homo sapiens
  chr19:45349502-45350227
  hyper
  lymphoid_neoplasm vs. cervical,upper_gi,colorectal, head_and_neck,liver_bileduct,myeloid_neoplasm,breast,sarcoma, lung,prostate,pancreas_gallbladder
cggggccggagccagggtcggcttgactcgggggagcagcgggtggatcctgtgacgtcagcgggttcgaaccgccggagctgagcgagaggccgggggtgccgagccgggcggggagagctgggccgggagagcagaacagggaggctagagcgcagcgggaaccggcccggagccggagccggagccccacaggcacctactaaaccgcccagccgatcggcccccacagagtggcccgcgggcctccggccgggcccagtcccctcccgggccctccatggcccgggccgctgccctcctgccgtcgagatcgccgccgacgccgctgctgtggccgctgctgctgctgctgctcctggaaaccggtgagacgagcggacggccccctgccctcgcgcggaccccctccaaccttaccttccgagctggggaagccgagcaccttccccgcccacccccggctccccgagccccctctcgcgtgcccccttcctggctggccccacagactccgaccccctacacgtccgattctctcgaggagactctgacccctcctttctgcatctctctcaccaccacccccatccttcttaatccaattgcccatcctacgcctgcttgtctgtccccctccccatttctcggattcccgcgccgaaagggttaaatcccaggaaggcctggtgccccctccccaccccgcgccgagtagttcaccc

SEQ ID NO: 466832 - DNA, 749 bp, Homo sapiens
  chr19:45349755-45350504
  hyper
  lymphoid_neoplasm vs. upper_gi,colorectal,lung,breast, liver_bileduct,myeloid_neoplasm,head_and_neck,uterine,sarcoma
cgggcccagtcccctcccgggccctccatggcccgggccgctgccctcctgccgtcgagatcgccgccgacgccgctgctgtggccgctgctgctgctgctgctcctggaaaccggtgagacgagcggacggccccctgccctcgcgcggaccccctccaaccttaccttccgagctggggaagccgagcaccttccccgcccacccccggctccccgagccccctctcgcgtgcccccttcctggctggccccacagactccgaccccctacacgtccgattctctcgaggagactctgacccctcctttctgcatctctctcaccaccacccccatccttcttaatccaattgcccatcctacgcctgcttgtctgtccccctccccatttctcggattcccgcgccgaaagggttaaatcccaggaaggcctggtgccccctccccaccccgcgccgagtagttcacccggatctgggtctctgtctcctctacccctctcaggaatgtggggaatgttccccccacctaccgcagtaaggtctcgaggaagaggcgagaccacctccctcccctatttttccttcttcccggcttgggcgtctgaggcccggagagaactgaggacaagcggacctgattcgggtcccttggagggctaaggataagagttctggcgacttagggggaagggcctgagctcggagctccaaccccgaacctcagggagttgggggttctgactcc

SEQ ID NO: 466833 - DNA, 3 bp, Homo sapiens
  chr19:45655296-45655299
  hyper
  lymphoid_neoplasm vs. anorectal,sarcoma
cgg

SEQ ID NO: 466834 - DNA, 140 bp, Homo sapiens
  chr19:46931914-46932054
  hyper
  lymphoid_neoplasm vs. myeloid_neoplasm,non_cancer, cervical
cgtggctcccgggtcctgggcaaggctgcaccaaggagggtctaaagatgatgcttcccctttcttggcgtggcctccgaaggtctcacaggccccaacggtctctccggatctgggactgctgatctccctgggacaac

SEQ ID NO: 466835 - DNA, 12 bp, Homo sapiens
  chr19:46932336-46932348
  hyper
  lymphoid_neoplasm vs. myeloid_neoplasm,non_cancer, cervical
agaagcgcccgc

SEQ ID NO: 466836 - DNA, 18 bp, Homo sapiens
  chr19:49242357-49242375
  hyper
  lymphoid_neoplasm vs. ovary
cgcgcaggtgctccgccc

SEQ ID NO: 466837 - DNA, 142 bp, Homo sapiens; identical to SEQ ID NO: 459532
  chr19:49242393-49242535
  hyper
  lymphoid_neoplasm vs. ovary

SEQ ID NO: 466838 - DNA, 36 bp, Homo sapiens; identical to SEQ ID NO: 459533
  chr19:49242773-49242809
  hyper
  lymphoid_neoplasm vs. ovary

SEQ ID NO: 466839 - DNA, 19 bp, Homo sapiens
  chr19:49242911-49242930
  hyper
  lymphoid_neoplasm vs. ovary
cgccggggaacagagtcgc

SEQ ID NO: 466840 - DNA, 2 bp, Homo sapiens
  chr19:49575256-49575258
  hyper
  lymphoid_neoplasm vs. bladder_and_urothelial,ovary
cg

SEQ ID NO: 466841 - DNA, 781 bp, Homo sapiens; identical to SEQ ID NO: 352360
  chr19:49652265-49653046
  hyper
  lymphoid_neoplasm vs. upper_gi,colorectal,ovary,uterine

SEQ ID NO: 466842 - DNA, 435 bp, Homo sapiens; identical to SEQ ID NO: 336213
  chr19:49660929-49661364
  hyper
  lymphoid_neoplasm vs. liver_bileduct

SEQ ID NO: 466843 - DNA, 348 bp, Homo sapiens
  chr19:50706517-50706865
  hyper
  lymphoid_neoplasm vs. liver_bileduct,upper_gi, bladder_and_urothelial,sarcoma,colorectal,lung
cggtcggcccccccacgccggcccttacaaaggcccccattcatgccttgcgcacaaagcggcccattcaccctggccccttgggcctcccgcccccggccgccccccgcgcctcgctattggtggcgccccgtgcccatcaggcctcggcttccacccccgaccgcgccgcctagctccgcgcccgggccgcgttcttttcccacggctggcacccttcgacaacttctgattggcccagcccgccagccgctctttttgattggcggctcccgtcccccaggggcggggccgtagcttgccgcagcgggcgccgattggcctctgctgctctcttgggggcggggc

SEQ ID NO: 466844 - DNA, 189 bp, Homo sapiens
  chr19:50706894-50707083
  hyper
  lymphoid_neoplasm vs. liver_bileduct,upper_gi, bladder_and_urothelial,sarcoma,colorectal,lung
ccaggccgaagcctcgggacggccctggaagccggtgagtgcccggggccggcagccctccgggggcggcggaacgggactgagccaggggaagctggagcctgggggctgcgatcggggcccgggagcccgggcaggcggccggggacggcggggaggtgacgcggacactcaccttgggcgcgcagc

SEQ ID NO: 466845 - DNA, 91 bp, Homo sapiens; identical to SEQ ID NO: 352365
  chr19:50707093-50707184
  hyper
  lymphoid_neoplasm vs. liver_bileduct,upper_gi, bladder_and_urothelial,sarcoma,colorectal,lung

SEQ ID NO: 466846 - DNA, 378 bp, Homo sapiens; identical to SEQ ID NO: 336220
  chr19:50708476-50708854
  hyper
  lymphoid_neoplasm vs. pancreas_gallbladder

SEQ ID NO: 466847 - DNA, 28 bp, Homo sapiens
  chr19:51198097-51198125
  hyper
  lymphoid_neoplasm vs. sarcoma,breast,prostate,thyroid
cgccaccgcgggccggggcctgccggcc

SEQ ID NO: 466848 - DNA, 51 bp, Homo sapiens; identical to SEQ ID NO: 352375
  chr19:51198271-51198322
  hyper
  lymphoid_neoplasm vs. sarcoma,breast,prostate,thyroid

SEQ ID NO: 466849 - DNA, 47 bp, Homo sapiens
  chr19:51520092-51520139
  hyper
  lymphoid_neoplasm vs. bladder_and_urothelial
cggaccctggcttctatccgttgcaggcaaccacctcctcctagagc

SEQ ID NO: 466850 - DNA, 249 bp, Homo sapiens
  chr19:51520492-51520741
  hyper
  lymphoid_neoplasm vs. bladder_and_urothelial
aggcttcggggtccaagcgcgtgtcgttttgggggagcagcgccgcctctgcggctggagaaagaaaggggacggaatcaaagcacggagggcagggtctgggtttggggttggagctgggctgtggcactggactgcgttcggggacgggggacgcagccagaacgcgagggtggtagggaaatattgggggtttcgcgtgcaccgaagggaatgggaggagaagaagcgcgtgaaagtggaaggaag

SEQ ID NO: 466851 - DNA, 13 bp, Homo sapiens
  chr19:51521986-51521999
  hyper
  lymphoid_neoplasm vs. ovary
cggtagtgtaaaa

SEQ ID NO: 466852 - DNA, 17 bp, Homo sapiens
  chr19:51815083-51815100
  hyper
  lymphoid_neoplasm vs. bladder_and_urothelial
cgcgccgcctctgccgc

SEQ ID NO: 466853 - DNA, 3 bp, Homo sapiens
  chr19:51830757-51830760
  hyper
  lymphoid_neoplasm vs. multiple_myeloma
cga

SEQ ID NO: 466854 - DNA, 85 bp, Homo sapiens; identical to SEQ ID NO: 457790
  chr19:54412564-54412649
  hyper
  lymphoid_neoplasm vs. multiple_myeloma

SEQ ID NO: 466855 - DNA, 34 bp, Homo sapiens; identical to SEQ ID NO: 460909
  chr19:54485370-54485404
  hyper
  lymphoid_neoplasm vs. uterine,non_cancer,prostate

SEQ ID NO: 466856 - DNA, 124 bp, Homo sapiens; identical to SEQ ID NO: 361740
  chr19:54486197-54486321
  hyper
  lymphoid_neoplasm vs. uterine,non_cancer,prostate

SEQ ID NO: 466857 - DNA, 546 bp, Homo sapiens; identical to SEQ ID NO: 336285
  chr19:55677520-55678066
  hyper
  lymphoid_neoplasm vs. uterine,colorectal, myeloid_neoplasm,upper_gi,thyroid,bladder_and_urothelial

SEQ ID NO: 466858 - DNA, 412 bp, Homo sapiens; identical to SEQ ID NO: 361743
  chr19:55866046-55866458
  hyper
  lymphoid_neoplasm vs. cervical,head_and_neck

SEQ ID NO: 466859 - DNA, 535 bp, Homo sapiens
  chr2:45398-45933
  hyper
  lymphoid_neoplasm vs. upper_gi
cgcacacggccagccccgcccccagccttctgggcacacacctcgggtccggctctgctcctggctgggggtctccttggccttcttacaggtgtacagccacttgatgatgcgggcgttcctctcgatgaccgaagtggtgctgggcacctgctctatcagctcctcctcctgcagcccctcgtcgtcgccgccgctgtgccgggagaagccgctgccggaggtggcgacgctcacgctgcgcaccttgagggtcacacagtccgaccccgcggtgaagttctccctccccagggcctccaccacctcggggtccaggccgcagtactggaagaaggtgtcagactcggccaaggcagcggaatagcgggagctgaggtccgactgtgagcgctgcagcccccgacgcctcaccacccgcggctctggcccagggggcgcggccgggacactggagggcgccgcggaccgcgcggctggggctggggtctcggggattgcggggtccgccgcggggccaggagtggtcgggacc

SEQ ID NO: 466860 - DNA, 246 bp, Homo sapiens
  chr2:45969-46215
  hyper
  lymphoid_neoplasm vs. upper_gi
cggggcaccggcgccttgtccttacccggcccctggaagagcttcttcaccaggcttgccctggggccgtcggcgcccgatcctcgcacgaattcgcatttctgccggtagatgatcagcgagtccggtctcaacggcttccgcgcaatagccctgcgcgccaccggggccggggcgcgggccgggggcccagggtcgttccccgggcacttgatcgcccccgggccgctgccctcggaagcgacg

SEQ ID NO: 466861 - DNA, 176 bp, Homo sapiens
  chr2:45757-45933
  hyper
  lymphoid_neoplasm vs. liver_bileduct
cggaatagcgggagctgaggtccgactgtgagcgctgcagcccccgacgcctcaccacccgcggctctggcccagggggcgcggccgggacactggagggcgccgcggaccgcgcggctggggctggggtctcggggattgcggggtccgccgcggggccaggagtggtcgggacc

SEQ ID NO: 466862 - DNA, 246 bp, Homo sapiens; identical to SEQ ID NO: 466860
  chr2:45969-46215
  hyper
  lymphoid_neoplasm vs. liver_bileduct

SEQ ID NO: 466863 - DNA, 143 bp, Homo sapiens; identical to SEQ ID NO: 357074
  chr2:46450-46593
  hyper
  lymphoid_neoplasm vs. liver_bileduct

SEQ ID NO: 466864 - DNA, 530 bp, Homo sapiens; identical to SEQ ID NO: 357075
  chr2:46665-47195
  hyper
  lymphoid_neoplasm vs. colorectal,cervical

SEQ ID NO: 466865 - DNA, 271 bp, Homo sapiens
  chr2:7005163-7005434
  hyper
  lymphoid_neoplasm vs. upper_gi,thyroid
cggcccgggcggcttcccggtccgggaagaccacggaactgggcaagtctggcaccaccgggtgcagcgggggctccgggacgggcacgacctgtgcgcagcccacctgcagccgcctgccgtcttgcacctcccagaggcgctgccacagctggccgcgcgggtcggcctcgaactcgcccaagtgcgggcgtggtgcctcctgacaggcgcccagcagctcgagcagcgcttgccgggtgtcagggtcatccagggggtcgcgcagcag

SEQ ID NO: 466866 - DNA, 460 bp, Homo sapiens
  chr2:7005469-7005929
  hyper
  lymphoid_neoplasm vs. upper_gi,thyroid
ggcagtagcagagcagcctgagcagctggcaccgctggaaggggccgcggcgcagctggtgcagcaggcgctggtgcagccgcgccgcccggacccgggccccgcagccggcgtccggggtcacgggcacgcacagcgagtagctgcgctccgggggccccagcagcgccgccaggcgggggtcgggggcgtctgcgtcgccgggggcgtcggcgcctagggcgaagtgagccagggtgcagtcgggaagctccaggacgaagcggcgcggcggagccatggccccagcgcagaccccgcgccgcccgagcagcggccccgacagtggcccgcgcaggagccggcgggcgaaggccatgggcgcctcagcgacgccgccctcggccccgcctcggaaacgaaacctggcgggagccaggcgccggcgggaaacgaaacccggagggagccaggcgccagc

SEQ ID NO: 466867 - DNA, 728 bp, Homo sapiens; identical to SEQ ID NO: 349448
  chr2:7005469-7006197
  hyper
  lymphoid_neoplasm vs. upper_gi,uterine,myeloid_neoplasm, non_cancer

SEQ ID NO: 466868 - DNA, 292 bp, Homo sapiens
  chr2:7057762-7058054
  hyper
  lymphoid_neoplasm vs. myeloid_neoplasm,prostate,melanoma, thyroid,sarcoma,renal,breast,ovary,anorectal,uterine,non_cancer, cervical,head_and_neck,bladder_and_urothelial,lung, multiple_myeloma,liver_bileduct
cgcgcgtcccctttgtgtccgcatcgcccgggccggccgcggagcggggagggcgggacgcggcgctgcgcggccggccttggggctcggggcttgcggccgcgcctgccccgctgggtcctgccccggcgcccggtggcagcgggcggggggcagcgtcccgggcggggactcgcgggctccgttcagaggacgcccgccctgccctgcccgtgtccctgacctcgtccctgctctgctcctgccctgccctgcctctcgcaggcggcgcccgcgccccagggcagtgggc

SEQ ID NO: 466869 - DNA, 12 bp, Homo sapiens
  chr2:7058378-7058390
  hyper
  lymphoid_neoplasm vs. myeloid_neoplasm,prostate,melanoma, thyroid,sarcoma,renal,breast,ovary,anorectal,uterine,non_cancer, cervical,head_and_neck,bladder_and_urothelial,lung, multiple_myeloma,liver_bileduct
cgcccgagcccc

SEQ ID NO: 466870 - DNA, 40 bp, Homo sapiens
  chr2:7058392-7058432
  hyper
  lymphoid_neoplasm vs. myeloid_neoplasm,prostate,melanoma, thyroid,sarcoma,renal,breast,ovary,anorectal,uterine,non_cancer, cervical,head_and_neck,bladder_and_urothelial,lung, multiple_myeloma,liver_bileduct
agttccctgcgggtcttacccaccccagcctccggccgcc

SEQ ID NO: 466871 - DNA, 202 bp, Homo sapiens
  chr2:10183602-10183804
  hyper
  lymphoid_neoplasm vs. head_and_neck,pancreas_gallbladder, liver_bileduct
cgcggtgtattttggttcgcctccgcgccccgccccgccagccgctccctccgcggccgccccgcccctcccgcgccgcgagggccgcgccggggcagagccgcgcgggcgggcgaggcgcgtgccggccgcaggagctccgggttgccgccgccgccgccgcccgcagcccacgtgcggccgctgctgcgcccgagctcac

SEQ ID NO: 466872 - DNA, 439 bp, Homo sapiens; identical to SEQ ID NO: 357085
  chr2:10183814-10184253
  hyper
  lymphoid_neoplasm vs. head_and_neck,pancreas_gallbladder, liver_bileduct

SEQ ID NO: 466873 - DNA, 43 bp, Homo sapiens
  chr2:11051801-11051844
  hyper
  lymphoid_neoplasm vs. ovary,uterine
cggcagcattctctccccactaatcctctccaaacagcagtga

SEQ ID NO: 466874 - DNA, 230 bp, Homo sapiens
  chr2:11052132-11052362
  hyper
  lymphoid_neoplasm vs. ovary,uterine
cggcgtgggtccgccagctccgggacctgccgccgctgcctgcgcgccccggggcggaggacggtgccagccgcccacgaggagaccccgctcccgcaggaggccgagctgaagcggcggagcgcgccgccagccagccggggtgagtgccccgggcgaggccggcggccgccaaagcccccgcgggctcgcccgggcgcccggatgccagccccgagccccgccgccgg

SEQ ID NO: 466875 - DNA, 284 bp, Homo sapiens
  chr2:14772282-14772566
  hyper
  lymphoid_neoplasm vs. cervical
aaagacgtctggggaacgaaaagggtcttcgatccaaggaccagcctaggggccatcgggaaccaaggctctgggggatcccagcagggcccagacgcccgcctcgggcaatgtcgctgcctgccccgggccgctcgcagtgcctgggccatactggggtgccctggggtttcttctccatacccagactcagcttccccgctggagtctgtcttcctggaacacggaacgcgggcgggctgtgttctcagtcacaatcagctcggatgagctggggggcgcgg

SEQ ID NO: 466876 - DNA, 167 bp, Homo sapiens; identical to SEQ ID NO: 357096
  chr2:14772823-14772990
  hyper
  lymphoid_neoplasm vs. cervical

SEQ ID NO: 466877 - DNA, 79 bp, Homo sapiens
  chr2:14773829-14773908
  hyper
  lymphoid_neoplasm vs. head_and_neck
cgagttcccggaaggggtcggaggctgtgtggtggcgtctgctctcgcctgacctgtggcggcttctccgcccctcgta

SEQ ID NO: 466878 - DNA, 240 bp, Homo sapiens
  chr2:14774042-14774282
  hyper
  lymphoid_neoplasm vs. head_and_neck
tctctgcctctctgtgcctccgcagatccccgctcctggccctcgcctcgccacctcattgatgggcaaccaactggaccgcatcacccacctcaactacagcgagttgcccacaggggacccgtcggggattgaaaaggacgaactgcgggtcggggttgcctacttcttctcggatgatgaggaagacctggacgaacgcgggcagcccgacaagtttggcgtgaaggcccccccggg

SEQ ID NO: 466879 - DNA, 135 bp, Homo sapiens
  chr2:14774684-14774819
  hyper
  lymphoid_neoplasm vs. head_and_neck
gaacgcctgcggccacctgggcctcaagagcgaggagatctgctggacgaactcggagagcttcgccgcctggtgccgctttggcaagcgggagttcaaggcgggaggggaggtgccggcaggcacgcagccccc

SEQ ID NO: 466880 - DNA, 256 bp, Homo sapiens
  chr2:14774684-14774940
  hyper
  lymphoid_neoplasm vs. head_and_neck,breast,colorectal, upper_gi
gaacgcctgcggccacctgggcctcaagagcgaggagatctgctggacgaactcggagagcttcgccgcctggtgccgctttggcaagcgggagttcaaggcgggaggggaggtgccggcaggcacgcagcccccgcagcagcagtactatctcaaggtgcacctgggagagaacaaggtccacaccgccaggtttcacagcctggaagacctcatccgcgagaagcgccgtatcgacgccagcggccgcctgcga

SEQ ID NO: 466881 - DNA, 31 bp, Homo sapiens; identical to SEQ ID NO: 349458
  chr2:14775287-14775318
  hyper
  lymphoid_neoplasm vs. head_and_neck,breast,colorectal, upper_gi

SEQ ID NO: 466882 - DNA, 70 bp, Homo sapiens
  chr2:14774870-14774940
  hyper
  lymphoid_neoplasm vs. head_and_neck,colorectal
cgccaggtttcacagcctggaagacctcatccgcgagaagcgccgtatcgacgccagcggccgcctgcga

SEQ ID NO: 466883 - DNA, 240 bp, Homo sapiens
  chr2:14775287-14775527
  hyper
  lymphoid_neoplasm vs. head_and_neck,colorectal
ggctgaggggagaaaggacatggccttccccgcgagtccatggccagtgactgtggcccgactcgaaaacaaccctcttctcaaaagggaccatcaccgccccgagcgtgcgcacacagaccggtcggaggcgagaactggtctctacagggcacagttcagctcctctgtggatgcgtccccagatcgcaggatttccaagaaatcgagcctgtcccttgtgcacttgggaataattcc

SEQ ID NO: 466884 - DNA, 20 bp, Homo sapiens
  chr2:19556672-19556692
  hyper
  lymphoid_neoplasm vs. bladder_and_urothelial,cervical
tgcttgcattaatgagaacg

SEQ ID NO: 466885 - DNA, 18 bp, Homo sapiens
  chr2:19556772-19556790
  hyper
  lymphoid_neoplasm vs. bladder_and_urothelial,cervical
agtggtgacaggcgtccg

SEQ ID NO: 466886 - DNA, 362 bp, Homo sapiens
  chr2:19557098-19557460
  hyper
  lymphoid_neoplasm vs. bladder_and_urothelial,cervical
gggtgaaatttaccaaattgtggcaacaaagaaacccttgcggctactttacacattgagaacccaacccgctactgcctgagctgctgaaaaaggactaaacgtggtttttcattcttctccgagacatttccgaggagaaattagttcagcaggcagcccttcacccctttcccccttctttctctcctgacggctggattagcggacagtcaggggagtaacagaacttttcctgtccccagcccggagaccctagggctccacagagtttccactagtgctgtgtgtgggtctcgaattggaaagcagtgcttgcgcccactgcattgcctccctgcaccaggacaatcaagggttcc

SEQ ID NO: 466887 - DNA, 137 bp, Homo sapiens; identical to SEQ ID NO: 357110
  chr2:19557489-19557626
  hyper
  lymphoid_neoplasm vs. bladder_and_urothelial,cervical

SEQ ID NO: 466888 - DNA, 64 bp, Homo sapiens
  chr2:26915614-26915678
  hyper
  lymphoid_neoplasm vs. anorectal
cgggtgcccggcgcggagagcggcgagcgcagccatgccccaggccgcctccggggcagcagca

SEQ ID NO: 466889 - DNA, 240 bp, Homo sapiens
  chr2:42274305-42274545
  hyper
  lymphoid_neoplasm vs. upper_gi
cgcggctgaccccgtcagaccccaggcatcttgaggggtagggagcgacccccagctgcatttggggctttagaggcaaggaaaatcagaaacactttggtaaaaggagttgaacagggcatcctcggcgagctcacgagcattcctctatgcctagagctcctgtcccacgcgcgctcgcaggtgctggcccggctgtgcccgcttccccctcaccatcgccccaatccggaatccggg

SEQ ID NO: 466890 - DNA, 416 bp, Homo sapiens
  chr2:42274691-42275107
  hyper
  lymphoid_neoplasm vs. upper_gi
gtcccctccggagcccgctacccgccggcctcgcccctttatctttcccccactccgcccggccggctccgttatccacctcccaatcccgttatccggccgccccggccccgttatccgccctcgcgttgggcgcggagcccccgcgcgcctcctggccgccgccgccccctcccccgctcccagacggagctcgggggaccgcgggctgggcgggaccgcgggctgggcaggaccggagccgcctccgcgccgcttcccaggcccggacggccgcgggaggaggtcccgctgtcagtcagcggggaaggccgggccgggcggccggagggggcggcgccgaggacgggctcgggccgggagctgggaggtggaggcggaggggcgggggagggggcgggggagggggcgggggc

SEQ ID NO: 466891 - DNA, 904 bp, Homo sapiens
  chr2:42274691-42275595
  hyper
  lymphoid_neoplasm vs. head_and_neck,upper_gi
gtcccctccggagcccgctacccgccggcctcgcccctttatctttcccccactccgcccggccggctccgttatccacctcccaatcccgttatccggccgccccggccccgttatccgccctcgcgttgggcgcggagcccccgcgcgcctcctggccgccgccgccccctcccccgctcccagacggagctcgggggaccgcgggctgggcgggaccgcgggctgggcaggaccggagccgcctccgcgccgcttcccaggcccggacggccgcgggaggaggtcccgctgtcagtcagcggggaaggccgggccgggcggccggagggggcggcgccgaggacgggctcgggccgggagctgggaggtggaggcggaggggcgggggagggggcgggggagggggcgggggcgggggcggggggcggctctgggccttataagcggcgggggcagggcggcagggaggcaagtgtcaggccgatgtgtcgcccgcgaggggccggggtcggggccgccggggccatgcgcgcgggctgggcagggggccggcggggcgcagagcggagccgcctcggagcctgagccgcccggggccggggccggggagccgcgcggggccggccggccggggggaggggagcgatgcggcgccggcgggcggcagtggccgcgggtttctgcgcctccttcctgctgggctccgtcctcaacgtgctcttcgctccgggctcggagcctccgaggccaggccagtcccctgagccttcgccggccccgggtccgggccgtcgcgggggccgcggggagctggcccggcagatccgggcgcgctacgaggaggtgcagcgctattcccgcgggggccccgggcccggggcgggccggccggagcggcggc

SEQ ID NO: 466892 - DNA, 665 bp, Homo sapiens
  chr2:42275112-42275777
  hyper
cggggggcggctctgggccttataagcggcgggggcagggcggcagggaggcaagtgtcaggccgatgtgtcgcccgcgaggggccggggtcggggccgccggggccatgcgcgcgggctgggcagggggccggcggggcgcagagcggagccgcctcggagcctgagccgcccggggccggggccggggagccgcgcggggccggccggccggggggaggggagcgatgcggcgccggcgggcggcagtggccgcgggtttctgcgcctccttcctgctgggctccgtcctcaacgtgctcttcgctccgggctcggagcctccgaggccaggccagtcccctgagccttcgccggccccgggtccgggccgtcgcgggggccgcggggagctggcccggcagatccgggcgcgctacgaggaggtgcagcgctattcccgcgggggccccgggcccggggcgggccggccggagcggcggcgcctgatggacctggctccgggcgggcccggcctgccgcgcccccggcccccttgggcccggcccctgtccgacggcgccccaggctggcccccggctcccggcccaggctcccccggcccgggcccgcgcctgggctgcgccgcgcttcgcaacgtgtccggcgcgcagtacatgggctca

SEQ ID NO: 466893 - DNA, 368 bp, Homo sapiens
  chr2:43864730-43865098
  hyper
  lymphoid_neoplasm vs. melanoma,lung,renal, pancreas_gallbladder,anorectal,myeloid_neoplasm,ovary, non_cancer
gatgtcgccgggagaggtgggcagggggcggtggccggcggtccctcgcgcccgtgggctcccgtgacgttctgtttggaaacactgggcccgggcttctggcgcggcgcgagcggtcccgggggcgcagcggggcagcccagggtccccgagccgagggacccgcgcggtcagggatgccgcgctcgccttaggcttcgggagatccaccaggatctccggggcgaaactttaaactcaaaactttaaagaagcattttgtacacctcgagttgctggcacgtcaaagcaccctaaggtgacctacccggaaaccactgtccccgaagttagtggggcactttttaaaggacaacactttttacccg

SEQ ID NO: 466894 - DNA, 229 bp, Homo sapiens
  chr2:45396995-45397224
  hyper
  lymphoid_neoplasm vs. breast
gctgagggtcgcggttccaagggcggtctctcgccccgggtcaggccccaccccgcggtggcggtcgcgtggcgctgtcctggagttgagctgtccccgcgccgcggcccgcacgcccaggaccgcacaccgccgcccgcaggcagagacgcctgcaacctcgccctctcgcccggctcccagctcggggctgggaaccggaaaggtgcatttccgtgtggggtggggg

SEQ ID NO: 466895 - DNA, 21 bp, Homo sapiens
  chr2:45397277-45397298
  hyper
  lymphoid_neoplasm vs. breast
ttcccggctttccagccagcc

SEQ ID NO: 466896 - DNA, 482 bp, Homo sapiens
  chr2:46525231-46525713
  hyper
  lymphoid_neoplasm vs. upper_gi
cggtttgggggcgcggatcagcagctttgcagtggagacttctgcggctcggaggagtcggggatttgcgcgcacggcgaggccaggaggccgagggagatggcctggaggtcggaggtgcttccgcggtgcctttgaaaatctcccagccgccccgcagcagattaccgtggccaccggcgcttggaaatgtttgtgggtgcatgtcctcgactttctctggtctctcattttggggcagcatccacgtctctatttttctctggattcgcggagtccttccaaatgcgctcctgtgcccgcgccgcggcccaagtgggcaaaggggggcgggaggcggagagcggctcagggacacgatcctaccgaggagccaggacccttcagagcgccccgctgccgggctccagaccccaccgaaggttggagaacccacttcctcgtgccgcaccttgactctggggagagtaggtagtgagtga

SEQ ID NO: 466897 - DNA, 246 bp, Homo sapiens
  chr2:46525757-46526003
  hyper
  lymphoid_neoplasm vs. upper_gi
ggacggcaacactggatgtccctggcaggtccgggtgtctgtctccgaagaggacagagaagggcagccacgatctgcccgcctgccctcgcgagcctctcggcactgggtgagaggcaactctggccatttcttgctgccctctcgccctctcccggccgctcccagtccagccgggcccggcgctacccgagcgagggttcgagccctctgcgcggccgcgcagaagcaggcagggcctcaact

SEQ ID NO: 466898 - DNA, 246 bp, Homo sapiens; identical to SEQ ID NO: 466897
  chr2:46525757-46526003
  hyper
  lymphoid_neoplasm vs. colorectal

SEQ ID NO: 466899 - DNA, 64 bp, Homo sapiens
  chr2:46526239-46526303
  hyper
  lymphoid_neoplasm vs. colorectal
gtgactggccgggagggctcactgccgaggttgatttgctcttgttccaacttccactacggga

SEQ ID NO: 466900 - DNA, 54 bp, Homo sapiens; identical to SEQ ID NO: 369581
  chr2:46526448-46526502
  hyper
  lymphoid_neoplasm vs. colorectal

SEQ ID NO: 466901 - DNA, 81 bp, Homo sapiens; identical to SEQ ID NO: 369613
  chr2:66654136-66654217
  hyper

SEQ ID NO: 466902 - DNA, 951 bp, Homo sapiens; identical to SEQ ID NO: 331322
  chr2:66660936-66661887
  hyper
  lymphoid_neoplasm vs. liver_bileduct

SEQ ID NO: 466903 - DNA, 391 bp, Homo sapiens; identical to SEQ ID NO: 369615
  chr2:66803754-66804145
  hyper
  lymphoid_neoplasm vs. cervical

SEQ ID NO: 466904 - DNA, 432 bp, Homo sapiens
  chr2:72371599-72372031
  hyper
  lymphoid_neoplasm vs. ovary
cgagaggaaagaggtatcccggacagctggacccgaagcgggagtctccgcccccacccccacccccacacccccaccccgcgctcgggagcctctcggaataaatatttccaggctccgggccacgggctggcgagaccccgcggggtggccgcaggccaaagattatttatagcggtaagcggtcggtgcccggaggcagcaactacagatgggggttggagtttcctccgctctccggtgtggcccgcgcagggacccggcggccctcggaggactctgcagggcggggtcacgggcccagagccgcgattttcctaatgcattttgccctggaaataacggagacggactttggttgccgccctggagtttggaacccgagcgcggggcggggcgggaccgggcagggcgacccgcgcaggtaaccag

SEQ ID NO: 466905 - DNA, 122 bp, Homo sapiens
  chr2:72372237-72372359
  hyper
  lymphoid_neoplasm vs. ovary
cgcaaaggggaggggcgccacctgtctagccgccccgcctgccagcccacgagcgtaccgactcgggctccagatctacccgctcctgcacccccgaggggacaactcagtccccctagccc

SEQ ID NO: 466906 - DNA, 90 bp, Homo sapiens
  chr2:72371941-72372031
  hyper
  lymphoid_neoplasm vs. colorectal,ovary,breast,uterine, renal
cggagacggactttggttgccgccctggagtttggaacccgagcgcggggcggggcgggaccgggcagggcgacccgcgcaggtaaccag

SEQ ID NO: 466907 - DNA, 355 bp, Homo sapiens
  chr2:72372237-72372592
  hyper
  lymphoid_neoplasm vs. colorectal,ovary,breast,uterine, renal
cgcaaaggggaggggcgccacctgtctagccgccccgcctgccagcccacgagcgtaccgactcgggctccagatctacccgctcctgcacccccgaggggacaactcagtccccctagcccgggttggtccccctcctcactttccttttttccacagaaaactacttccagctaaatgtgcacacacgccagtacagccgaaaagtgactctgcagaacccggagccctaatcacttttccacatgcgcctccggcccggcgcgcgacggggaacgagctgggagcgcccgcgcagccaggaggggggctgggccgcgggaacgctgtccccctcccaggctggaaggcgggg

SEQ ID NO: 466908 - DNA, 154 bp, Homo sapiens; identical to SEQ ID NO: 349519
  chr2:72372758-72372912
  hyper
  lymphoid_neoplasm vs. colorectal,ovary,breast,uterine, renal

SEQ ID NO: 466909 - DNA, 167 bp, Homo sapiens
  chr2:72372425-72372592
  hyper
  lymphoid_neoplasm vs. breast,ovary,colorectal, head_and_neck,cervical,bladder_and_urothelial,thyroid
cgccagtacagccgaaaagtgactctgcagaacccggagccctaatcacttttccacatgcgcctccggcccggcgcgcgacggggaacgagctgggagcgcccgcgcagccaggaggggggctgggccgcgggaacgctgtccccctcccaggctggaaggcgggg

SEQ ID NO: 466910 - DNA, 480 bp, Homo sapiens; identical to SEQ ID NO: 357204
  chr2:72372758-72373238
  hyper
  lymphoid_neoplasm vs. breast,ovary,colorectal, head_and_neck,cervical,bladder_and_urothelial,thyroid

SEQ ID NO: 466911 - DNA, 128 bp, Homo sapiens
  chr2:72374248-72374376
  hyper
  lymphoid_neoplasm vs. multiple_myeloma,head_and_neck, anorectal,ovary
cgctgccgacggcgccgcaggaacacagttttaaatcggcaattcaagctgccaccagccccctcctctcccgactcaattttcggctcccagcgacacagccaaccccagaaagccgagggcgactg

SEQ ID NO: 466912 - DNA, 259 bp, Homo sapiens; identical to SEQ ID NO: 345015
  chr2:72374932-72375191
  hyper
  lymphoid_neoplasm vs. multiple_myeloma,head_and_neck, anorectal,ovary

SEQ ID NO: 466913 - DNA, 132 bp, Homo sapiens
  chr2:72376427-72376559
  hyper
  lymphoid_neoplasm vs. pancreas_gallbladder
cgcacacacggtgcgcactcgcttagtgcctgcttggcttctaggctccttcccttcctcttttcctccttcccaggtcagcggtcccctcctccagctccgagcagtccctcctgggccgaagccccggca

SEQ ID NO: 466914 - DNA, 136 bp, Homo sapiens
  chr2:72376588-72376724
  hyper
  lymphoid_neoplasm vs. pancreas_gallbladder
actggcaggcgcccaaagccctcgaaactgtgccttagggtcccgagcttccaacccccgggatcccgctggctcttatctccagggacccctgagttaccagtcccaatccccctaagccagatcccccattccc

SEQ ID NO: 466915 - DNA, 265 bp, Homo sapiens
  chr2:72376765-72377030
  hyper
  lymphoid_neoplasm vs. pancreas_gallbladder
cgccatatgtctcttaccctacggaacctggaggttctcctgtccccgtcagcgtcccaggctgctgactctgcagcccctcctttcctgcacattgggacccccctcccctgcttttgtagtccccctccaccgcccgcagcgtcggggaaccccgatactggtccggcaagtgtcctgcgcggggacaaacgcggcggccccggtacccagaggcgggagaagacgggcacaaacgttcattgatacaaatgagtaaataaac

SEQ ID NO: 466916 - DNA, 16 bp, Homo sapiens
  chr2:72377387-72377403
  hyper
  lymphoid_neoplasm vs. pancreas_gallbladder
tcccggagccagagtc

SEQ ID NO: 466917 - DNA, 224 bp, Homo sapiens
  chr2:73144495-73144719
  hyper
  lymphoid_neoplasm vs. ovary
gcctggatctccccgcgaaggctccagtccggcttttgcctccgactgcgggctccctccccacccgccgtccctcgccccgccccgccccgccccccaccttggggcaggtgagcggcggccaatgggcgagcgcggggcaggtgcccgctaactcgcgcctcgcagcgctgggcggccggggctgggcagggcagtgcggggacaccgggggctggggtcgg

SEQ ID NO: 466918 - DNA, 183 bp, Homo sapiens
  chr2:75426248-75426431
  hyper
  lymphoid_neoplasm vs. ovary
cgcctgcccgcggtggctctgaattcctccactttcaagcttcaggagacgtttgagttcagaagtctggagacagcatctctcttgcggtaaactgaaaaagggaaagaaattccaccggtcacagttctaggaagcaagagatcccccgcatttatgcacctgctgctgcctgcaactcct

SEQ ID NO: 466919 - DNA, 215 bp, Homo sapiens
  chr2:75426570-75426785
  hyper
  lymphoid_neoplasm vs. ovary
atttttccttctcttttgctgccgctgccgccgcctgcagtttcgcgggcacctctcggttcgggttgctcagctcgcgagttagctgcgcacgaggcttttataaccccctgcagagacgtcactgggaaggggcagtacctgggctgcgtactcgccagtcccggtgcgcagcgcggcagctgcgccagctgttgacaactgtctcattccac

SEQ ID NO: 466920 - DNA, 54 bp, Homo sapiens; identical to SEQ ID NO: 357229
  chr2:75426875-75426929
  hyper
  lymphoid_neoplasm vs. ovary

SEQ ID NO: 466921 - DNA, 26 bp, Homo sapiens
  chr2:95664132-95664158
  hyper
  lymphoid_neoplasm vs. multiple_myeloma
cttgtcagtccggtcaccgcgcgccc

SEQ ID NO: 466922 - DNA, 206 bp, Homo sapiens
  chr2:96011320-96011526
  hyper
  lymphoid_neoplasm vs. liver_bileduct,head_and_neck
cgcgcttataggcgtggagcggagctggatttctcccttggctaacacagcgggaaggatgaggtgcgggccgtagccgcgctgccgcgctgagtccgtccggcggggatgcccacagtgcgccgcgcccgctggagggcagcagagggccaggctcccggctcaggtctccggcctcgcggctccaaggaccccgggctccgccc

SEQ ID NO: 466923 - DNA, 130 bp, Homo sapiens
  chr2:96011564-96011694
  hyper
  lymphoid_neoplasm vs. liver_bileduct,head_and_neck
cgcggctttccctcctctaccagacccggcaggaagaaagccacccacaaacgaataagcatgcccttgccctgcccgtgcgtggcactccgcatccgcttagctcttccccgccgcccgaaggcgggcg

SEQ ID NO: 466924 - DNA, 410 bp, Homo sapiens
  chr2:96011863-96012273
  hyper
  lymphoid_neoplasm vs. liver_bileduct,head_and_neck
gaccaacttctgcattttcaaagggggccagcctgggcccagtttaatctccggcggaggaccggggttgcgggaaatgcgccggggagtgagggcttcccggatcccccgccgccgactccgcgcgggccagcggcgcggggcgggccgggatcagcgcctccccgggagagcgcagccgccgccccctcctctcgggctcccggcccctccccagcccctcggcccccatcctgcgcgtgggagaaaccgccgaccgcgcggcctccaggggctggcggagcagcggtggcgacgcgccagactccgtcctgggctggcccgtgccgggcggggcggggccggctccctccgcccttcccgggcaggcgcgggggggccgcagggacgcctcccggagtggccgccgc

SEQ ID NO: 466925 - DNA, 579 bp, Homo sapiens
  chr2:96011863-96012442
  hyper
  lymphoid_neoplasm vs. head_and_neck,pancreas_gallbladder, ovary,sarcoma,breast,bladder_and_urothelial,prostate,anorectal, renal,uterine,thyroid,upper_gi,myeloid_neoplasm,non_cancer
gaccaacttctgcattttcaaagggggccagcctgggcccagtttaatctccggcggaggaccggggttgcgggaaatgcgccggggagtgagggcttcccggatcccccgccgccgactccgcgcgggccagcggcgcggggcgggccgggatcagcgcctccccgggagagcgcagccgccgccccctcctctcgggctcccggcccctccccagcccctcggcccccatcctgcgcgtgggagaaaccgccgaccgcgcggcctccaggggctggcggagcagcggtggcgacgcgccagactccgtcctgggctggcccgtgccgggcggggcggggccggctccctccgcccttcccgggcaggcgcgggggggccgcagggacgcctcccggagtggccgccgcgcctaggccaatgagcgcgcggggagcggcgatggaggctggggcggccgggagcgcccgggacccccgccgccgcgccgccgccgccgcgcccccgcgccccggcgcccgcggggctggagagggggcgacagaggcgcagcgcccgcgccgggcatggaggcgccgc

SEQ ID NO: 466926 - DNA, 48 bp, Homo sapiens; identical to SEQ ID NO: 346460
  chr2:96012683-96012731
  hyper
  lymphoid_neoplasm vs. head_and_neck,pancreas_gallbladder, ovary,sarcoma,breast,bladder_and_urothelial,prostate,anorectal, renal,uterine,thyroid,upper_gi,myeloid_neoplasm,non_cancer

SEQ ID NO: 466927 - DNA, 490 bp, Homo sapiens
  chr2:101435063-101435553
  hyper
  lymphoid_neoplasm vs. ovary
cgacccccagtccaccgcgggggcctggcgcgcttggggcaaaggccctaggagaccccttctggccacaaaatcgagtatgacagaaaagggccagcgggggcgctttccttccagggccacttgccggaatgtaagagggacggagagacgtccggaaaaggctgccacgctcggagcgctgcgccaggccaggcacctaggccaggggagcggagacctcgtgggagcgggcagggggacctttcccctctcccgggcttccacccaggcgcctccccgctgtgaacgccgccgcccaggtgaaggggaaaccggccacgtttccggacctcggcggggcacacggtctccggttttcaccggctctgtcttggagccccgaagggcatcagacagcagccccggcacccggggattattcctgtacctctgcctccctccgcttggcgtttgcgggaaccttggtaaaatcctccctgtttctcgc

SEQ ID NO: 466928 - DNA, 95 bp, Homo sapiens
  chr2:101435590-101435685
  hyper
  lymphoid_neoplasm vs. ovary
cgcctgtctcctcccacagaggaaaaaaaaaaaaaggtcacgtatgtttggaaaaatatgtaggtcagtggaacatttcctgcactggtgcaaaa

SEQ ID NO: 466929 - DNA, 47 bp, Homo sapiens
  chr2:101435506-101435553
  hyper
  lymphoid_neoplasm vs. liver_bileduct
cgcttggcgtttgcgggaaccttggtaaaatcctccctgtttctcgc

SEQ ID NO: 466930 - DNA, 95 bp, Homo sapiens; identical to SEQ ID NO: 466928
  chr2:101435590-101435685
  hyper
  lymphoid_neoplasm vs. liver_bileduct

SEQ ID NO: 466931 - DNA, 275 bp, Homo sapiens; identical to SEQ ID NO: 357252
  chr2:101436113-101436388
  hyper
  lymphoid_neoplasm vs. liver_bileduct

SEQ ID NO: 466932 - DNA, 28 bp, Homo sapiens
  chr2:101436605-101436633
  hyper
  lymphoid_neoplasm vs. pancreas_gallbladder,upper_gi
cggaagagtttgccgcgcgagcagccgg

SEQ ID NO: 466933 - DNA, 5 bp, Homo sapiens
  chr2:101436708-101436713
  hyper
  lymphoid_neoplasm vs. pancreas_gallbladder,upper_gi
gcggc

SEQ ID NO: 466934 - DNA, 617 bp, Homo sapiens
  chr2:101436742-101437359
  hyper
  lymphoid_neoplasm vs. pancreas_gallbladder,upper_gi
cagcgcctcccgccgccgcccgggaggagctcgccgcgcccgctcgccgcctcgtctcccagcggcggcgggaggcgcgtctccccggcccagtccgcgcccggccccgcggggccgctccggcccgctccgaggtaaggggccgcgcctaggggcgcgggggacccagggtgggtagtacgtgcgcgcggggtcgcaggactcggtcacctgctcgccagcgtggaggacgcgcgggggcggaggggcgctcaggcgcgaggctgcgcggcaccggggaccccggacgcgggggcgcggagaggtgggttcccctccacagtcaggccgctgggggcttcgcgtcctgcaggaggtagcaatcgctgggccggtgggctccgggcgcgtctcgacgcagaagacagaggactgggcatccgagcctcggaatttgggggtcctcggggtgtccgacagggtggagaaggatcgtgccccagggcaacagctttggggattgcccgtggttgtcttcgagacccatcgcgctaccctccgaaacgtcgggcgtcctggacccccggagagtgcggcgtgcgcgccctgggcccgcggtctctcggagtccctgggtc

SEQ ID NO: 466935 - DNA, 761 bp, Homo sapiens; identical to SEQ ID NO: 349552
  chr2:101436867-101437628
  hyper
  lymphoid_neoplasm vs. upper_gi,multiple_myeloma, liver_bileduct,uterine,colorectal,prostate,non_cancer,renal, pancreas_gallbladder,myeloid_neoplasm

SEQ ID NO: 466936 - DNA, 519 bp, Homo sapiens; identical to SEQ ID NO: 331387
  chr2:102758965-102759484
  hyper
  lymphoid_neoplasm vs. bladder_and_urothelial,renal, prostate,colorectal

SEQ ID NO: 466937 - DNA, 174 bp, Homo sapiens
  chr2:103235763-103235937
  hyper
  lymphoid_neoplasm vs. colorectal
cgcccgttgcggcgattccacccacagttcgctggctctgggggtggcgggtcttggcgcgcggtgcctgcgcgaagggagggcagccatcgcccccgcggtcactggggccccgcgttccccgcgggctcgggcaggtgcgcggtgtgccggccaggtccccttgtcctcctg

SEQ ID NO: 466938 - DNA, 346 bp, Homo sapiens; identical to SEQ ID NO: 349555
  chr2:103236292-103236638
  hyper
  lymphoid_neoplasm vs. colorectal

SEQ ID NO: 466939 - DNA, 83 bp, Homo sapiens; identical to SEQ ID NO: 369698
  chr2:107504132-107504215
  hyper
  lymphoid_neoplasm vs. bladder_and_urothelial

SEQ ID NO: 466940 - DNA, 225 bp, Homo sapiens
  chr2:110370717-110370942
  hyper
  lymphoid_neoplasm vs. bladder_and_urothelial,cervical, liver_bileduct,prostate,breast,pancreas_gallbladder,colorectal
cgaccttggtactattaacgaaaatagttgtaaccacacttggaaaaccgctggcttactaacaagcgagataaatctacaaaagtaactggaaaggttcaaaacagtgaacaaacgcgttcttttagagtacaaaagagtcaaggcgggaaaaaaacggtttaaaatcccaatggaggaaaacttggacgaccacaccatcggataaaacgggagagcttttga

SEQ ID NO: 466941 - DNA, 266 bp, Homo sapiens; identical to SEQ ID NO: 349564
  chr2:110371219-110371485
  hyper
  lymphoid_neoplasm vs. bladder_and_urothelial,cervical, liver_bileduct,prostate,breast,pancreas_gallbladder,colorectal

SEQ ID NO: 466942 - DNA, 486 bp, Homo sapiens
  chr2:110371219-110371705
  hyper
  lymphoid_neoplasm vs. colorectal,head_and_neck, liver_bileduct
gccgccgcggaagccggggagcactgggcgggcggggccggagggggcgcgggtcacaatcccgggccggaccagggggccggtgggtcgagggcgggaagtcccgcgggggccggggagcgcggggctggggccccggcgtcggcgggactcaccaggtgccgcgccacctcggaggaggccatggtcgcgggcaggggcacggtgaagcggctgtatcagcccggccccgagcggctggtcccggcgacggcggcgggaaggccggagggcagaagcaacgggcggggcgcgaggctaggctgcctccgcgacggggaagggacaggggcggggccgagctggaggcctccgggggcggggttggggcggacgccctgtggtgcgcgctgagcgttttgcctgcgccaagcgagcccctcacaggagctaccctcgacgcctgaggactgagcgtcagcgttggggcgggctgaaggagagctg

SEQ ID NO: 466943 - DNA, 168 bp, Homo sapiens
  chr2:110371818-110371986
  hyper
  lymphoid_neoplasm vs. colorectal,head_and_neck, liver_bileduct
tggccgagacagcggggagcggaagtgggcgtggcctggtggcgtgggcgcggggcgggggtgcggggggcgtgtccgcccgggcgcggcccagtgaggcggtggccgagtcctctggcctcagacgcgtaggctggcagcccgctgagcccgccagactccgccgcc

SEQ ID NO: 466944 - DNA, 205 bp, Homo sapiens
  chr2:110371500-110371705
  hyper
  lymphoid_neoplasm vs. colorectal,liver_bileduct
cgggcggggcgcgaggctaggctgcctccgcgacggggaagggacaggggcggggccgagctggaggcctccgggggcggggttggggcggacgccctgtggtgcgcgctgagcgttttgcctgcgccaagcgagcccctcacaggagctaccctcgacgcctgaggactgagcgtcagcgttggggcgggctgaaggagagctg

SEQ ID NO: 466945 - DNA, 447 bp, Homo sapiens
  chr2:110371818-110372265
  hyper
  lymphoid_neoplasm vs. colorectal,liver_bileduct
tggccgagacagcggggagcggaagtgggcgtggcctggtggcgtgggcgcggggcgggggtgcggggggcgtgtccgcccgggcgcggcccagtgaggcggtggccgagtcctctggcctcagacgcgtaggctggcagcccgctgagcccgccagactccgccgccgtcgggagccggccgctgggagcccgtcgctatgggaccgcgctgagccgcccgctggcgggggagcagcgcggtcgaggatggaggggccggcagagtggggccccgaggcggcgctgggccccgaggcggtgctgcgcttcctggcggagcgcgggggccgggccctgcacgccgagctggtgcagcacttcaggggcgccctaggcggcgaaccggagcagcgcgcccgcgcccgcgcgcacttcaaggagctggtgaacgccgtggccactgtgc

SEQ ID NO: 466946 - DNA, 139 bp, Homo sapiens
  chr2:110372284-110372423
  hyper
  lymphoid_neoplasm vs. colorectal,liver_bileduct
cgccaagtacgtgcacctcaagaagaggttctgtgaagggccgtccgagccctccggggacccgccgcgaatccaggtgaccgccgagcccgaggcccccgacggccctgccgggcccgaggcgcgcgatcggctcccc

SEQ ID NO: 466947 - DNA, 1 bp, Homo sapiens
  chr2:111490007-111490008
  hyper
  lymphoid_neoplasm vs. uterine
c

SEQ ID NO: 466948 - DNA, 294 bp, Homo sapiens
  chr2:111490023-111490317
  hyper
  lymphoid_neoplasm vs. uterine
cgcgccggacctcccgcccgggaagccagggcagggcggggccggggagggaggggagaggaaggtgaggagggaggagacgggccgggaggggtggagagggagagggcgtgcgcctggggcctcacctgctgggagctggaggaggcgcggagcgaagccggccctgccagccacgcggagaagcagaggcaggtgagcgcgatgcagccggcgccgggtctggggctcggggactcctccctgcaccgctacctggacggcgacttctggagcctcaagaacgagctgcgc

SEQ ID NO: 466949 - DNA, 171 bp, Homo sapiens; identical to SEQ ID NO: 369707
  chr2:111490689-111490860
  hyper
  lymphoid_neoplasm vs. uterine

SEQ ID NO: 466950 - DNA, 636 bp, Homo sapiens; identical to SEQ ID NO: 331421
  chr2:120301702-120302338
  hyper
  lymphoid_neoplasm vs. liver_bileduct,renal,cervical

SEQ ID NO: 466951 - DNA, 2 bp, Homo sapiens
  chr2:121103676-121103678
  hyper
  lymphoid_neoplasm vs. cervical
cg

SEQ ID NO: 466952 - DNA, 324 bp, Homo sapiens
  chr2:121199626-121199950
  hyper
cgggcgttccgctttctccactgtaccatgctaatttttcgagggacaattttttgacaatgagtcctccagcccgaacagaaaccctttatggggccggccccagggaggccgcggcgctgccaaggcaaacaaaggctcattgctgccgcggaacatgcctgcgcctttcagggccgggttcgcagagcgcgccgcctccagcccgcgccgaggtaacacctggtccgccaactcctggcgcctaatcaagatatcaatcacggcgcgggggcaggggggcgcacgggccccgaaggctccagaacccggcaagtgcaggta

SEQ ID NO: 466953 - DNA, 261 bp, Homo sapiens
  chr2:121200130-121200391
  hyper
aatgattcggcctttggaggagttcggagggctgggggtggcagcaggaggctggggcgcagcgcagcgccaggggcgcgggacccagccaagctccccactctgcccccactgggacagagaggcgcaagagtccaccaacccctgccacttgtggcctttcctgactgcccagggcttccaacaatgtagaagagtgacagtaaatgtccaggtccctgcatataggtgtttctttaatctgcacaccaggccggaaag

SEQ ID NO: 466954 - DNA, 179 bp, Homo sapiens; identical to SEQ ID NO: 457855
  chr2:121494270-121494449
  hyper
  lymphoid_neoplasm vs. lung

SEQ ID NO: 466955 - DNA, 693 bp, Homo sapiens; identical to SEQ ID NO: 357287
  chr2:121494270-121494963
  hyper
  lymphoid_neoplasm vs. multiple_myeloma

SEQ ID NO: 466956 - DNA, 270 bp, Homo sapiens
  chr2:121499186-121499456
  hyper
  lymphoid_neoplasm vs. liver_bileduct
cgcctcctccccgcccccgccgtctggaccttcctctccctccgcgccggcttttccgccacgcggagcgctggctggcgaggccgcgtgtccgagcggcgccgaccgtgccgcggccgggggacattccgtgccccgagcgccccgggcccgcggctgcggccctcccacctgcgcgccggcctggtttgcagctcccaaacaatggccacattgtcgcagccgcacaccggccgccgccggcgagtggcgggaggccggactctgctc

SEQ ID NO: 466957 - DNA, 47 bp, Homo sapiens; identical to SEQ ID NO: 349578
  chr2:121499643-121499690
  hyper
  lymphoid_neoplasm vs. liver_bileduct

SEQ ID NO: 466958 - DNA, 312 bp, Homo sapiens; identical to SEQ ID NO: 357298
  chr2:127976826-127977138
  hyper
  lymphoid_neoplasm vs. bladder_and_urothelial,anorectal, ovary

SEQ ID NO: 466959 - DNA, 210 bp, Homo sapiens
  chr2:133427262-133427472
  hyper
tcctcctgcagcgcgggacttggacactttcccagcctcgcgccccggggcaccagtcgcggccgccaactcccgctgggcagccccagcgcagggctggccccgaggtgggcgccttgggggcaaaagggctggcgggtagatggattgtgcgcacctggcctcggctgctggcctctgggtattctcacctggaagcaagaacaatcc

SEQ ID NO: 466960 - DNA, 234 bp, Homo sapiens
  chr2:133427652-133427886
  hyper
ccgcaggtgccgctcgcggagcctgcatcgcccgcgctcgggctcccggctgcgggtctctgctcctcccgctcgcgctcccgggccgagcaccgcgcctccggagttggcggctgagactgaaggaactactggcgatcgggagcacccacaaaagtctcgccttttctccccacctcccactccaggcatcacgtgacggctgccgagttggggtgggggtggcgggcgggg

SEQ ID NO: 466961 - DNA, 1 bp, Homo sapiens
  chr2:133427471-133427472
  hyper
  lymphoid_neoplasm vs. liver_bileduct
c

SEQ ID NO: 466962 - DNA, 234 bp, Homo sapiens; identical to SEQ ID NO: 466960
  chr2:133427652-133427886
  hyper
  lymphoid_neoplasm vs. liver_bileduct

SEQ ID NO: 466963 - DNA, 191 bp, Homo sapiens; identical to SEQ ID NO: 349585
  chr2:133428106-133428297
  hyper
  lymphoid_neoplasm vs. liver_bileduct

SEQ ID NO: 466964 - DNA, 61 bp, Homo sapiens
  chr2:137523039-137523100
  hyper
  lymphoid_neoplasm vs. multiple_myeloma
tgcgccgttccttcctcctcctcctcctcctccttctcttcctcctcctccttctcttcct

SEQ ID NO: 466965 - DNA, 102 bp, Homo sapiens; identical to SEQ ID NO: 357316
  chr2:137523676-137523778
  hyper
  lymphoid_neoplasm vs. multiple_myeloma

SEQ ID NO: 466966 - DNA, 132 bp, Homo sapiens
  chr2:142887740-142887872
  hyper
  lymphoid_neoplasm vs. ovary
cggcgctttcgccgctccacggacctcgaatgcagcaggtaaggaagttaacctgggagctaagttgagggcggacacgcttaacgcggagaacctggagctcgcaaaagctcgcagttgagggccatcgcg

SEQ ID NO: 466967 - DNA, 32 bp, Homo sapiens; identical to SEQ ID NO: 349593
  chr2:142888566-142888598
  hyper
  lymphoid_neoplasm vs. ovary

SEQ ID NO: 466968 - DNA, 699 bp, Homo sapiens; identical to SEQ ID NO: 280266
  chr2:150186988-150187687
  hyper
  lymphoid_neoplasm vs. upper_gi

SEQ ID NO: 466969 - DNA, 763 bp, Homo sapiens; identical to SEQ ID NO: 331465
  chr2:151341770-151342533
  hyper
  lymphoid_neoplasm vs. liver_bileduct,upper_gi

SEQ ID NO: 466970 - DNA, 314 bp, Homo sapiens
  chr2:151343277-151343591
  hyper
  lymphoid_neoplasm vs. liver_bileduct
cactgtaggaacgtaattctggatagacaaaatgggcaaaagaggaaggaaagagggcaaagaggttacgtttaaacgcacgacacccattgaacacccttcccctccccgctccccagttaagaaagaaaaccttcacacatcagaccacacactaagcacatggaccctttccgaaacccctgtcctactccccactcaccccacccggctctcacagatctgctgacccgaatctcccaaccccaggttatgcacacaggaacgaacaagtttcaggagctaaccagcccatgtgcaggcgcgtcccaacc

SEQ ID NO: 466971 - DNA, 181 bp, Homo sapiens; identical to SEQ ID NO: 369777
  chr2:151343637-151343818
  hyper
  lymphoid_neoplasm vs. liver_bileduct

SEQ ID NO: 466972 - DNA, 282 bp, Homo sapiens; identical to SEQ ID NO: 331467
  chr2:151344070-151344352
  hyper
  lymphoid_neoplasm vs. liver_bileduct

SEQ ID NO: 466973 - DNA, 109 bp, Homo sapiens; identical to SEQ ID NO: 357334
  chr2:154335663-154335772
  hyper
  lymphoid_neoplasm vs. thyroid

SEQ ID NO: 466974 - DNA, 877 bp, Homo sapiens
  chr2:159313069-159313946
  hyper
  lymphoid_neoplasm vs. lung,upper_gi,pancreas_gallbladder, sarcoma,breast,anorectal,prostate,uterine,renal,head_and_neck, myeloid_neoplasm,colorectal,non_cancer,liver_bileduct
cgccagggacaaaccctaccaggcacagttgggattggcagtaaggcaaggaaagcctgccccagatttcagagccagcgctggggaatctccctgtcctctccgccaccccctcccgcgcccgagacctgagacaccttctctctcacacccaccctctccaggccctctcgcgctgaacagcatcggtctctatggcgacctgaaaccgcagctcccattggcctgttcaatatgagggccgggccaatggggagggccagccctctccttcccgccaatggggtggcgggagctggcccggggacggcggcgtgctgacgttcccgggagcccggggctggccgggcgggagggctggcagcggggcgggcggcggcggcggcctctgggcagtagagggggctccggggctgagtccgcgtcgacgccggccgcggaggcggcaccatgggcaaggggtagaggggcaagttggccaccgccgccgccgggggtggtgggagagccgctccgggggcgggggccggtgggggagggaggggcgggcagccgcgccgccgcggcacttttttaattttttcgggtgccgcagcggcgacccctcggcgccgatgtccctgatccctggagcgacgacggccgctgcctaagctggaaagtaagtgtgtgggctcgcgggagggcgcggagactcctgcccacgagaccctcggccctcgccccgaacacgcgccagggccaggacctgcgcgccgggggccgggggcctccctcccgctgccgcgtccccagcgcctcgcggccgccgcggctttcctgccccgcctcgtgttcctgcccgcactcgcctgctgctcccctccccccggcaggc

SEQ ID NO: 466975 - DNA, 988 bp, Homo sapiens
  chr2:159313477-159314465
  hyper
  lymphoid_neoplasm vs. upper_gi,lung,anorectal,uterine, myeloid_neoplasm,prostate,thyroid,breast,colorectal, head_and_neck,pancreas_gallbladder
cggggctgagtccgcgtcgacgccggccgcggaggcggcaccatgggcaaggggtagaggggcaagttggccaccgccgccgccgggggtggtgggagagccgctccgggggcgggggccggtgggggagggaggggcgggcagccgcgccgccgcggcacttttttaattttttcgggtgccgcagcggcgacccctcggcgccgatgtccctgatccctggagcgacgacggccgctgcctaagctggaaagtaagtgtgtgggctcgcgggagggcgcggagactcctgcccacgagaccctcggccctcgccccgaacacgcgccagggccaggacctgcgcgccgggggccgggggcctccctcccgctgccgcgtccccagcgcctcgcggccgccgcggctttcctgccccgcctcgtgttcctgcccgcactcgcctgctgctcccctccccccggcaggcgcacaagtttcaccctccatttgcttttcccggcgattcctctccccggtctcccgtacgcgcagcgcacgacctctgcccacgctgggctgttcggattcagagctcccagccccgaacttgagcgccgcgctgagccctgctggacgccctcgcggcggcttccccgctgcctgccgccgcgcgccccaagtcgccctcgacaccactgggcgcccgccctcctcagcactcggggccggctgtctgtccttctagccccagatcctgcaccttggtcccctccccgtcttcccacgcccctgctgcccgcgcggtcttgcgtttgtccccgaagtcctgtactccttgccggtcctgcccacccctctgcctagtgcgcccctctctaccggccgcggatcctcacgctccacccctcccggctccccagcgccgagcctcgccgctgccctcctgcgccgccgcttcctcctctccctgccaggagttgaagcggagctgcggcacctccctggc

SEQ ID NO: 466976 - DNA, 904 bp, Homo sapiens; identical to SEQ ID NO: 345046
  chr2:159313976-159314880
  hyper
  lymphoid_neoplasm vs. myeloid_neoplasm, bladder_and_urothelial,pancreas_gallbladder,upper_gi, head_and_neck,uterine,lung,anorectal,non_cancer,breast, liver_bileduct,prostate,thyroid,renal,sarcoma,colorectal,ovary,
  CONT. FROM ABOVE: cervical

SEQ ID NO: 466977 - DNA, 402 bp, Homo sapiens
  chr2:169312417-169312819
  hyper
  lymphoid_neoplasm vs. sarcoma,pancreas_gallbladder, upper_gi,liver_bileduct,uterine,lung,renal,breast,cervical, non_cancer,colorectal,anorectal
cgcctccgggcgcacgggaagaggactgagagccctgaaaccccagcggggcaggagccagcattctgagcatgtgcgagccagccagggggctagggcggatttggggggtcgactttaggtcgtcgccctaagcgcaaagcgaaagagcggtgagagcaggggcgggcgacactccccggagcggtgcccctgcgcccagggcgcagcgactgcgccctgccctgcgggtgtgggcgagttggccgcgtgtgtgcctcgctgtttgacgcgaagacgagccaatcagggcgggcggcccgagctgccatgtgacgggcaaggcggcccctttccccagcgcggccagagggaggagagaaccggggctcgccgcgagccttcgagagcagcggccgcgga

SEQ ID NO: 466978 - DNA, 461 bp, Homo sapiens
  chr2:169312881-169313342
  hyper
  lymphoid_neoplasm vs. sarcoma,pancreas_gallbladder, upper_gi,liver_bileduct,uterine,lung,renal,breast,cervical, non_cancer,colorectal,anorectal
gcgcatccccgggcgccctgcgcggtggagagcttggcgggctgcgggtgccgcaggacaggagtggacaaagcaagatggcagggatcttagcctggttctggaacgagaggttttggctcccgcacaatgtcacctgggcggacctgaagaacacggaggaggccaccttcccgcaggctgaggacctctatctcgcttttcccctggccttctgtatcttcatggtgcggctcatcttcgagaggtaagaagggctgaagcccctcctcccctccccctgcgcacacacacgcgcgcacacactcgcgcgctctctggcgcacgcccccgcgcccccaacgctcgcgttcacgcctcccaacctttgtgttcggggaggggttgctgacccccctgccccgctggctttctgggagccagaaagggtctggcttgccacggatttcctcccgggcgcc

SEQ ID NO: 466979 - DNA, 904 bp, Homo sapiens; identical to SEQ ID NO: 349616
  chr2:169312881-169313785
  hyper
  lymphoid_neoplasm vs. renal,pancreas_gallbladder,sarcoma, upper_gi,thyroid,uterine,breast

SEQ ID NO: 466980 - DNA, 362 bp, Homo sapiens; identical to SEQ ID NO: 464430
  chr2:171567970-171568332
  hyper
  lymphoid_neoplasm vs. upper_gi,ovary

SEQ ID NO: 466981 - DNA, 16 bp, Homo sapiens
  chr2:171568711-171568727
  hyper
  lymphoid_neoplasm vs. upper_gi,ovary
actgacccccgccccc

SEQ ID NO: 466982 - DNA, 244 bp, Homo sapiens
  chr2:171570957-171571201
  hyper
  lymphoid_neoplasm vs. cervical,colorectal
ggtcgccttgggtgtcctgccgagctcagctttgagggtatgcgcggcgcgggtgtttttcccaggtccactctgcaaaagttgtggcctgaggaaaacttccaggtcgccagcaggaacgtcacaggagagccccggtcgctcgtcaggcgggcggccctggagcgtgcgcgccacccaacgccgcgctgggcggccgcccggccccgccccaggtcacagccctgccctcggccccaccgcg

SEQ ID NO: 466983 - DNA, 21 bp, Homo sapiens
  chr2:171571244-171571265
  hyper
  lymphoid_neoplasm vs. cervical,colorectal
gccccaccggggatctcgctt

SEQ ID NO: 466984 - DNA, 244 bp, Homo sapiens; identical to SEQ ID NO: 466982
  chr2:171570957-171571201
  hyper
  lymphoid_neoplasm vs. colorectal,cervical,melanoma, upper_gi,bladder_and_urothelial,pancreas_gallbladder

SEQ ID NO: 466985 - DNA, 21 bp, Homo sapiens
  chr2:171571244-171571265
  hyper
  lymphoid_neoplasm vs. colorectal,cervical,melanoma, upper_gi,bladder_and_urothelial,pancreas_gallbladder
gccccaccggggatctcgctt

SEQ ID NO: 466986 - DNA, 162 bp, Homo sapiens
  chr2:171571315-171571477
  hyper
  lymphoid_neoplasm vs. colorectal,cervical,melanoma, upper_gi,bladder_and_urothelial,pancreas_gallbladder
tgcaagtaaatacaggggagagttacactctttgccgtctcaaagtccggcgcctggaagccgaaggcagatttttccagagataacaaagacactttgtcactttgggcgctgcgtcggtgcaaatctttaattgcaagtgtgtgtgtgtgtgtgtgtgtg

SEQ ID NO: 466987 - DNA, 277 bp, Homo sapiens; identical to SEQ ID NO: 349621
  chr2:171571520-171571797
  hyper
  lymphoid_neoplasm vs. colorectal,cervical,melanoma, upper_gi,bladder_and_urothelial,pancreas_gallbladder

SEQ ID NO: 466988 - DNA, 761 bp, Homo sapiens
  chr2:171673109-171673870
  hyper
  lymphoid_neoplasm vs. head_and_neck,cervical
cgacagcctgcctatttccaaaggaaaaaaaaaaagcgtgttgagtacgttctggattactcataagaccttttttttttccttccgggcgcaaaaccgtgagctggatttataatcgccctataaagctccagaggcggtcaggcacctgcagaggagccccgccgctccgccgactagctgcccccgcgagcaacggcctcgtgatttccccgccgatccggtccccgcctccccactctgcccccgcctaccccggagccgtgcagccgcctctccgaatctctctcttctcctggcgctcgcgtgcgagagggaactagcgagaacgaggaagcagctggaggtgacgccgggcagattacgcctgtcagggccgagccgagcggatcgctgggcgctgtgcagaggaaaggcgggagtgcccggctcgctgtcgcagagccgaggtgggtaagctagcgaccacctggacttcccagcgcccaaccgtggcttttcagccaggtcctctcctcccgcggcttctcaaccaaccccatcccagcgccggccacccaacctcccgaaatgagtgcttcctgcccgccctagtccctgctctccacgggtgcgctgcgcagggacccccccccccccgcctccctcgtcactcttcttatccctgccctccggattcacgccccggggaagcacggaggctgaggctctagttgaagtggggcaagagcgattttcccttgagcttccatgctgcgagc

SEQ ID NO: 466989 - DNA, 487 bp, Homo sapiens
  chr2:171673387-171673874
  hyper
  lymphoid_neoplasm vs. anorectal
cgaatctctctcttctcctggcgctcgcgtgcgagagggaactagcgagaacgaggaagcagctggaggtgacgccgggcagattacgcctgtcagggccgagccgagcggatcgctgggcgctgtgcagaggaaaggcgggagtgcccggctcgctgtcgcagagccgaggtgggtaagctagcgaccacctggacttcccagcgcccaaccgtggcttttcagccaggtcctctcctcccgcggcttctcaaccaaccccatcccagcgccggccacccaacctcccgaaatgagtgcttcctgcccgccctagtccctgctctccacgggtgcgctgcgcagggacccccccccccccgcctccctcgtcactcttcttatccctgccctccggattcacgccccggggaagcacggaggctgaggctctagttgaagtggggcaagagcgattttcccttgagcttccatgctgcgagcgcct

SEQ ID NO: 466990 - DNA, 153 bp, Homo sapiens
  chr2:171673939-171674092
  hyper
  lymphoid_neoplasm vs. anorectal
tttccaggggccgtagtcgacccgctgcccgagttgctgtgcgactgcgcgcgcggggctaggagtgaggtcggagggagggtgtggaggcgatggccggtgggcccttctctgtggggtcctcgatctacccagattagcccgcaatctctc

SEQ ID NO: 466991 - DNA, 51 bp, Homo sapiens; identical to SEQ ID NO: 357367
  chr2:171674329-171674380
  hyper
  lymphoid_neoplasm vs. anorectal

SEQ ID NO: 466992 - DNA, 153 bp, Homo sapiens; identical to SEQ ID NO: 466990
  chr2:171673939-171674092
  hyper
  lymphoid_neoplasm vs. prostate

SEQ ID NO: 466993 - DNA, 370 bp, Homo sapiens
  chr2:171674329-171674699
  hyper
  lymphoid_neoplasm vs. prostate
gatggctaaaaaccggctgggataagagggaggcaagcaacattccgactcgctgctttctggctgtctggagtgcaaggtgactgtggttcttctctggccaagtccgagggagaacgtaaagatatgggcctttttccccctctcaccttgtctcaccaaagtccctagtccccggagcagttagcctctttctttccagggaattagccagacacaacaacgggaaccagacaccgaaccagacatgcccgccccgtgcgccctccccccgctggcccacacgccggctgctgagtgcccaatggggcttgtagcggctcggctggaaaatcgctcactgagcgctcccctgtgctcctagcctagt

SEQ ID NO: 466994 - DNA, 382 bp, Homo sapiens
  chr2:173037307-173037689
  hyper
  lymphoid_neoplasm vs. upper_gi,lung
cgggcggtggcgggccgtggtccggcgcagtttccccgcggcccgctgggtcgcactgtggccttaggaatgtgggccggggcggggcggcttgggagcgcgctgcagccaacgccgcgttcagccccgggcgcaactgcagccgtgccgggggcctccggggccccgaccgaccgacagctctttcagaccgcagcgaagtttgcacacacgacagcacgtcccggggctaggatcttgcccgcctgcggggctgacctgcaccacccttggggaagcgcgaactgccgccccgctgccgggagttaggcgcccgggcctgggtcgcccccacagacggctcggacggcacgaacgagcggaccccaaggatagtgggctg

SEQ ID NO: 466995 - DNA, 22 bp, Homo sapiens
  chr2:177001081-177001103
  hyper
  lymphoid_neoplasm vs. colorectal,anorectal, myeloid_neoplasm,non_cancer
cgggggagagagaaagcagaag

SEQ ID NO: 466996 - DNA, 220 bp, Homo sapiens
  chr2:177052744-177052964
  hyper
  lymphoid_neoplasm vs. renal
tagtcaaaaagtgaaaattttgtcccgccctaggcacacagcactcacagcataagatgtagttccatgagtcctaggaaagggggaagaaaggaaaaaaccaaacatctgctctaggtttagaagagggataacatcagcgccaagcaaaccgaaagcgcagaggactcagaagaggggaagaggaataactttatctgtcctggaggtgggcgaagag

SEQ ID NO: 466997 - DNA, 487 bp, Homo sapiens; identical to SEQ ID NO: 331548
  chr2:178937351-178937838
  hyper
  lymphoid_neoplasm vs. colorectal

SEQ ID NO: 466998 - DNA, 91 bp, Homo sapiens
  chr2:183902312-183902403
  hyper
  lymphoid_neoplasm vs. head_and_neck,cervical,colorectal, ovary,breast,renal,upper_gi,pancreas_gallbladder,anorectal, non_cancer,liver_bileduct,prostate,melanoma,lung, bladder_and_urothelial,uterine
cgtaagaatatggaacactcaagttttcctacccacctagaatttcgcccacccaccaccctccctttcctatgggccccatcatgggggc

SEQ ID NO: 466999 - DNA, 569 bp, Homo sapiens
  chr2:183902442-183903011
  hyper
  lymphoid_neoplasm vs. head_and_neck,cervical,colorectal, ovary,breast,renal,upper_gi,pancreas_gallbladder,anorectal, non_cancer,liver_bileduct,prostate,melanoma,lung, bladder_and_urothelial,uterine
cgcccccaccccgtgcgaggcccagcgcccgatcccgccgccgggagccgggaaatggcttctctgccttcggccggccggcgaaccacagggagaggcgcccgggactccgcattaggccgcggcgcatccaggcgaccccgggccgggcctcgggcggcgacgccgagatttctacacccggcgcctcctgccgcccccaccccacggcctcccttgcccttcatccctcccgggcccgcccgcctccgccgcggcctccccggcccgtgcgcaccttcttgatgttgtagaggcgggtgagcatgccgacgccccggtcgttgaggatggtgagcttctccgccagcttctgctgactgggctgcagcactgagcgcgacatggtggtgctggtgccgccgccgccgccggccgcctcgcgcccagtcacgggcccgcggccttcgcagcagcctctctcgggcctcctcccctcccgcccgcgacctccgccttaggagagcgcgcccatggccctcgcgccccaatcccgcgccggcgacagagcgagccgcggcggactcctc

SEQ ID NO: 467000 - DNA, 176 bp, Homo sapiens; identical to SEQ ID NO: 345057
  chr2:183903037-183903213
  hyper
  lymphoid_neoplasm vs. head_and_neck,cervical,colorectal, ovary,breast,renal,upper_gi,pancreas_gallbladder,anorectal, non_cancer,liver_bileduct,prostate,melanoma,lung, bladder_and_urothelial,uterine

SEQ ID NO: 467001 - DNA, 273 bp, Homo sapiens
  chr2:183902738-183903011
  hyper
  lymphoid_neoplasm vs. melanoma,anorectal,liver_bileduct, head_and_neck,thyroid,colorectal,breast,uterine,non_cancer, cervical,ovary,renal,bladder_and_urothelial, pancreas_gallbladder,lung
cgggtgagcatgccgacgccccggtcgttgaggatggtgagcttctccgccagcttctgctgactgggctgcagcactgagcgcgacatggtggtgctggtgccgccgccgccgccggccgcctcgcgcccagtcacgggcccgcggccttcgcagcagcctctctcgggcctcctcccctcccgcccgcgacctccgccttaggagagcgcgcccatggccctcgcgccccaatcccgcgccggcgacagagcgagccgcggcggactcctc

SEQ ID NO: 467002 - DNA, 587 bp, Homo sapiens; identical to SEQ ID NO: 346507
  chr2:183903037-183903624
  hyper
  lymphoid_neoplasm vs. melanoma,anorectal,liver_bileduct, head_and_neck,thyroid,colorectal,breast,uterine,non_cancer, cervical,ovary,renal,bladder_and_urothelial, pancreas_gallbladder,lung

SEQ ID NO: 467003 - DNA, 584 bp, Homo sapiens
  chr2:189156844-189157428
  hyper
  lymphoid_neoplasm vs. bladder_and_urothelial,lung
ctctccacgcccctgcccgaagcctgacccgactgcctctctcagtgaggtacggagatttatctaggctcttccctggctgcgaacccaggctccctccaggtagcgtggaatcgcttagaagctgatatcccgaggggcggtgggggtggacagctccggccaccagtgcccgggaaggagggcgcggggctgcgcgtagccgctggccagcaggttgtaaaaaattaggacagctaaatgctcagggagtcgtccagcactaaaggaggctaagacctgttgacgcctgctatggcagcgcttgagaaatgactgggggagtccagcgaggtcggggacgcagcggtctccgggctccagaaacctccttagccttttgtggtaactttggtccggcggcggggggccggtgagcaggaactggagggaggcggtggggaaaccgtggatccgtccggctgagggtgcgtggatcagactgggctgagcaggcaagtcatcgtcgggtcacagcgaggcgacccaggagcgaacttccagggcagcctcccttttgttggcgctgggagagaatgtgggca

SEQ ID NO: 467004 - DNA, 30 bp, Homo sapiens
  chr2:189157688-189157718
  hyper
  lymphoid_neoplasm vs. bladder_and_urothelial,lung
tctctattctgaggctcctgcggctgccgc

SEQ ID NO: 467005 - DNA, 108 bp, Homo sapiens
  chr2:190445073-190445181
  hyper
  lymphoid_neoplasm vs. colorectal
cgtgtagagttgcttgtctccaaagccccacctgggtttccaccatatgctttcggtcaacgacactcaccacagcatcctctctggcggttgtgatctcccgccctg

SEQ ID NO: 467006 - DNA, 725 bp, Homo sapiens
  chr2:190445255-190445980
  hyper
  lymphoid_neoplasm vs. colorectal
taacaggagtgcaaggaactggagatagcacctctaaaaacacaacagccttgggcaaaaagactacaacgacgactttggcaaagaacaaaagaaaaggggcccagggattttcttttttccttctttccaaacttagctaacactgtagctgaagttggaaaggcaaagccttatggaagcggtttgggaggctcagcaggtcgtccgagcctagcggacgccctgagccagctctctccgccgccgccgccgccgccgtgggccgggcccagctcttataccgagtcgggggcggagctccctgcgacctccgactggggccgccccgtccccttcagggccgcccgggcgtccccgcggcgcgagacgagctcccgtcaaccttgcgcgccgggccgtccccgcgcccttgcccggaggagtcgcccaccccgggcgcaagcgtccaaccggccgcagacaccctgcgcggcttgcggggaccttcgcctcgacgcgttccactccccgggttttcctgctctccgggaagccgcgagggcaacctcggggggcggccgtggggctgggaaaaggaggaaggcgcgtggagccggcggggcggcgtagggagattctgcgcgaaactaagcgtcaggtgctggaagaaagcgctgcgcaccggctaccccgcagttcagggaaagggcggccgccggacggtcgcagtgcaaagctccagc

SEQ ID NO: 467007 - DNA, 448 bp, Homo sapiens
  chr2:192109730-192110178
  hyper
  lymphoid_neoplasm vs. anorectal,melanoma,breast, pancreas_gallbladder,sarcoma,prostate,colorectal,ovary,uterine, liver_bileduct,renal,thyroid,non_cancer,bladder_and_urothelial, lung,upper_gi,cervical,myeloid_neoplasm
cggaatgtgaccccaggctggcttcgagttgtcaaatgttgtatttctcattttatgtcagtgagtctggaagcaaaaaaggtagaaagactgccttccgtgggggccgcgacgatcgcccctccttccctcaagcctcgtcccatccaggctcgccccgggtgcggagggtcgggccgcaaacccgcaaggcgcggaggccgccgcgacgctcaccggggggcgctgtgaagccggcaccgggcggacagaggtgagtcggctcggaggcggtggctcccgttcctgcccgcgcgccgaggggcgaatcccaggcagcgaggtcgccgcccccgcccctcggccggcccctccgccagcgggcgagaggggagtggccgggctcctcccgccgccgctgagcactccgcagctgggtgcgcacgggagcctcaaccgcggcgcgtgg

SEQ ID NO: 467008 - DNA, 254 bp, Homo sapiens
  chr2:192110303-192110557
  hyper
  lymphoid_neoplasm vs. anorectal,melanoma,breast, pancreas_gallbladder,sarcoma,prostate,colorectal,ovary,uterine, liver_bileduct,renal,thyroid,non_cancer,bladder_and_urothelial, lung,upper_gi,cervical,myeloid_neoplasm
aggacgacgtggaggcggagtggcgcccggcgaggtagcgccaggcgaggtagcgcgagcgctttctctctctctcccctgcccttccctctgcgtccgtcgtcggcccccgaggcgcctgctccgcgcctttgtgcccgcggtccctggccccgtcgcaccctgcgggcgggggtcagcgggctctgccgctctcttgggagacgcggcgctgcggcgggaacggcgcacgctgtaggttgcggagggtggtc

SEQ ID NO: 467009 - DNA, 1 bp, Homo sapiens
  chr2:192110584-192110585
  hyper
  lymphoid_neoplasm vs. anorectal,melanoma,breast, pancreas_gallbladder,sarcoma,prostate,colorectal,ovary,uterine, liver_bileduct,renal,thyroid,non_cancer,bladder_and_urothelial, lung,upper_gi,cervical,myeloid_neoplasm
c

SEQ ID NO: 467010 - DNA, 41 bp, Homo sapiens
  chr2:192110137-192110178
  hyper
  lymphoid_neoplasm vs. liver_bileduct,breast,sarcoma, anorectal,melanoma,prostate,pancreas_gallbladder,renal, colorectal,non_cancer,bladder_and_urothelial,ovary,thyroid,lung, upper_gi,uterine,myeloid_neoplasm,cervical,multiple_myeloma
cgcagctgggtgcgcacgggagcctcaaccgcggcgcgtgg

SEQ ID NO: 467011 - DNA, 254 bp, Homo sapiens; identical to SEQ ID NO: 467008
  chr2:192110303-192110557
  hyper
  lymphoid_neoplasm vs. liver_bileduct,breast,sarcoma, anorectal,melanoma,prostate,pancreas_gallbladder,renal, colorectal,non_cancer,bladder_and_urothelial,ovary,thyroid,lung, upper_gi,uterine,myeloid_neoplasm,cervical,multiple_myeloma

SEQ ID NO: 467012 - DNA, 439 bp, Homo sapiens; identical to SEQ ID NO: 345062
  chr2:192110584-192111023
  hyper
  lymphoid_neoplasm vs. liver_bileduct,breast,sarcoma, anorectal,melanoma,prostate,pancreas_gallbladder,renal, colorectal,non_cancer,bladder_and_urothelial,ovary,thyroid,lung, upper_gi,uterine,myeloid_neoplasm,cervical,multiple_myeloma

SEQ ID NO: 467013 - DNA, 45 bp, Homo sapiens
  chr2:200322454-200322499
  hyper
  lymphoid_neoplasm vs. liver_bileduct
cggcggcggcggcgagccggggctgctggttcgcagggcggctag

SEQ ID NO: 467014 - DNA, 62 bp, Homo sapiens; identical to SEQ ID NO: 357429
  chr2:200322611-200322673
  hyper
  lymphoid_neoplasm vs. liver_bileduct

SEQ ID NO: 467015 - DNA, 378 bp, Homo sapiens
  chr2:200327794-200328172
  hyper
  lymphoid_neoplasm vs. multiple_myeloma
tggtgtcccttcggcggccgcgggccgggggaccggggaagacggagggtcctgcggcctggagcaccaccctaccacaccaggcaacgccccccggggcgcccttcattcttttgcagagcccagaacttaataggtgggtccccttctgcaaccacgctgcgagagaatgactgccctgctaatctagtttacttgtagaaatcgactgtaaaccgggacaacaaggcaagggtgggggaagaaaaggaagcgccgaaggagccgccgctgcgtccccgcccccagctcggagctgccggggttggggccccgggtggcgctcccgacccgccgcgttttccttagggaaacaccgagtgaggcagaggatctcag

SEQ ID NO: 467016 - DNA, 180 bp, Homo sapiens; identical to SEQ ID NO: 369893
  chr2:200328393-200328573
  hyper
  lymphoid_neoplasm vs. multiple_myeloma

SEQ ID NO: 467017 - DNA, 32 bp, Homo sapiens; identical to SEQ ID NO: 357443
  chr2:210637062-210637094
  hyper
  lymphoid_neoplasm vs. ovary,prostate

SEQ ID NO: 467018 - DNA, 250 bp, Homo sapiens; identical to SEQ ID NO: 369910
  chr2:211090073-211090323
  hyper
  lymphoid_neoplasm vs. bladder_and_urothelial

SEQ ID NO: 467019 - DNA, 501 bp, Homo sapiens
  chr2:213402010-213402511
  hyper
  lymphoid_neoplasm vs. ovary
ccctggatggtttcggaaatctctctggctctccaaaaggcaccccttggccacgtcaagacaccggtcctcctcagacctctcccgtcccactttcatccccaggaaactctagtgtcagaaactttgagctccattgcactgcaggtgctgtcattagtcctgcaagccgtggcgggccagccccgccgcgctgcctctcggggtcaattagccctttgcctgcccaggtacctggggctcgagctctccagcaagcagtggccgcgcacccatcgccgctgccgctttcgcctcgggtggatccagtgacccgcaggctcggcagcctggccgggcagtaaacagacaagtttgaaggactccggccaatagcaagttgaactacaggaagaactcttcccggagccaaacacggcaaccgacgggaaggccgggcttctggctcaagtgtgccaagcctttttttttttttttaagaggtcaggcaggcgagtaagc

SEQ ID NO: 467020 - DNA, 546 bp, Homo sapiens
  chr2:213402063-213402609
  hyper
  lymphoid_neoplasm vs. cervical
cgtcaagacaccggtcctcctcagacctctcccgtcccactttcatccccaggaaactctagtgtcagaaactttgagctccattgcactgcaggtgctgtcattagtcctgcaagccgtggcgggccagccccgccgcgctgcctctcggggtcaattagccctttgcctgcccaggtacctggggctcgagctctccagcaagcagtggccgcgcacccatcgccgctgccgctttcgcctcgggtggatccagtgacccgcaggctcggcagcctggccgggcagtaaacagacaagtttgaaggactccggccaatagcaagttgaactacaggaagaactcttcccggagccaaacacggcaaccgacgggaaggccgggcttctggctcaagtgtgccaagcctttttttttttttttaagaggtcaggcaggcgagtaagcgcccctcaagtcaatggggagagggctccgggaagccggcggaagaggcccagaactccgggccccggaccgaggcgcgcccgcctgctgcactccgg

SEQ ID NO: 467021 - DNA, 70 bp, Homo sapiens
  chr2:213402539-213402609
  hyper
cgggaagccggcggaagaggcccagaactccgggccccggaccgaggcgcgcccgcctgctgcactccgg

SEQ ID NO: 467022 - DNA, 16 bp, Homo sapiens
  chr2:217497773-217497789
  hyper
  lymphoid_neoplasm vs. head_and_neck
cggttagcccagtgcc

SEQ ID NO: 467023 - DNA, 87 bp, Homo sapiens; identical to SEQ ID NO: 349672
  chr2:217498487-217498574
  hyper
  lymphoid_neoplasm vs. head_and_neck

SEQ ID NO: 467024 - DNA, 3 bp, Homo sapiens
  chr2:219826725-219826728
  hyper
  lymphoid_neoplasm vs. renal
cgg

SEQ ID NO: 467025 - DNA, 167 bp, Homo sapiens
  chr2:219827883-219828050
  hyper
  lymphoid_neoplasm vs. prostate,renal
tggctccagaacccaaaaatgtcggtccccacttgccctcccgggacgacaggactcgattcccctggcctcagcccagcgcccttgtaacctgcctggagccggaaatccccagtccagatttgtgaattgagttcccggagggagggggagagctggcggaaggg

SEQ ID NO: 467026 - DNA, 53 bp, Homo sapiens; identical to SEQ ID NO: 357459
  chr2:219828117-219828170
  hyper
  lymphoid_neoplasm vs. prostate,renal

SEQ ID NO: 467027 - DNA, 59 bp, Homo sapiens; identical to SEQ ID NO: 349687
  chr2:220417712-220417771
  hyper
  lymphoid_neoplasm vs. anorectal,thyroid,non_cancer

SEQ ID NO: 467028 - DNA, 82 bp, Homo sapiens
  chr2:220435308-220435390
  hyper
  lymphoid_neoplasm vs. liver_bileduct,head_and_neck, cervical,bladder_and_urothelial
cgtgcgcgttgcgggcgtggcacacgtagacgccggaatccggcagccgagccgccaggatgcgcagtgccaggctcgcgcc

SEQ ID NO: 467029 - DNA, 95 bp, Homo sapiens; identical to SEQ ID NO: 357471
  chr2:220436254-220436349
  hyper
  lymphoid_neoplasm vs. liver_bileduct,lung

SEQ ID NO: 467030 - DNA, 139 bp, Homo sapiens; identical to SEQ ID NO: 460969
  chr2:222435635-222435774
  hyper
  lymphoid_neoplasm vs. ovary,non_cancer

SEQ ID NO: 467031 - DNA, 2 bp, Homo sapiens
  chr2:222435863-222435865
  hyper
  lymphoid_neoplasm vs. ovary,non_cancer
gc

SEQ ID NO: 467032 - DNA, 379 bp, Homo sapiens
  chr2:222436961-222437340
  hyper
  lymphoid_neoplasm vs. thyroid,non_cancer, myeloid_neoplasm,pancreas_gallbladder,bladder_and_urothelial, uterine,renal,lung,ovary,prostate
cagccatggttcgccggtgccaacgctgctcctgccgcttctatcccagtggaataaatgcttaagttaggagagcagcgggctgaagacattgccaagggggcgggcccggccggtgacgtgagcccgccagtccggggcccgcggccaatggcggcgcagacagggcggccgagccccgccttcaccgagcagggcccgccccagggttccgccccctccgggctccacggggcgcgcggtctcccggggctctagggggcgagcacggccggtccccgcccccgcctgccggagggagccagcgggatcccccacgttacctcgaaggtcgagcccctggacggcggagggactttggaaaagctcggaattgacc

SEQ ID NO: 467033 - DNA, 407 bp, Homo sapiens
  chr2:222436961-222437368
  hyper
  lymphoid_neoplasm vs. multiple_myeloma, pancreas_gallbladder,prostate,head_and_neck,non_cancer,thyroid, uterine,myeloid_neoplasm,sarcoma,renal,lung,breast,ovary
cagccatggttcgccggtgccaacgctgctcctgccgcttctatcccagtggaataaatgcttaagttaggagagcagcgggctgaagacattgccaagggggcgggcccggccggtgacgtgagcccgccagtccggggcccgcggccaatggcggcgcagacagggcggccgagccccgccttcaccgagcagggcccgccccagggttccgccccctccgggctccacggggcgcgcggtctcccggggctctagggggcgagcacggccggtccccgcccccgcctgccggagggagccagcgggatcccccacgttacctcgaaggtcgagcccctggacggcggagggactttggaaaagctcggaattgaccgaggggagccagagaagaggttggaaac

SEQ ID NO: 467034 - DNA, 415 bp, Homo sapiens; identical to SEQ ID NO: 345066
  chr2:222437421-222437836
  hyper
  lymphoid_neoplasm vs. multiple_myeloma, pancreas_gallbladder,prostate,head_and_neck,non_cancer,thyroid, uterine,myeloid_neoplasm,sarcoma,renal,lung,breast,ovary

SEQ ID NO: 467035 - DNA, 806 bp, Homo sapiens; identical to SEQ ID NO: 346522
  chr2:222437421-222438227
  hyper
  lymphoid_neoplasm vs. multiple_myeloma,uterine

SEQ ID NO: 467036 - DNA, 441 bp, Homo sapiens; identical to SEQ ID NO: 331646
  chr2:231902096-231902537
  hyper
  lymphoid_neoplasm vs. liver_bileduct

SEQ ID NO: 467037 - DNA, 340 bp, Homo sapiens
  chr2:233497841-233498181
  hyper
  lymphoid_neoplasm vs. cervical
gcgggcgcctcccactccctgaccccggggagggtgggcaccactcccagacgcgggggacgcgtgggtgtcgctcgggggcgctcgcctcccccacccagcctgtcccgggccgcgagcgcttccagtcgggttacttctgggggacaagaaaggcaccgtctgaacggtcgagacgctttttcccgctacggttttccccggagctgacaggggcagcaaggtcggagttgatccgagggtccctgcctggtcccggggggacggtcagcctcccgcccggagccgcggggagaggaagcaggtcggggtctccgggacgcgcagacacccagacacc

SEQ ID NO: 467038 - DNA, 104 bp, Homo sapiens
  chr2:233498077-233498181
  hyper
  lymphoid_neoplasm vs. ovary
cgagggtccctgcctggtcccggggggacggtcagcctcccgcccggagccgcggggagaggaagcaggtcggggtctccgggacgcgcagacacccagacacc

SEQ ID NO: 467039 - DNA, 165 bp, Homo sapiens; identical to SEQ ID NO: 357503
  chr2:235404971-235405136
  hyper
  lymphoid_neoplasm vs. cervical,multiple_myeloma

SEQ ID NO: 467040 - DNA, 23 bp, Homo sapiens
  chr2:235859951-235859974
  hyper
  lymphoid_neoplasm vs. head_and_neck,pancreas_gallbladder, bladder_and_urothelial,colorectal,breast,cervical,prostate, myeloid_neoplasm,lung
cgtgccaggcctgttttacgcgc

SEQ ID NO: 467041 - DNA, 593 bp, Homo sapiens
  chr2:235860154-235860747
  hyper
  lymphoid_neoplasm vs. head_and_neck,pancreas_gallbladder, bladder_and_urothelial,colorectal,breast,cervical,prostate, myeloid_neoplasm,lung
cactgtcctcagccaaggtgtagtaaagcgtctccgaacgcggcgcgaccctcgcccacgcccgctcgcggggggaccgcaccgccccaggggtcctcgctaggggttcccggagaaggggtgggagatgggggtgcgggggggcacaggagcgcgggccagcacccagacctgctcggtaccggggacccagacccgaggatgccgggcggccaaggccccgctaccctggccggctccgggcggaggaagaagaggaggcgcccagactggatacccgcctggacccggagccgcggcaccacccccagcccgccccacgctcgccagcctcagacggccgcgccccgccccgcccctctcccgaagccccgccccggcgcgggaccaccccctccgcggcctcagctccggtcctggccccgccccccgcgcccccgcccccgcccccgcccccgcccccgcccaggcgcgggaccaccctccgcccgccgaggcgggggcccagcgcgcccggcactctcggcggtccgggcccctcgccactaccgccgccgccgccgccgtgagtcccgcggagccgcgcgcgcccc

SEQ ID NO: 467042 - DNA, 439 bp, Homo sapiens
  chr2:235860308-235860747
  hyper
  lymphoid_neoplasm vs. pancreas_gallbladder,colorectal, breast,melanoma,upper_gi,liver_bileduct,uterine,prostate, head_and_neck,lung,anorectal,bladder_and_urothelial,ovary
cgggccagcacccagacctgctcggtaccggggacccagacccgaggatgccgggcggccaaggccccgctaccctggccggctccgggcggaggaagaagaggaggcgcccagactggatacccgcctggacccggagccgcggcaccacccccagcccgccccacgctcgccagcctcagacggccgcgccccgccccgcccctctcccgaagccccgccccggcgcgggaccaccccctccgcggcctcagctccggtcctggccccgccccccgcgcccccgcccccgcccccgcccccgcccccgcccaggcgcgggaccaccctccgcccgccgaggcgggggcccagcgcgcccggcactctcggcggtccgggcccctcgccactaccgccgccgccgccgccgtgagtcccgcggagccgcgcgcgcccc

SEQ ID NO: 467043 - DNA, 85 bp, Homo sapiens
  chr2:235860808-235860893
  hyper
  lymphoid_neoplasm vs. pancreas_gallbladder,colorectal, breast,melanoma,upper_gi,liver_bileduct,uterine,prostate, head_and_neck,lung,anorectal,bladder_and_urothelial,ovary
agccaggtaggcaggcggcggcggggagcgcctcgggcggcagggccctgggggccggcgggggcgcggggtcgtgctcgggggc

SEQ ID NO: 467044 - DNA, 356 bp, Homo sapiens; identical to SEQ ID NO: 346530
  chr2:235860951-235861307
  hyper
  lymphoid_neoplasm vs. pancreas_gallbladder,colorectal, breast,melanoma,upper_gi,liver_bileduct,uterine,prostate, head_and_neck,lung,anorectal,bladder_and_urothelial,ovary

SEQ ID NO: 467045 - DNA, 70 bp, Homo sapiens
  chr2:235860823-235860893
  hyper
  lymphoid_neoplasm vs. upper_gi,liver_bileduct
cggcggcggggagcgcctcgggcggcagggccctgggggccggcgggggcgcggggtcgtgctcgggggc

SEQ ID NO: 467046 - DNA, 439 bp, Homo sapiens
  chr2:235860951-235861390
  hyper
  lymphoid_neoplasm vs. upper_gi,liver_bileduct
tgagttcggggctgcgcgggtgcctgggcgtggggcggcttcggggaagcctcgcgcgcccctcgccgctcccccgggcgctcgggtctccctggtgctggtgggcagggacccggcccggggttccgggcgccgagccgcagccctccgcgtgcgctcgggccgccccccaaccccggctctggccacttcccggcgggcggccctgcggggtggcctccctgggcaaccggacgcgtcctcgggcgcaaatcggggggcgcgctcggctcacgggggccgtgggggccacgggagggcgtggaggggtcggggcgcccccctcgagcggcgctggggaggagggaaggacgcgcggtctccggttaaacttgttggtgacaatgcatatttcaacttcttcggagatccctcctgtgaggatgaaattgaaaactcc

SEQ ID NO: 467047 - DNA, 132 bp, Homo sapiens; identical to SEQ ID NO: 357507
  chr2:235861533-235861665
  hyper
  lymphoid_neoplasm vs. upper_gi,liver_bileduct

SEQ ID NO: 467048 - DNA, 298 bp, Homo sapiens
  chr2:236402404-236402702
  hyper
  lymphoid_neoplasm vs. cervical,upper_gi,colorectal, prostate,lung,melanoma,renal,bladder_and_urothelial,ovary, uterine,breast,sarcoma,anorectal,non_cancer
aggcgcggggcctggccggcgggagggtcccgcaccccggcccagtgtgaacaccccgcgcacccccctggcccggcccgccgggggcgcggactacaagtcccaggaagcccagaggcaggcgcggggcggggcctggcgcaattccccgggatccggcgcgctgggaagcgccgaggaggacgcagcgccggcggccggagggcggcaagcgcgcgggcaggcggggcgcgggcgcgggcgcgggcgagggcgaaggcgggggcggggccgacgtgggccggagccctgcgtgcca

SEQ ID NO: 467049 - DNA, 298 bp, Homo sapiens; identical to SEQ ID NO: 467048
  chr2:236402404-236402702
  hyper
  lymphoid_neoplasm vs. liver_bileduct,prostate,upper_gi, colorectal,breast,ovary,head_and_neck,renal,non_cancer,lung, thyroid,uterine,pancreas_gallbladder,bladder_and_urothelial

SEQ ID NO: 467050 - DNA, 139 bp, Homo sapiens
  chr2:236403013-236403152
  hyper
  lymphoid_neoplasm vs. liver_bileduct,prostate,upper_gi, colorectal,breast,ovary,head_and_neck,renal,non_cancer,lung, thyroid,uterine,pancreas_gallbladder,bladder_and_urothelial
cccgagcaagcctccttcggggccggccgcacccgccgcggcgcgctccatgggggcgcgctccccccgggcggcccgctgacccgggacgccggggcccgctcgctcgccggccgcgcgtcccggccatgaactgagc

SEQ ID NO: 467051 - DNA, 139 bp, Homo sapiens; identical to SEQ ID NO: 467050
  chr2:236403013-236403152
  hyper
  lymphoid_neoplasm vs. cervical,melanoma,liver_bileduct, breast,bladder_and_urothelial,prostate,anorectal,upper_gi,lung, uterine

SEQ ID NO: 467052 - DNA, 68 bp, Homo sapiens; identical to SEQ ID NO: 346533
  chr2:236403736-236403804
  hyper
  lymphoid_neoplasm vs. cervical,melanoma,liver_bileduct, breast,bladder_and_urothelial,prostate,anorectal,upper_gi,lung, uterine

SEQ ID NO: 467053 - DNA, 119 bp, Homo sapiens
  chr2:236403736-236403855
  hyper
  lymphoid_neoplasm vs. liver_bileduct,cervical
ctctcctgcgggaaagtggctcggtgcctccgcgtcctgggctgccggagcgtcccggcccagcagacgcctgggggcagccggcggggtcggcgccacccgacccctgacaggttacc

SEQ ID NO: 467054 - DNA, 212 bp, Homo sapiens; identical to SEQ ID NO: 369996
  chr2:236403941-236404153
  hyper
  lymphoid_neoplasm vs. liver_bileduct,cervical

SEQ ID NO: 467055 - DNA, 308 bp, Homo sapiens
  chr2:236578055-236578363
  hyper
  lymphoid_neoplasm vs. prostate,uterine,myeloid_neoplasm, ovary,head_and_neck,breast,non_cancer,lung,sarcoma, pancreas_gallbladder,upper_gi,colorectal
caggctggtgctgggctgggcccctcggaggctccggtccgcgctgcgtcgatccatcccggcgcttgggcctgcacgccgccgcgctcgccgccgccgccgccgccgcgctcccgggactcggccagcccggctgggcgcgcggcccgcggtcccttgcacgtcggcccccgtcgcccgccccgccccggcgcgcgtttccattttaaaccgccgcccgccgcccgccacccgccacccttcggccgcagccggtgcagctgtccgcgcgtcccggagcccagggagtggcggaggctgcggaaccg

SEQ ID NO: 467056 - DNA, 44 bp, Homo sapiens; identical to SEQ ID NO: 346535
  chr2:236578677-236578721
  hyper
  lymphoid_neoplasm vs. prostate,uterine,myeloid_neoplasm, ovary,head_and_neck,breast,non_cancer,lung,sarcoma, pancreas_gallbladder,upper_gi,colorectal

SEQ ID NO: 467057 - DNA, 7 bp, Homo sapiens
  chr2:237087070-237087077
  hyper
  lymphoid_neoplasm vs. myeloid_neoplasm
ctccggc

SEQ ID NO: 467058 - DNA, 353 bp, Homo sapiens
  chr2:237087070-237087423
  hyper
  lymphoid_neoplasm vs. myeloid_neoplasm
ctccggcggttttttttttttttttttttttttgaaaggagcaaacatccccagctttaatgcggcccaattatctcgtttgcacgacttaaaatgtttctctttaactcatttcaatctagtaaatatgcttcagcaagtagctaatttctcagggatggcttcgcctcgccatttgcatataaagcgcgtcggggcccggccccttctccgagtgcgcgagtcccttcttccggtgcgcgggtggcaggcagccaggcctcctagtccagggaggtcgcctaggtttggcctagggaaggcggagtctggggtccgcgacagtgcctggggaccagggtggcagggagggc

SEQ ID NO: 467059 - DNA, 291 bp, Homo sapiens
  chr2:237087132-237087423
  hyper
  lymphoid_neoplasm vs. breast,cervical
cggcccaattatctcgtttgcacgacttaaaatgtttctctttaactcatttcaatctagtaaatatgcttcagcaagtagctaatttctcagggatggcttcgcctcgccatttgcatataaagcgcgtcggggcccggccccttctccgagtgcgcgagtcccttcttccggtgcgcgggtggcaggcagccaggcctcctagtccagggaggtcgcctaggtttggcctagggaaggcggagtctggggtccgcgacagtgcctggggaccagggtggcagggagggc

SEQ ID NO: 467060 - DNA, 394 bp, Homo sapiens
  chr2:237087618-237088012
  hyper
  lymphoid_neoplasm vs. breast,cervical
ggaaatctcagggctcagtcgagcaatctcctggctttaaattccgaataaaagtctcaaatattcccgggtcatgggggcactgtctcattaaaaccactctcgtcctgaaactgcaatgcagacattaaagtgcagtatttttcaattagagctgacgaattcaatcaaaattccatagattaggatgaaatgaggcatgggtcatttacaggggaatttaattgccgagccattagacaaatagtatatttgccattcccgcgttatccatcattttcgacatcaataccggggccgcatctccccgtcccgcggccgcccggcgtcggctgtaaacactcccttccctgtatcttctgattatatctgatttcatttagggccatggggg

SEQ ID NO: 467061 - DNA, 375 bp, Homo sapiens
  chr2:237087637-237088012
  hyper
  lymphoid_neoplasm vs. multiple_myeloma,prostate, non_cancer,bladder_and_urothelial,anorectal
cgagcaatctcctggctttaaattccgaataaaagtctcaaatattcccgggtcatgggggcactgtctcattaaaaccactctcgtcctgaaactgcaatgcagacattaaagtgcagtatttttcaattagagctgacgaattcaatcaaaattccatagattaggatgaaatgaggcatgggtcatttacaggggaatttaattgccgagccattagacaaatagtatatttgccattcccgcgttatccatcattttcgacatcaataccggggccgcatctccccgtcccgcggccgcccggcgtcggctgtaaacactcccttccctgtatcttctgattatatctgatttcatttagggccatggggg

SEQ ID NO: 467062 - DNA, 223 bp, Homo sapiens; identical to SEQ ID NO: 345074
  chr2:237088239-237088462
  hyper
  lymphoid_neoplasm vs. multiple_myeloma,prostate, non_cancer,bladder_and_urothelial,anorectal

SEQ ID NO: 467063 - DNA, 2 bp, Homo sapiens
  chr2:237145997-237145999
  hyper
  lymphoid_neoplasm vs. multiple_myeloma
gc

SEQ ID NO: 467064 - DNA, 4 bp, Homo sapiens
  chr2:239757293-239757297
  hyper
  lymphoid_neoplasm vs. sarcoma,myeloid_neoplasm
cgtg

SEQ ID NO: 467065 - DNA, 247 bp, Homo sapiens
  chr2:242498020-242498267
  hyper
  lymphoid_neoplasm vs. colorectal,breast,anorectal, uterine,cervical,pancreas_gallbladder,prostate,thyroid, head_and_neck,ovary,renal,non_cancer,liver_bileduct,upper_gi
cgctccggcctggtcgccttctccgggcgcatccagggaactcgctcggtcctccttaagcggggaagctcggaaagcgtctccccgactccgcccccagggttgcctttcccttagaaggccaagccccaagcccagcctctcgccagctgggagtcgcgcgctgcccacctcgctgcccaggcccccgacgccgcggcaggagccccccaagagcgcgggaagccccgtggacctggcgctcccg

SEQ ID NO: 467066 - DNA, 21 bp, Homo sapiens
  chr2:242498800-242498821
  hyper
  lymphoid_neoplasm vs. colorectal,breast,anorectal, uterine,cervical,pancreas_gallbladder,prostate,thyroid, head_and_neck,ovary,renal,non_cancer,liver_bileduct,upper_gi
gcccggcgccccgcgcgcccc

SEQ ID NO: 467067 - DNA, 236 bp, Homo sapiens
  chr2:242498800-242499036
  hyper
  lymphoid_neoplasm vs. colorectal,multiple_myeloma,ovary
gcccggcgccccgcgcgccccgttccccgcgccgcctccctccacccggctgagcgcttgtgcccgcaggtgcggcgccccccacccgcgtcgccgccatggaggtgctgcggcgctcctcggtcttcgccgccgagatcatggacgcctttgaccgctcgcccacagacaaggagctggtggcccaggccaaggcgctgggccgggagtacgtgcacgcgcggctgctgcgcgcc

SEQ ID NO: 467068 - DNA, 4 bp, Homo sapiens
  chr20:1206681-1206685
  hyper
  lymphoid_neoplasm vs. bladder_and_urothelial
cgca

SEQ ID NO: 467069 - DNA, 214 bp, Homo sapiens; identical to SEQ ID NO: 361786
  chr20:1207191-1207405
  hyper
  lymphoid_neoplasm vs. bladder_and_urothelial

SEQ ID NO: 467070 - DNA, 428 bp, Homo sapiens
  chr20:6747996-6748424
  hyper
  lymphoid_neoplasm vs. upper_gi,bladder_and_urothelial, renal,pancreas_gallbladder,colorectal
cgggcccagcggggaaataagaggccagaccctgaccctgcatttgtcctggatttcgcctccagagtccccgcgagggtccggcgcgccagctgatctctcctttgagagcagggagtggaggcgcgagcgccccccttggcggccgcgcgcccccgccctccgccccaccccgccgcggctgcccgggcgcgccgtccacacccctgcgcgcagctcccgcccgctcggggatccccggcgagccgcgccgcgaagggggaggtgttcggccgcggccgggagggagccggcaggcggcgtcccctttaaaagccgcgagcgccgcgccacggcgccgccgccgccgtcgccgccgccggagtcctcgccccgccgcgctgcgcccggctcgcgctgcgctagtcgctccgcttcccacaccccgc

SEQ ID NO: 467071 - DNA, 294 bp, Homo sapiens
  chr20:6748470-6748764
  hyper
  lymphoid_neoplasm vs. upper_gi,bladder_and_urothelial, renal,pancreas_gallbladder,colorectal
cggctacccgaacgttctcggggccagcgccgagtggatcaccggggaccgcgaggcacccgcgcgccgcagaccccgcgcgggctggagcacccggcagagcgcgccacagcgccgtggcctctgctgcccgggctgcgccagagccgcggacgggcgcgcagagcgccggggactccggagccgatccctagcgccgcgatgcggagcacctactgcaggagatcgggggcctgggacgcgctggccgaggtgtgatcggaccccaggctagccacaaagggcacttggccc

SEQ ID NO: 467072 - DNA, 101 bp, Homo sapiens
  chr20:6748323-6748424
  hyper
  lymphoid_neoplasm vs. upper_gi
cgccacggcgccgccgccgccgtcgccgccgccggagtcctcgccccgccgcgctgcgcccggctcgcgctgcgctagtcgctccgcttcccacaccccgc

SEQ ID NO: 467073 - DNA, 294 bp, Homo sapiens; identical to SEQ ID NO: 467071
  chr20:6748470-6748764
  hyper
  lymphoid_neoplasm vs. upper_gi

SEQ ID NO: 467074 - DNA, 258 bp, Homo sapiens
  chr20:6749063-6749321
  hyper
  lymphoid_neoplasm vs. upper_gi
ggagccggccccgcgcggggccacgcgtccctcgggcgctggttcctaaggaggacgacagcaccagcttctcctttctcccttcccttccctgccccgcactcctccccctgctcgctgttgttgtgtgtcagcacttggctggggacttcttgaacttgcagggagaataacttgcgcaccccactttgcgccggtgcctttgccccagcggagcctgcttcgccatctccgagccccaccgcccctccactcctc

SEQ ID NO: 467075 - DNA, 587 bp, Homo sapiens; identical to SEQ ID NO: 361809
  chr20:6749063-6749650
  hyper
  lymphoid_neoplasm vs. liver_bileduct

SEQ ID NO: 467076 - DNA, 339 bp, Homo sapiens; identical to SEQ ID NO: 460983
  chr20:9048825-9049164
  hyper
  lymphoid_neoplasm vs. uterine

SEQ ID NO: 467077 - DNA, 230 bp, Homo sapiens; identical to SEQ ID NO: 460984
  chr20:9049238-9049468
  hyper
  lymphoid_neoplasm vs. uterine

SEQ ID NO: 467078 - DNA, 111 bp, Homo sapiens; identical to SEQ ID NO: 361813
  chr20:9049670-9049781
  hyper
  lymphoid_neoplasm vs. uterine

SEQ ID NO: 467079 - DNA, 54 bp, Homo sapiens; identical to SEQ ID NO: 453156
  chr20:9496982-9497036
  hyper
  lymphoid_neoplasm vs. melanoma

SEQ ID NO: 467080 - DNA, 240 bp, Homo sapiens; identical to SEQ ID NO: 453157
  chr20:9497109-9497349
  hyper
  lymphoid_neoplasm vs. melanoma

SEQ ID NO: 467081 - DNA, 118 bp, Homo sapiens; identical to SEQ ID NO: 361818
  chr20:9497378-9497496
  hyper
  lymphoid_neoplasm vs. melanoma

SEQ ID NO: 467082 - DNA, 951 bp, Homo sapiens; identical to SEQ ID NO: 336369
  chr20:13976116-13977067
  hyper
  lymphoid_neoplasm vs. cervical

SEQ ID NO: 467083 - DNA, 78 bp, Homo sapiens; identical to SEQ ID NO: 375042
  chr20:17209635-17209713
  hyper
  lymphoid_neoplasm vs. cervical

SEQ ID NO: 467084 - DNA, 80 bp, Homo sapiens
  chr20:18039568-18039648
  hyper
cgggtgcgcccaggacaaccggcacagcctcttgtgtcgctgcggtcgccctcctccaggaggtcgtcagacgtgtgcca

SEQ ID NO: 467085 - DNA, 94 bp, Homo sapiens; identical to SEQ ID NO: 361824
  chr20:18039936-18040030
  hyper

SEQ ID NO: 467086 - DNA, 154 bp, Homo sapiens; identical to SEQ ID NO: 462762
  chr20:19192506-19192660
  hyper
  lymphoid_neoplasm vs. uterine,myeloid_neoplasm,sarcoma, breast,melanoma

SEQ ID NO: 467087 - DNA, 268 bp, Homo sapiens; identical to SEQ ID NO: 462763
  chr20:19193616-19193884
  hyper
  lymphoid_neoplasm vs. breast,uterine,non_cancer, myeloid_neoplasm,multiple_myeloma,ovary

SEQ ID NO: 467088 - DNA, 30 bp, Homo sapiens
  chr20:21487307-21487337
  hyper
  lymphoid_neoplasm vs. prostate,myeloid_neoplasm, non_cancer,melanoma
gtgtgtgtgtgtgtgtgtgtgtgtgtgtgt

SEQ ID NO: 467089 - DNA, 222 bp, Homo sapiens; identical to SEQ ID NO: 453162
  chr20:21686742-21686964
  hyper
  lymphoid_neoplasm vs. multiple_myeloma

SEQ ID NO: 467090 - DNA, 102 bp, Homo sapiens
  chr20:22558954-22559056
  hyper
  lymphoid_neoplasm vs. melanoma
cgaaccccctgcaaaaaaacccaacgccttgagtctcagttggctgagcttaccaccagccaagcccgcccgggcgtccgagccctggaagggagaaggact

SEQ ID NO: 467091 - DNA, 381 bp, Homo sapiens
  chr20:22559242-22559623
  hyper
  lymphoid_neoplasm vs. melanoma
tttatttgagctcaaaccaagcgactgttgactttagcacacaaagcaaagatttcactgcccgctagtttaaaaatgaatattttaccaagatatcgatcagcgttataaaattcagttaagtacaatgggatcctggcaaaaaaaaaaaaaaaagaataataaaggaggggggaggcaatataatatctgtgcaaatttgctgaagtgtgacgtggcatggaaagtttaccctcctggaattcggatctagaatgtttttttcggttgtttacagactttgtttattcacagatcatggttgcttaaaccggcgcgcggaaagcgtggggaaaaaaggaaaaaaaggaggggggagagtctctgcaccccacaatgagt

SEQ ID NO: 467092 - DNA, 152 bp, Homo sapiens; identical to SEQ ID NO: 361840
  chr20:22559772-22559924
  hyper
  lymphoid_neoplasm vs. melanoma

SEQ ID NO: 467093 - DNA, 331 bp, Homo sapiens
  chr20:22563824-22564155
  hyper
  lymphoid_neoplasm vs. liver_bileduct
cgttagcaccgcggctggagggtgcccagacctcccacccaccgcccaggcctccgcgtccggggaggcctccggggagccctttcgtccccgatggcccagtctccggactccgagtctgtttcattcagggagagtcatgatcgatcgcccttgggaaggtggcgagcggattgctgcttgggcatgtggcccgttcctagcccttctccacctcgcccagattctagaacaggggtcccatggagtactcccaagccagcaccccaaatacattcccctaccccagagtctccccaaactctcccaccagcatactgagctggcgccg

SEQ ID NO: 467094 - DNA, 48 bp, Homo sapiens; identical to SEQ ID NO: 460993
  chr20:22564188-22564236
  hyper
  lymphoid_neoplasm vs. liver_bileduct

SEQ ID NO: 467095 - DNA, 554 bp, Homo sapiens
  chr20:22564265-22564819
  hyper
  lymphoid_neoplasm vs. liver_bileduct
cggtctccctccagggaccccctcccttgtcccagggaaactgcaaggcagtgcctgtgcggagtgcgggggcggctggaggcactgaacggggcaatagggaaagaaccgagacctgaaccacacgcggctgagctttgcaggcaaaaactttctttctctttgtccactagtctttgactctgcctccacttcagcccccaactcctacccatcttctcctcctcagctccccaccccctcgccggccgacctcccacccctccccagccgcgcgctgccaaacataactctgttaggatagtgcgtggctcggccacgaagaggatttggaggcgccgcaagtcaatatttgatcacaaagttaatattatctcaaggctaacagtgtgtcgtataaaaaagagacccatttgattccaaggagggcggaaaaggcggctgcccagaaaggctggggttgtggggcggggtgggggggtgccagcgagggaagcggtcctgaggttggggaaggagcgagcgccgccgctccacttccccctggaaaagac

SEQ ID NO: 467096 - DNA, 923 bp, Homo sapiens; identical to SEQ ID NO: 347661
  chr20:22564324-22565247
  hyper
  lymphoid_neoplasm vs. liver_bileduct,renal,ovary, upper_gi,uterine,colorectal

SEQ ID NO: 467097 - DNA, 69 bp, Homo sapiens; identical to SEQ ID NO: 457917
  chr20:22565361-22565430
  hyper
  lymphoid_neoplasm vs. upper_gi,lung

SEQ ID NO: 467098 - DNA, 144 bp, Homo sapiens; identical to SEQ ID NO: 457918
  chr20:22565459-22565603
  hyper
  lymphoid_neoplasm vs. upper_gi,lung

SEQ ID NO: 467099 - DNA, 319 bp, Homo sapiens; identical to SEQ ID NO: 457919
  chr20:22565634-22565953
  hyper
  lymphoid_neoplasm vs. upper_gi,lung

SEQ ID NO: 467100 - DNA, 260 bp, Homo sapiens
  chr20:23030486-23030746
  hyper
  lymphoid_neoplasm vs. multiple_myeloma
ctgccctggcgcagggaggttctcgggcggggccgacaggggcaggcgccagggaaggccagcacccctgtaacaagacgactgtccccgcccaccactcgggcccccacgcgtgcagccctctttcatctcttggtcctcctttctttcttttcatacatgttacagccacttccaaggaaagcctggattgcaagagctctgggaaccggagacttcagagaagagggctttgaatggggagtgggggaggtggtgca

SEQ ID NO: 467101 - DNA, 265 bp, Homo sapiens
  chr20:23617984-23618249
  hyper
  lymphoid_neoplasm vs. head_and_neck,cervical, liver_bileduct,colorectal,sarcoma
cgcgctgcggcgcagctcgagctggctcctggaagctgatcttaggcgccgggcgcggacctgacgtgtccgtgcggttccaggccaggccagactcagggcattcccggacacgcccgccaagggctcgggggtgacagcgaagaccgggaacagggtccgggtgagaagcccaggcgccggagaggagcagcacggggtccgggagcagcgcggggggaggctgggacggcggggccggggcttcggaccctgcggggggcgg

SEQ ID NO: 467102 - DNA, 68 bp, Homo sapiens; identical to SEQ ID NO: 352469
  chr20:23618645-23618713
  hyper
  lymphoid_neoplasm vs. head_and_neck,cervical, liver_bileduct,colorectal,sarcoma

SEQ ID NO: 467103 - DNA, 205 bp, Homo sapiens; identical to SEQ ID NO: 352470
  chr20:25065526-25065731
  hyper
  lymphoid_neoplasm vs. sarcoma

SEQ ID NO: 467104 - DNA, 151 bp, Homo sapiens; identical to SEQ ID NO: 459615
  chr20:25566244-25566395
  hyper
  lymphoid_neoplasm vs. breast,sarcoma,renal

SEQ ID NO: 467105 - DNA, 59 bp, Homo sapiens; identical to SEQ ID NO: 352472
  chr20:25566411-25566470
  hyper
  lymphoid_neoplasm vs. breast,sarcoma,renal

SEQ ID NO: 467106 - DNA, 37 bp, Homo sapiens; identical to SEQ ID NO: 347675
  chr20:37358242-37358279
  hyper
  lymphoid_neoplasm vs. multiple_myeloma

SEQ ID NO: 467107 - DNA, 115 bp, Homo sapiens; identical to SEQ ID NO: 361877
  chr20:39318166-39318281
  hyper
  lymphoid_neoplasm vs. thyroid

SEQ ID NO: 467108 - DNA, 96 bp, Homo sapiens
  chr20:39318288-39318384
  hyper
  lymphoid_neoplasm vs. thyroid
cgcctcctgggccctttgttcccaagcggcccccgcccagtgggcgacgctctgtgtgtcctcgcggcttctggccgtgtgtgtcgtgcgttcctg

SEQ ID NO: 467109 - DNA, 463 bp, Homo sapiens
  chr20:39318415-39318878
  hyper
  lymphoid_neoplasm vs. thyroid
gggagggcgggctcgaggctccgagagttgtgttcagacccaactcttaacctcaggggacctttctcaggccaagcgagggcccctcctggcgggtgcagtcgcagagccctgaggttcgactccactggccccgccgctccccgcgttcaccccaccgcacaatgttcacagtgaaggcgacgggaaaagcagcagcccaaaggctctgaattcctcttccccgccacacgcacggaatcctgagcccccggagcctcggggccgaggccggcccgggacggtgctccgagtagctctccactgctggggagccggccctgtttttgtttgaacgttttgtaacgattaagcagatcccggcgtcagcccgccgcggagaggctcaaacaggcataaagtgcgaccccaagtggccactgtgcgcaaaggcgccgcgaccgcccggcccacggccggaagg

SEQ ID NO: 467110 - DNA, 92 bp, Homo sapiens
  chr20:39318786-39318878
  hyper
  lymphoid_neoplasm vs. non_cancer,thyroid
cgccgcggagaggctcaaacaggcataaagtgcgaccccaagtggccactgtgcgcaaaggcgccgcgaccgcccggcccacggccggaagg

SEQ ID NO: 467111 - DNA, 540 bp, Homo sapiens; identical to SEQ ID NO: 375128
  chr20:48100505-48101045
  hyper
  lymphoid_neoplasm vs. sarcoma

SEQ ID NO: 467112 - DNA, 571 bp, Homo sapiens
  chr20:50383675-50384246
  hyper
  lymphoid_neoplasm vs. liver_bileduct,colorectal,uterine, breast,anorectal,lung,thyroid,upper_gi,ovary
cgccgcgtctcctgttccgagcaactgacgctgcaataagcggccgccaccgggaaatgcccagagaggaccagacgcccgaggaagggcggagcagagcggccgcaggccccgcccaacaccgcgctcagcctcccgcgggctccagcctcacctgcgcggcctgtggagctgcacatctccaggccccgccccccagaactctgattggcgggtctaggcgggggccgggaaatctgcatttgcaccagcgcccacccccgtccttcccacccccgcccctcacgcccaggtaagtctatggcaggcgatacgagagccccgcaaacctcaacgcgtcacgctgccatcctccgaacaggaagacggcgaggcgcaaaataccaacccgtcccctcttcccaaatgcagaaaaacccttgcctgttccgcgcctaagctgccctcggggtctcctactgcgggaagggcacagcaggtggcagcccctgtcccagccgtgggattccttccccgaaattgtggggggagaacacaaggggtagtgtcaccaagcggccagtaggagacc

SEQ ID NO: 467113 - DNA, 85 bp, Homo sapiens; identical to SEQ ID NO: 345642
  chr20:50384400-50384485
  hyper
  lymphoid_neoplasm vs. liver_bileduct,colorectal,uterine, breast,anorectal,lung,thyroid,upper_gi,ovary

SEQ ID NO: 467114 - DNA, 249 bp, Homo sapiens
  chr20:50383997-50384246
  hyper
  lymphoid_neoplasm vs. upper_gi,liver_bileduct,breast, myeloid_neoplasm,anorectal,colorectal,bladder_and_urothelial, thyroid,lung,ovary,non_cancer,renal,cervical,head_and_neck
cgcaaacctcaacgcgtcacgctgccatcctccgaacaggaagacggcgaggcgcaaaataccaacccgtcccctcttcccaaatgcagaaaaacccttgcctgttccgcgcctaagctgccctcggggtctcctactgcgggaagggcacagcaggtggcagcccctgtcccagccgtgggattccttccccgaaattgtggggggagaacacaaggggtagtgtcaccaagcggccagtaggagacc

SEQ ID NO: 467115 - DNA, 250 bp, Homo sapiens
  chr20:50384400-50384650
  hyper
  lymphoid_neoplasm vs. upper_gi,liver_bileduct,breast, myeloid_neoplasm,anorectal,colorectal,bladder_and_urothelial, thyroid,lung,ovary,non_cancer,renal,cervical,head_and_neck
tgagcatatctgggctcccgagtaatgctccaagcgcagagctcggtgtgacactgaccaaattgttacctcagatattaattacggacagatattaattacggaacaataaaacggtgagaaagcacggctgatccgaattccgcgagtgtgtaaacagcactggggcgggcccggcttctcggggtttctaaaggaaggtgggcaaggaggcccaggcaaccgggcgctcgaaccccaaagggccggc

SEQ ID NO: 467116 - DNA, 68 bp, Homo sapiens
  chr20:50384928-50384996
  hyper
  lymphoid_neoplasm vs. upper_gi,liver_bileduct,breast, myeloid_neoplasm,anorectal,colorectal,bladder_and_urothelial, thyroid,lung,ovary,non_cancer,renal,cervical,head_and_neck
tggccgccgcgccccccgcgccgcctgggccgccgcccggtccggcctccgcgccgccgcccgccggc

SEQ ID NO: 467117 - DNA, 149 bp, Homo sapiens
  chr20:50384501-50384650
  hyper
  lymphoid_neoplasm vs. liver_bileduct,upper_gi,renal, bladder_and_urothelial,breast,anorectal,head_and_neck
cggaacaataaaacggtgagaaagcacggctgatccgaattccgcgagtgtgtaaacagcactggggcgggcccggcttctcggggtttctaaaggaaggtgggcaaggaggcccaggcaaccgggcgctcgaaccccaaagggccggc

SEQ ID NO: 467118 - DNA, 244 bp, Homo sapiens
  chr20:50384928-50385172
  hyper
  lymphoid_neoplasm vs. liver_bileduct,upper_gi,renal, bladder_and_urothelial,breast,anorectal,head_and_neck
tggccgccgcgccccccgcgccgcctgggccgccgcccggtccggcctccgcgccgccgcccgccggcgccgcgccgccccgggggaggaggcggcggcagcgggcgggccgggcccgcagcgagggggcgagctcgcgagcgccgggccacgcgcggagcgcccgcgcggcccgaccgacggacacgggcgcaccatgggcccgagctccgcgctgcgcccgctcgctccgcgccgcgccgcg

SEQ ID NO: 467119 - DNA, 87 bp, Homo sapiens; identical to SEQ ID NO: 347688
  chr20:50385230-50385317
  hyper
  lymphoid_neoplasm vs. liver_bileduct,upper_gi,renal, bladder_and_urothelial,breast,anorectal,head_and_neck

SEQ ID NO: 467120 - DNA, 61 bp, Homo sapiens
  chr20:53092081-53092142
  hyper
  lymphoid_neoplasm vs. myeloid_neoplasm,thyroid
ccccaccccttcctcctctttcctcctcctccttcctcctcctcctcctccttcttctcct

SEQ ID NO: 467121 - DNA, 20 bp, Homo sapiens
  chr20:55203829-55203849
  hyper
  lymphoid_neoplasm vs. anorectal
gggaactgggcgtctctggc

SEQ ID NO: 467122 - DNA, 276 bp, Homo sapiens
  chr20:55203829-55204105
  hyper
  lymphoid_neoplasm vs. anorectal,myeloid_neoplasm
gggaactgggcgtctctggcgcactggggctccagctgcatgatcccagctcagaccttaagcctcagtggggtgtaggtgggatgggatgtgtttttaggagatgaggagaccccggttgttgagtcgctccccaaatgcgcagtttcttaactccaggtgacatccgtcttttggaggaacgagtgaaggccgtttaggcgaaagaggggtgggtttcagtatttggatcccttcccccagctctgccaatctcaggtgtgtttacggtggagg

SEQ ID NO: 467123 - DNA, 161 bp, Homo sapiens
  chr20:55203944-55204105
  hyper
  lymphoid_neoplasm vs. cervical
cggttgttgagtcgctccccaaatgcgcagtttcttaactccaggtgacatccgtcttttggaggaacgagtgaaggccgtttaggcgaaagaggggtgggtttcagtatttggatcccttcccccagctctgccaatctcaggtgtgtttacggtggagg

SEQ ID NO: 467124 - DNA, 217 bp, Homo sapiens
  chr20:55205088-55205305
  hyper
  lymphoid_neoplasm vs. lung,breast
gaagcacgaaaacaaccgaagtttggctttcaaaagaagtgggggctggggagtggtggtgggggtgcccgaggccagatggggccgtaagagctcgcgagtgctccagcctgtcggacaggttgagctagagtttcggagagtgggagggaagaaggaggcggcgagcgggaagaggaagaagacgcaggcagcgctaggcgagctcaggggcgcc

SEQ ID NO: 467125 - DNA, 3 bp, Homo sapiens
  chr20:57875361-57875364
  hyper
  lymphoid_neoplasm vs. multiple_myeloma
cgc

SEQ ID NO: 467126 - DNA, 176 bp, Homo sapiens; identical to SEQ ID NO: 457936
  chr20:57875366-57875542
  hyper
  lymphoid_neoplasm vs. multiple_myeloma

SEQ ID NO: 467127 - DNA, 220 bp, Homo sapiens; identical to SEQ ID NO: 352521
  chr20:57875889-57876109
  hyper
  lymphoid_neoplasm vs. multiple_myeloma

SEQ ID NO: 467128 - DNA, 74 bp, Homo sapiens; identical to SEQ ID NO: 361931
  chr20:58180712-58180786
  hyper
  lymphoid_neoplasm vs. multiple_myeloma

SEQ ID NO: 467129 - DNA, 248 bp, Homo sapiens; identical to SEQ ID NO: 459641
  chr20:61810310-61810558
  hyper
  lymphoid_neoplasm vs. ovary

SEQ ID NO: 467130 - DNA, 1 bp, Homo sapiens
  chr20:62463400-62463401
  hyper
  lymphoid_neoplasm vs. colorectal,cervical
c

SEQ ID NO: 467131 - DNA, 106 bp, Homo sapiens
  chr21:28215837-28215943
  hyper
  lymphoid_neoplasm vs. cervical
cgtagcaggaaggaccggcagtgactttcaacagtgcttgagagcagaattatggccgcgagagggagtgcaaactgggaggcggggcaaacccgggaaagacctc

SEQ ID NO: 467132 - DNA, 227 bp, Homo sapiens
  chr21:28215997-28216224
  hyper
  lymphoid_neoplasm vs. cervical
tataagggggaaaggggacagaagtctgcagaacagagatcctagcgtagccgctcagggtaccttcccaggtcaccattgctcctctgccctctccacatccgccctcccgtgagcgcaggatgcacgcacaggcagcggttacaaaactcagcgcaacgttgcaacccgcacaaaaggcgcacacaaaatcattaaaaagaaatacacagagtggaaagaactcg

SEQ ID NO: 467133 - DNA, 28 bp, Homo sapiens
  chr21:38071764-38071792
  hyper
  lymphoid_neoplasm vs. upper_gi,head_and_neck,renal
cgagcaggaacggggctccggttgctgc

SEQ ID NO: 467134 - DNA, 112 bp, Homo sapiens
  chr21:38071905-38072017
  hyper
  lymphoid_neoplasm vs. upper_gi,head_and_neck,renal
ccccccgcacctgcccgcggcccactccgcggactcacctggctcccggctcccccttccccatccccgccgccgcagcccgagcggggctccgcgggcctggagcacggcc

SEQ ID NO: 467135 - DNA, 311 bp, Homo sapiens
  chr21:39288394-39288705
  hyper
  lymphoid_neoplasm vs. multiple_myeloma,lung,renal, melanoma
caggtccggcttcccggcgtccgcgggtctccacccctccgcccgcccagcctctccagccaggtgcggccgtctccggactggctccctctggccgagcgcggagagcagggctgggcgctggggccaagggaggggcggaggggcgcgcgtttgggcagggacgggggagggagactgggtggaatgaagtggggaaagataagagtggcagaagaaaaaaaaaatccccggttaggagaaaagtggtggaccacgcagagagacgtcatgaaatccgcagattcaatgaatgctactcaattccagcc

SEQ ID NO: 467136 - DNA, 6 bp, Homo sapiens
  chr21:39288901-39288907
  hyper
  lymphoid_neoplasm vs. multiple_myeloma,lung,renal, melanoma
aggacc

SEQ ID NO: 467137 - DNA, 290 bp, Homo sapiens
  chr21:39288415-39288705
  hyper
  lymphoid_neoplasm vs. multiple_myeloma,myeloid_neoplasm, non_cancer,uterine,prostate
cgcgggtctccacccctccgcccgcccagcctctccagccaggtgcggccgtctccggactggctccctctggccgagcgcggagagcagggctgggcgctggggccaagggaggggcggaggggcgcgcgtttgggcagggacgggggagggagactgggtggaatgaagtggggaaagataagagtggcagaagaaaaaaaaaatccccggttaggagaaaagtggtggaccacgcagagagacgtcatgaaatccgcagattcaatgaatgctactcaattccagcc

SEQ ID NO: 467138 - DNA, 280 bp, Homo sapiens
  chr21:39288901-39289181
  hyper
  lymphoid_neoplasm vs. multiple_myeloma,myeloid_neoplasm, non_cancer,uterine,prostate
aggaccgggcttggtgggggcgggctgggcacaaaccaacgtgcatcccccgccactggaaacgtgggtgctccatgctgggggaatcttttgggtttcggtccccgaccccccagtcccaacctttctcccagtgccactaagtaagttattcccggagaaacgcctggaaagcaggaaagagccgaagctcggggagcagttttgtctgctggttgtaggggttcggcttttagggttttgtgagataaggaaaaagaggctctgggcactgcctccc

SEQ ID NO: 467139 - DNA, 39 bp, Homo sapiens
  chr21:40032283-40032322
  hyper
  lymphoid_neoplasm vs. anorectal,sarcoma
cgagccgtccctcccggcgctggacgccccacctgtccc

SEQ ID NO: 467140 - DNA, 159 bp, Homo sapiens
  chr21:40032367-40032526
  hyper
  lymphoid_neoplasm vs. anorectal,sarcoma
cgctgccttcctccccgtccccgcagccgctgtagccagcgtgggagccgggcaggtcgcgtggggcgctggacttaccgagaggttagcgccgccgtcgggggagggcgtgtcccgcacgtgtgtgtccgcgcgtgtccgcgcccgcgtgtgccagcg

SEQ ID NO: 467141 - DNA, 65 bp, Homo sapiens; identical to SEQ ID NO: 361990
  chr21:40032848-40032913
  hyper
  lymphoid_neoplasm vs. anorectal,sarcoma

SEQ ID NO: 467142 - DNA, 136 bp, Homo sapiens; identical to SEQ ID NO: 462780
  chr21:40032971-40033107
  hyper
  lymphoid_neoplasm vs. sarcoma

SEQ ID NO: 467143 - DNA, 76 bp, Homo sapiens; identical to SEQ ID NO: 462781
  chr21:40033358-40033434
  hyper
  lymphoid_neoplasm vs. sarcoma

SEQ ID NO: 467144 - DNA, 141 bp, Homo sapiens; identical to SEQ ID NO: 361993
  chr21:40033449-40033590
  hyper
  lymphoid_neoplasm vs. sarcoma

SEQ ID NO: 467145 - DNA, 820 bp, Homo sapiens
  chr21:42879240-42880060
  hyper
  lymphoid_neoplasm vs. liver_bileduct
ccggcacggagcgcaagcggaggagccagaccggctcctcccgggcgggttcctgccggtgccgggtgtccaggaggccccggccctgatcgccgccagcgggtcgccgcaacggggcctgagtcgcgagcagtccctccccgagactgactggccgttcgcacctcgcccgggggccctccagcagcctggcccagcggtccccgccgcgccggccgtatcgttcccggcatctcagcgagtttccagtttctccctacctcagtagggaaccaagaagcagaaggagttcaggtaacactgcgggactgcagagatttcccccaaacaaagaagccaaccgacagcactcccagtcctcctccccaaagagaaaaggcgcaccggtgctcccaggcgggggccgtggagggcaggcggactaggagccagctttggggaccccgggggactctcttccaccaactggctagggactcgcaggaccacctgccccaacctcgcgatgccaagccaacaggggcggcgagggctctcggccgtgcgcaaggggtcccaggcgcccagcactctcccagcaccccgggaggcgccctgcccggctggccccagcgctcgaccctcgggcgcactcacctgccgcgccgcgctcctcacacccgctttcacctccgggcggggcagggggcatcggcgggtcccaggcgcccaggttcccctccccagcccggaccccgagccgggaccctggtaccggcgccgctcacctgccgcgctccaggcggcgctccccgcccctcgccctccgcctccgcctccg

SEQ ID NO: 467146 - DNA, 41 bp, Homo sapiens
  chr21:42880104-42880145
  hyper
  lymphoid_neoplasm vs. liver_bileduct
ctcgctttaatctcaggaggcggtgtcccagggtccagggc

SEQ ID NO: 467147 - DNA, 403 bp, Homo sapiens
  chr21:42879657-42880060
  hyper
  lymphoid_neoplasm vs. colorectal
cggactaggagccagctttggggaccccgggggactctcttccaccaactggctagggactcgcaggaccacctgccccaacctcgcgatgccaagccaacaggggcggcgagggctctcggccgtgcgcaaggggtcccaggcgcccagcactctcccagcaccccgggaggcgccctgcccggctggccccagcgctcgaccctcgggcgcactcacctgccgcgccgcgctcctcacacccgctttcacctccgggcggggcagggggcatcggcgggtcccaggcgcccaggttcccctccccagcccggaccccgagccgggaccctggtaccggcgccgctcacctgccgcgctccaggcggcgctccccgcccctcgccctccgcctccgcctccg

SEQ ID NO: 467148 - DNA, 122 bp, Homo sapiens
  chr21:42880104-42880226
  hyper
  lymphoid_neoplasm vs. colorectal
ctcgctttaatctcaggaggcggtgtcccagggtccagggcgacacccccaagcgggtcgcgggtcaccctgggcgggcgggggcgggggcggcgggaggaggcgtttcccaagggaagtcc

SEQ ID NO: 467149 - DNA, 143 bp, Homo sapiens
  chr21:42880260-42880403
  hyper
  lymphoid_neoplasm vs. colorectal
cggagggacccataagggactctggggcgcttcccgggcccggccacagcggccaacctgcccctctccggtccgcggcgcagcgctgcccgagggctcgagtttgggttaaggaaggggattctggggagcgctcctggagt

SEQ ID NO: 467150 - DNA, 114 bp, Homo sapiens
  chr21:43186321-43186435
  hyper
  lymphoid_neoplasm vs. upper_gi,multiple_myeloma,melanoma, colorectal,ovary,lung
cggcgaggaagcgctgggcggacggatcaacaccccgggccccgtgccggaccccactgccaggcccgagccccggagctccaccgcgcaagcgccgggcgcccgggaagcctc

SEQ ID NO: 467151 - DNA, 107 bp, Homo sapiens
  chr21:43186592-43186699
  hyper
  lymphoid_neoplasm vs. upper_gi,multiple_myeloma,melanoma, colorectal,ovary,lung
cgccccggtgggtcccgggcgggccggacgcgcctcccaagggcgcgggtccgaggcgcaaggcgagctggagaccccgaaaaccagggccactcggggagtgtcag

SEQ ID NO: 467152 - DNA, 213 bp, Homo sapiens
  chr21:43186889-43187102
  hyper
  lymphoid_neoplasm vs. upper_gi,multiple_myeloma,melanoma, colorectal,ovary,lung
ttggtttcccccccgaagctgctccgggggtgagttcgggagagagaggcaggaccccgggaccagagcaccccgaccccgaccccagcccgggccccagccgccccagcgccccgcccgggccgctcacctgtcgtcgacgtgcaggctgggcgagcacttgatggccagccaggtcttccagtggacatggcgcaccttgtacacctgccc

SEQ ID NO: 467153 - DNA, 92 bp, Homo sapiens
  chr21:43186607-43186699
  hyper
  lymphoid_neoplasm vs. ovary,pancreas_gallbladder,lung, head_and_neck,upper_gi,cervical,renal,colorectal,anorectal, myeloid_neoplasm,breast,thyroid,prostate,uterine,non_cancer
cgggcgggccggacgcgcctcccaagggcgcgggtccgaggcgcaaggcgagctggagaccccgaaaaccagggccactcggggagtgtcag

SEQ ID NO: 467154 - DNA, 493 bp, Homo sapiens; identical to SEQ ID NO: 347707
  chr21:43186889-43187382
  hyper
  lymphoid_neoplasm vs. ovary,pancreas_gallbladder,lung, head_and_neck,upper_gi,cervical,renal,colorectal,anorectal, myeloid_neoplasm,breast,thyroid,prostate,uterine,non_cancer

SEQ ID NO: 467155 - DNA, 225 bp, Homo sapiens
  chr21:45875732-45875957
  hyper
  lymphoid_neoplasm vs. upper_gi,breast
cgggccgcgcgcacagggcttggcttctctgttttctcggtttccttcttcaggcagttgaaagaaaaggcgcggttctgtgcccggtgcgagccgcggctcctttagggctggcagggaagggcttgctgggttatgacagtttttaggggttgtcggagtcagccaggcgttggctgctggagtagcccctggcgcgcgagcgcccgctggtgcccggccacg

SEQ ID NO: 467156 - DNA, 30 bp, Homo sapiens
  chr21:45875988-45876018
  hyper
  lymphoid_neoplasm vs. upper_gi,breast
agaagctgcagccgtcaccgtcctcctggc

SEQ ID NO: 467157 - DNA, 95 bp, Homo sapiens
  chr21:46825731-46825826
  hyper
  lymphoid_neoplasm vs. head_and_neck,renal,breast
tcacggcctcgtccccgcagcgccgggtcccgggactgaccgcgggcggaaggcggcggagcgcggggcgtcgtctccgcgtttccaacctgttg

SEQ ID NO: 467158 - DNA, 143 bp, Homo sapiens; identical to SEQ ID NO: 453174
  chr21:47063290-47063433
  hyper
  lymphoid_neoplasm vs. thyroid,non_cancer,melanoma

SEQ ID NO: 467159 - DNA, 241 bp, Homo sapiens
  chr22:25348202-25348443
  hyper
  lymphoid_neoplasm vs. upper_gi,prostate,lung, head_and_neck,breast,cervical,myeloid_neoplasm,anorectal, thyroid,non_cancer,liver_bileduct,ovary,uterine,sarcoma,renal, colorectal,pancreas_gallbladder,bladder_and_urothelial,melanoma
cgcgaggaggcgccagcaccgcgcacagaccttgcccgcccccgggccggcaccagcagcccaggcaagtcagtgggcccacatttatggagcgcctcctgaaatcctgggttgcattaggctctcggggtcgccggctgggcagcgggtcggtgccggtggcgggggatcctggctggtgactggggaacatccagggaacgcgggagggtacccggagcaaagttcccaattggacaga

SEQ ID NO: 467160 - DNA, 487 bp, Homo sapiens
  chr22:25348485-25348972
  hyper
  lymphoid_neoplasm vs. upper_gi,prostate,lung, head_and_neck,breast,cervical,myeloid_neoplasm,anorectal, thyroid,non_cancer,liver_bileduct,ovary,uterine,sarcoma,renal, colorectal,pancreas_gallbladder,bladder_and_urothelial,melanoma
tgtccaagcgagtcgtgacctctgacccgccggagaggtcccaggcccaggcgccactgcggactcgggtcctgcctgctctgctcccctccgcgcaggcgcggccggcggcagttcccatggtgacgggggcgcgtccccgctcgaggccccgcccccagcaggctaggctgcgcggggctgcgggctcccagggcaggtgccgcgggctgcgggcaggtggcggcgcggcgcgggctggcggtggctccacggtaggttgcgcagcggctgcgggcagtgggggccggctggccgcctcctgtccccggccgacgaggtagctgggggtgacggcggctggcgagggccgccaagtttctgcccggccgaggccccgggagaaaagttggcaaagttggccggggaagaggcggggagccggaggatttccccagactccgggtctgcagggagggaggatcccggtttgggagccggggaatcc

SEQ ID NO: 467161 - DNA, 788 bp, Homo sapiens
  chr22:25348485-25349273
  hyper
  lymphoid_neoplasm vs. cervical,head_and_neck,upper_gi, renal,thyroid,anorectal,colorectal,ovary,melanoma,lung,uterine, non_cancer,prostate,breast,myeloid_neoplasm,liver_bileduct
tgtccaagcgagtcgtgacctctgacccgccggagaggtcccaggcccaggcgccactgcggactcgggtcctgcctgctctgctcccctccgcgcaggcgcggccggcggcagttcccatggtgacgggggcgcgtccccgctcgaggccccgcccccagcaggctaggctgcgcggggctgcgggctcccagggcaggtgccgcgggctgcgggcaggtggcggcgcggcgcgggctggcggtggctccacggtaggttgcgcagcggctgcgggcagtgggggccggctggccgcctcctgtccccggccgacgaggtagctgggggtgacggcggctggcgagggccgccaagtttctgcccggccgaggccccgggagaaaagttggcaaagttggccggggaagaggcggggagccggaggatttccccagactccgggtctgcagggagggaggatcccggtttgggagccggggaatccgtctcccgagacttgagagtggatcccgcgggaagatcccgcacagggcaaccaatggatcacgtgccacctggttggcgacttgggagtcgatccctggaggggatcgggcgctggaggcctggggtcccactggatccccagtcaggggtgacggcgaagggtgattcgagactgggagcgagaggatcaatctcctcccatgccagcctgagccttgggaatggattcagagagatcccgtggctaggagctgagggatcgctggagatctgggttactcagcctggagctgctaggg

SEQ ID NO: 467162 - DNA, 125 bp, Homo sapiens; identical to SEQ ID NO: 345656
  chr22:25349348-25349473
  hyper
  lymphoid_neoplasm vs. cervical,head_and_neck,upper_gi, renal,thyroid,anorectal,colorectal,ovary,melanoma,lung,uterine, non_cancer,prostate,breast,myeloid_neoplasm,liver_bileduct

SEQ ID NO: 467163 - DNA, 295 bp, Homo sapiens
  chr22:25348978-25349273
  hyper
  lymphoid_neoplasm vs. upper_gi,colorectal, bladder_and_urothelial,multiple_myeloma,renal
cgagacttgagagtggatcccgcgggaagatcccgcacagggcaaccaatggatcacgtgccacctggttggcgacttgggagtcgatccctggaggggatcgggcgctggaggcctggggtcccactggatccccagtcaggggtgacggcgaagggtgattcgagactgggagcgagaggatcaatctcctcccatgccagcctgagccttgggaatggattcagagagatcccgtggctaggagctgagggatcgctggagatctgggttactcagcctggagctgctaggg

SEQ ID NO: 467164 - DNA, 395 bp, Homo sapiens; identical to SEQ ID NO: 352589
  chr22:25349348-25349743
  hyper
  lymphoid_neoplasm vs. upper_gi,colorectal, bladder_and_urothelial,multiple_myeloma,renal

SEQ ID NO: 467165 - DNA, 49 bp, Homo sapiens
  chr22:31198444-31198493
  hyper
  lymphoid_neoplasm vs. uterine,colorectal,upper_gi
cgtggaccatccgagggcccctcccctgctgggtccaggcaaagggccg

SEQ ID NO: 467166 - DNA, 395 bp, Homo sapiens; identical to SEQ ID NO: 362057
  chr22:31198752-31199147
  hyper
  lymphoid_neoplasm vs. uterine,colorectal,upper_gi

SEQ ID NO: 467167 - DNA, 82 bp, Homo sapiens; identical to SEQ ID NO: 461010
  chr22:32571858-32571940
  hyper
  lymphoid_neoplasm vs. multiple_myeloma

SEQ ID NO: 467168 - DNA, 5 bp, Homo sapiens
  chr22:33197380-33197385
  hyper
cgtgg

SEQ ID NO: 467169 - DNA, 15 bp, Homo sapiens
  chr22:39953450-39953465
  hyper
  lymphoid_neoplasm vs. prostate
cgccgccgtcagtct

SEQ ID NO: 467170 - DNA, 127 bp, Homo sapiens; identical to SEQ ID NO: 362072
  chr22:39954151-39954278
  hyper
  lymphoid_neoplasm vs. prostate

SEQ ID NO: 467171 - DNA, 3 bp, Homo sapiens
  chr22:44257996-44257999
  hyper
  lymphoid_neoplasm vs. sarcoma,melanoma,ovary, myeloid_neoplasm,uterine,non_cancer,breast,prostate
cgg

SEQ ID NO: 467172 - DNA, 203 bp, Homo sapiens
  chr22:44258078-44258281
  hyper
  lymphoid_neoplasm vs. sarcoma,melanoma,ovary, myeloid_neoplasm,uterine,non_cancer,breast,prostate
cggcgcggggctcaccggacttggggtaggtgacgatccacacgtcgctgggccgcaccgggaagttggcgatctcctccatcttcccgcggcagaagggcggcagccgcacgccatggaactcgaagtacttgctctcgaactcccccggggtgctgggggtctcggcctcgctctccgccatgccgccgccgtcgccgtcg

SEQ ID NO: 467173 - DNA, 41 bp, Homo sapiens; identical to SEQ ID NO: 352622
  chr22:44258533-44258574
  hyper
  lymphoid_neoplasm vs. sarcoma,melanoma,ovary, myeloid_neoplasm,uterine,non_cancer,breast,prostate

SEQ ID NO: 467174 - DNA, 304 bp, Homo sapiens
  chr22:44727058-44727362
  hyper
  lymphoid_neoplasm vs. lung,sarcoma,ovary
cgccggcgcggaccccagtgccgaacaccggctgtcccgcacggttcctgcccccggacccttccccggtcgtccccagcccctttctaaagagccccggacccccgtcatatgccccttacccgcctctcccaaagcgcccacccttcaccccttctccggagccccgcgccgcagaccccgccccccactcgcccagaccctcctccgccaggagctccgccccggcccctttccccgccgctctcggaccccggcccaggcgcgcccctcccccgcgcggcccccgccctgcccgccccgg

SEQ ID NO: 467175 - DNA, 649 bp, Homo sapiens; identical to SEQ ID NO: 352625
  chr22:44893737-44894386
  hyper
  lymphoid_neoplasm vs. lung,pancreas_gallbladder,prostate

SEQ ID NO: 467176 - DNA, 35 bp, Homo sapiens
  chr22:45064203-45064238
  hyper
  lymphoid_neoplasm vs. anorectal,prostate,uterine,breast, thyroid,ovary,renal,bladder_and_urothelial,non_cancer
gtctgaccgtctgatttgtcctcccggcttctagc

SEQ ID NO: 467177 - DNA, 390 bp, Homo sapiens
  chr22:45064286-45064676
  hyper
  lymphoid_neoplasm vs. anorectal,prostate,uterine,breast, thyroid,ovary,renal,bladder_and_urothelial,non_cancer
cggcccgccgaggggtggggtgagggcgtcacgggccgatccgggccgccgggtgacccgggacgccccctgccccggcgggcgccgcccacagcctgcgcagtgctcaggggcggaggccgggagggggcccaagcgccagccccccagctccggcggacccgggtgggcgtgcccgcggacccgcttgccgcacttaggcgagtctcccctgcagcgccccgagtccctgggggctgcggcggctgcgggcgcccccgcgcgggcccgaggggcgggacgcggcggagcggggcggggcggggcctccgcggccccctcccccggccccgggctccggctccggctccggctctggctctgcgcggtggcagcggcggcggcggcgcg

SEQ ID NO: 467178 - DNA, 147 bp, Homo sapiens; identical to SEQ ID NO: 352628
  chr22:45064918-45065065
  hyper
  lymphoid_neoplasm vs. anorectal,prostate,uterine,breast, thyroid,ovary,renal,bladder_and_urothelial,non_cancer

SEQ ID NO: 467179 - DNA, 554 bp, Homo sapiens
  chr22:45097777-45098331
  hyper
  lymphoid_neoplasm vs. upper_gi,pancreas_gallbladder, uterine,non_cancer,breast,bladder_and_urothelial,colorectal, anorectal,lung,renal,thyroid,prostate,myeloid_neoplasm,ovary, head_and_neck,cervical,melanoma,liver_bileduct
cgtgtgggcgcgaccgcagtgctgggcggggggcgggcgcttgggcttgggccctgcgtcctgtgcgtgttggtttcctgtgggcacgtggggccctcggaagaggggaggagggtgagcacgtcctcagagggcagacccagcgaggcgtcgtggcagctgcggccgcggagacgccggctccgcctcttgcacacgccccctcgcctgaggccccgccccgcccgcgatgcccccgcccccttccccgccccgccccccggggcgccgagacccgcccctgggcccgcccccgggtccgcccccggcctccgtttgcgccgggtctgtgctggccgcgcgcctggcgctccacgctgagcctctccgtgcaatgattaacccggcggggcggccggcgcgggacccgagacggaggcgcggggccggggcgggaccccgcaggaccgctcggcttcctgctctcgccggagtttccgcgtagagggcgcatcgccggcccggggcccttggtgcggcgtggcgcagggcgcggcgtggggcgcgcgtgggcg

SEQ ID NO: 467180 - DNA, 254 bp, Homo sapiens
  chr22:45098381-45098635
  hyper
  lymphoid_neoplasm vs. upper_gi,pancreas_gallbladder, uterine,non_cancer,breast,bladder_and_urothelial,colorectal, anorectal,lung,renal,thyroid,prostate,myeloid_neoplasm,ovary, head_and_neck,cervical,melanoma,liver_bileduct
atgagttcgcccagcctcagtgacctgggcaagagagagccggccgccgccgcggacgagcggggcacgcagcagcgccgggcctgcgccaacgccacctggaacaggtaaggccgcgccctcccggccacccggaggccctggagccgggggaggggacccctgagccgtccgcgggctaggggccgccccgagccaggaacgctgccgaaggcggcgcggcgcttcacagtttgcaaagaacttgccccgcc

SEQ ID NO: 467181 - DNA, 187 bp, Homo sapiens
  chr22:45098144-45098331
  hyper
  lymphoid_neoplasm vs. pancreas_gallbladder,upper_gi, colorectal,uterine,breast,non_cancer,bladder_and_urothelial, myeloid_neoplasm,lung,prostate,liver_bileduct,renal,anorectal, thyroid,head_and_neck,ovary,cervical,melanoma
cgtgcaatgattaacccggcggggcggccggcgcgggacccgagacggaggcgcggggccggggcgggaccccgcaggaccgctcggcttcctgctctcgccggagtttccgcgtagagggcgcatcgccggcccggggcccttggtgcggcgtggcgcagggcgcggcgtggggcgcgcgtgggcg

SEQ ID NO: 467182 - DNA, 471 bp, Homo sapiens
  chr22:45098381-45098852
  hyper
  lymphoid_neoplasm vs. pancreas_gallbladder,upper_gi, colorectal,uterine,breast,non_cancer,bladder_and_urothelial, myeloid_neoplasm,lung,prostate,liver_bileduct,renal,anorectal, thyroid,head_and_neck,ovary,cervical,melanoma
atgagttcgcccagcctcagtgacctgggcaagagagagccggccgccgccgcggacgagcggggcacgcagcagcgccgggcctgcgccaacgccacctggaacaggtaaggccgcgccctcccggccacccggaggccctggagccgggggaggggacccctgagccgtccgcgggctaggggccgccccgagccaggaacgctgccgaaggcggcgcggcgcttcacagtttgcaaagaacttgccccgccggagtggtgcgggcctggaggaaagttcagtgcagcgtggttccagaacccagggaagggagcgaggcccgccagcgcccggggctggcccagaagcgcccggcgggtgggcggcggggtgggccgggaagccgcgtgcccgcctcctacccggggtctttccacgtctccactgcggtgctcgtgacaacctgggaggctaacggagcaggaagta

SEQ ID NO: 467183 - DNA, 97 bp, Homo sapiens; identical to SEQ ID NO: 345664
  chr22:45098900-45098997
  hyper
  lymphoid_neoplasm vs. pancreas_gallbladder,upper_gi, colorectal,uterine,breast,non_cancer,bladder_and_urothelial, myeloid_neoplasm,lung,prostate,liver_bileduct,renal,anorectal, thyroid,head_and_neck,ovary,cervical,melanoma

SEQ ID NO: 467184 - DNA, 445 bp, Homo sapiens
  chr22:45148213-45148658
  hyper
  lymphoid_neoplasm vs. bladder_and_urothelial,uterine, pancreas_gallbladder,breast,upper_gi,ovary,head_and_neck,lung, anorectal,multiple_myeloma,colorectal,thyroid,cervical,renal, non_cancer
cgtgcgggacggggacgcggcccagccgggaatcggggtgcccagggtgcgatgtgcgaggggctcctgagcgcgtgtgctccgcccgaccccgccctgtccccccgacacacaggtggacccagggtcagctcgtgcacctgggaaatggctcccgccgggtagcaggggcggaggggcggggctgggcggaggggcgggggggcggggcctgcccgggagccacgtccggggaggggccaggtgagcggcagacccggcacgcaggtgggggccggcggggtccgtggccaggtaaggcgggcggcggcgggagggagcgcgcagggaggaggccgtgctcggggtgggggggtgcgccgcgggggctcccagggcgtgtacggggacaaggggccgctggccgggtagggacgcccaggcgggcgcgacgccacgtgcggcc

SEQ ID NO: 467185 - DNA, 155 bp, Homo sapiens; identical to SEQ ID NO: 352633
  chr22:45148870-45149025
  hyper
  lymphoid_neoplasm vs. bladder_and_urothelial,uterine, pancreas_gallbladder,breast,upper_gi,ovary,head_and_neck,lung, anorectal,multiple_myeloma,colorectal,thyroid,cervical,renal, non_cancer

SEQ ID NO: 467186 - DNA, 290 bp, Homo sapiens
  chr22:45403189-45403479
  hyper
  lymphoid_neoplasm vs. ovary,sarcoma,myeloid_neoplasm, anorectal,non_cancer,prostate
ttctctctcgccagggtcaccggcagccgccccaacctcgtccacgtctctcccctacgccagaaaatcccccgggggagggggcgtccgatccggcggcccgggctggggtgggagcgcgggggcaggcccgggcgggggcgcgcgggggcgggcccggagctgtccaagtttggcgctggcggctgcggccggcattccgaaggaaacgcgatcgatggccgggggcgcggcgcgggcgggggcggggcgcgaaggagggagggagggggcagcggagggagggaggg

SEQ ID NO: 467187 - DNA, 113 bp, Homo sapiens
  chr22:45899073-45899186
  hyper
  lymphoid_neoplasm vs. cervical
agcgccgaggcctcggcgacgcccccctcccccacggccagctccggtcctcatctcctccccggcctggggacttgtttcaaaaccggattcccccacccctcaaacacacc

SEQ ID NO: 467188 - DNA, 1 bp, Homo sapiens
  chr22:45899227-45899228
  hyper
  lymphoid_neoplasm vs. cervical
c

SEQ ID NO: 467189 - DNA, 10 bp, Homo sapiens
  chr22:46262409-46262419
  hyper
  lymphoid_neoplasm vs. cervical
cgggtgctgg

SEQ ID NO: 467190 - DNA, 428 bp, Homo sapiens
  chr3:12329055-12329483
  hyper
  lymphoid_neoplasm vs. multiple_myeloma, bladder_and_urothelial,uterine,upper_gi,pancreas_gallbladder, colorectal,renal
cggtctccccagaccggccctggccgggggcatccccctaaacttcggatccctcctcggaaatgggaccctctctgggccgcctcccagcggtggtggcgaggagcaaacgacaccaggtagcctgccgcggggcagagagtggacgcgggaaagccggtggctcccgccgtgggccctactgtgcgcgggcggcggccgagcccgggccgctccctcccagtcgcgcgccgccgcccccgcccccgcccccgcccccgcccccacccccacccccacccccacccccagccggcgcccgcgcccgcccccgcgccgggcccggctcggcccgacccggctccgccgcgggcaggcggggcccagcgcactcggagcccgagcccgagccgcagccgccgcctggggcgcttgggtcggcctcgagg

SEQ ID NO: 467191 - DNA, 20 bp, Homo sapiens
  chr3:12329463-12329483
  hyper
  lymphoid_neoplasm vs. bladder_and_urothelial, multiple_myeloma,upper_gi
cgcttgggtcggcctcgagg

SEQ ID NO: 467192 - DNA, 206 bp, Homo sapiens
  chr3:12330025-12330231
  hyper
  lymphoid_neoplasm vs. bladder_and_urothelial, multiple_myeloma,upper_gi
gcagggtgtctggacccggggaagcgaagatccgcgtgcgtccgtcctgaggccgcgcggcacccctgctgaggaggaggtcccgttcgctgtccagagcccaggggcgaccgccgcttggggaccgggggaccgttcagcgaggggcgcgcttgtagctggccaggccctgtgccctgacgcgttgtgctggccctacgcccggc

SEQ ID NO: 467193 - DNA, 80 bp, Homo sapiens; identical to SEQ ID NO: 349733
  chr3:12330283-12330363
  hyper
  lymphoid_neoplasm vs. bladder_and_urothelial, multiple_myeloma,upper_gi

SEQ ID NO: 467194 - DNA, 202 bp, Homo sapiens
  chr3:13920779-13920981
  hyper
  lymphoid_neoplasm vs. bladder_and_urothelial
gactgcccagtctctaggaacggctgtgccgcgcctcctgagagagttcgtctcgggctccggggactgagctccccgagattggctgtggtcctggcttgatgttcctgctagacctgctgtccctatgcccgggtccgaagggtccccgggatgggctgaacctttgcagcagctagccctcccccagagtccctcaggc

SEQ ID NO: 467195 - DNA, 202 bp, Homo sapiens; identical to SEQ ID NO: 467194
  chr3:13920779-13920981
  hyper
  lymphoid_neoplasm vs. multiple_myeloma

SEQ ID NO: 467196 - DNA, 138 bp, Homo sapiens; identical to SEQ ID NO: 357550
  chr3:13921903-13922041
  hyper
  lymphoid_neoplasm vs. bladder_and_urothelial

SEQ ID NO: 467197 - DNA, 479 bp, Homo sapiens
  chr3:13936742-13937221
  hyper
  lymphoid_neoplasm vs. anorectal,colorectal,uterine, non_cancer,ovary,bladder_and_urothelial
cgacgcaacccgctgtgggccgaaacgggagctaagccagatggaacaaacgacccccaacccgagcccggcggggcgaacaggacatcccgcgttgttccacctgccaaagagggcgagcgcgcgggccgatcggagcagagcgagagggcggggccaagcggagcggatggggccaagtggacgagccgagggagtggggcgcagccgaaagtagccgagtgaagccgaacagagacgaggcgcgggtcgggtggtgccaagcggaaatgagtggggccgagcggggcagggtggagccgagcggagccgggtggagccgagcggagccgagcgagtgagaagccggaggccgagagggccgggccgacttgaagaggtggggattgctgagggctggtctgtcggctctggaaatcctgtcatactgtcacttttggattccgccgtttccgtcccaacggaaaactggggctcct

SEQ ID NO: 467198 - DNA, 124 bp, Homo sapiens; identical to SEQ ID NO: 349739
  chr3:13937250-13937374
  hyper
  lymphoid_neoplasm vs. anorectal,colorectal,uterine, non_cancer,ovary,bladder_and_urothelial

SEQ ID NO: 467199 - DNA, 79 bp, Homo sapiens
  chr3:14644635-14644714
  hyper
  lymphoid_neoplasm vs. liver_bileduct
cggggcggccgccaggcgctccgctccggctcccgagcccgcggctgagcagctacgcttttcgagcgcgcgctttccc

SEQ ID NO: 467200 - DNA, 54 bp, Homo sapiens; identical to SEQ ID NO: 357556
  chr3:14644749-14644803
  hyper
  lymphoid_neoplasm vs. liver_bileduct

SEQ ID NO: 467201 - DNA, 159 bp, Homo sapiens
  chr3:24870844-24871003
  hyper
  lymphoid_neoplasm vs. ovary,renal,anorectal,prostate
gcacagccagcgggcggcgcgccgcggactccaaggcagcccgccaaaaggtaaagccaggagagcgcgctggcgggtcttcctgttgggtggctgctgtccaagcccctagcgtccccggagccccaagctgggtctggaagaccagggcatttgcat

SEQ ID NO: 467202 - DNA, 349 bp, Homo sapiens; identical to SEQ ID NO: 357568
  chr3:24871245-24871594
  hyper
  lymphoid_neoplasm vs. ovary,renal,anorectal,prostate

SEQ ID NO: 467203 - DNA, 30 bp, Homo sapiens; identical to SEQ ID NO: 462803
  chr3:32860277-32860307
  hyper
  lymphoid_neoplasm vs. thyroid,non_cancer

SEQ ID NO: 467204 - DNA, 94 bp, Homo sapiens
  chr3:37901953-37902047
  hyper
  lymphoid_neoplasm vs. melanoma,lung,upper_gi
gcgcgcgcaacctagcaggcggaggcaagcagctcttcgcctcaggccgcccactgaaccctgcccaccgacgtcgcgccctgtaggccctccc

SEQ ID NO: 467205 - DNA, 424 bp, Homo sapiens
  chr3:37902095-37902519
  hyper
  lymphoid_neoplasm vs. melanoma,lung,upper_gi
cccgagcccgccctcctgcggcactaccccgcccccccggcttacggggctgcagagtgtggcctgcaagttggaagcgcaggacgcgggcgtccaaaggccccgacgctcccaggctgaggaggcactttgtcgtctctcccacgctctggccgtcgtcctaggcctgacagtggccagctgccttgcacaagcacagtccctgccagacttggtctgccaccagcgccttccgctcttctgccctcgacggactcccccggtccccttgctgcacagcacccgaaaatgcccactgcccaggcccctctcagtcacgacaccctcacgtgcaggaggttggtccttcaggacccgccgcccctcacgcgggctctggggccgaatgctgacgcgagtcccgccagcatccgaacaacctgag

SEQ ID NO: 467206 - DNA, 255 bp, Homo sapiens; identical to SEQ ID NO: 357584
  chr3:37902584-37902839
  hyper
  lymphoid_neoplasm vs. melanoma,lung,upper_gi

SEQ ID NO: 467207 - DNA, 42 bp, Homo sapiens
  chr3:38070629-38070671
  hyper
  lymphoid_neoplasm vs. cervical
cgttcttggatgctgtttccttccttcgccgcccctccgtgc

SEQ ID NO: 467208 - DNA, 494 bp, Homo sapiens
  chr3:39850742-39851236
  hyper
  lymphoid_neoplasm vs. uterine,colorectal, myeloid_neoplasm,breast,thyroid,ovary,non_cancer
cggggaaggacctggagtcgcacatgggggctcccgaaccgcggccccaatactgcactgcgccgcagggaagagccccgggaggggcgcgggtccccgccccgggcgcgcgcagccctgccccgcctcctcccggtgcgccccgcccctcccggcgcgtgccgcccgcgcgcccgaggtgctctggaggaaccggcccggcgggcaccccctgccccggcgcaggcgcgatcgcgggccgcccctcccgccgggcgccctgcacgcgcccccgccccgcctccgcaggctcccccgctccgggcgcctctgattggctctcggccgggccagcaggtgtcggcggtggctgcggccaggctggccctggctgcctgcggcgcgggcgcctccctcgcagccgctgctgccgacgccgctgcgctcccgcctcctgtcggttcccgggttcccgctgcggctgcggttctggcagccgagcccccgcggtgctg

SEQ ID NO: 467209 - DNA, 18 bp, Homo sapiens
  chr3:39851218-39851236
  hyper
  lymphoid_neoplasm vs. uterine,myeloid_neoplasm, non_cancer,thyroid
cgagcccccgcggtgctg

SEQ ID NO: 467210 - DNA, 244 bp, Homo sapiens
  chr3:43147038-43147282
  hyper
  lymphoid_neoplasm vs. sarcoma,melanoma,thyroid, multiple_myeloma,lung,breast,pancreas_gallbladder,non_cancer, renal,uterine,bladder_and_urothelial,ovary,head_and_neck, prostate,upper_gi,anorectal,cervical,liver_bileduct,colorectal,
  CONT. FROM ABOVE: myeloid_neoplasm
cgttgcccaggtccccggcccccggcccccgacccccaatccccggcccccgaccctgagggtccacccccgccccgcccacctcccgcgcctccctcagctcgcttcacacgtcacccctcagttctgcaaactctcctggatcccgaaggcgtcctagaacctccccctcaccccggggcccagcaccgcgtcgtcccctccagggggccgagggttcgacacctccacttcaagtcccagg

SEQ ID NO: 467211 - DNA, 105 bp, Homo sapiens; identical to SEQ ID NO: 345089
  chr3:43147607-43147712
  hyper
  lymphoid_neoplasm vs. sarcoma,melanoma,thyroid, multiple_myeloma,lung,breast,pancreas_gallbladder,non_cancer, renal,uterine,bladder_and_urothelial,ovary,head_and_neck, prostate,upper_gi,anorectal,cervical,liver_bileduct,colorectal,
  CONT. FROM ABOVE: myeloid_neoplasm

SEQ ID NO: 467212 - DNA, 366 bp, Homo sapiens
  chr3:45186931-45187297
  hyper
  lymphoid_neoplasm vs. lung,head_and_neck,upper_gi
cgtgttggtcccttcccccaaccgaaacaactcgaaattcacacatatccccggaacaacagcctcctgccctcaaagtccactgccaaaaagtgcgaggggcgcgggaatgtccagtctctgcggtggcgcagatgcctggcggctttctctgggaccccctaaaagaaatccgggcgctttcatttttgcaccaacgctcttcaactttaggagagggggaatgcagcgtgcggacgggaaaaaggggatctagtgggaaatgcggacgtgaaagcactttttttgcaccttctctctggaccaggcgaggaggtagagggcgagcctggagaggaaagatctcttcccacaccctgcctgggt

SEQ ID NO: 467213 - DNA, 9 bp, Homo sapiens
  chr3:45188139-45188148
  hyper
  lymphoid_neoplasm vs. colorectal,lung,upper_gi, pancreas_gallbladder,anorectal,uterine,bladder_and_urothelial
gcgaaggtc

SEQ ID NO: 467214 - DNA, 389 bp, Homo sapiens; identical to SEQ ID NO: 349782
  chr3:64430905-64431294
  hyper
  lymphoid_neoplasm vs. lung,bladder_and_urothelial, anorectal,myeloid_neoplasm

SEQ ID NO: 467215 - DNA, 307 bp, Homo sapiens
  chr3:64671732-64672039
  hyper
  lymphoid_neoplasm vs. pancreas_gallbladder, liver_bileduct
tgagagaaagcggggactctagattacgcaccgccctccacaacacacactgaaggaactcccagtgccttgggcaggggatcctcagccccacatccccgatgcaaggcgcaccaataaggagtctggtccgccctgcgctcagcggctccgctcccgggtggccaagtttgctgcagggaaccgcaactccagtaactttctccgagtttggaaactgacttccaggccgcctcgcagcgttgggcaacgcgccgctgaaccgagtccaaactccagaaagctctgaaacatccagaagcccctg

SEQ ID NO: 467216 - DNA, 208 bp, Homo sapiens; identical to SEQ ID NO: 370133
  chr3:64672413-64672621
  hyper
  lymphoid_neoplasm vs. pancreas_gallbladder, liver_bileduct

SEQ ID NO: 467217 - DNA, 130 bp, Homo sapiens
  chr3:64673134-64673264
  hyper
  lymphoid_neoplasm vs. bladder_and_urothelial
cgctgcggggtgcccctgcccaggagcgaggaccgggaggcggcgtcggggccggcggggtcccgggggccggagcctggttaccttgcctcgggtgcagcctgtccttgcgcacggccgccgcggcgtc

SEQ ID NO: 467218 - DNA, 507 bp, Homo sapiens; identical to SEQ ID NO: 357632
  chr3:64673419-64673926
  hyper
  lymphoid_neoplasm vs. bladder_and_urothelial

SEQ ID NO: 467219 - DNA, 970 bp, Homo sapiens; identical to SEQ ID NO: 346569
  chr3:66024122-66025092
  hyper
  lymphoid_neoplasm vs. breast,uterine,colorectal,thyroid, upper_gi,renal,lung,prostate,pancreas_gallbladder,non_cancer, liver_bileduct,cervical

SEQ ID NO: 467220 - DNA, 847 bp, Homo sapiens
  chr3:66024594-66025441
  hyper
  lymphoid_neoplasm vs. breast,colorectal,liver_bileduct, upper_gi,pancreas_gallbladder,thyroid,non_cancer
cgccccgcggccgccagccggccggcccacccctcccctcctccccgaagggagagattccaacgtgcttcccgatgggtcctaaaaccgacctgccgggagaaggcaactcccccccaacccttcctgaacccctatcctctctccttttctttcagtgccctggactccgcggattcctttggggctggagggccgcacacgtgttttactccaactgtttgcaacttttgaaacccgggcaatctggctttggcatttgaaaaccatttcaaacaggtgggggttggggaggctgccacactcaccctggcgctcacactcacgcacacgcgcacgcactcgcgccggccctaagcctcctaaccgccctcggccagtggctggccaggctgtcggtcacccagcccggctggttcgccgccccccttgccgcaggtcccactgaaacccccgagacccgccccggggcgctcgccgcctccctgcctgccctgcgcttgcgggttcgggtcctggcgcggggtctgccagggtctctgcgacccgggggagggggacggtgggatcctccggttccccaactgggatccctgtgcgggtcacacgcgctcttacacacacccgcatccttaaactttgggaccaactttttaggacacgggaaactacaggcaagagagagaagccatggtgctagtgtgggttcaggtattcaaccaaaaaagagatccctctagcttttcaactgccctgccagcagagactgctggacccagtcaatcatctgccccggcctcaagttcctggcagggccgagaagcctgcggacctactccggggccag

SEQ ID NO: 467221 - DNA, 56 bp, Homo sapiens; identical to SEQ ID NO: 349784
  chr3:66025506-66025562
  hyper
  lymphoid_neoplasm vs. breast,colorectal,liver_bileduct, upper_gi,pancreas_gallbladder,thyroid,non_cancer

SEQ ID NO: 467222 - DNA, 778 bp, Homo sapiens; identical to SEQ ID NO: 331805
  chr3:69788429-69789207
  hyper
  lymphoid_neoplasm vs. bladder_and_urothelial

SEQ ID NO: 467223 - DNA, 61 bp, Homo sapiens
  chr3:71802788-71802849
  hyper
  lymphoid_neoplasm vs. breast,ovary,sarcoma, bladder_and_urothelial,uterine,anorectal,prostate
agggggctccgcggcggcggcggcggcggcggcagcggcggcagcggcggcggcgggcccg

SEQ ID NO: 467224 - DNA, 245 bp, Homo sapiens
  chr3:87841814-87842059
  hyper
  lymphoid_neoplasm vs. bladder_and_urothelial
cgccccggacccgcaagggcggcgcaagacttccccagcgcgcagtcagcgtcgcggccccgaaagctggcgacaggcgctgctgtcttcccgccccgtggggtcgcccctgccctcccgcgccccggggctgggggcgccaccttgccagctccgactgctgcagggagcgccaggggtgagtgtgcggatcagcgctgagcccgggagtgcgggtcacgcccgcagctggcgcgcaggtgggg

SEQ ID NO: 467225 - DNA, 302 bp, Homo sapiens; identical to SEQ ID NO: 370154
  chr3:87842412-87842714
  hyper
  lymphoid_neoplasm vs. bladder_and_urothelial

SEQ ID NO: 467226 - DNA, 281 bp, Homo sapiens
  chr3:98619774-98620055
  hyper
  lymphoid_neoplasm vs. sarcoma,thyroid,cervical, myeloid_neoplasm,anorectal,melanoma,lung,ovary,head_and_neck, uterine,prostate,non_cancer,breast,renal,colorectal
cgcgccaacttgggggacagacgggcaagaccttgcctttgcaactcaaccccgtgagtacccagccaggtccggccacgcacgaaagcgcaccgcgcctccctgcagcgtctgcagatttgttcaggggccaagagacccgcagccccgacggaggttcccccgccgctcactcccctgggaccactcaccttgctgggctccagcgtcctcgagcagcaggagcaggacaagtaagagcaggaggaacagaggcatggagaaggaggaggagttggagc

SEQ ID NO: 467227 - DNA, 58 bp, Homo sapiens; identical to SEQ ID NO: 345096
  chr3:98621126-98621184
  hyper
  lymphoid_neoplasm vs. head_and_neck,myeloid_neoplasm, melanoma,uterine,lung,sarcoma,anorectal,cervical,non_cancer, pancreas_gallbladder,renal,thyroid,ovary,colorectal,breast

SEQ ID NO: 467228 - DNA, 505 bp, Homo sapiens
  chr3:110789734-110790239
  hyper
  lymphoid_neoplasm vs. liver_bileduct
aaatccatggcctcctgttgccagtcgcccggcgcggaaagtggacagcccagcggccagtgagaagcaagagcaagaaagcaaaccttctgaagacccctctcctcgcccagctccgccgaccattctaccaagctgccctcccagaaaaaagagcaggaaaaatgcctgtgcaaacgtgccttggcgagcggggaataagtgggctgggaagaagggaaggattcggagagcacagctgtcccggggaacaggaaggaggagaaagtctctccctcccttcagtgccccgcgccccagcgaggaggaagattactagtccagcaggctgcgtccagcttcctacacaggaacctttagcatgggcaacggaagggcagccccctcctgccttcccctccccaccccaccccctcgtcccaggtccccgccacagggagagcgccgcccgggagaggagaaggccgagcgtgattgtcccgcagccctcgcctcagtcggcgcc

SEQ ID NO: 467229 - DNA, 883 bp, Homo sapiens
  chr3:110789759-110790642
  hyper
  lymphoid_neoplasm vs. upper_gi,colorectal,liver_bileduct, renal,pancreas_gallbladder
cgcccggcgcggaaagtggacagcccagcggccagtgagaagcaagagcaagaaagcaaaccttctgaagacccctctcctcgcccagctccgccgaccattctaccaagctgccctcccagaaaaaagagcaggaaaaatgcctgtgcaaacgtgccttggcgagcggggaataagtgggctgggaagaagggaaggattcggagagcacagctgtcccggggaacaggaaggaggagaaagtctctccctcccttcagtgccccgcgccccagcgaggaggaagattactagtccagcaggctgcgtccagcttcctacacaggaacctttagcatgggcaacggaagggcagccccctcctgccttcccctccccaccccaccccctcgtcccaggtccccgccacagggagagcgccgcccgggagaggagaaggccgagcgtgattgtcccgcagccctcgcctcagtcggcgccggggcccccgtggacccgcgaggggtggagtgggcgagaccattggaaaggcagggaaggggggaaaccaggcaggaacgaggggcggggccgactaacctattccagattttcctgtcccttttaaatctctgctgtgggagaaaccccgttatcaaagtggatgaaaagaatatttttttttgaaaggggaggagcatgtgtaggagggcggggtgggaggagacagggcttgcgcccggggatcagacgggaggtggagttgcgcggggagggcgggcgagtcgggcgcccgctctgagagtcggtttcttttccccctcttgcgtggggcggggtggtgcgttccgagttcccaggagttcgacgcgggcgggtgccgaggggaggggagtggcggcgg

SEQ ID NO: 467230 - DNA, 70 bp, Homo sapiens
  chr3:110790671-110790741
  hyper
  lymphoid_neoplasm vs. upper_gi,colorectal,liver_bileduct, renal,pancreas_gallbladder
agtggcgtcggcgacggcggtgtcgaggcagccgccagcgttcggccaagtgtcagccggcagcgacggc

SEQ ID NO: 467231 - DNA, 395 bp, Homo sapiens
  chr3:110790247-110790642
  hyper
  lymphoid_neoplasm vs. upper_gi,thyroid,anorectal, liver_bileduct,colorectal,prostate,lung,bladder_and_urothelial, uterine
cgtggacccgcgaggggtggagtgggcgagaccattggaaaggcagggaaggggggaaaccaggcaggaacgaggggcggggccgactaacctattccagattttcctgtcccttttaaatctctgctgtgggagaaaccccgttatcaaagtggatgaaaagaatatttttttttgaaaggggaggagcatgtgtaggagggcggggtgggaggagacagggcttgcgcccggggatcagacgggaggtggagttgcgcggggagggcgggcgagtcgggcgcccgctctgagagtcggtttcttttccccctcttgcgtggggcggggtggtgcgttccgagttcccaggagttcgacgcgggcgggtgccgaggggaggggagtggcggcgg

SEQ ID NO: 467232 - DNA, 573 bp, Homo sapiens; identical to SEQ ID NO: 349801
  chr3:110790671-110791244
  hyper
  lymphoid_neoplasm vs. upper_gi,thyroid,anorectal, liver_bileduct,colorectal,prostate,lung,bladder_and_urothelial, uterine

SEQ ID NO: 467233 - DNA, 732 bp, Homo sapiens
  chr3:123751654-123752386
  hyper
  lymphoid_neoplasm vs. melanoma,liver_bileduct,sarcoma, lung,pancreas_gallbladder,breast,uterine,head_and_neck
cggaggaggtggccgcggggccgggaggagcaccggcggcgcgagcggagaagctgagcgcgcagcgcccgggccgcagagccccctggacaagcctggcgtgtgccctgcagccccgggctcgcccggcggccccgccccctccctggcccgggcttttcctgcggagctcaggaagccggcctagcacagcctcgaacaatagctcgggactcgggctccgctccccgggaggccggcgcggggccgctgggactgggggcgtaggcgccgccgggggcccgcagcgagccctcggccccggccggagcttcaattcagctcggcgctcccggggtcattgttggccgggactgagggagcgggagccgggggaggagctggggaggcggctgctgcggcggcggcggcggcgggagccagagggggagctagagagcgagcgagcgaaggagggaggtagcgagtgagcgagtgagcgagggagggaggaggtagggagacagggagggtgggagggaggaggaaaaataaagaggagagagcggagcagggctgaacaatagagacaggcagacgggcgagcaggagagccagctgccgctgctgggggacagcgggcgcccaggcagcccgcaccccggccccgggccccggccccagccagacagcaggcggccagcgccctggggaaggggtaccatgggggagctggcggcaggcacccccagc

SEQ ID NO: 467234 - DNA, 427 bp, Homo sapiens
  chr3:123751959-123752386
  hyper
  lymphoid_neoplasm vs. liver_bileduct,lung,melanoma
cggagcttcaattcagctcggcgctcccggggtcattgttggccgggactgagggagcgggagccgggggaggagctggggaggcggctgctgcggcggcggcggcggcgggagccagagggggagctagagagcgagcgagcgaaggagggaggtagcgagtgagcgagtgagcgagggagggaggaggtagggagacagggagggtgggagggaggaggaaaaataaagaggagagagcggagcagggctgaacaatagagacaggcagacgggcgagcaggagagccagctgccgctgctgggggacagcgggcgcccaggcagcccgcaccccggccccgggccccggccccagccagacagcaggcggccagcgccctggggaaggggtaccatgggggagctggcggcaggcacccccagc

SEQ ID NO: 467235 - DNA, 248 bp, Homo sapiens
  chr3:123752573-123752821
  hyper
  lymphoid_neoplasm vs. liver_bileduct,lung,melanoma
gccctcccacagtcatgaacccccctgagggagcagcggaggaaggaggagcagcagactcggacgtggacgcctttttccggacaggtaagccgggcagggcgcggggggccagggctgaaggctactgcctcggacgcggcgtctcggacaagtttggggaaggagggctgttgctgccgcgtgcgtgttggggggcagtgccccctcggcgtcggggctggagttgccgagattctggttgttat

SEQ ID NO: 467236 - DNA, 245 bp, Homo sapiens
  chr3:125986265-125986510
  hyper
  lymphoid_neoplasm vs. melanoma
cgctggggcggtgcgctggccgtgggtcgagaggtcgctgcgccctgcattcctggccgcgcgcgcacaggctggaatccgtacattccattcataacattcccgcaagcgaggggaggagacgcaaagccggggagtgagtgattaaagaaaagaaagaagggcttcttgcagctccgggctgtgttttttcctgcgcgccctggcgcagtccccggctcggaaaggcaggagcacgtgagcgg

SEQ ID NO: 467237 - DNA, 3 bp, Homo sapiens
  chr3:126373462-126373465
  hyper
  lymphoid_neoplasm vs. liver_bileduct, pancreas_gallbladder,colorectal,sarcoma,lung,renal
cgg

SEQ ID NO: 467238 - DNA, 49 bp, Homo sapiens
  chr3:126373704-126373753
  hyper
  lymphoid_neoplasm vs. liver_bileduct, pancreas_gallbladder,colorectal,sarcoma,lung,renal
gggggacgacaggcgggcacggcgccccggcggcgacaacacgcgcgcc

SEQ ID NO: 467239 - DNA, 317 bp, Homo sapiens; identical to SEQ ID NO: 349810
  chr3:126373824-126374141
  hyper
  lymphoid_neoplasm vs. liver_bileduct, pancreas_gallbladder,colorectal,sarcoma,lung,renal

SEQ ID NO: 467240 - DNA, 9 bp, Homo sapiens
  chr3:132756962-132756971
  hyper
  lymphoid_neoplasm vs. thyroid,breast,non_cancer
cgaaaacag

SEQ ID NO: 467241 - DNA, 81 bp, Homo sapiens
  chr3:133748401-133748482
  hyper
  lymphoid_neoplasm vs. pancreas_gallbladder,head_and_neck, breast
cgcgtcgcccggggatgagatcggagcgcggcacaggagggagcccggggctcccggagcctcctggctccggcagacaga

SEQ ID NO: 467242 - DNA, 73 bp, Homo sapiens
  chr3:133748576-133748649
  hyper
  lymphoid_neoplasm vs. pancreas_gallbladder,head_and_neck, breast
cacagcggccggctcggctagtagaggtgtcgctgccctgggacgcgccgagcttgggcaggagccccatggc

SEQ ID NO: 467243 - DNA, 260 bp, Homo sapiens; identical to SEQ ID NO: 357694
  chr3:133748694-133748954
  hyper
  lymphoid_neoplasm vs. pancreas_gallbladder,head_and_neck, breast

SEQ ID NO: 467244 - DNA, 21 bp, Homo sapiens
  chr3:134032175-134032196
  hyper
  lymphoid_neoplasm vs. liver_bileduct
cgggctgggagcggagtgggg

SEQ ID NO: 467245 - DNA, 296 bp, Homo sapiens
  chr3:135684609-135684905
  hyper
  lymphoid_neoplasm vs. prostate,head_and_neck,thyroid, anorectal,uterine,ovary,non_cancer,colorectal,breast, bladder_and_urothelial,sarcoma,lung,renal,upper_gi, pancreas_gallbladder,cervical
cgagagtccgcgccgcggggaggcttggaggcaagcgctgcccgcgagctgagccgccggaggaggagccgcgggcaacgaggtaggcaaaggaacactggccgcacggcctggagccttcagctccctcgtcccggcccgagggggtggcgaggctcggggcggcgcgcggaggccggggcgggcggggccgggacctgggggcggggaccggcctggccagaggggccacacggagctgattgggctgtggaagtcggaattccagtcggtgcggtgcggtgcggtgcgttgcc

SEQ ID NO: 467246 - DNA, 4 bp, Homo sapiens
  chr3:135685442-135685446
  hyper
  lymphoid_neoplasm vs. prostate,head_and_neck,thyroid, anorectal,uterine,ovary,non_cancer,colorectal,breast, bladder_and_urothelial,sarcoma,lung,renal,upper_gi, pancreas_gallbladder,cervical
tccc

SEQ ID NO: 467247 - DNA, 67 bp, Homo sapiens; identical to SEQ ID NO: 370218
  chr3:137482183-137482250
  hyper
  lymphoid_neoplasm vs. melanoma

SEQ ID NO: 467248 - DNA, 556 bp, Homo sapiens
  chr3:138067014-138067570
  hyper
  lymphoid_neoplasm vs. myeloid_neoplasm,uterine,prostate, bladder_and_urothelial,thyroid,breast,lung,non_cancer,renal, upper_gi,colorectal,head_and_neck
taggactggggaggcgtccctaggctcagaagttggcccggccggagcggagatttaaaggttggagcgcagaggctcttaaagaggccgagtcgaattcccactcggcgtccaccttaaagccagctccccggcaccacggatctgacccgggtaagtgctgggccgcgggagaggctgcggcgccgaccccagcccctggcgctctagcgcgccctgccgggcccaggggactcggcgcgggtgggctggacttcgtaggcgcgcgtcctgggggccggggtgcacgcgggggcgacagggtcgaggcacccggcccgggctccccactggcgcgcccgcagcggcgctctatttttagcaggcgctgtggcaatataaggaatgcgcggcgcgctaggcgctcggggcgcacgctggcggcgcggtcgctttaaggaggcgccggggcggggacggaccggagtggccggctggcggggagccgtcagtccggcggccgcggggcccggcgggcgcgacgctgcctcctcaccggcgcaggctaggagggggc

SEQ ID NO: 467249 - DNA, 637 bp, Homo sapiens
  chr3:138067081-138067718
  hyper
  lymphoid_neoplasm vs. liver_bileduct,thyroid,renal, prostate,sarcoma,lung,ovary,pancreas_gallbladder, myeloid_neoplasm,colorectal,anorectal,upper_gi,breast,uterine, non_cancer,head_and_neck,cervical
cgcagaggctcttaaagaggccgagtcgaattcccactcggcgtccaccttaaagccagctccccggcaccacggatctgacccgggtaagtgctgggccgcgggagaggctgcggcgccgaccccagcccctggcgctctagcgcgccctgccgggcccaggggactcggcgcgggtgggctggacttcgtaggcgcgcgtcctgggggccggggtgcacgcgggggcgacagggtcgaggcacccggcccgggctccccactggcgcgcccgcagcggcgctctatttttagcaggcgctgtggcaatataaggaatgcgcggcgcgctaggcgctcggggcgcacgctggcggcgcggtcgctttaaggaggcgccggggcggggacggaccggagtggccggctggcggggagccgtcagtccggcggccgcggggcccggcgggcgcgacgctgcctcctcaccggcgcaggctaggagggggcggcctgagtgccgtagccgagccggggctggagcgcgcggtgagtggtcgggcggccttggaggggagggggcccggccgcgccgcctctcgccccggccgtcgctttgttccggggcgggaggtgtggccgccctccgggctcggcc

SEQ ID NO: 467250 - DNA, 106 bp, Homo sapiens; identical to SEQ ID NO: 346595
  chr3:138067747-138067853
  hyper
  lymphoid_neoplasm vs. liver_bileduct,thyroid,renal, prostate,sarcoma,lung,ovary,pancreas_gallbladder, myeloid_neoplasm,colorectal,anorectal,upper_gi,breast,uterine, non_cancer,head_and_neck,cervical

SEQ ID NO: 467251 - DNA, 208 bp, Homo sapiens
  chr3:142607211-142607419
  hyper
cggagcggctccctaggcgccgcgccgctagggttgttccctagtttacgtctctgggcaaagcctctcggggaaggaaaaaaaacagcggtaaaccaaaatccacatatttgggccccagtgcttccctctggccccatagacacgaggagaggggagacacaagtcagattaagccccgccacgtggtggccaagccagctgcagg

SEQ ID NO: 467252 - DNA, 85 bp, Homo sapiens; identical to SEQ ID NO: 357707
  chr3:142607884-142607969
  hyper

SEQ ID NO: 467253 - DNA, 18 bp, Homo sapiens
  chr3:142681815-142681833
  hyper
  lymphoid_neoplasm vs. non_cancer
cggtagcagccacgggtg

SEQ ID NO: 467254 - DNA, 60 bp, Homo sapiens
  chr3:145878430-145878490
  hyper
  lymphoid_neoplasm vs. renal,head_and_neck,uterine,lung, sarcoma,breast,colorectal
cgggcacgctgagttcaccgagaactccaaggagtcaacgagggcgggtgcccctacact

SEQ ID NO: 467255 - DNA, 113 bp, Homo sapiens
  chr3:145878553-145878666
  hyper
  lymphoid_neoplasm vs. renal,head_and_neck,uterine,lung, sarcoma,breast,colorectal
gggacaggcccccactactcacctggccagccccgcggaagggctggtggatgaatgaactgcccccccgccggccgagcctcgcgggacagcggcggaccgcggggtgctca

SEQ ID NO: 467256 - DNA, 174 bp, Homo sapiens
  chr3:145878695-145878869
  hyper
  lymphoid_neoplasm vs. renal,head_and_neck,uterine,lung, sarcoma,breast,colorectal
gtccgcacccagacagggattccaggggtggaggacgagcgccaggagcagcagctgaggcttcaccgtgcatccccccatattcggccctcgagggccgcgcgggctcaggcgcccacggccccgcagcgccgcgcttctcgcgagaacgcagagacccgggtccgccctgag

SEQ ID NO: 467257 - DNA, 349 bp, Homo sapiens; identical to SEQ ID NO: 349836
  chr3:145878937-145879286
  hyper
  lymphoid_neoplasm vs. renal,head_and_neck,uterine,lung, sarcoma,breast,colorectal

SEQ ID NO: 467258 - DNA, 604 bp, Homo sapiens; identical to SEQ ID NO: 346598
  chr3:145968403-145969007
  hyper
  lymphoid_neoplasm vs. colorectal,head_and_neck,prostate, melanoma,liver_bileduct,renal,bladder_and_urothelial,sarcoma

SEQ ID NO: 467259 - DNA, 2 bp, Homo sapiens
  chr3:149374946-149374948
  hyper
  lymphoid_neoplasm vs. head_and_neck,uterine,melanoma, thyroid,liver_bileduct,non_cancer,breast,pancreas_gallbladder, bladder_and_urothelial,sarcoma
cg

SEQ ID NO: 467260 - DNA, 516 bp, Homo sapiens
  chr3:149375406-149375922
  hyper
  lymphoid_neoplasm vs. head_and_neck,uterine,melanoma, thyroid,liver_bileduct,non_cancer,breast,pancreas_gallbladder, bladder_and_urothelial,sarcoma
gaaaggtcgcacgattccaggacaggcagccccccgaaagaagttcagcccgagccaactccaccacgtctcgactccggaagcccgaggagcctggagccctggagtggtgccggatgagcgcgcgagctccagcgggcactacctgggcgggcagcgaagctgagcctgagcgcgcggcggccgccgtcccgcccgaacttgccgtcgggcctgggtcgctcgggtgagtcccgagattgcggagctggagccgaggcttggctgacaaatcccgacccgactctgtgcctggcagtctaagggcttcggctctcacatcccccgagctggcctaaggcgctagtgctgggcgaaaaggaggcgcaggagaagcagacagcgcggccgcagcagctcccggactgtcccataaacaaagtttggagcaaactcccacccccaggaaagaggcgggcccgaaagttgagctgttgaattatgtatgacctcctagtccctagccggccagccccc

SEQ ID NO: 467261 - DNA, 557 bp, Homo sapiens
  chr3:149375440-149375997
  hyper
  lymphoid_neoplasm vs. sarcoma,uterine,melanoma,thyroid, non_cancer,liver_bileduct,ovary,breast,myeloid_neoplasm,renal, prostate,head_and_neck,lung
cgaaagaagttcagcccgagccaactccaccacgtctcgactccggaagcccgaggagcctggagccctggagtggtgccggatgagcgcgcgagctccagcgggcactacctgggcgggcagcgaagctgagcctgagcgcgcggcggccgccgtcccgcccgaacttgccgtcgggcctgggtcgctcgggtgagtcccgagattgcggagctggagccgaggcttggctgacaaatcccgacccgactctgtgcctggcagtctaagggcttcggctctcacatcccccgagctggcctaaggcgctagtgctgggcgaaaaggaggcgcaggagaagcagacagcgcggccgcagcagctcccggactgtcccataaacaaagtttggagcaaactcccacccccaggaaagaggcgggcccgaaagttgagctgttgaattatgtatgacctcctagtccctagccggccagcccccgctcgcccctcctcttcctcctcctcctcctcccacctcggctccagaaaaccctgggcgtgatgggtactttac

SEQ ID NO: 467262 - DNA, 98 bp, Homo sapiens; identical to SEQ ID NO: 349842
  chr3:152553725-152553823
  hyper
  lymphoid_neoplasm vs. myeloid_neoplasm,sarcoma,thyroid, anorectal,uterine

SEQ ID NO: 467263 - DNA, 32 bp, Homo sapiens
  chr3:153838787-153838819
  hyper
  lymphoid_neoplasm vs. melanoma,sarcoma,breast,anorectal
cgttagaactctgcgctactgcccacgcatct

SEQ ID NO: 467264 - DNA, 59 bp, Homo sapiens
  chr3:153839460-153839519
  hyper
  lymphoid_neoplasm vs. melanoma,sarcoma,breast,anorectal
gaatgggtggcgggctcatttgctgcgggtggtcttttggcgcgggagggacgcggagg

SEQ ID NO: 467265 - DNA, 59 bp, Homo sapiens; identical to SEQ ID NO: 467264
  chr3:153839460-153839519
  hyper
  lymphoid_neoplasm vs. bladder_and_urothelial

SEQ ID NO: 467266 - DNA, 84 bp, Homo sapiens; identical to SEQ ID NO: 349845
  chr3:153840393-153840477
  hyper
  lymphoid_neoplasm vs. sarcoma

SEQ ID NO: 467267 - DNA, 20 bp, Homo sapiens
  chr3:158288800-158288820
  hyper
  lymphoid_neoplasm vs. lung
cgaaaagctccccggccggc

SEQ ID NO: 467268 - DNA, 2 bp, Homo sapiens
  chr3:158288886-158288888
  hyper
  lymphoid_neoplasm vs. lung
cg

SEQ ID NO: 467269 - DNA, 173 bp, Homo sapiens; identical to SEQ ID NO: 349858
  chr3:158289012-158289185
  hyper
  lymphoid_neoplasm vs. lung

SEQ ID NO: 467270 - DNA, 273 bp, Homo sapiens
  chr3:159943217-159943490
  hyper
  lymphoid_neoplasm vs. sarcoma
cgcctcccgcagcctccgcgcgccgcgggctcctcctcccgcccaagcgtggccaagtgaggactgctccggccgcaggtagctgaggcgcgggaggcggcgcgcgcgggacccgagcggagcgccggggaggggccgacggacgcgagggcggacggactccccagcctcccgtcccggacgttagccgaggtctgcgcgggccatgtggggacccggggtcactgctgagggcctgtcggtggctccggcgccgccgcctctgctgccgct

SEQ ID NO: 467271 - DNA, 362 bp, Homo sapiens
  chr3:171527569-171527931
  hyper
  lymphoid_neoplasm vs. melanoma,colorectal,lung
cgtattgtgaggaagaagaccttttacacactccctgctgctggcccccggccccctcgccccacctccgagtggtcacatcacacggcgggagccgcggtcagcagctgtgatcacacccccaggaccgtgctctgcgggctgggctcgaagccttgggacgcggcacttcctggttggtacgggatgccggtcccatcgcccccaccagcccagtcatgccaccgcgcacccgaaccaagggcgcccggatgacctggggacaccacacacactgcacccgaagccctgtggcggcgaggcggtgcatcctgcagaggacgcctgggcttcagcctgagcctgcgcggctctgcgctcca

SEQ ID NO: 467272 - DNA, 80 bp, Homo sapiens
  chr3:171527971-171528051
  hyper
  lymphoid_neoplasm vs. melanoma,colorectal,lung
agctttcaccctgcaggaattccacccgaaggcgtgcgagggaggcccttggggatcgctagggagtccgccgccgactc

SEQ ID NO: 467273 - DNA, 217 bp, Homo sapiens
  chr3:171528333-171528550
  hyper
  lymphoid_neoplasm vs. melanoma,colorectal,lung
ctccgcccggattcgccccggattcgcaggggtggagcgaggcggtgccaggtcccggggcgtcgcggtgccggctggaggccccagcggggcaggtctcgcgactgggcctctgatcgcccgcgttccttgttctcttttcccaaagtttcataactcgaccgcatcaccctagggaatgctcgctattaggaccattatcaggtcctctcgagcc

SEQ ID NO: 467274 - DNA, 56 bp, Homo sapiens
  chr3:181413014-181413070
  hyper
  lymphoid_neoplasm vs. myeloid_neoplasm
cgccgtttcgcccacggggtgcggggaacgaacccaactggacacactgtgcaccc

SEQ ID NO: 467275 - DNA, 202 bp, Homo sapiens
  chr3:182970902-182971104
  hyper
  lymphoid_neoplasm vs. bladder_and_urothelial
cggggcccatcaccttcacctacgcgccgggagggtggcggctggcgggcggggccgggctcgggccgtgacgccgagagtgcggggcgcgcggctgggagcctcgcgcccccgcccgggcccgcccccatcccgcccgcatacagcccgcatcccgccggggaagcgagcccagtccagcgctgcccgtccagtcctcgcc

SEQ ID NO: 467276 - DNA, 368 bp, Homo sapiens; identical to SEQ ID NO: 357771
  chr3:182971342-182971710
  hyper
  lymphoid_neoplasm vs. bladder_and_urothelial

SEQ ID NO: 467277 - DNA, 198 bp, Homo sapiens; identical to SEQ ID NO: 357787
  chr3:192635147-192635345
  hyper
  lymphoid_neoplasm vs. renal,breast,colorectal,cervical, uterine,thyroid

SEQ ID NO: 467278 - DNA, 30 bp, Homo sapiens
  chr4:568266-568296
  hyper
  lymphoid_neoplasm vs. myeloid_neoplasm,thyroid
cgtctctgtctgctcttcctccgtgggaag

SEQ ID NO: 467279 - DNA, 289 bp, Homo sapiens; identical to SEQ ID NO: 332005
  chr4:819440-819729
  hyper
  lymphoid_neoplasm vs. pancreas_gallbladder

SEQ ID NO: 467280 - DNA, 10 bp, Homo sapiens
  chr4:1399981-1399991
  hyper
  lymphoid_neoplasm vs. melanoma
cgagaaggag

SEQ ID NO: 467281 - DNA, 137 bp, Homo sapiens
  chr4:1400112-1400249
  hyper
  lymphoid_neoplasm vs. melanoma
cgtccatagcttcctgggcagcggcggcgggagcgggcggtgcgggccccgaacctggctggggaggcggcggtagcgcgggaatgtccccaggagcctcggggccgctagcgctcatgccggcctcccgccgctcc

SEQ ID NO: 467282 - DNA, 187 bp, Homo sapiens
  chr4:1796303-1796490
  hyper
  lymphoid_neoplasm vs. pancreas_gallbladder
cgagggcgcttccccgtgggtgcgcgccgagctccaggcaagcgaggggcgcgtgtcccagcgtcgcgggccctagactgggctggcggtccaggtcccgcgggacgtcgagggtctgaagggaggtcccaaggggcgaggggaggggaaggggcgcccggccggacctgcacacgcgccgcggttc

SEQ ID NO: 467283 - DNA, 549 bp, Homo sapiens; identical to SEQ ID NO: 357811
  chr4:1796598-1797147
  hyper
  lymphoid_neoplasm vs. pancreas_gallbladder

SEQ ID NO: 467284 - DNA, 138 bp, Homo sapiens
  chr4:3767158-3767296
  hyper
  lymphoid_neoplasm vs. melanoma,sarcoma,breast,thyroid, prostate,uterine,ovary
cggggagcgccgatccaggatctggtccggaccctgagctcggcaggacctgtgcgcacgcaggtagcgtcgcgtcctcccccaggctgcgagaggttgctctgccatcaggccatggaccccgagccgcccgtgctg

SEQ ID NO: 467285 - DNA, 275 bp, Homo sapiens; identical to SEQ ID NO: 349902
  chr4:3768207-3768482
  hyper
  lymphoid_neoplasm vs. anorectal,thyroid,prostate,breast, sarcoma,non_cancer,uterine

SEQ ID NO: 467286 - DNA, 145 bp, Homo sapiens; identical to SEQ ID NO: 349905
  chr4:5890606-5890751
  hyper
  lymphoid_neoplasm vs. melanoma,bladder_and_urothelial, sarcoma,anorectal,uterine,non_cancer,head_and_neck,prostate, multiple_myeloma,ovary

SEQ ID NO: 467287 - DNA, 207 bp, Homo sapiens
  chr4:6201673-6201880
  hyper
  lymphoid_neoplasm vs. thyroid
ggggctgggggcgggaccgggagggggtgttgggggaagcgacgcagcggctgggagattttgcaagggggtctgaagaggagtgggggatgggtatggaagggtgggggaccactgaggtgggatgcgagagtggaagggggacccagagggggcgcgatggccggaggagggggagatggacgatggggcggggcggcaccggtc

SEQ ID NO: 467288 - DNA, 80 bp, Homo sapiens; identical to SEQ ID NO: 453239
  chr4:6201800-6201880
  hyper
  lymphoid_neoplasm vs. renal

SEQ ID NO: 467289 - DNA, 65 bp, Homo sapiens; identical to SEQ ID NO: 346630
  chr4:6202658-6202723
  hyper
  lymphoid_neoplasm vs. renal

SEQ ID NO: 467290 - DNA, 821 bp, Homo sapiens; identical to SEQ ID NO: 332029
  chr4:6271360-6272181
  hyper
  lymphoid_neoplasm vs. liver_bileduct,lung

SEQ ID NO: 467291 - DNA, 165 bp, Homo sapiens
  chr4:6473630-6473795
  hyper
  lymphoid_neoplasm vs. head_and_neck,renal,uterine,ovary, prostate,lung
cggagggcggcgcggaggagggcgctgccctgtgccggcgctgggcagcggaggccggtaccctcgggctccctccctcctgggccccgggcagggtgggatgggatggggtggggtggggtgggatggggtggggtggggtggggcggggggacacgacacaca

SEQ ID NO: 467292 - DNA, 46 bp, Homo sapiens; identical to SEQ ID NO: 349909
  chr4:6474487-6474533
  hyper
  lymphoid_neoplasm vs. head_and_neck,renal,uterine,ovary, prostate,lung

SEQ ID NO: 467293 - DNA, 120 bp, Homo sapiens
  chr4:7194882-7195002
  hyper
  lymphoid_neoplasm vs. ovary,bladder_and_urothelial,lung, prostate,non_cancer,uterine,breast,cervical
ccctacccgggacaccgcgggacacccgggcgggaccgccacggcccccaccccagatccccactatggtcatcaggggcgggttcttggcgacttgggcacttgggtcacctcggccgc

SEQ ID NO: 467294 - DNA, 215 bp, Homo sapiens
  chr4:7194882-7195097
  hyper
  lymphoid_neoplasm vs. bladder_and_urothelial, multiple_myeloma
ccctacccgggacaccgcgggacacccgggcgggaccgccacggcccccaccccagatccccactatggtcatcaggggcgggttcttggcgacttgggcacttgggtcacctcggccgcgcccctactggcctctggtcactggttacttggggagaggtcctcagattcgtacgcttgtctcaccgcaggggacattcccgcagatttcggga

SEQ ID NO: 467295 - DNA, 668 bp, Homo sapiens
  chr4:7940425-7941093
  hyper
  lymphoid_neoplasm vs. pancreas_gallbladder
cgctgagagctacaaagttcaatctggctttccagattttttttttcttcccattactaacggaagaaatcaagaagctccgggcagtagggccctgctccctccaatcagagcccagcccggggccagagcaggaagcgcggcggtgggacgcgcggtgacagccccgcgccccccggggcccgccggccaggggagaggacggtgcggccgctgcgcgacagctccgggcccgcgcctctcgcttccacccgccgggcaggtgagaggataaatcacggggcggggcagtgcgcccccaccaaccgcgccccccgcgcacggacccccattacactcgcgtcccaggcggggtcgacccagacgagccacggggcggcgcagagccccactcgcagggcggccgggacccacgcgcgtgggtccacgcaacaacctataggtgacaaaacactcaggaagccgtcatgcggggccaagaaagagcccccatccagagtcacggaccccctcgtccgagggtccgcgcagtcccctcggtaagtcggacgaagcagtctcgctacgggggagggcggcggagcctcccactcttggtgacccggaccccgccccacgagtgggtcttcgcagggccccctctgacgcacacggggaccagccacgcc

SEQ ID NO: 467296 - DNA, 33 bp, Homo sapiens
  chr4:7941129-7941162
  hyper
  lymphoid_neoplasm vs. pancreas_gallbladder
cgcagtcccctccgggcagacgcggggagctgg

SEQ ID NO: 467297 - DNA, 160 bp, Homo sapiens
  chr4:7941191-7941351
  hyper
  lymphoid_neoplasm vs. pancreas_gallbladder
ggacgaccgggacccccgcgcgggcccacgcggcgtcgcagcaggcgcggagcccccggtaccacccgaggccgagacaaagcccaggcgcacggaccccggaccctgcggagccccgctcggagcttccacgcccggggcagagacccccgccgggtcc

SEQ ID NO: 467298 - DNA, 205 bp, Homo sapiens
  chr4:7940888-7941093
  hyper
  lymphoid_neoplasm vs. head_and_neck,cervical,lung, anorectal,uterine,prostate,pancreas_gallbladder,upper_gi,ovary, colorectal
cgtcatgcggggccaagaaagagcccccatccagagtcacggaccccctcgtccgagggtccgcgcagtcccctcggtaagtcggacgaagcagtctcgctacgggggagggcggcggagcctcccactcttggtgacccggaccccgccccacgagtgggtcttcgcagggccccctctgacgcacacggggaccagccacgcc

SEQ ID NO: 467299 - DNA, 33 bp, Homo sapiens; identical to SEQ ID NO: 467296
  chr4:7941129-7941162
  hyper
  lymphoid_neoplasm vs. head_and_neck,cervical,lung, anorectal,uterine,prostate,pancreas_gallbladder,upper_gi,ovary, colorectal

SEQ ID NO: 467300 - DNA, 523 bp, Homo sapiens
  chr4:7941191-7941714
  hyper
  lymphoid_neoplasm vs. head_and_neck,cervical,lung, anorectal,uterine,prostate,pancreas_gallbladder,upper_gi,ovary, colorectal
ggacgaccgggacccccgcgcgggcccacgcggcgtcgcagcaggcgcggagcccccggtaccacccgaggccgagacaaagcccaggcgcacggaccccggaccctgcggagccccgctcggagcttccacgcccggggcagagacccccgccgggtccggagaccctgccgccagtcgcgccgtctcacctcaggccgccacctcgcagcgctcgctcctcgccgcggcgcctgggccgactggagcgcagctgaacagccgacagagccgcagccgccttaacaatggagccccggggcggggccgccgccgccgcctcagcccgtgtaccccgctcgagatccggctcggctcgcggagctgcagccggcgtggggctgcggccgggacagacaccacgcaggcgcacacggccccgcccgccgcccgccgtcccgcccccagcggagccgggcgcccagggcccgccccccggccaatgggaagcgagctgcgcggagtgggcggggcctgagggaac

SEQ ID NO: 467301 - DNA, 628 bp, Homo sapiens
  chr4:8159728-8160356
  hyper
  lymphoid_neoplasm vs. upper_gi
cgcggctgggctccagcgctgtgggatttttccagccccgcacagaggctgtcagatcccggagggtgggtgcggcgggaaaggcaggggtgcgacgcgcaggggcgaggggctggagacgcgcagagatcgggtcggggccgggtctgacacatgcgggctccgggtccccagatctgctgcggagagtcctgggcgccgagggtcggcctgacgcccccaacccaggcgctgccagagcggcgcaagggcggcgcccccagctgcaaagccccgcctatcatctcacctctgcgtgcctaggtctgctggggccccggcccttcgcccggaccccaggcccccgcgcggaccctgaccgctttctgcagcctggaacaacccggacccccgtgagaagcaaagaaggggcgccttccagacatcctggcgcagccacgccggccggcgcgctgggaaaggatccccggcccgcgccactgagctacgcgctccgggcgcagggcagagggctgcgctctggcccctcggggctgcaaaatcctggagcaaaagttgggtggagccgctgggtgattttccccggcgttgcaggtgcagcctccgaatgccacccagcccttgcggc

SEQ ID NO: 467302 - DNA, 142 bp, Homo sapiens; identical to SEQ ID NO: 357835
  chr4:8160429-8160571
  hyper
  lymphoid_neoplasm vs. upper_gi

SEQ ID NO: 467303 - DNA, 33 bp, Homo sapiens; identical to SEQ ID NO: 370387
  chr4:8873984-8874017
  hyper
  lymphoid_neoplasm vs. melanoma

SEQ ID NO: 467304 - DNA, 311 bp, Homo sapiens
  chr4:8894331-8894642
  hyper
  lymphoid_neoplasm vs. myeloid_neoplasm,multiple_myeloma
cgggttcccgagagcggcggggggtccaaaggcgcgggcaccgatggcgggcggggccctcctgggtcctctgcccgccgccacccctcggcccaccccgcccgcagcatctgcgcgttttaagccggataagacgcttccttccctgtttgtctgggtttctttctcggttgctcaaggctctgatgtgacctctccaagaaaggacaccaatggccgcgcccccgccccacgacgctgcggacagcaagccgactccccccacccggccgcctgccccctccccgcgtcggtgcgcgccttggctccgg

SEQ ID NO: 467305 - DNA, 145 bp, Homo sapiens
  chr4:24914262-24914407
  hyper
  lymphoid_neoplasm vs. cervical,pancreas_gallbladder,lung, liver_bileduct,melanoma
cgaaagtgcaggaggagcggcgcacctggcggggtcgcgcgggtgcggcagccgcggccacttggagtgcgcgcccccctctcgtccctcccagctcggcctctctgggggcgcgggcccggggctggcggccgctcggcccggc

SEQ ID NO: 467306 - DNA, 72 bp, Homo sapiens; identical to SEQ ID NO: 357849
  chr4:24914804-24914876
  hyper
  lymphoid_neoplasm vs. cervical,pancreas_gallbladder,lung, liver_bileduct,melanoma

SEQ ID NO: 467307 - DNA, 95 bp, Homo sapiens
  chr4:25031950-25032045
  hyper
  lymphoid_neoplasm vs. multiple_myeloma
cgtcctccccgggggccaacactccacccacgtcccccacacaaaggcaaagaaggggcctggggagtgggtcagggtcgcgctggcccggcgcc

SEQ ID NO: 467308 - DNA, 461 bp, Homo sapiens; identical to SEQ ID NO: 357851
  chr4:25032103-25032564
  hyper
  lymphoid_neoplasm vs. multiple_myeloma

SEQ ID NO: 467309 - DNA, 284 bp, Homo sapiens
  chr4:30720964-30721248
  hyper
  lymphoid_neoplasm vs. renal,lung,head_and_neck
cgtcgtctgagagggagggagaaggagaaacctatcctgacaccagctccgaaagctctcacgcgtgaactgggcattagtcaagggaggaggaaatttaccagcccgagggagggaaaacaagtcccccagagaagacggcggtactcgctagggagggggactgggctttggcttaaagaggactggctgggattgggcacactttgagcggcccctggagctgaggctgggctttcccgagcgcggcggctggctgacgctccctcccgcctccttatccc

SEQ ID NO: 467310 - DNA, 304 bp, Homo sapiens; identical to SEQ ID NO: 349922
  chr4:30721470-30721774
  hyper
  lymphoid_neoplasm vs. renal,lung,head_and_neck

SEQ ID NO: 467311 - DNA, 221 bp, Homo sapiens
  chr4:30722023-30722244
  hyper
  lymphoid_neoplasm vs. sarcoma
cgacatgcgggccgaatgcaggtgagaaaaggcacggactctgcggctgcgaacccaaacttgggcaccgcacggtgcgcactgctcagccttcgcccccgtgggcgaaaggctgctgcggtttcaggcggctgcttcgtgactaatgaccttgcgcagagttgttaagaaaaaagagaaacccgcgctctccggggtgagaagggactgactctgggcgt

SEQ ID NO: 467312 - DNA, 548 bp, Homo sapiens; identical to SEQ ID NO: 370415
  chr4:30722273-30722821
  hyper
  lymphoid_neoplasm vs. sarcoma

SEQ ID NO: 467313 - DNA, 398 bp, Homo sapiens
  chr4:37455033-37455431
  hyper
  lymphoid_neoplasm vs. liver_bileduct
cgtggtggtggcgcccccgctgtttctaggtccatgtagctcatacagggctggccatggaactcacagcaggtctaggcggcgaatgccagaaataaggaggaaactgaaaaatgccaagttctcggggtttgggagtacacaactatttgccagcgggtgcatttgttttgtgtatccccgtactccagtcccttgatcataggaagctcccttctctccagcgcaacattggagtaagcaccccggagtttcccgtgatggcaggcggttggcgcggtcgtttgtgctcagaggccaacaagcgcgtggattttctgcttcagtgcgcccgggactgccaccccggccccggggatgtcggacatcgtactccagggtttcgagccctagccccg

SEQ ID NO: 467314 - DNA, 330 bp, Homo sapiens; identical to SEQ ID NO: 357862
  chr4:37455485-37455815
  hyper
  lymphoid_neoplasm vs. liver_bileduct

SEQ ID NO: 467315 - DNA, 53 bp, Homo sapiens
  chr4:41362252-41362305
  hyper
  lymphoid_neoplasm vs. liver_bileduct
cggcgccgggccaggggctgccccgccttgcccctacctctgcggccaggaag

SEQ ID NO: 467316 - DNA, 349 bp, Homo sapiens
  chr4:41363167-41363516
  hyper
  lymphoid_neoplasm vs. liver_bileduct
tgcagtctagctgcgcgcgtgagggcaggaagggatcccctgcgcgtccatccttcctgcccgctggcctcgcaaatctcagctagcgccgcttccaggcgctgccaagggaagcgcagtgctagcaaagcgttgcaaaggcgcaggaagcgcgagcccccagagacttcaccggtgctcgcatttcggggtatcttgcttctggtcccacatttcgccccttgtccccctaccccgcacccttccggagcagagttggcagtgtcttcacggaggcgcatacccaccggagcctcttgctgtattcctggcaccgggtcaggtgtgaggctggcacagtgcgcagggc

SEQ ID NO: 467317 - DNA, 66 bp, Homo sapiens; identical to SEQ ID NO: 461067
  chr4:41752247-41752313
  hyper
  lymphoid_neoplasm vs. multiple_myeloma,thyroid

SEQ ID NO: 467318 - DNA, 240 bp, Homo sapiens
  chr4:53617162-53617402
  hyper
cggccggggttgggttcctgtcgccgcacgcgtggcccgcccgaaacccgctacaaagtagcggcgtgtctgccctagggaggcaaagcgcaaacttgttaccgcgccgggacctgccccgggattctcccagcggctccgcaggacgcagcgcctgtgcctcgcgcggccctgggacgggcacggccgtccgccccctgggccgccgagggctgctttacccctccgttctggccgcgg

SEQ ID NO: 467319 - DNA, 242 bp, Homo sapiens
  chr4:53617560-53617802
  hyper
ccaagaagaaggctcgcggcgggaactgaagtgagcggggacacacgagggctgggaagatcctgggttggggcggagcggggctgggaagatcctgggttggggcggggcggggcaccgcagagcggacagccggattcaggcaccaggaacccaccggtcccactggccaggtgctccgagctgggtgattttctcccgctcaagactaggaacatacctgcgctttcggcgcagggaag

SEQ ID NO: 467320 - DNA, 1 bp, Homo sapiens
  chr4:53728037-53728038
  hyper
  lymphoid_neoplasm vs. sarcoma
c

SEQ ID NO: 467321 - DNA, 15 bp, Homo sapiens
  chr4:74903962-74903977
  hyper
  lymphoid_neoplasm vs. upper_gi
cggggaccccagcgg

SEQ ID NO: 467322 - DNA, 356 bp, Homo sapiens; identical to SEQ ID NO: 370457
  chr4:74904434-74904790
  hyper
  lymphoid_neoplasm vs. upper_gi

SEQ ID NO: 467323 - DNA, 422 bp, Homo sapiens
  chr4:77172549-77172971
  hyper
  lymphoid_neoplasm vs. liver_bileduct
cgctcctcctgccttcttcctttctttccttcagtaaacgttttttgaaacgatgatgagcaaaaaacgcctgatccagtctatggcgcgtttcggtgggaagatgaacacgccttcccagcagagtaaaacgtgattacaccaaggaccggtaccctctcccttccctcggccaggtccacgtccccaggcgtcggagaaggggttggaccgcgcagcggggcgtcagagttgccaggcgcccggggcaaataccggcagcggtggttgtgcggtgtcctagcaacggggcggcagcagggcacacacaccgcccaagcccggacggtggccgcgaagctagggccaccatggcggaccgcaggcggcggctccggccggggacgttggccccggtgcgcgagggcgtgaactgcaggtcc

SEQ ID NO: 467324 - DNA, 86 bp, Homo sapiens; identical to SEQ ID NO: 357891
  chr4:77173055-77173141
  hyper
  lymphoid_neoplasm vs. liver_bileduct

SEQ ID NO: 467325 - DNA, 362 bp, Homo sapiens
  chr4:77227668-77228030
  hyper
  lymphoid_neoplasm vs. upper_gi
cgggaacagaaagtgtagggacagaagagcgctggagtcttccccgggagggagcccggggctgcagcccaggggcggggagcggggcggggctgggaaagttgagtactggtcgctcagggccgggctccgccggagtgcccggcgcagaaaccgtaaaaggctggagcgggcggggtaggtgtggctctgtgtgcgtgacctgagccccggtcccagtccctgtagtctcctgcggccgcggcctctcagccatgggcgccgtctggtccgccctgctggttggagggggtctggccggagcacttttcgtttggctgctgcggggcggccctggcgacaccgggaaggacggggatgcg

SEQ ID NO: 467326 - DNA, 78 bp, Homo sapiens; identical to SEQ ID NO: 357893
  chr4:77228452-77228530
  hyper
  lymphoid_neoplasm vs. upper_gi

SEQ ID NO: 467327 - DNA, 234 bp, Homo sapiens
  chr4:82965099-82965333
  hyper
  lymphoid_neoplasm vs. multiple_myeloma, pancreas_gallbladder,renal,head_and_neck,cervical,lung
cggaagacccccaggcccgccaggggtccctgaggggacacaccctccacctacctcaaacatgggagaggcgcccttgctcggcaacgtgcagcccaggagctcggcgagaaactttgccatatacaagcggtgaggcagggtccctcccgatgcgccgtttctgtcctttccccttgccagagcccgagcgccaggatcctgcccgcagcccgcccgccagccggggccgtg

SEQ ID NO: 467328 - DNA, 53 bp, Homo sapiens
  chr4:83482632-83482685
  hyper
  lymphoid_neoplasm vs. lung
cgcttctcacccgagtccacccgataacgagatgatggggcggcgggtgggga

SEQ ID NO: 467329 - DNA, 115 bp, Homo sapiens; identical to SEQ ID NO: 370479
  chr4:83483372-83483487
  hyper
  lymphoid_neoplasm vs. lung

SEQ ID NO: 467330 - DNA, 296 bp, Homo sapiens; identical to SEQ ID NO: 349947
  chr4:85419891-85420187
  hyper
  lymphoid_neoplasm vs. melanoma,renal,anorectal

SEQ ID NO: 467331 - DNA, 701 bp, Homo sapiens
  chr4:85419891-85420592
  hyper
actgggatgctctgctctttcggtcgcgcggctgattcgcattcgacgctcactgtgcccggggagaaagcgcatccagcccgcgggagatctagcctctgtgcgggcttcctccgcccacgctgccccgggctgctgcgccagaaagggcagtgccacggatccccgcggctcccaggtcctcacctccacccgccttgccctctggcccacggggcactggagttgcaatattgaaaagaaaaagggggaggaaaaacacagaaaaacaaaagactaagtgtgaaaagtctgacggctgggtttcggcgccgctcgtcagtccacttctgcaaacgggcccggcgacccccgccccacccccgctccctctctccctctcactctcagcctttgactctcctctctggcattttcttcgcggcttcccaggcttcggtcttctaagtcctgtcctctggccaaactgaccctctccgcggctcctccgctctttctctcctttcctctctccctccgggcctgacagttcagatgaagctctcaaaggtaataaaacatttgcatcactccctacccctctttagctgggggacgaaagggagggggaagtgggggaccaaaatgagaactttgagggacgtcactccgaggctgcgggggccggcgagccgggcgcaggccgggggcgtaaccaccgt

SEQ ID NO: 467332 - DNA, 3 bp, Homo sapiens
  chr4:85420621-85420624
  hyper
gtc

SEQ ID NO: 467333 - DNA, 311 bp, Homo sapiens
  chr4:85503546-85503857
  hyper
  lymphoid_neoplasm vs. upper_gi,colorectal
cggcgctgcggttgtgatcggaattgttggccgacgcacctctggacgcccagtgaggcaaaagcatctcctgttttcaaggtgatgacactgggctggaatgccgcggggccaaccagtccgtcctgccagacaagtttctggtccagtgagcctccgacccgccgcgcgtgtcaagctgacaaggccggggaggcgtttgaagcagcagtgttgagcgctgttaacatttagcgggcgtctttgagtagctcctccagccctcgcagcggcccagggactagcctgcaagttctcaacgctcacttcca

SEQ ID NO: 467334 - DNA, 20 bp, Homo sapiens
  chr4:85503892-85503912
  hyper
  lymphoid_neoplasm vs. upper_gi,colorectal
cagcctcctcccgccccacc

SEQ ID NO: 467335 - DNA, 251 bp, Homo sapiens; identical to SEQ ID NO: 453250
  chr4:85503985-85504236
  hyper
  lymphoid_neoplasm vs. upper_gi,colorectal

SEQ ID NO: 467336 - DNA, 297 bp, Homo sapiens; identical to SEQ ID NO: 357911
  chr4:85504793-85505090
  hyper
  lymphoid_neoplasm vs. head_and_neck

SEQ ID NO: 467337 - DNA, 307 bp, Homo sapiens
  chr4:85886808-85887115
  hyper
  lymphoid_neoplasm vs. bladder_and_urothelial
cgaagggcttccagcgtagggcgtagggggagaggcccgaagccctggagacagcgcccgagggatggaggccgcgctcggctgcgctcaggtccgggtggctccgggagctgagaccccgcaggatgcagcgggggggggccagggcctgatcccctacccctgcgagccagggccgcctacgcccccactgcttcccacaggtaacgtccagccctctcctcccctatcccccgaaatatcccggttccgctccgctccgctcgccgcccgtgaccccgaccccgacccgtccgcgacggcgccc

SEQ ID NO: 467338 - DNA, 409 bp, Homo sapiens
  chr4:85887200-85887609
  hyper
  lymphoid_neoplasm vs. bladder_and_urothelial
acagcagctgggccgcggcctgtccctagggggagcgggcgcagggccgcgagtgggcagcgcctccgccccgcacgaacaaagcggccaggcgcgccgggccgaggcagcaccgcctctccgggagcgcggggggcggggaggatggcgggggtactcacctgagggccggcggagggcgcgggcgggacaggcccaggagacgggaccgcggcgggccggggctccgcgccgagggcgcacgggctacggggaaggggcgaccggcgcgacgtccgcggcggggcccgggagccccgcgccgcgggccgggggccggggcccgagctcgattctgcggccgcgaggtatgggaaccggtccgccgggccaggcagcggtgctaggcagcaggggcagcgacgccgcc

SEQ ID NO: 467339 - DNA, 679 bp, Homo sapiens
  chr4:85887200-85887879
  hyper
  lymphoid_neoplasm vs. liver_bileduct
acagcagctgggccgcggcctgtccctagggggagcgggcgcagggccgcgagtgggcagcgcctccgccccgcacgaacaaagcggccaggcgcgccgggccgaggcagcaccgcctctccgggagcgcggggggcggggaggatggcgggggtactcacctgagggccggcggagggcgcgggcgggacaggcccaggagacgggaccgcggcgggccggggctccgcgccgagggcgcacgggctacggggaaggggcgaccggcgcgacgtccgcggcggggcccgggagccccgcgccgcgggccgggggccggggcccgagctcgattctgcggccgcgaggtatgggaaccggtccgccgggccaggcagcggtgctaggcagcaggggcagcgacgccgccgcctttcccttctcctgcccccgtccctgctccgccgcgtcctcgtcctcgctgggtccccgccgccgccgcctcagcctcggcgctcctcgggtttcttctctccatcaaggccgggccgacccgcagggaccatcccggaaagtgaggggttgttgccgtttcccgcagctgttggtggccatctttaatcctcctcctcctcctgctttctccacctcccgctggctgtctgactgactgactggatcctcctctttcccctcctgc

SEQ ID NO: 467340 - DNA, 192 bp, Homo sapiens; identical to SEQ ID NO: 357914
  chr4:85887927-85888119
  hyper
  lymphoid_neoplasm vs. liver_bileduct

SEQ ID NO: 467341 - DNA, 249 bp, Homo sapiens
  chr4:85887630-85887879
  hyper
  lymphoid_neoplasm vs. liver_bileduct
cgtccctgctccgccgcgtcctcgtcctcgctgggtccccgccgccgccgcctcagcctcggcgctcctcgggtttcttctctccatcaaggccgggccgacccgcagggaccatcccggaaagtgaggggttgttgccgtttcccgcagctgttggtggccatctttaatcctcctcctcctcctgctttctccacctcccgctggctgtctgactgactgactggatcctcctctttcccctcctgc

SEQ ID NO: 467342 - DNA, 439 bp, Homo sapiens
  chr4:85887927-85888366
  hyper
  lymphoid_neoplasm vs. liver_bileduct
ccctcctgcctttccttcctctttccttacttccttcccttccctcggcttcccgctcttgcctcactctcagcggctgccttcgcccctgtctgcagacagcgccgctggatgctcccagctggacttcaaccccactcctctcagtccctctccccactgccttccagacgcgcctcttccccgccccgcgcccctctctcctctcccacccctgcccctctccgcggcgctcaccctcctcagtcccagtttctgaaaggactcagctgagaaaggacaactgggttccgctttccttaaccctacaccctttagctggatgctgtcagaggcgatggagaaacgcaaaggtgcgttaattttactctagccagagtataaaagaactgcccacgccagctattgtactacgcagcttcgaaactcctgcacgctc

SEQ ID NO: 467343 - DNA, 49 bp, Homo sapiens; identical to SEQ ID NO: 370495
  chr4:85888399-85888448
  hyper
  lymphoid_neoplasm vs. liver_bileduct

SEQ ID NO: 467344 - DNA, 184 bp, Homo sapiens
  chr4:87515033-87515217
  hyper
  lymphoid_neoplasm vs. head_and_neck,uterine
cgaagagtaagggaggagccagcacttacgcatttttcactctcctcctcactccctagggtcatagttttgattctgaagttagaagtgtgggggtcgtcggctgcattttcaacttggcctaaaagttggagttcaccacactgcaggcgctaggaactctgccgctcggtcaccaacctga

SEQ ID NO: 467345 - DNA, 24 bp, Homo sapiens
  chr4:87813027-87813051
  hyper
  lymphoid_neoplasm vs. head_and_neck,upper_gi,breast
cgctgcgccaaaatgtgtctgatc

SEQ ID NO: 467346 - DNA, 341 bp, Homo sapiens
  chr4:87813080-87813421
  hyper
  lymphoid_neoplasm vs. head_and_neck,upper_gi,breast
cctgcacaggaaccacccgccccggcccgggcactttgagcagagcaatccttcccaggttttccctcattcaaaacactcagcaccactcccgcgtccccgcccttgcacgccgattcggggcgagtcccctacccttccccggacggacgcgcagggcccgggaggaactggttcccgggacgggtgggggcctcggccgcccacagagcccgcggagaagggaacggcctcagcctcggctccttcccacacctgggccccaccctgcctccgactcgccaggaatgcgctgtgtgcgcggggcttccagggtggcgggtccccgcgagccggcgccg

SEQ ID NO: 467347 - DNA, 313 bp, Homo sapiens; identical to SEQ ID NO: 349949
  chr4:87813512-87813825
  hyper
  lymphoid_neoplasm vs. head_and_neck,upper_gi,breast

SEQ ID NO: 467348 - DNA, 5 bp, Homo sapiens
  chr4:94749495-94749500
  hyper
  lymphoid_neoplasm vs. head_and_neck,multiple_myeloma
cgcct

SEQ ID NO: 467349 - DNA, 197 bp, Homo sapiens
  chr4:94749529-94749726
  hyper
  lymphoid_neoplasm vs. head_and_neck,multiple_myeloma
gcggtcgtgcacatctgacccgagtcagcttgggcaccagccgagagccggctccgcaccgctcccgcaccccagccgccggggtggtgacacacaccggagtcgaattacagccctgcaattaacatatgaatctgacgaatttaaaagaaggaaaaaaaaaaaaaaacctgagcaggcttgggagtcctctgcac

SEQ ID NO: 467350 - DNA, 277 bp, Homo sapiens
  chr4:94749755-94750032
  hyper
  lymphoid_neoplasm vs. head_and_neck,multiple_myeloma
ctttgattggctgctcgcacgcgcctgcccgcgccctccattggctgagaagacacgcgaccggcgcgaggagggggttgggagaggagcggggggagactgagtggcgcgtgccgctttttaaaggggcgcagcgccttcagcaaccggagaagcatagttgcacgcgacctggtgtgtgatctccgagtgggtgggggagggtcgaggagggaaaaaaaaataagacgttgcagaagagacccggaaagggccttttttttggttgagctggtgt

SEQ ID NO: 467351 - DNA, 24 bp, Homo sapiens
  chr4:95678830-95678854
  hyper
  lymphoid_neoplasm vs. bladder_and_urothelial,sarcoma, renal,anorectal,thyroid,prostate,non_cancer,myeloid_neoplasm
cgggctgcctccggcccgcacccc

SEQ ID NO: 467352 - DNA, 61 bp, Homo sapiens
  chr4:95678999-95679060
  hyper
  lymphoid_neoplasm vs. bladder_and_urothelial,sarcoma, renal,anorectal,thyroid,prostate,non_cancer,myeloid_neoplasm
aaaaaaattccagaggcagccgaggagcgagagggaaaaaaaaaaaaaaaaaaaaaaaaag

SEQ ID NO: 467353 - DNA, 315 bp, Homo sapiens
  chr4:95679325-95679640
  hyper
  lymphoid_neoplasm vs. bladder_and_urothelial,sarcoma, renal,anorectal,thyroid,prostate,non_cancer,myeloid_neoplasm
gacgggtagcggctgggtgcggagctgggcggcggtcgccctaggcaggacggagcgcgcgagggagagggcgagagcgagggcgggctgcgcggccgtggggcggtggcggcggcggggagggggtcaggcggtggccgcctcggctttgtgcgcgggcggctctgccgggaccccgaggcctcgtgcctgcgcaggcgaggagtcggggcagcggcggcggcgggcgggacacgtgcttcgggctgtagggacgccccaaggcagggagtcggacctgcgagcggagggatggggcgggagggcgagctgagg

SEQ ID NO: 467354 - DNA, 63 bp, Homo sapiens; identical to SEQ ID NO: 349954
  chr4:95679745-95679808
  hyper
  lymphoid_neoplasm vs. bladder_and_urothelial,sarcoma, renal,anorectal,thyroid,prostate,non_cancer,myeloid_neoplasm

SEQ ID NO: 467355 - DNA, 556 bp, Homo sapiens
  chr4:118954450-118955006
  hyper
  lymphoid_neoplasm vs. multiple_myeloma
aggaagggaccgcgcgggtgcgccccacccttccagcgtcgcctcggggactcgcacccctttccctggccgcacaagacgtttcatccttggcggccgccgccaacccgccgggaggggcggtcggaactggcaggccggggcggaacccccggggtctccttgtcgaggcccgggcagccagatcctcagggccggtccgggcgggagcccggtcgatggaggcggctcccgtcctcagctcccgctccctccccttccccggggcgggcgcgcgcgggccgggagctgggaggcggcggctcccgcccgggaggcggtggcgagggcggcggaggcgcggccgggcgggtcccagggccgtggttctccagcgcaggagtccccggcgcacccgctgcgctcgccccgcagccgcagcctgagcggccgaagtcgccaccagctgtgtccgcgcagatcccgggcgcggaggggagaggtcgcccgcttgtcgcccccgccggaccccgggcaccgcgtagcacccaagcgccacccggacgaggggccctgg

SEQ ID NO: 467356 - DNA, 81 bp, Homo sapiens; identical to SEQ ID NO: 370534
  chr4:118955125-118955206
  hyper
  lymphoid_neoplasm vs. multiple_myeloma

SEQ ID NO: 467357 - DNA, 109 bp, Homo sapiens
  chr4:119273336-119273445
  hyper
  lymphoid_neoplasm vs. head_and_neck,pancreas_gallbladder
cgtccggagtttccgcggccgccccgaggccactaaccgtgtctgcagtcgcagtagccccagtccaccttgccacgggcgtctccgtagaaacaccagggtctgcccg

SEQ ID NO: 467358 - DNA, 223 bp, Homo sapiens
  chr4:119273515-119273738
  hyper
  lymphoid_neoplasm vs. head_and_neck,pancreas_gallbladder
ctccaggaagggtggcacctccgcccaccgcagacacggggcgccgaagtccgtcacgctgacccatggctcgccggcggggcagccccaggggtgcggccggggcgtgtgcccggcctggagggcgtgcgggcgctgggcagggagcgcccgcggggggcgcgggaagcgcgggagaggcggcggcggacgcgtcctcgggggccgctgctgggtgggaagg

SEQ ID NO: 467359 - DNA, 202 bp, Homo sapiens
  chr4:119273903-119274105
  hyper
  lymphoid_neoplasm vs. head_and_neck,pancreas_gallbladder
gctccccagcttctcgggcttggagcggagaagaggagggggcgggggcggggctgccgcgtccctcgaatcccccagccccctcccgcccccgcacgcggaccgccctcgcctccccaaccttgcctcccgccgctggtgccctgccgcgcctcggctcctgtcccctggcggcggccgcgggtggggaaatctggagctc

SEQ ID NO: 467360 - DNA, 90 bp, Homo sapiens
  chr4:119273648-119273738
  hyper
  lymphoid_neoplasm vs. liver_bileduct,colorectal, pancreas_gallbladder,lung
cgctgggcagggagcgcccgcggggggcgcgggaagcgcgggagaggcggcggcggacgcgtcctcgggggccgctgctgggtgggaagg

SEQ ID NO: 467361 - DNA, 202 bp, Homo sapiens; identical to SEQ ID NO: 467359
  chr4:119273903-119274105
  hyper
  lymphoid_neoplasm vs. liver_bileduct,colorectal, pancreas_gallbladder,lung

SEQ ID NO: 467362 - DNA, 243 bp, Homo sapiens; identical to SEQ ID NO: 357951
  chr4:119274214-119274457
  hyper
  lymphoid_neoplasm vs. liver_bileduct,colorectal, pancreas_gallbladder,lung

SEQ ID NO: 467363 - DNA, 18 bp, Homo sapiens
  chr4:121843130-121843148
  hyper
  lymphoid_neoplasm vs. ovary
cgtatgaatgagattcta

SEQ ID NO: 467364 - DNA, 261 bp, Homo sapiens
  chr4:121843304-121843565
  hyper
  lymphoid_neoplasm vs. ovary
gcaaagacgcagctcacacccgtaaccgaggaagagggaggctcccgccgcgctcacttcctgcgggagagaggaaagacatcttgcggcagggaggccggtggcagttccgcccctggaccggccggcagcggagcgcaccccgccgccacctacgtggcgctgcctgctcgggtggcgcagcgagtaaaggccacccccgccgtgccccgcggtccccggccttcccacggacgcctggcccggcccgggcgaggggcg

SEQ ID NO: 467365 - DNA, 271 bp, Homo sapiens
  chr4:121843731-121844002
  hyper
  lymphoid_neoplasm vs. ovary
gagaacctgtccggcacgtacatgcccagcattttcccgggcgcggcggccgccgcctctctcaacaccggcgcttagcgcccggcaggcggcacatcgaaatttggggtgccagggtagaggggagaaaccggcagggaaggaggaaatggagttttcctcccagaatccccacctccctgccgattccaggatcccccgcggctcagcccctcctcgtcccgggtcgggctcggcccggatccgttcctgccattcctgctgcgggggc

SEQ ID NO: 467366 - DNA, 61 bp, Homo sapiens
  chr4:121843504-121843565
  hyper
  lymphoid_neoplasm vs. renal,bladder_and_urothelial
cgccgtgccccgcggtccccggccttcccacggacgcctggcccggcccgggcgaggggcg

SEQ ID NO: 467367 - DNA, 277 bp, Homo sapiens
  chr4:121843731-121844008
  hyper
  lymphoid_neoplasm vs. renal,bladder_and_urothelial
gagaacctgtccggcacgtacatgcccagcattttcccgggcgcggcggccgccgcctctctcaacaccggcgcttagcgcccggcaggcggcacatcgaaatttggggtgccagggtagaggggagaaaccggcagggaaggaggaaatggagttttcctcccagaatccccacctccctgccgattccaggatcccccgcggctcagcccctcctcgtcccgggtcgggctcggcccggatccgttcctgccattcctgctgcgggggcgcgggg

SEQ ID NO: 467368 - DNA, 170 bp, Homo sapiens; identical to SEQ ID NO: 357955
  chr4:121844206-121844376
  hyper
  lymphoid_neoplasm vs. renal,bladder_and_urothelial

SEQ ID NO: 467369 - DNA, 235 bp, Homo sapiens; identical to SEQ ID NO: 453257
  chr4:121992978-121993213
  hyper
  lymphoid_neoplasm vs. lung,renal,non_cancer

SEQ ID NO: 467370 - DNA, 114 bp, Homo sapiens; identical to SEQ ID NO: 349974
  chr4:121993736-121993850
  hyper
  lymphoid_neoplasm vs. lung,renal,non_cancer

SEQ ID NO: 467371 - DNA, 243 bp, Homo sapiens
  chr4:128544404-128544647
  hyper
  lymphoid_neoplasm vs. bladder_and_urothelial,cervical
cgccttcagcccttggcttccgcgcgtcggaggctggcacctccaggttcaccgcggcggccggagctgtgcgggggccagacggttcggcgggagccggggctgggacctgggtgacctgtcgtccgcccctgtagcgagtctccagtgggcatgtttcaggtgggcaggtccagcatccccaaacctgccccccgcagcctggaggacctggactcagtgcagcgtgtcctgttacacagg

SEQ ID NO: 467372 - DNA, 49 bp, Homo sapiens; identical to SEQ ID NO: 357962
  chr4:128544806-128544855
  hyper
  lymphoid_neoplasm vs. bladder_and_urothelial,cervical

SEQ ID NO: 467373 - DNA, 824 bp, Homo sapiens; identical to SEQ ID NO: 332200
  chr4:142557243-142558067
  hyper
  lymphoid_neoplasm vs. liver_bileduct,cervical

SEQ ID NO: 467374 - DNA, 114 bp, Homo sapiens
  chr4:152246019-152246133
  hyper
  lymphoid_neoplasm vs. upper_gi,anorectal, bladder_and_urothelial,cervical,thyroid,colorectal
cggcgcaggcaaacccctcggaaggtgtcgttgtccaccgagacggccattgacctctgactcatccagagataagtcatcaaccaggccacaagtcccaagccagcagctcct

SEQ ID NO: 467375 - DNA, 179 bp, Homo sapiens
  chr4:152246314-152246493
  hyper
  lymphoid_neoplasm vs. upper_gi,anorectal, bladder_and_urothelial,cervical,thyroid,colorectal
gctgtgtggggcaggacccgagcggccccagagcgcgcagctctgggtccccgccgccccgtcccccgcgcctctcacctgcggccgagtggcccgagagcgcacggccccgggcgcggcgctggccaccaagttcgcggcgctcgcgtagctcttcctcctcgtcctcccgccgccgg

SEQ ID NO: 467376 - DNA, 469 bp, Homo sapiens; identical to SEQ ID NO: 349997
  chr4:152246542-152247011
  hyper
  lymphoid_neoplasm vs. upper_gi,anorectal, bladder_and_urothelial,cervical,thyroid,colorectal

SEQ ID NO: 467377 - DNA, 765 bp, Homo sapiens
  chr4:152329824-152330589
  hyper
  lymphoid_neoplasm vs. pancreas_gallbladder
cggggcgccggtggccgccgtcaaacctttgggaagcaagaaatccgaaacgcccgtgacgtgcggcgttgtccgactccttccactaggcagaacccgagagacgagcctttggcgggacggtgaacgattgtgctgtgtacggcggtgtgcgtgcgtgagtaaagagtgtgtagctccggccaaacgctagcccccaagggcgcgagtgctacactgcgcccagctcaagtttctgtggaaactttccctcagaggctcctcctccttcaccttggaaaccggcgcgggccgtgcggcgcggcactgcctaagtccccggcgcacctggcggcggcgtgtcccagcggcagaggcggggccggcggcggcgggggcggggccggggcgcgctccccgaggcctccaggcaggttgggccccacccccgcccctgccccgccccggcccccgcccccgcccccgccccccccgcgctcactagggagaggctggggggaggcagtgacccacgcgcctcagcccgcggctgacgcaccttcgaaaagttgcgctccgaccttctcacgacctacattcttcccgggcactcctgagtttgagccgggcctggaggacctgggccaagactttcgagcggcggccgcccgaggtgcgaggagccagcccggctttcctcactgggtcccgcgcaggcgtccccgggaccgcagagcaaactttctggactatctgaggacacttgtccagcgagccccactgctc

SEQ ID NO: 467378 - DNA, 766 bp, Homo sapiens
  chr4:152330106-152330872
  hyper
  lymphoid_neoplasm vs. upper_gi,pancreas_gallbladder
cggcgcgggccgtgcggcgcggcactgcctaagtccccggcgcacctggcggcggcgtgtcccagcggcagaggcggggccggcggcggcgggggcggggccggggcgcgctccccgaggcctccaggcaggttgggccccacccccgcccctgccccgccccggcccccgcccccgcccccgccccccccgcgctcactagggagaggctggggggaggcagtgacccacgcgcctcagcccgcggctgacgcaccttcgaaaagttgcgctccgaccttctcacgacctacattcttcccgggcactcctgagtttgagccgggcctggaggacctgggccaagactttcgagcggcggccgcccgaggtgcgaggagccagcccggctttcctcactgggtcccgcgcaggcgtccccgggaccgcagagcaaactttctggactatctgaggacacttgtccagcgagccccactgctcggggaggaggagccacggccggggacaggtaggtgctgtgctggccggagatttgcgcttgagggattcttttattttagagggttgaaggaggagggagagtcgaaatgtcccttctctgcatccgccaactgggcagggggtgcgggcattgggctgagggagcaggcattgggctgggggccggctggggatgttccaaacgaggtcgctgcgtcgggcgggggcgcaggggggaggaggtgacttctagggtttcgggctccgggacggggcgtaacgc

SEQ ID NO: 467379 - DNA, 372 bp, Homo sapiens
  chr4:155664665-155665037
  hyper
  lymphoid_neoplasm vs. bladder_and_urothelial
cgaaagattcggtcaggaaagaatctgcaggcattcgaggcgctcgcactttgcaaagtaaatgcaatctctttattaagccgaagtccctcatatctatccttttagaggaaggtggtccaactcagaaatctctcccaagaggactttccaccgaagactaccgcgaagtgccaggaactcgccccagtcccgacaggtgcaggacctttcgtgccgccacaccttgggactctacctccctaaataggccacttaaaagccagtagtgcaaccgggatcccgcggcgataaagaatcactgtgcagaaccctggagctgggagtcggcccgcccccctcccaaagaaaccgggatcccgcgtcctcccc

SEQ ID NO: 467380 - DNA, 726 bp, Homo sapiens; identical to SEQ ID NO: 370601
  chr4:159690014-159690740
  hyper

SEQ ID NO: 467381 - DNA, 359 bp, Homo sapiens; identical to SEQ ID NO: 358007
  chr4:164253781-164254140
  hyper
  lymphoid_neoplasm vs. liver_bileduct

SEQ ID NO: 467382 - DNA, 156 bp, Homo sapiens
  chr4:165304258-165304414
  hyper
  lymphoid_neoplasm vs. melanoma
cgtctctctgcctcgactggtcactccacttcctggagctccagaaactccctcagcacctggataactgcgacactcacccgtgagcgcaggaccctcctggcgtcttaagtcccagctctcagtcccgctggccgcaggaacacaatgacatct

SEQ ID NO: 467383 - DNA, 244 bp, Homo sapiens; identical to SEQ ID NO: 358009
  chr4:166300444-166300688
  hyper
  lymphoid_neoplasm vs. head_and_neck

SEQ ID NO: 467384 - DNA, 11 bp, Homo sapiens
  chr4:166795638-166795649
  hyper
  lymphoid_neoplasm vs. prostate
tgttcgagagc

SEQ ID NO: 467385 - DNA, 63 bp, Homo sapiens; identical to SEQ ID NO: 332241
  chr4:169552556-169552619
  hyper
  lymphoid_neoplasm vs. colorectal,cervical

SEQ ID NO: 467386 - DNA, 31 bp, Homo sapiens
  chr4:170947105-170947136
  hyper
  lymphoid_neoplasm vs. ovary,colorectal,melanoma,lung, breast,non_cancer,bladder_and_urothelial,myeloid_neoplasm, anorectal,head_and_neck,pancreas_gallbladder,renal,thyroid, uterine,prostate,liver_bileduct
cgcgctcctcgccctcggaaggttacggttc

SEQ ID NO: 467387 - DNA, 103 bp, Homo sapiens
  chr4:170947173-170947276
  hyper
  lymphoid_neoplasm vs. ovary,colorectal,melanoma,lung, breast,non_cancer,bladder_and_urothelial,myeloid_neoplasm, anorectal,head_and_neck,pancreas_gallbladder,renal,thyroid, uterine,prostate,liver_bileduct
cgccccgcacggatctcgaagcatcctgcgaccccctggagcccgctgcccggaccctgcggcgtctcgcagcgcagcctccgccgcagtctcagccagccca

SEQ ID NO: 467388 - DNA, 172 bp, Homo sapiens
  chr4:170947867-170948039
  hyper
  lymphoid_neoplasm vs. ovary,colorectal,melanoma,lung, breast,non_cancer,bladder_and_urothelial,myeloid_neoplasm, anorectal,head_and_neck,pancreas_gallbladder,renal,thyroid, uterine,prostate,liver_bileduct
gctctctctcccgcccggggcttccaccgcaacttctgtgggcgtcgcatcgcacgcgtgttcaaggacacccaggaaaaggcttcttagggtcccatcctggggcgctaaatgggaaccagtcaacccacccccaagcctaccctgtctccttgcaatcaaatgcaatcac

SEQ ID NO: 467389 - DNA, 1 bp, Homo sapiens
  chr4:170948089-170948090
  hyper
  lymphoid_neoplasm vs. ovary,colorectal,melanoma,lung, breast,non_cancer,bladder_and_urothelial,myeloid_neoplasm, anorectal,head_and_neck,pancreas_gallbladder,renal,thyroid, uterine,prostate,liver_bileduct
c

SEQ ID NO: 467390 - DNA, 172 bp, Homo sapiens; identical to SEQ ID NO: 467388
  chr4:170947867-170948039
  hyper
  lymphoid_neoplasm vs. pancreas_gallbladder,sarcoma, head_and_neck,colorectal,uterine,lung,anorectal,thyroid, myeloid_neoplasm,breast,ovary,non_cancer,multiple_myeloma

SEQ ID NO: 467391 - DNA, 427 bp, Homo sapiens
  chr4:170948089-170948516
  hyper
  lymphoid_neoplasm vs. pancreas_gallbladder,sarcoma, head_and_neck,colorectal,uterine,lung,anorectal,thyroid, myeloid_neoplasm,breast,ovary,non_cancer,multiple_myeloma
cgctgtaagtcttaaacgtctcttaaagcaaagtccacagatggaagagtctggaaaaaaacccagcgggccgttccctggtgactttctgagtggtggggttccaggaatttttttttcattttctttaaaaatattatttgtaatttccacgttttttctaatgaaccataagttgattttttaattaaaaagtagagtactctaaaattattaagtacctacagaagtttcgctacacgatcctgcaatgttagtggcttcttctcctccttatctccctttttttttttttttttttaattttaaaagagaacagagactctcaatttctggggcgggaccaggctccttcccccggctttttagtgcccgccctcttggccacaccccactccggcctttttactcccgtaccgccctcttc

SEQ ID NO: 467392 - DNA, 411 bp, Homo sapiens
  chr4:170948105-170948516
  hyper
  lymphoid_neoplasm vs. pancreas_gallbladder
cgtctcttaaagcaaagtccacagatggaagagtctggaaaaaaacccagcgggccgttccctggtgactttctgagtggtggggttccaggaatttttttttcattttctttaaaaatattatttgtaatttccacgttttttctaatgaaccataagttgattttttaattaaaaagtagagtactctaaaattattaagtacctacagaagtttcgctacacgatcctgcaatgttagtggcttcttctcctccttatctccctttttttttttttttttttaattttaaaagagaacagagactctcaatttctggggcgggaccaggctccttcccccggctttttagtgcccgccctcttggccacaccccactccggcctttttactcccgtaccgccctcttc

SEQ ID NO: 467393 - DNA, 21 bp, Homo sapiens
  chr4:170948833-170948854
  hyper
  lymphoid_neoplasm vs. pancreas_gallbladder
cgacatcgaagctcgggaaac

SEQ ID NO: 467394 - DNA, 941 bp, Homo sapiens
  chr4:171010636-171011577
  hyper
  lymphoid_neoplasm vs. bladder_and_urothelial
cgcagagcctggctcaccgcgagcgtgcacaggggtacgcatggatgcaaccaagcggtggcttgctagggaaccctccttagaggctgtgcgaggaatgccccaccccaaaggagagatggtcaccccgtttctcactcatggtccggatgggagaagggtttctggctgcgctcgctgccgtgatgaaccgtgcgtaattcatgtcttctgacagccaagcatcaagcttcttcttcagtggttgaggactagaaaaaccaaagagcctcgtcaagtcctgcctgctaactcctcactctggcaacgccaccgcgagatgtgtccccccgctgcgtctggcttcccgcgcgcggtgcccggagaacgccgccgaaactccccggctggacgctgcgttcggtctcccggtcctaaacgggtctggggctgtgtggcgagcccggcaaagtccacgccgcacgcgctcctgcggccgccagggcccaggccggttttgccccgccgcgggcctcgccgcgccccctcccgccccgcgccgtggcctatggccgcccgcggcgcgcgcctccccgtcccggatcatcgccctcagagcgcagggcgcggggtagcccaggcgcgaggcgcttgcagccccaggccaatgactcttgacctcgccgctgggaatcaccgcaacccggcgtccgcgttggccggcctaggcgccggcccagaggctagcccaggggctgaccgaggggaccggaagtgcccgtgatcctaatcctcgggaaccatctggcggcgacttgggtccactgcagggggctcccgagctgcgcccagccgggagcggccccaccctcgttcccgcgcgctccgctggcctcctctcagtcactgggactgtgcattttgcccgctcagaccatggctatgctaaatacccatctttc

SEQ ID NO: 467395 - DNA, 113 bp, Homo sapiens
  chr4:184019900-184020013
  hyper
  lymphoid_neoplasm vs. renal,cervical,anorectal,uterine, myeloid_neoplasm,non_cancer,head_and_neck,colorectal,breast, pancreas_gallbladder,bladder_and_urothelial,upper_gi,ovary
tttctccggaggagagctccccgcccgccacccctttcctctcgaaagttttgtggtttccctagaagacgaaagaggttgagaaggttgcggagacttttgcaatcttcccc

SEQ ID NO: 467396 - DNA, 207 bp, Homo sapiens
  chr4:184019900-184020107
  hyper
  lymphoid_neoplasm vs. renal,anorectal, bladder_and_urothelial,ovary,colorectal,cervical,head_and_neck, non_cancer,myeloid_neoplasm,uterine,pancreas_gallbladder,breast, thyroid,upper_gi,prostate,lung
tttctccggaggagagctccccgcccgccacccctttcctctcgaaagttttgtggtttccctagaagacgaaagaggttgagaaggttgcggagacttttgcaatcttccccgtccagaaactctaaaacctctcggcgtttggcccaggggagctatctggggtcaaggggagggagctggccgcacattccttcgcccgccttc

SEQ ID NO: 467397 - DNA, 72 bp, Homo sapiens
  chr4:184020035-184020107
  hyper
  lymphoid_neoplasm vs. melanoma,pancreas_gallbladder, thyroid,anorectal,lung,liver_bileduct,head_and_neck,ovary, cervical,breast,upper_gi,non_cancer,myeloid_neoplasm,uterine, bladder_and_urothelial,prostate,colorectal,renal
cggcgtttggcccaggggagctatctggggtcaaggggagggagctggccgcacattccttcgcccgccttc

SEQ ID NO: 467398 - DNA, 24 bp, Homo sapiens
  chr4:184021278-184021302
  hyper
  lymphoid_neoplasm vs. lung,liver_bileduct, myeloid_neoplasm,breast,anorectal,uterine,pancreas_gallbladder, upper_gi,cervical,non_cancer,thyroid,prostate,colorectal, bladder_and_urothelial,ovary,renal
gggaaggggctcccgccccccgcc

SEQ ID NO: 467399 - DNA, 366 bp, Homo sapiens
  chr4:184718835-184719201
  hyper
  lymphoid_neoplasm vs. renal,lung,myeloid_neoplasm, thyroid,head_and_neck
gcgcggcagatgcctgggaagatggagaagtttctgcagatcgcgcctcactccctggccatcgtcctgggcccggcagaggcgccggcgggggaaaggccaggggcagcccggcccgcgcccccggcccagccccgccagctcgcccggcaccacatcggctacgagatcttcgccgacttcaaagccgagaacatgcagcacttctggaacaagaaggtcacggccgcggtggccgagaccttcttcctgggctggatcgacgagcaggtcctgctgatccagggcaaggaggaacatctggaggcgctgcgcgaaggctggacgcgccgggccctgcggccgccctcgggcttccacatccgc

SEQ ID NO: 467400 - DNA, 157 bp, Homo sapiens; identical to SEQ ID NO: 350021
  chr4:184719413-184719570
  hyper
  lymphoid_neoplasm vs. renal,lung,myeloid_neoplasm, thyroid,head_and_neck

SEQ ID NO: 467401 - DNA, 106 bp, Homo sapiens
  chr4:184719095-184719201
  hyper
  lymphoid_neoplasm vs. cervical,renal
cgacgagcaggtcctgctgatccagggcaaggaggaacatctggaggcgctgcgcgaaggctggacgcgccgggccctgcggccgccctcgggcttccacatccgc

SEQ ID NO: 467402 - DNA, 521 bp, Homo sapiens; identical to SEQ ID NO: 358035
  chr4:184719413-184719934
  hyper
  lymphoid_neoplasm vs. cervical,renal

SEQ ID NO: 467403 - DNA, 27 bp, Homo sapiens
  chr4:187647047-187647074
  hyper
  lymphoid_neoplasm vs. liver_bileduct,multiple_myeloma
cgggtgggtggtcagtgaagactgggg

SEQ ID NO: 467404 - DNA, 183 bp, Homo sapiens
  chr4:187647457-187647640
  hyper
  lymphoid_neoplasm vs. liver_bileduct,multiple_myeloma
gtttaaacttaaatgccaaaaggcatgcacgatttgaacaaagaactcaccagtctagccgagtcctcggccctgggctctaaagtcctcggcagctccgtgatcccctcgcggtgtagatatgtgttaagagccgggtttgaagtaccaactttgcctccccgggatcttcagcatgtccct

SEQ ID NO: 467405 - DNA, 364 bp, Homo sapiens
  chr4:187647669-187648033
  hyper
  lymphoid_neoplasm vs. liver_bileduct,multiple_myeloma
gacccaggcggccgcatctccggaggcttccgaccagggcaaacttaagcaccaaacgcaggcgaaaagagagtgcgcggggccggaacgagggcccgggagcagccaagtttgtcaggacgtgcccaggcagccagccgccgagttgaggagttgcggccgccggctgcggcgactcgctgcctctttccccactccctcccccttggaggcggtgggggaggggaggtgacgtcagcgccccgcctcgccccccgccccgggcgcggacgggattctccggctgggcgcgccaccccgacagtggcagcagcggccgtggaggctgcgggggtcccggcctctgcggtctctctggccggcc

SEQ ID NO: 467406 - DNA, 94 bp, Homo sapiens
  chr4:187647546-187647640
  hyper
  lymphoid_neoplasm vs. liver_bileduct,upper_gi
cggcagctccgtgatcccctcgcggtgtagatatgtgttaagagccgggtttgaagtaccaactttgcctccccgggatcttcagcatgtccct

SEQ ID NO: 467407 - DNA, 394 bp, Homo sapiens
  chr4:187647669-187648063
  hyper
  lymphoid_neoplasm vs. liver_bileduct,upper_gi
gacccaggcggccgcatctccggaggcttccgaccagggcaaacttaagcaccaaacgcaggcgaaaagagagtgcgcggggccggaacgagggcccgggagcagccaagtttgtcaggacgtgcccaggcagccagccgccgagttgaggagttgcggccgccggctgcggcgactcgctgcctctttccccactccctcccccttggaggcggtgggggaggggaggtgacgtcagcgccccgcctcgccccccgccccgggcgcggacgggattctccggctgggcgcgccaccccgacagtggcagcagcggccgtggaggctgcgggggtcccggcctctgcggtctctctggccggccgcagctgtggcgcgggtgaaacgcccgccc

SEQ ID NO: 467408 - DNA, 239 bp, Homo sapiens; identical to SEQ ID NO: 350024
  chr4:187648119-187648358
  hyper
  lymphoid_neoplasm vs. liver_bileduct,upper_gi

SEQ ID NO: 467409 - DNA, 75 bp, Homo sapiens
  chr5:523704-523779
  hyper
  lymphoid_neoplasm vs. sarcoma,anorectal,non_cancer, thyroid,pancreas_gallbladder,ovary
cgaccgggattttctaaaaaaaaaaaaaaaaaaggaggcccgccaatgggaacgctgcgcctgtagggaggattc

SEQ ID NO: 467410 - DNA, 2 bp, Homo sapiens
  chr5:524880-524882
  hyper
  lymphoid_neoplasm vs. sarcoma
gc

SEQ ID NO: 467411 - DNA, 210 bp, Homo sapiens; identical to SEQ ID NO: 332279
  chr5:1004778-1004988
  hyper
  lymphoid_neoplasm vs. pancreas_gallbladder,head_and_neck, colorectal,cervical

SEQ ID NO: 467412 - DNA, 117 bp, Homo sapiens
  chr5:1009142-1009259
  hyper
  lymphoid_neoplasm vs. head_and_neck,ovary,sarcoma, prostate,anorectal
cgcggggcccggcggggcgtggcggcggcgatggggaaactgcagtcgaagcacggtgagccgcgggccggtagggcgggagggcgggcgggcgggcgtggggccgcctctcactgt

SEQ ID NO: 467413 - DNA, 151 bp, Homo sapiens; identical to SEQ ID NO: 350030
  chr5:1009625-1009776
  hyper
  lymphoid_neoplasm vs. head_and_neck,ovary,sarcoma, prostate,anorectal

SEQ ID NO: 467414 - DNA, 991 bp, Homo sapiens; identical to SEQ ID NO: 332283
  chr5:1111396-1112387
  hyper
  lymphoid_neoplasm vs. renal,bladder_and_urothelial, melanoma,upper_gi,lung,liver_bileduct

SEQ ID NO: 467415 - DNA, 167 bp, Homo sapiens
  chr5:1155508-1155675
  hyper
  lymphoid_neoplasm vs. pancreas_gallbladder,prostate, myeloid_neoplasm
cgaggtcagagggcgccccgggagctgtcggcccatccccgcggcccctgccccggctcggtgtcacctgcaggccccggacagggcgggatccccgcagggaactgccccaggtccccggagcgcgcggcgggcggcaggggcggggctccgctgggctgggggga

SEQ ID NO: 467416 - DNA, 70 bp, Homo sapiens; identical to SEQ ID NO: 350034
  chr5:1877239-1877309
  hyper
  lymphoid_neoplasm vs. melanoma,multiple_myeloma

SEQ ID NO: 467417 - DNA, 52 bp, Homo sapiens
  chr5:9545445-9545497
  hyper
  lymphoid_neoplasm vs. head_and_neck
cggcacaggcgggtacacaaacttccagcccgtgcactagctcaactgtggg

SEQ ID NO: 467418 - DNA, 588 bp, Homo sapiens; identical to SEQ ID NO: 370667
  chr5:9545851-9546439
  hyper
  lymphoid_neoplasm vs. head_and_neck

SEQ ID NO: 467419 - DNA, 74 bp, Homo sapiens; identical to SEQ ID NO: 458097
  chr5:11903295-11903369
  hyper
  lymphoid_neoplasm vs. melanoma

SEQ ID NO: 467420 - DNA, 89 bp, Homo sapiens
  chr5:16935468-16935557
  hyper
  lymphoid_neoplasm vs. uterine
cgcacgttttgcaaaggaaataccagacaagacctttcttggagaaaggcaggtccccgctgaacattttattgggcttcctgcacccg

SEQ ID NO: 467421 - DNA, 267 bp, Homo sapiens
  chr5:16935617-16935884
  hyper
  lymphoid_neoplasm vs. uterine
gggtgtcccagggcgccccgagagccagccacccacgcaaacggaaacgcaccttcgctacctcccggagcaaaatgcgagcgcgggacaggacgaaacaaaacctgcccgggcttactcatcagagactccgcggggggatggggggtgatttcaggagactcccagaaagttgcgccttccagggcttaggaaaaagtacccagggcgcgcggcgtggtgggcagacgcctctctccctgggctccggaggccaggtcggactgg

SEQ ID NO: 467422 - DNA, 92 bp, Homo sapiens
  chr5:16935792-16935884
  hyper
  lymphoid_neoplasm vs. uterine,sarcoma,colorectal
cgccttccagggcttaggaaaaagtacccagggcgcgcggcgtggtgggcagacgcctctctccctgggctccggaggccaggtcggactgg

SEQ ID NO: 467423 - DNA, 34 bp, Homo sapiens
  chr5:16936321-16936355
  hyper
  lymphoid_neoplasm vs. uterine,sarcoma,colorectal
agccgcgatccccgcgcgagcgcttggaggtgag

SEQ ID NO: 467424 - DNA, 71 bp, Homo sapiens
  chr5:16936514-16936585
  hyper
  lymphoid_neoplasm vs. uterine,sarcoma,colorectal
ctggccccgcccgggcggagcgccccgcccccttcccgaccaggccccgcccactctaagcccgaagcagc

SEQ ID NO: 467425 - DNA, 34 bp, Homo sapiens; identical to SEQ ID NO: 467423
  chr5:16936321-16936355
  hyper
  lymphoid_neoplasm vs. ovary,cervical,upper_gi,colorectal, uterine,breast,lung

SEQ ID NO: 467426 - DNA, 71 bp, Homo sapiens; identical to SEQ ID NO: 467424
  chr5:16936514-16936585
  hyper
  lymphoid_neoplasm vs. ovary,cervical,upper_gi,colorectal, uterine,breast,lung

SEQ ID NO: 467427 - DNA, 235 bp, Homo sapiens; identical to SEQ ID NO: 350049
  chr5:16936833-16937068
  hyper
  lymphoid_neoplasm vs. ovary,cervical,upper_gi,colorectal, uterine,breast,lung

SEQ ID NO: 467428 - DNA, 132 bp, Homo sapiens
  chr5:34655742-34655874
  hyper
  lymphoid_neoplasm vs. pancreas_gallbladder,uterine
cgttcccatgcgcaatctcgcctgtcagttcaggctgtaggtttctcctttctaactcctgagcagaacaacactgaacggtggtagtcttgccttgccacccaatgagtgctagaaaacagtcacttcaac

SEQ ID NO: 467429 - DNA, 442 bp, Homo sapiens
  chr5:34655910-34656352
  hyper
  lymphoid_neoplasm vs. pancreas_gallbladder,uterine
ctttactttctgttcaatgattttggaaaacaaccttttagattctggtcagaaggggcttggatccgtgactttgaaacactcgccactaccacaaacgactttggaagttaatcagaaataaacagtatctgggatctcatccgtcctaaacccaggggtcagagcgtggggggcttccactaacttcaggttaagaggatgaaacagatccgcggagaagggtcccacgatccctggagactaaaagcaagccacgaacagccgggacgcgcgggccggggagatgcgccgggggctggagggcggagagcaccccccgcaggtcccggccagagcccggggccgggtcacctgactcgcggaatttggggccgcgaggggtggaatgggaggggaatggttagcgcctcccttcccgctcccactggatccaggtcgg

SEQ ID NO: 467430 - DNA, 153 bp, Homo sapiens
  chr5:34656421-34656574
  hyper
  lymphoid_neoplasm vs. pancreas_gallbladder,uterine
gctcggcgcccactgacccccgcagcgggggaggaggagggactgcggcgcaggaagccgagcaggaagcgagcccggcggccgcgttttcctggggaagcggcgggcggggtggagcagccagctgggtccggggagcgccgccgccgcctc

SEQ ID NO: 467431 - DNA, 229 bp, Homo sapiens
  chr5:34656123-34656352
  hyper
  lymphoid_neoplasm vs. cervical,melanoma,breast,uterine, anorectal,head_and_neck,lung,upper_gi,colorectal, myeloid_neoplasm,ovary,thyroid
cgcggagaagggtcccacgatccctggagactaaaagcaagccacgaacagccgggacgcgcgggccggggagatgcgccgggggctggagggcggagagcaccccccgcaggtcccggccagagcccggggccgggtcacctgactcgcggaatttggggccgcgaggggtggaatgggaggggaatggttagcgcctcccttcccgctcccactggatccaggtcgg

SEQ ID NO: 467432 - DNA, 222 bp, Homo sapiens
  chr5:34656421-34656643
  hyper
  lymphoid_neoplasm vs. cervical,melanoma,breast,uterine, anorectal,head_and_neck,lung,upper_gi,colorectal, myeloid_neoplasm,ovary,thyroid
gctcggcgcccactgacccccgcagcgggggaggaggagggactgcggcgcaggaagccgagcaggaagcgagcccggcggccgcgttttcctggggaagcggcgggcggggtggagcagccagctgggtccggggagcgccgccgccgcctcgatggggtgagtgcgcggcacggagttgggaggctcccggcgcggggtcccgggctcgtgtccccgcct

SEQ ID NO: 467433 - DNA, 46 bp, Homo sapiens; identical to SEQ ID NO: 350057
  chr5:34657034-34657080
  hyper
  lymphoid_neoplasm vs. cervical,melanoma,breast,uterine, anorectal,head_and_neck,lung,upper_gi,colorectal, myeloid_neoplasm,ovary,thyroid

SEQ ID NO: 467434 - DNA, 56 bp, Homo sapiens
  chr5:34656587-34656643
  hyper
  lymphoid_neoplasm vs. lung,multiple_myeloma,breast, thyroid,uterine,colorectal,anorectal,ovary
cgcggcacggagttgggaggctcccggcgcggggtcccgggctcgtgtccccgcct

SEQ ID NO: 467435 - DNA, 387 bp, Homo sapiens; identical to SEQ ID NO: 358087
  chr5:34657034-34657421
  hyper
  lymphoid_neoplasm vs. lung,multiple_myeloma,breast, thyroid,uterine,colorectal,anorectal,ovary

SEQ ID NO: 467436 - DNA, 376 bp, Homo sapiens; identical to SEQ ID NO: 358088
  chr5:35230090-35230466
  hyper
  lymphoid_neoplasm vs. multiple_myeloma,liver_bileduct

SEQ ID NO: 467437 - DNA, 101 bp, Homo sapiens; identical to SEQ ID NO: 459724
  chr5:38556107-38556208
  hyper
  lymphoid_neoplasm vs. cervical,lung,melanoma,thyroid, renal,head_and_neck,pancreas_gallbladder,sarcoma

SEQ ID NO: 467438 - DNA, 86 bp, Homo sapiens; identical to SEQ ID NO: 459725
  chr5:38556985-38557071
  hyper
  lymphoid_neoplasm vs. cervical,lung,melanoma,thyroid, renal,head_and_neck,pancreas_gallbladder,sarcoma

SEQ ID NO: 467439 - DNA, 1 bp, Homo sapiens
  chr5:38845617-38845618
  hyper
  lymphoid_neoplasm vs. cervical,breast,lung,sarcoma, upper_gi,multiple_myeloma,anorectal,myeloid_neoplasm,renal, head_and_neck
c

SEQ ID NO: 467440 - DNA, 38 bp, Homo sapiens
  chr5:39424892-39424930
  hyper
  lymphoid_neoplasm vs. colorectal
cgaagctactcaccggctagctattgcctccgtgaagc

SEQ ID NO: 467441 - DNA, 278 bp, Homo sapiens
  chr5:42424338-42424616
  hyper
  lymphoid_neoplasm vs. sarcoma
cggcagggagttgcgggcgacagacgaaccatcacactctggcgtctgctctggcccgcgagtagtgtacgtggaggggtttactccggagacagttttgttaaagtcataaaagttttgctagtgtgtttctgtttgccatcatctgcctggctgcggcaggaactgccgaggctgctgctgttgcgcggggaagaatccccggcagcgcgactggagagactggggaggtcgagctgtgcgcgtggacacagcgcgcagagcgcgcggtcttttgc

SEQ ID NO: 467442 - DNA, 171 bp, Homo sapiens; identical to SEQ ID NO: 464590
  chr5:72733185-72733356
  hyper
  lymphoid_neoplasm vs. ovary,colorectal,upper_gi

SEQ ID NO: 467443 - DNA, 317 bp, Homo sapiens
  chr5:72733185-72733502
  hyper
  lymphoid_neoplasm vs. colorectal,pancreas_gallbladder, upper_gi
ctccagcaaactaacatcttgataagtccgctgacaacaaaataaacagtggagaaggctggagggcggggggcgccgtggcccgcggctggttcgcagcagctcggcggccttctgcgaggggaaggcgggccgctctcggctttgtgcttggggctttaggaggggggcggttggaggagagagagaagccgaattatctccctttccgcgtctcattcccgtggatggagggccccgggagcgtttgacgatggcagtttggggcgtgcgcgctgcctcgtcggcccctacgacgtcaggcgccggagctgccg

SEQ ID NO: 467444 - DNA, 177 bp, Homo sapiens; identical to SEQ ID NO: 350088
  chr5:72733588-72733765
  hyper
  lymphoid_neoplasm vs. colorectal,pancreas_gallbladder, upper_gi

SEQ ID NO: 467445 - DNA, 369 bp, Homo sapiens
  chr5:74349128-74349497
  hyper
  lymphoid_neoplasm vs. sarcoma,lung,upper_gi, head_and_neck
cggggttcagcccggttccccgcgcggctccgagagggcgcccccgcctgccgcctggagatggacgcggcgccgaagttttccccggcgggaaaacgaaagtcgtgaggagcagagggtcggggcgtcccggcggagacgaggctgagaccgggttaacatctccagccccgggcgaccctcgctcccccgcgtggccaagtcgacttacgagagggagcgggccagccccgaacgcggggtccgtgcggctgcggaggccgccccggcgggggccgagggttgcgctctgggttcccaggctctccgcggcggctcgctctcgccgcgctcctccgtcgccctgctggggagccgctctcgcccggc

SEQ ID NO: 467446 - DNA, 20 bp, Homo sapiens
  chr5:75380048-75380068
  hyper
  lymphoid_neoplasm vs. myeloid_neoplasm
cgcctgctgtgcgccaggcc

SEQ ID NO: 467447 - DNA, 29 bp, Homo sapiens
  chr5:75380974-75381003
  hyper
  lymphoid_neoplasm vs. myeloid_neoplasm
catggcaagttccgaaaggcctcgtgctc

SEQ ID NO: 467448 - DNA, 1 bp, Homo sapiens
  chr5:76114396-76114397
  hyper
  lymphoid_neoplasm vs. liver_bileduct,colorectal, pancreas_gallbladder
c

SEQ ID NO: 467449 - DNA, 408 bp, Homo sapiens
  chr5:76114443-76114851
  hyper
  lymphoid_neoplasm vs. liver_bileduct,colorectal, pancreas_gallbladder
cgcatccctcctcctgcagggtccaccgcaccgggaagccctgtctgtatcagttaccaaccacaattgcagtgagtacgaatcgtggctttcccacagtcaggaaaggcaagggagaccgacgacccgcttctctaggagtaagtaaagattaaaggtagttcgcggtatagcctaggcagggattaacccgtggtcccagcgctcctgctatttgcattccaaagcagacacctcatgcgctcaaccccgcccgcaggcggctcccgcagtctaagggacctggcgcgagtccgggaagcggagggcgcagctgcgcagggaagggggccgggggcgggaccagggcgcgcgttccggtcccggggcgtggcctcccgcaggtgagtacgctgctccttcggtttc

SEQ ID NO: 467450 - DNA, 283 bp, Homo sapiens
  chr5:76114880-76115163
  hyper
  lymphoid_neoplasm vs. liver_bileduct,colorectal, pancreas_gallbladder
cgcagcagaggctccgattcggggcaggtgagaggctgactttctctcggtgcgtccagtggagctctgagtttcgaatcggcggcggcggattccccgcgcgcccggcgtcggggcttccaggaggatgcggagccccagcgcggcgtggctgctgggggccgccatcctgctagcagcctctctctcctgcagtggcaccatccaaggtgagaaacctggccaaggagggctcttatctctgaggagctggggtcctgggcacgctgggcagacggtggga

SEQ ID NO: 467451 - DNA, 59 bp, Homo sapiens
  chr5:76115225-76115284
  hyper
  lymphoid_neoplasm vs. liver_bileduct,colorectal, pancreas_gallbladder
ccccttggtggctttgatgtgaggtctctgcgccaaggaggcacccaggtgggacatgc

SEQ ID NO: 467452 - DNA, 58 bp, Homo sapiens
  chr5:76114793-76114851
  hyper
  lymphoid_neoplasm vs. colorectal
cgcgttccggtcccggggcgtggcctcccgcaggtgagtacgctgctccttcggtttc

SEQ ID NO: 467453 - DNA, 283 bp, Homo sapiens; identical to SEQ ID NO: 467450
  chr5:76114880-76115163
  hyper
  lymphoid_neoplasm vs. colorectal

SEQ ID NO: 467454 - DNA, 219 bp, Homo sapiens
  chr5:76115225-76115444
  hyper
  lymphoid_neoplasm vs. colorectal
ccccttggtggctttgatgtgaggtctctgcgccaaggaggcacccaggtgggacatgcgggagcagctgaagtcagcggagccgggcagaggcagagatttccccaaagaccccacttcccgtagaggctgtcatgctgggcacctccaggccccagcgtgggttcggggaaagggagggaaggaaggagtagctgtgtctaaagggtacgcagagga

SEQ ID NO: 467455 - DNA, 78 bp, Homo sapiens; identical to SEQ ID NO: 358150
  chr5:76115609-76115687
  hyper
  lymphoid_neoplasm vs. colorectal

SEQ ID NO: 467456 - DNA, 42 bp, Homo sapiens; identical to SEQ ID NO: 462893
  chr5:79865662-79865704
  hyper
  lymphoid_neoplasm vs. sarcoma

SEQ ID NO: 467457 - DNA, 91 bp, Homo sapiens; identical to SEQ ID NO: 462894
  chr5:79865744-79865835
  hyper
  lymphoid_neoplasm vs. sarcoma

SEQ ID NO: 467458 - DNA, 69 bp, Homo sapiens; identical to SEQ ID NO: 350104
  chr5:80256566-80256635
  hyper
  lymphoid_neoplasm vs. uterine

SEQ ID NO: 467459 - DNA, 46 bp, Homo sapiens; identical to SEQ ID NO: 453298
  chr5:87436549-87436595
  hyper
  lymphoid_neoplasm vs. uterine,myeloid_neoplasm,lung, bladder_and_urothelial,thyroid,breast,ovary,non_cancer,sarcoma

SEQ ID NO: 467460 - DNA, 735 bp, Homo sapiens; identical to SEQ ID NO: 345179
  chr5:87436769-87437504
  hyper
  lymphoid_neoplasm vs. uterine,myeloid_neoplasm,lung, bladder_and_urothelial,thyroid,breast,ovary,non_cancer,sarcoma

SEQ ID NO: 467461 - DNA, 866 bp, Homo sapiens; identical to SEQ ID NO: 350129
  chr5:94619403-94620269
  hyper
  lymphoid_neoplasm vs. head_and_neck,lung, bladder_and_urothelial

SEQ ID NO: 467462 - DNA, 503 bp, Homo sapiens
  chr5:94619827-94620330
  hyper
  lymphoid_neoplasm vs. melanoma,breast,lung
cgtccgccaggaggcgtccctcccgctgctcccgaggccgccgcgggcccctttacggcggggagcaaatgctcgcggatccggcggcgtagcgtggacccctgctcggctctgccggcgccgccgggctccaggggctccggcgacgagcagcacaggttgggctgcgaggaggagaagactcggtccagcacttgcttccgcttcttgaagccgctccacctgctgcctgcaccactccccctggccggtgcattccctgtgcccaccgggggtggcggggagggcgacggggtgtccgcagtgcggcgctctggacccccagcgcgcccgcccccgccgcccttgctcctgcccacccccagctgcaggttcttccagagccgggcctggaaggaggaggacgccgccggcggctctggctcgcccgccgcggcagcccggggctccatcctccaccccctgctcctcctctcccctcctcctcctcctcctcctcctgc

SEQ ID NO: 467463 - DNA, 299 bp, Homo sapiens
  chr5:107005685-107005984
  hyper
  lymphoid_neoplasm vs. pancreas_gallbladder,lung
cgctctctctgcgcgcaccgggaaaagagaagggaaaattaaaattaaaaaaaaaaaaaaaaaaaaaaaaactttgggggatgtttggcgggttctctccgcagtccctgcggacccacgctccaggaaggagctcccggctgcgcacactgggggctccccgcgccgggaaccggatgccagccagatgccggggctgggaagcagagaagtccctactccccggctcccgcccttttccgagtctcccggcgccccgcagaagcagttggtctaggcagccccggggactcccaggg

SEQ ID NO: 467464 - DNA, 85 bp, Homo sapiens
  chr5:107006260-107006345
  hyper
  lymphoid_neoplasm vs. pancreas_gallbladder,lung
cacacacatccagagcaccagaaacaccagcgtcaacatctccacgtgcaacatcacgcctggccagcggcggagcccccgacgc

SEQ ID NO: 467465 - DNA, 138 bp, Homo sapiens
  chr5:107005846-107005984
  hyper
  lymphoid_neoplasm vs. bladder_and_urothelial,lung, head_and_neck,pancreas_gallbladder,anorectal,renal,cervical, non_cancer,prostate,ovary,breast
cgcgccgggaaccggatgccagccagatgccggggctgggaagcagagaagtccctactccccggctcccgcccttttccgagtctcccggcgccccgcagaagcagttggtctaggcagccccggggactcccaggg

SEQ ID NO: 467466 - DNA, 450 bp, Homo sapiens
  chr5:107006260-107006710
  hyper
  lymphoid_neoplasm vs. bladder_and_urothelial,lung, head_and_neck,pancreas_gallbladder,anorectal,renal,cervical, non_cancer,prostate,ovary,breast
cacacacatccagagcaccagaaacaccagcgtcaacatctccacgtgcaacatcacgcctggccagcggcggagcccccgacgcgccactccggggagagagcggggatccggagggagggaggcaggcaaagggacagagagagagcgggcgccaaataaatatgaataaataaaaatgaaagtgggcgagaaaggaaagaggcgcccaccaagctggggaggggtaggagagcgagaagaaaagaaggcggtgggatggggggtgataaagacaaactcgcacccccactggagggttcaggaggaaaaaggaatcacaagatggagagaagcgtgcgtgtgtgtggtggcggcggcgagggcgggggaagaggtgccaagctgtgtctcgggcggcggcggcaggccggtcaccccgggagagggaggtgcgcgccgggccgggcg

SEQ ID NO: 467467 - DNA, 358 bp, Homo sapiens
  chr5:107006352-107006710
  hyper
  lymphoid_neoplasm vs. renal,breast,lung
cggggagagagcggggatccggagggagggaggcaggcaaagggacagagagagagcgggcgccaaataaatatgaataaataaaaatgaaagtgggcgagaaaggaaagaggcgcccaccaagctggggaggggtaggagagcgagaagaaaagaaggcggtgggatggggggtgataaagacaaactcgcacccccactggagggttcaggaggaaaaaggaatcacaagatggagagaagcgtgcgtgtgtgtggtggcggcggcgagggcgggggaagaggtgccaagctgtgtctcgggcggcggcggcaggccggtcaccccgggagagggaggtgcgcgccgggccgggcg

SEQ ID NO: 467468 - DNA, 253 bp, Homo sapiens
  chr5:112823814-112824067
  hyper
  lymphoid_neoplasm vs. melanoma,breast,anorectal
ggccaacttttcccgcgagcttctgagcaacttgccgcaagttggggcgagggggcagagcaggggtcaagggcgcgcggagggactgatctcgctcctgtcggtttcctcgtacctccccgcgtacctgctgatgtatccgtccccgtcgccgtcgcacgtctggaagaggcgccgcatcctctcctcctcgccggtgctggacgtgtcgctgctgctgctgctgctgccgctgccgccgccgccgccgccg

SEQ ID NO: 467469 - DNA, 27 bp, Homo sapiens
  chr5:127872819-127872846
  hyper
  lymphoid_neoplasm vs. melanoma
cgcccaacccccggagagagggctttc

SEQ ID NO: 467470 - DNA, 168 bp, Homo sapiens
  chr5:129239570-129239738
  hyper
  lymphoid_neoplasm vs. uterine
cgcggagtggcagcggtaagaacaacgtggaaaggacggaaaacgcgaagagtggcgccctggcggacctggggcggggcagagtggtaagggtcacgccaggacgtacccggctgtgggccgggggaggagagcacggtgggacagcaacgaacttgctgggggctc

SEQ ID NO: 467471 - DNA, 243 bp, Homo sapiens
  chr5:129239782-129240025
  hyper
  lymphoid_neoplasm vs. uterine
gggaggaggccagtagagcccccagacacgagtgtcgggaggccagcggaggggcgggacgggacgggaaatgggacgaagagcaagagctgggggaggagggaagagggggcgtcggcgctgcaagccggaggcggcccgacagggatcgtttccttccggagaggaggccggctctggactgaggcgcggacggggggcgtccaagggcgggtgacggggaaataccgcggcccgcgcttc

SEQ ID NO: 467472 - DNA, 56 bp, Homo sapiens
  chr5:129239969-129240025
  hyper
  lymphoid_neoplasm vs. melanoma,bladder_and_urothelial, uterine,multiple_myeloma,head_and_neck,myeloid_neoplasm, anorectal,cervical,thyroid,breast,lung,renal
cgcggacggggggcgtccaagggcgggtgacggggaaataccgcggcccgcgcttc

SEQ ID NO: 467473 - DNA, 35 bp, Homo sapiens
  chr5:129240901-129240936
  hyper
  lymphoid_neoplasm vs. melanoma,bladder_and_urothelial, uterine,multiple_myeloma,head_and_neck,myeloid_neoplasm, anorectal,cervical,thyroid,breast,lung,renal
ctccagcggccgagggggagcccgaggaggaggac

SEQ ID NO: 467474 - DNA, 5 bp, Homo sapiens
  chr5:129240962-129240967
  hyper
  lymphoid_neoplasm vs. melanoma,bladder_and_urothelial, uterine,multiple_myeloma,head_and_neck,myeloid_neoplasm, anorectal,cervical,thyroid,breast,lung,renal
cggcc

SEQ ID NO: 467475 - DNA, 35 bp, Homo sapiens; identical to SEQ ID NO: 467473
  chr5:129240901-129240936
  hyper
  lymphoid_neoplasm vs. head_and_neck,melanoma,anorectal, uterine,myeloid_neoplasm,prostate,thyroid,lung,non_cancer, breast

SEQ ID NO: 467476 - DNA, 144 bp, Homo sapiens
  chr5:129240962-129241106
  hyper
  lymphoid_neoplasm vs. head_and_neck,melanoma,anorectal, uterine,myeloid_neoplasm,prostate,thyroid,lung,non_cancer, breast
cggccggccggggagtagccacaacggcagcggggacgggggcgctgccgccccgagcgcccgaccccgggacttcctgtacgtgggggtgatgaccgcgcagaagtacctgggcagccgcgcgctggccgcgcagcggacctg

SEQ ID NO: 467477 - DNA, 274 bp, Homo sapiens
  chr5:129241140-129241414
  hyper
  lymphoid_neoplasm vs. head_and_neck,melanoma,anorectal, uterine,myeloid_neoplasm,prostate,thyroid,lung,non_cancer, breast
tccagccagcagccccccaacgccggccagcccccgccacccctgcctgtcatcgcgctaccgggtgtggacgactcctatcctccccagaaaaagtccttcatgatgatcaagtacatgcacgaccactacctggacaagtatgagtggttcatgcgcgccgacgacgatgtctacatcaaaggtgacctccctgcgccggctttccagcctgccagtctccccgactcctttctctgtaaccggtcctagcccctgcccagcccctccgctg

SEQ ID NO: 467478 - DNA, 227 bp, Homo sapiens
  chr5:134824599-134824826
  hyper
  lymphoid_neoplasm vs. multiple_myeloma,cervical,lung, colorectal,breast,bladder_and_urothelial
cggcggagggcagaagcgtcttcttggctggctagagaagctccgccggagtggcctcctcccctcccccaggccggggaggaggccgccgagggctctccaattggagagcctttcatctctttgtttttacagtgattaacccgtccgagcgcgctccgagcgtggctccaggcagcgcagggggaggggagaggacggctgggcaagggaagggagggaggagg

SEQ ID NO: 467479 - DNA, 176 bp, Homo sapiens
  chr5:134870248-134870424
  hyper
  lymphoid_neoplasm vs. myeloid_neoplasm
cggctcaaaccgaattttcatgctcgtttttcttcattagagttctacaaattgtaaaattgacttttcacctcgtcttcaggggctgatctgtcccttttctaaatcacactgaagtggtggctggggtcagttctgagccagtcacaaaggaggttttgtggagttcagaaagt

SEQ ID NO: 467480 - DNA, 15 bp, Homo sapiens
  chr5:134914178-134914193
  hyper
  lymphoid_neoplasm vs. bladder_and_urothelial
cgtcgctgtagcgga

SEQ ID NO: 467481 - DNA, 3 bp, Homo sapiens
  chr5:134915077-134915080
  hyper
  lymphoid_neoplasm vs. bladder_and_urothelial
tcc

SEQ ID NO: 467482 - DNA, 341 bp, Homo sapiens; identical to SEQ ID NO: 370878
  chr5:135528891-135529232
  hyper

SEQ ID NO: 467483 - DNA, 14 bp, Homo sapiens
  chr5:136833998-136834012
  hyper
  lymphoid_neoplasm vs. myeloid_neoplasm
cgcttcaggggtcc

SEQ ID NO: 467484 - DNA, 1 bp, Homo sapiens
  chr5:136835144-136835145
  hyper
  lymphoid_neoplasm vs. myeloid_neoplasm,prostate, non_cancer,uterine,anorectal,bladder_and_urothelial,breast, thyroid,melanoma
c

SEQ ID NO: 467485 - DNA, 275 bp, Homo sapiens; identical to SEQ ID NO: 350183
  chr5:140346034-140346309
  hyper
  lymphoid_neoplasm vs. sarcoma,non_cancer, myeloid_neoplasm,uterine

SEQ ID NO: 467486 - DNA, 439 bp, Homo sapiens
  chr5:145214425-145214864
  hyper
  lymphoid_neoplasm vs. upper_gi
cggaaagctccacacgtcggtcatctgcaactccacggagctcacgagctgggattcccggaggctcttcctaaaaggaaagcctcttctttcagctggggcaggtgtgaacgtgatgccaagcacggccccttttcccgctccctgtaaagggagtcttcgaggaaatccctctcgacccacacatccctgaagcaaagcccgcagctggaaagagacactggcggtgccagcttccgcgtggatgaaggagaggagagaggggcaagcagcggaggcagcgcgggatacggaaggtggaagcggggcggtacctttcggagaaagctggcgaccacctgctcgaaggggtacttgtacacctggtgcacatccaccgagacccccatccccgcgcgccgcgggccccgcgcaccggccacgcctccgcgagctcaga

SEQ ID NO: 467487 - DNA, 235 bp, Homo sapiens; identical to SEQ ID NO: 370904
  chr5:145215152-145215387
  hyper
  lymphoid_neoplasm vs. upper_gi

SEQ ID NO: 467488 - DNA, 127 bp, Homo sapiens
  chr5:148520933-148521060
  hyper
  lymphoid_neoplasm vs. thyroid,liver_bileduct,anorectal, non_cancer,breast,renal,colorectal,head_and_neck, pancreas_gallbladder
cgtccatctcacaaggcctcgtccatctcccatcacaccctagggcccaggcagaagcccggcggggcggggcctcggacacgcgccggtgcgtccagcaggtggcagcagcgagcggccgcgcccc

SEQ ID NO: 467489 - DNA, 45 bp, Homo sapiens; identical to SEQ ID NO: 346753
  chr5:148521331-148521376
  hyper
  lymphoid_neoplasm vs. thyroid,liver_bileduct,anorectal, non_cancer,breast,renal,colorectal,head_and_neck, pancreas_gallbladder

SEQ ID NO: 467490 - DNA, 253 bp, Homo sapiens
  chr5:148650971-148651224
  hyper
  lymphoid_neoplasm vs. ovary,bladder_and_urothelial, myeloid_neoplasm,anorectal,thyroid,renal,head_and_neck, non_cancer,lung
cgcggcgaatggagaagacaagcccaaagccaggaaatgggtggcggctgcagggaagggggttttgattccctaggataaaaacgcgctccaacagtctccgcattccggcatggagccggctgaggggtgcggtggtaagaccccatcgctagcggagtgcaagcaaagccgcacacctcctgggtccgggctggggcaggccgcgcgggcgcgggaacgaacgcgtgcggacggggaaaagggtcctcca

SEQ ID NO: 467491 - DNA, 103 bp, Homo sapiens; identical to SEQ ID NO: 358280
  chr5:149569886-149569989
  hyper
  lymphoid_neoplasm vs. multiple_myeloma

SEQ ID NO: 467492 - DNA, 183 bp, Homo sapiens
  chr5:149681827-149682010
  hyper
  lymphoid_neoplasm vs. multiple_myeloma
cgccagcctccccgggcccgtcggccacgaagctcggcttggcccagtcccaggacaggtagccgaagctgagcaggctgaccagggagaagccagtgagggtgtgcatcgccaagccggcccgcgcgtcccggcgcgccgggctcctggggcctcaccacctcgcgcgcccagggcgcacca

SEQ ID NO: 467493 - DNA, 256 bp, Homo sapiens
  chr5:155108849-155109105
  hyper
  lymphoid_neoplasm vs. breast,melanoma,multiple_myeloma, prostate
cagcataagcgcttagagatccgcagccgcctgggcgcgctaagagatcgtgggcagacctagcccttagggcagcctaagcgcgcttcactaaagaaaaaagactgttggtatattaaagaagtgtgtgtgtgagagagaaagagacagagaaagagacagagagacatgggtgggggcaccaggaaaggtagcccgagtaggaggtgctagtgaaatttatcttttgctgacggatccagcctccggaatgccc

SEQ ID NO: 467494 - DNA, 256 bp, Homo sapiens; identical to SEQ ID NO: 467493
  chr5:155108849-155109105
  hyper
  lymphoid_neoplasm vs. multiple_myeloma

SEQ ID NO: 467495 - DNA, 17 bp, Homo sapiens
  chr5:155109499-155109516
  hyper
  lymphoid_neoplasm vs. multiple_myeloma
tcctccggctgggcggc

SEQ ID NO: 467496 - DNA, 43 bp, Homo sapiens
  chr5:159399024-159399067
  hyper
  lymphoid_neoplasm vs. multiple_myeloma
cgggtgccagtgccgcggccgcggccgccgccgacgccgccgc

SEQ ID NO: 467497 - DNA, 97 bp, Homo sapiens
  chr5:168727259-168727356
  hyper
  lymphoid_neoplasm vs. multiple_myeloma
cgggccctgcgtctggaaccctcacccctggagaggcactgctctttgcccatcgctgggggtttcgagacctctctttccagatctgaccaagcct

SEQ ID NO: 467498 - DNA, 227 bp, Homo sapiens
  chr5:169930945-169931172
  hyper
  lymphoid_neoplasm vs. bladder_and_urothelial
ccgtgcagccctcgcccccgccccgcccctccgtagttgcccgcccgccgccccctccgccgccccctccgccgctccgactctcgccccgagcgctggcagcaggcagcaggcagcaggcgggcgcgctgtggctccgcgccgcgcggtccgggctctgttcattcatgattggtactcggccctccgagacccagcccgagcgcagggaggggagccgagtgtgc

SEQ ID NO: 467499 - DNA, 22 bp, Homo sapiens
  chr5:169931484-169931506
  hyper
  lymphoid_neoplasm vs. bladder_and_urothelial
caattcagagtagacaaaccac

SEQ ID NO: 467500 - DNA, 415 bp, Homo sapiens; identical to SEQ ID NO: 461174
  chr5:174150711-174151126
  hyper
  lymphoid_neoplasm vs. cervical,upper_gi

SEQ ID NO: 467501 - DNA, 247 bp, Homo sapiens; identical to SEQ ID NO: 461175
  chr5:174151197-174151444
  hyper
  lymphoid_neoplasm vs. cervical,upper_gi

SEQ ID NO: 467502 - DNA, 107 bp, Homo sapiens; identical to SEQ ID NO: 461176
  chr5:174151019-174151126
  hyper
  lymphoid_neoplasm vs. cervical,upper_gi

SEQ ID NO: 467503 - DNA, 247 bp, Homo sapiens; identical to SEQ ID NO: 461175
  chr5:174151197-174151444
  hyper
  lymphoid_neoplasm vs. cervical,upper_gi

SEQ ID NO: 467504 - DNA, 210 bp, Homo sapiens; identical to SEQ ID NO: 461178
  chr5:174151769-174151979
  hyper
  lymphoid_neoplasm vs. cervical,upper_gi

SEQ ID NO: 467505 - DNA, 700 bp, Homo sapiens
  chr5:174151769-174152469
  hyper
  lymphoid_neoplasm vs. upper_gi
ggagcgccgcgtcaaggtctccagcctgcccttcagcgtggaggcgctcatgtccgacaagaagccgcccaaggaggcgtccccgctgccggccgaaagcgcctcggccggggccaccctgcggccactgctgctgtcggggcacggcgctcgggaagcgcacagccccgggccgctggtgaagcccttcgagaccgcctcggtcaagtcggaaaattcagaagatggagcggcgtggatgcaggaacccggccgatattcgccgccgccaagtgagtgcgcgccggggcaggagtaggaggtagcgcggggtactggagggagcggggggcgggtgttccagggctgagggtaccgagacccttctgcgtgcgctacactcccgggaaagcaagcccagggcctctggactcctgggtgcccggggcgttcggcgcgcccagtgcgccgtccgcatccaagacaccctctgggtaataaccgcgctgtgtgtgtctgagactccctcgacatacagattgttttttcaagagcgaaccccagctgggtttacggggtcgctcggtggtccgtttctacagccctcggccctgcgctctggccacttggcttgtttttgtttcactgttccccggagtctctgcctggggagtgaaggagttggatccatgttcagtgagcacttggatgtaccaggaac

SEQ ID NO: 467506 - DNA, 769 bp, Homo sapiens; identical to SEQ ID NO: 461179
  chr5:174151999-174152768
  hyper
  lymphoid_neoplasm vs. upper_gi

SEQ ID NO: 467507 - DNA, 93 bp, Homo sapiens; identical to SEQ ID NO: 461180
  chr5:174162402-174162495
  hyper
  lymphoid_neoplasm vs. multiple_myeloma,upper_gi

SEQ ID NO: 467508 - DNA, 19 bp, Homo sapiens
  chr5:174162856-174162875
  hyper
  lymphoid_neoplasm vs. multiple_myeloma,upper_gi
cccttgtcccccatcatta

SEQ ID NO: 467509 - DNA, 87 bp, Homo sapiens; identical to SEQ ID NO: 350223
  chr5:174162904-174162991
  hyper
  lymphoid_neoplasm vs. multiple_myeloma,upper_gi

SEQ ID NO: 467510 - DNA, 66 bp, Homo sapiens
  chr5:174178103-174178169
  hyper
  lymphoid_neoplasm vs. multiple_myeloma
cgaatcacagactccccgcagtcagagatggcgaagcctccaccgggtcacctcggccggcccccg

SEQ ID NO: 467511 - DNA, 384 bp, Homo sapiens
  chr5:174178248-174178632
  hyper
  lymphoid_neoplasm vs. multiple_myeloma
acacttgcgggggccgcggcgcaccctgacagcccggcagctccgcgccaaaatggatgggtctcgggcggcgagggcacggatacaaatgcgccgccgcgttctcaggtacacaaatgcggcctcgggcgggcgctggttcccaggcgcacggaggcggcggccccttcaactcggggcgcgggcgggagcggaacccgcgttaattactgtacgtttccactgtaaagagtgtcagccggggagcggggccgccgcgcctgcccggccccggcgcacaaaagcttcatatattctgaatgaaggcgaatcgcagcctcggcctccttgaaaagagccgtgagggagacttaattctctccctttcagctgtgctcagactgt

SEQ ID NO: 467512 - DNA, 34 bp, Homo sapiens; identical to SEQ ID NO: 370969
  chr5:175084709-175084743
  hyper
  lymphoid_neoplasm vs. bladder_and_urothelial

SEQ ID NO: 467513 - DNA, 75 bp, Homo sapiens; identical to SEQ ID NO: 462926
  chr5:175084745-175084820
  hyper
  lymphoid_neoplasm vs. bladder_and_urothelial

SEQ ID NO: 467514 - DNA, 13 bp, Homo sapiens
  chr5:178017936-178017949
  hyper
  lymphoid_neoplasm vs. head_and_neck,anorectal, myeloid_neoplasm
cggacttcggtgc

SEQ ID NO: 467515 - DNA, 244 bp, Homo sapiens
  chr5:179498011-179498255
  hyper
  lymphoid_neoplasm vs. head_and_neck,lung,cervical, liver_bileduct,prostate,uterine,breast,non_cancer,colorectal, sarcoma,anorectal
cggcacgtttttatattagaaaagggccgcatccttccagatctagcgcagccttaagtccgtgatttgaggaacctgccgcttccaaaatacaggctgagacgtcctccccatgaagtagttttgcgctcttgcaccacctcctttgtctacgctgtccctgcaaactcctagctcaatgccctccagcaaacgagctgcctgaacgcaaagatgaccgttccaagtcttttttaaaagaagg

SEQ ID NO: 467516 - DNA, 505 bp, Homo sapiens
  chr5:179498363-179498868
  hyper
  lymphoid_neoplasm vs. head_and_neck,lung,cervical, liver_bileduct,prostate,uterine,breast,non_cancer,colorectal, sarcoma,anorectal
agccagggccagagccggggccgggaaccctagtcccgccgcctacgcgggatgcagcgaccaccgcccgccgcccccgggccggcactcacctccgtggaggggcagcggcgccagcacctggccgcggacctcggccttgggggagtcaagcccgtagcgcccgcggtcgatgcgaaacgtgagcggggcgccgcggccgggctcctgcaccgtcacgttgatgagcgccgtgtagtactcctggctcgcgttgtctgcccgtgccggccacaggctgcaggtcagcagggcgagcgcggcgagccgggcagggcccgcccgccccgcgcagctcatcgtccctccggcagccgccgctgctcgcggaccgggctccggggccggcgcctagaggcggggcgggcgcggcccgggcggcggcgggagcgcgcgcgcgcggcctgcgcggggccgagcccgagcgcggccctcctggacgccgcggccccgccgctcgccgccc

SEQ ID NO: 467517 - DNA, 26 bp, Homo sapiens
  chr5:179498897-179498923
  hyper
  lymphoid_neoplasm vs. head_and_neck,lung,cervical, liver_bileduct,prostate,uterine,breast,non_cancer,colorectal, sarcoma,anorectal
gcccatgggccctcggcgagggcggc

SEQ ID NO: 467518 - DNA, 441 bp, Homo sapiens
  chr5:179498427-179498868
  hyper
  lymphoid_neoplasm vs. head_and_neck,uterine,breast
cgcccgccgcccccgggccggcactcacctccgtggaggggcagcggcgccagcacctggccgcggacctcggccttgggggagtcaagcccgtagcgcccgcggtcgatgcgaaacgtgagcggggcgccgcggccgggctcctgcaccgtcacgttgatgagcgccgtgtagtactcctggctcgcgttgtctgcccgtgccggccacaggctgcaggtcagcagggcgagcgcggcgagccgggcagggcccgcccgccccgcgcagctcatcgtccctccggcagccgccgctgctcgcggaccgggctccggggccggcgcctagaggcggggcgggcgcggcccgggcggcggcgggagcgcgcgcgcgcggcctgcgcggggccgagcccgagcgcggccctcctggacgccgcggccccgccgctcgccgccc

SEQ ID NO: 467519 - DNA, 330 bp, Homo sapiens
  chr5:179498897-179499227
  hyper
  lymphoid_neoplasm vs. head_and_neck,uterine,breast
gcccatgggccctcggcgagggcggcgtctcaggtcgcacgcgggcgtctcttcggggtcccaggagggttgtagaagcgtgccccctccatccccccgggtcggtcccaccgaatgggaggcgcctcgcaaggacgcggcgggggaggggaagggcggcacgggaggaagcgccccgaggagggtcagcggaacacaaagtccctctcgcgcggctgccgcctgaggcgcgtgtccgccgccgccccgcccccccgctggtctagcggcaacgcgcaggcctaaggcgcagtcccgccccgagcgcatgcgtgccagggcctgtccgct

SEQ ID NO: 467520 - DNA, 81 bp, Homo sapiens; identical to SEQ ID NO: 350234
  chr5:179499256-179499337
  hyper
  lymphoid_neoplasm vs. head_and_neck,uterine,breast

SEQ ID NO: 467521 - DNA, 197 bp, Homo sapiens
  chr5:179779452-179779649
  hyper
  lymphoid_neoplasm vs. lung
cgctccgggccgcggccgccctccccacggtcccgcagccacgcgggacagcgcgggagcgccgcgggaatcggacgcccggccccgctccccgccccggactccctctcgtggcttcgggccgaggttcgggcagtgactgcctcttccccgcgcaaagaggcggtaacgcggcagcgacccttctagggaccaga

SEQ ID NO: 467522 - DNA, 274 bp, Homo sapiens; identical to SEQ ID NO: 350244
  chr6:1311068-1311342
  hyper
  lymphoid_neoplasm vs. colorectal

SEQ ID NO: 467523 - DNA, 428 bp, Homo sapiens
  chr6:1311344-1311772
  hyper
  lymphoid_neoplasm vs. colorectal
gaacacgccctctccgtcgttcctgttgactgtcagatcccgggaaccaagcggcggagctcggcggcatctgaggcttccgcagggacacaagtgcaggcacagcccagcaccctgcgccagacacagccgccccaggggaagaggaggacgctgctgtcctcccgcaggagtcaccagccaggtaaagaaaaaggtaaagtaagacaaagaaaagtgaaagtcggagcccatttagtgagcaagagtaaaggtcatccaaaaaggcgcatacaatttcaagcccaggagtgcattcattaaaacaagaggaaaagacaagatggtccttgaaaggagctcataggaaggggcacagcacaaggctcccgaaagaggtcactgcaagtgtcctgcgcaatttctgttcagcacctctgcagtgacga

SEQ ID NO: 467524 - DNA, 377 bp, Homo sapiens
  chr6:1311395-1311772
  hyper
  lymphoid_neoplasm vs. anorectal,colorectal,upper_gi, myeloid_neoplasm
cggcggagctcggcggcatctgaggcttccgcagggacacaagtgcaggcacagcccagcaccctgcgccagacacagccgccccaggggaagaggaggacgctgctgtcctcccgcaggagtcaccagccaggtaaagaaaaaggtaaagtaagacaaagaaaagtgaaagtcggagcccatttagtgagcaagagtaaaggtcatccaaaaaggcgcatacaatttcaagcccaggagtgcattcattaaaacaagaggaaaagacaagatggtccttgaaaggagctcataggaaggggcacagcacaaggctcccgaaagaggtcactgcaagtgtcctgcgcaatttctgttcagcacctctgcagtgacga

SEQ ID NO: 467525 - DNA, 3 bp, Homo sapiens
  chr6:1311998-1312001
  hyper
  lymphoid_neoplasm vs. anorectal,colorectal,upper_gi, myeloid_neoplasm
cac

SEQ ID NO: 467526 - DNA, 224 bp, Homo sapiens
  chr6:1312096-1312320
  hyper
  lymphoid_neoplasm vs. anorectal,colorectal,upper_gi, myeloid_neoplasm
ttggcgggaggaggaaggcggggccggccgacccaaaacaaacaacctgcgccagcgactttgccgccgcgctgcagtgtggcctccgcctggtgcgcgcccgttggggagctggggaactggggagccgccaccacctcggccacctcgttcccccaccccttgccgtccgcgctcaggccccgcccccgcggagccgccgcagggttatattgggccggccc

SEQ ID NO: 467527 - DNA, 15 bp, Homo sapiens
  chr6:1312342-1312357
  hyper
  lymphoid_neoplasm vs. anorectal,colorectal,upper_gi, myeloid_neoplasm
cgcggcaggccagcg

SEQ ID NO: 467528 - DNA, 3 bp, Homo sapiens
  chr6:1311998-1312001
  hyper
  lymphoid_neoplasm vs. uterine,thyroid
cac

SEQ ID NO: 467529 - DNA, 224 bp, Homo sapiens; identical to SEQ ID NO: 467526
  chr6:1312096-1312320
  hyper
  lymphoid_neoplasm vs. uterine,thyroid

SEQ ID NO: 467530 - DNA, 15 bp, Homo sapiens
  chr6:1312342-1312357
  hyper
  lymphoid_neoplasm vs. uterine,thyroid
cgcggcaggccagcg

SEQ ID NO: 467531 - DNA, 47 bp, Homo sapiens
  chr6:1312708-1312755
  hyper
  lymphoid_neoplasm vs. uterine,thyroid
tcctccctctccgccccatagtccacccaacacttgcagcccctcca

SEQ ID NO: 467532 - DNA, 109 bp, Homo sapiens
  chr6:1312784-1312893
  hyper
  lymphoid_neoplasm vs. uterine,thyroid
gaaaagtgactatctcggaagaccagggtagagctcccgggagaaaaaggcgaagatccccggccccggatcgccatccccttccctggcaccagcttctctaggctgc

SEQ ID NO: 467533 - DNA, 47 bp, Homo sapiens; identical to SEQ ID NO: 467531
  chr6:1312708-1312755
  hyper
  lymphoid_neoplasm vs. sarcoma,cervical

SEQ ID NO: 467534 - DNA, 484 bp, Homo sapiens
  chr6:1312784-1313268
  hyper
  lymphoid_neoplasm vs. sarcoma,cervical
gaaaagtgactatctcggaagaccagggtagagctcccgggagaaaaaggcgaagatccccggccccggatcgccatccccttccctggcaccagcttctctaggctgcgcgaaggaagagggtacgacgccggggagggactgggtgcgcgggcatgaagttggaggtgttcgtccctcgcgcggcccacggggacaagcagggcagtgacctggagggcgcgggcggcagcgacgcgccgtccccgctgtcggcggcgggagacgactccctgggctcagatggggactgcgcggccaacagcccggccgcgggcggcggcgccagagatacgcagggcgacggcgaacagagtgcgggaggcgggccgggcgcggaggaggcgatcccggcagcagctgctgcagcggtggtggcggagggcgcggaggccggggcggcggggccaggcgcgggcggcgcggggagcggcgagggtgcacg

SEQ ID NO: 467535 - DNA, 75 bp, Homo sapiens
  chr6:1313302-1313377
  hyper
  lymphoid_neoplasm vs. sarcoma,cervical
tactcgtacatcgcgctcatcgccatggccatccgcgactcggcgggcgggcgcttgacgctggcggagatcaac

SEQ ID NO: 467536 - DNA, 374 bp, Homo sapiens
  chr6:1312894-1313268
  hyper
  lymphoid_neoplasm vs. ovary,cervical,renal, pancreas_gallbladder,anorectal,colorectal,non_cancer,upper_gi
cgaaggaagagggtacgacgccggggagggactgggtgcgcgggcatgaagttggaggtgttcgtccctcgcgcggcccacggggacaagcagggcagtgacctggagggcgcgggcggcagcgacgcgccgtccccgctgtcggcggcgggagacgactccctgggctcagatggggactgcgcggccaacagcccggccgcgggcggcggcgccagagatacgcagggcgacggcgaacagagtgcgggaggcgggccgggcgcggaggaggcgatcccggcagcagctgctgcagcggtggtggcggagggcgcggaggccggggcggcggggccaggcgcgggcggcgcggggagcggcgagggtgcacg

SEQ ID NO: 467537 - DNA, 581 bp, Homo sapiens; identical to SEQ ID NO: 346771
  chr6:1313302-1313883
  hyper
  lymphoid_neoplasm vs. ovary,cervical,renal, pancreas_gallbladder,anorectal,colorectal,non_cancer,upper_gi

SEQ ID NO: 467538 - DNA, 498 bp, Homo sapiens
  chr6:1313407-1313905
  hyper
  lymphoid_neoplasm vs. head_and_neck,prostate,anorectal, colorectal,upper_gi,renal,non_cancer,uterine,cervical,melanoma, myeloid_neoplasm,ovary
cgcggcagctacacgggctggcgcaactccgtgcgccacaacctttcgctcaacgactgcttcgtcaaggtgctgcgcgacccctcgcggccctggggcaaggacaactactggatgctcaaccccaacagcgagtacaccttcgccgacggggtcttccgccgccgccgcaagcgcctcagccaccgcgcgccggtccccgcgcccgggctgcggcccgaggaggccccgggcctccccgccgccccgccgcccgcgcccgccgccccggcctcgccccgcatgcgctcgcccgcccgccaggaggagcgcgccagccccgcgggcaagttctccagctccttcgccatcgacagcatcctgcgcaagcccttccgcagccgccgcctcagggacacggcccccgggacgacgcttcagtggggcgccgcgccctgcccgccgctgcccgcgttccccgcgctcctccccgcggcgccctgcagggccctgctgccg

SEQ ID NO: 467539 - DNA, 27 bp, Homo sapiens
  chr6:1314062-1314089
  hyper
  lymphoid_neoplasm vs. head_and_neck,prostate,anorectal, colorectal,upper_gi,renal,non_cancer,uterine,cervical,melanoma, myeloid_neoplasm,ovary
ccctgcggctgcccgcagccctgcagg

SEQ ID NO: 467540 - DNA, 86 bp, Homo sapiens
  chr6:1381781-1381867
  hyper
  lymphoid_neoplasm vs. pancreas_gallbladder,ovary
cgggcgggtgggatgatttgttgatttgcttgttttccaccaaaccgcagggcacctccaggagctccgggacaacttacaaatga

SEQ ID NO: 467541 - DNA, 61 bp, Homo sapiens; identical to SEQ ID NO: 350251
  chr6:1382651-1382712
  hyper
  lymphoid_neoplasm vs. pancreas_gallbladder,ovary

SEQ ID NO: 467542 - DNA, 144 bp, Homo sapiens; identical to SEQ ID NO: 464646
  chr6:10383584-10383728
  hyper
  lymphoid_neoplasm vs. cervical

SEQ ID NO: 467543 - DNA, 85 bp, Homo sapiens; identical to SEQ ID NO: 350273
  chr6:10384074-10384159
  hyper
  lymphoid_neoplasm vs. cervical

SEQ ID NO: 467544 - DNA, 341 bp, Homo sapiens; identical to SEQ ID NO: 358399
  chr6:10412036-10412377
  hyper
  lymphoid_neoplasm vs. myeloid_neoplasm,head_and_neck

SEQ ID NO: 467545 - DNA, 854 bp, Homo sapiens; identical to SEQ ID NO: 371048
  chr6:10412036-10412890
  hyper
  lymphoid_neoplasm vs. melanoma

SEQ ID NO: 467546 - DNA, 61 bp, Homo sapiens; identical to SEQ ID NO: 464653
  chr6:10415329-10415390
  hyper
  lymphoid_neoplasm vs. cervical,thyroid

SEQ ID NO: 467547 - DNA, 283 bp, Homo sapiens; identical to SEQ ID NO: 464654
  chr6:10415836-10416119
  hyper
  lymphoid_neoplasm vs. cervical,thyroid

SEQ ID NO: 467548 - DNA, 67 bp, Homo sapiens
  chr6:13013504-13013571
  hyper
  lymphoid_neoplasm vs. multiple_myeloma,uterine
cgggtcggagaatttctatgggaggtgaaaacatcaattatgttgtaacaggttgtctgctccagtg

SEQ ID NO: 467549 - DNA, 391 bp, Homo sapiens; identical to SEQ ID NO: 350284
  chr6:13014076-13014467
  hyper
  lymphoid_neoplasm vs. multiple_myeloma,uterine

SEQ ID NO: 467550 - DNA, 447 bp, Homo sapiens
  chr6:17101827-17102274
  hyper
  lymphoid_neoplasm vs. colorectal,cervical,renal,prostate, ovary,bladder_and_urothelial
cgtgttggtttctgttcgtgcgaccgtctttctgaggtcgcttttgtgccactgccttctggtgctgtcggggccgcctccacaccgtcctccggccctcaacagccgtctctgcgactggacacctgcctcgcatgccacacgatcaccttcactacagacagtgtctaaaaacaaggatgtggtccaggcaccaggggtaggggcgtgtcacacacaccgtgtcttacaaagaggaaaaataagaggttcccgcaagatgcttgcgactctggtacttttcaaagtaacgcagccaggcagcgggctttcccccggcccctcgctctggatagggctgccatttgcatcctagctgtgatttagacacctccaaccttctagttttcagttacaagagtcccatctccgcccaggtcccaggtctgcatgacgtaatttattgtg

SEQ ID NO: 467551 - DNA, 192 bp, Homo sapiens; identical to SEQ ID NO: 358412
  chr6:17102346-17102538
  hyper
  lymphoid_neoplasm vs. colorectal,cervical,renal,prostate, ovary,bladder_and_urothelial

SEQ ID NO: 467552 - DNA, 65 bp, Homo sapiens; identical to SEQ ID NO: 200293
  chr6:17281262-17281327
  hyper
  lymphoid_neoplasm vs. sarcoma

SEQ ID NO: 467553 - DNA, 89 bp, Homo sapiens
  chr6:17281329-17281418
  hyper
  lymphoid_neoplasm vs. sarcoma
cccccgcccgcttcggcgctcggacgctcttcccgcggaccctccccacaccccacccaaggcacctgattcctaaggaagaaaaatct

SEQ ID NO: 467554 - DNA, 432 bp, Homo sapiens
  chr6:17281534-17281966
  hyper
  lymphoid_neoplasm vs. sarcoma
cgatccggagaatttgtacggtgaccggcagggggggcgggaggagagagcgaagtcaagtctccagggccgctggcgacttcggaagccgcgcgcccggcgctctcggccgcccccggccgctcgcccccgccgcgccgccgccctcgcccccgggctcgcccttggcccccggcggccgcgaaagggtgcgggagacgcggagccggaggaggaggcgcagccgctgcccgagccgcagccgcagccggagcccgagccgcggggcgggtgcgaagatgcacacgacccagaaggacacgacgtacaccaagatcttcgtcggggggctgccctaccacaccaccgacgccagcctgcgcaagtacttcgaggtcttcggcgagatcgaggaggcggtggtcatcaccgaccggcagacgggcaagtccc

SEQ ID NO: 467555 - DNA, 565 bp, Homo sapiens
  chr6:17281534-17282099
  hyper
  lymphoid_neoplasm vs. myeloid_neoplasm,liver_bileduct, non_cancer,breast,renal,prostate,pancreas_gallbladder
cgatccggagaatttgtacggtgaccggcagggggggcgggaggagagagcgaagtcaagtctccagggccgctggcgacttcggaagccgcgcgcccggcgctctcggccgcccccggccgctcgcccccgccgcgccgccgccctcgcccccgggctcgcccttggcccccggcggccgcgaaagggtgcgggagacgcggagccggaggaggaggcgcagccgctgcccgagccgcagccgcagccggagcccgagccgcggggcgggtgcgaagatgcacacgacccagaaggacacgacgtacaccaagatcttcgtcggggggctgccctaccacaccaccgacgccagcctgcgcaagtacttcgaggtcttcggcgagatcgaggaggcggtggtcatcaccgaccggcagacgggcaagtcccggggctatggatttgtaagttgcacggactgggggtgacggggagggacggagtggcggctgaccccggggatcgggagcttggagtgaggggctcggcgtgacccgtgaggagccccgcgggtagagcggcg

SEQ ID NO: 467556 - DNA, 181 bp, Homo sapiens; identical to SEQ ID NO: 350286
  chr6:17282217-17282398
  hyper
  lymphoid_neoplasm vs. myeloid_neoplasm,liver_bileduct, non_cancer,breast,renal,prostate,pancreas_gallbladder

SEQ ID NO: 467557 - DNA, 615 bp, Homo sapiens; identical to SEQ ID NO: 332675
  chr6:19804685-19805300
  hyper
  lymphoid_neoplasm vs. anorectal,cervical,thyroid,breast

SEQ ID NO: 467558 - DNA, 813 bp, Homo sapiens; identical to SEQ ID NO: 332677
  chr6:20212279-20213092
  hyper

SEQ ID NO: 467559 - DNA, 96 bp, Homo sapiens
  chr6:21664624-21664720
  hyper
  lymphoid_neoplasm vs. bladder_and_urothelial
cggaacgggacgcgcaggaacccggcccgacgggcgcggctcacacccgtgctcttcctgcgctctcggcctcactttgcggccagagccgcggcc

SEQ ID NO: 467560 - DNA, 175 bp, Homo sapiens
  chr6:21664749-21664924
  hyper
  lymphoid_neoplasm vs. bladder_and_urothelial
ctccgaccccactgcccagtactgtacgcgtccagactaaagaaacatcattcgcttaaggggctgggaaaagcgcgtgctccgctcgccctggcaccgcgggtcgcccagctcgcagactgggacgggcggtgcaagaggtggtgctccctgtccaggaggggacgcggaagag

SEQ ID NO: 467561 - DNA, 335 bp, Homo sapiens
  chr6:21665191-21665526
  hyper
  lymphoid_neoplasm vs. bladder_and_urothelial
taatgcccctccccccgcaagccaacccaggacatagcccccaggtccccaaggttccgtctacctcatccttctacccccaaacttcaccaacccgaaaggattccaagtctgggatggggagaaaggaaagagggtggaggcaaaggtgcgcgacgggctggataccaactggagggtgggtgttcgcattgaaatgtttttttcttttgccctagaaattgcttccccatgcgggcccctactctctcccatttcccccacctccctgctttctttttcttcaattctagtggatctagaaggaaaacgagtgctgctctgagtcactcagc

SEQ ID NO: 467562 - DNA, 432 bp, Homo sapiens
  chr6:21665191-21665623
  hyper
  lymphoid_neoplasm vs. cervical
taatgcccctccccccgcaagccaacccaggacatagcccccaggtccccaaggttccgtctacctcatccttctacccccaaacttcaccaacccgaaaggattccaagtctgggatggggagaaaggaaagagggtggaggcaaaggtgcgcgacgggctggataccaactggagggtgggtgttcgcattgaaatgtttttttcttttgccctagaaattgcttccccatgcgggcccctactctctcccatttcccccacctccctgctttctttttcttcaattctagtggatctagaaggaaaacgagtgctgctctgagtcactcagcgagctaatgctatggcccgaagttgggatcagggtcgaggggtgggggaccatgtggatggggtcccaattctggaggttgagaatgactggaaggg

SEQ ID NO: 467563 - DNA, 189 bp, Homo sapiens
  chr6:26987779-26987968
  hyper
  lymphoid_neoplasm vs. bladder_and_urothelial,renal,ovary, cervical
cggaaccagcgcagcagcgggacgctagcccgcccacacggcggccacttgaaggtcctccagggaacacctgaggcagtgggagcgtctgccctttcctaagtctccttggaaagaagtattcgctttcgtttccgcaaacaaagcatgctccgcgctttcaggaccggtggctcccgtggagaccgc

SEQ ID NO: 467564 - DNA, 419 bp, Homo sapiens
  chr6:35181443-35181862
  hyper
  lymphoid_neoplasm vs. cervical
catggagaccaggcccgctcccccatcgccggattgtaaattcctgcaggcagcggcccggcagcctggggagggggccaccgcgcccgggcgcgcagggggagcggccaccgcgccgaggccccatttgaaagaaaaaagggcacgaaaaaggaggtggtggagaaggaggaggaggaggaggaggaggagggggaggaggaagaaaacgaaaaggagcgaggagaggaggagaaagaggaggaggaggagaaaggcgaagaaaaagagcctgagagacggagaaagagcgagagaggaagaaagagaggcagaaagggcgtgtttctggcgctgcgtttcccctcccctttctcaggtccttcgctcgggctctgcgcgctctccggctgcagctctctcccggcgaagctgggaat

SEQ ID NO: 467565 - DNA, 218 bp, Homo sapiens
  chr6:35181983-35182201
  hyper
  lymphoid_neoplasm vs. cervical
gctctccccgacgtccggccaggaggagccggtagcatcgggagcctcgcgccgagggcgccgcggtccgcgccccgcgactgcagcccccggcctggccccggcggggcgccccctcccctccccctcctgcgagctgggatccggccggcttccgccctcccctggccgcgagaccggccccggcggctgggccgccagtagctccagccatgggc

SEQ ID NO: 467566 - DNA, 209 bp, Homo sapiens
  chr6:39196876-39197085
  hyper
  lymphoid_neoplasm vs. renal,colorectal,uterine
cggtccaccatggctcccgagcggccgcctcctagagaaagcctctcctagccccagctgctaccagtccgcccgccctccagcctctgaaaacagctgtttgaatttggagctccgcatgcgcagtgcccggtactcaccccccgcaagcaccgctccccggacagagttgcttggccaagttggcccacggagtgcggggagctgcg

SEQ ID NO: 467567 - DNA, 146 bp, Homo sapiens; identical to SEQ ID NO: 350354
  chr6:39197391-39197537
  hyper
  lymphoid_neoplasm vs. renal,colorectal,uterine

SEQ ID NO: 467568 - DNA, 129 bp, Homo sapiens; identical to SEQ ID NO: 371164
  chr6:39281999-39282128
  hyper
  lymphoid_neoplasm vs. multiple_myeloma

SEQ ID NO: 467569 - DNA, 3 bp, Homo sapiens
  chr6:39901917-39901920
  hyper
  lymphoid_neoplasm vs. melanoma,multiple_myeloma,renal
cgg

SEQ ID NO: 467570 - DNA, 29 bp, Homo sapiens
  chr6:39902362-39902391
  hyper
  lymphoid_neoplasm vs. melanoma,multiple_myeloma,renal
gggcagaagggtaaactcaggtaaggaac

SEQ ID NO: 467571 - DNA, 225 bp, Homo sapiens
  chr6:45982991-45983216
  hyper
  lymphoid_neoplasm vs. uterine,colorectal
tgcggatcaactctccgagaagacggccacctgccggaacctgccttcctccattccgcccaggagcctcgcagcggggcgctggcctgcggaaaggccacgggggagcacagggctccgcgccgccctcctgggagggtccggagtccagcgcaccccgagccctggtgggtgagcccggcgggaggcgcggcaggtgcggcgggagactggaccccgacctac

SEQ ID NO: 467572 - DNA, 106 bp, Homo sapiens
  chr6:49518471-49518577
  hyper
  lymphoid_neoplasm vs. cervical
cgcttgctgcttgaaccggtcaaagaaggaacgaatgaatgacccttttgccaggatggagacccgggggcctcagggagctgcgaatcccatggactcctcccgc

SEQ ID NO: 467573 - DNA, 278 bp, Homo sapiens; identical to SEQ ID NO: 350379
  chr6:49519000-49519278
  hyper
  lymphoid_neoplasm vs. cervical

SEQ ID NO: 467574 - DNA, 156 bp, Homo sapiens; identical to SEQ ID NO: 459772
  chr6:72129577-72129733
  hyper
  lymphoid_neoplasm vs. breast,melanoma,renal,non_cancer, ovary,pancreas_gallbladder

SEQ ID NO: 467575 - DNA, 61 bp, Homo sapiens; identical to SEQ ID NO: 350400
  chr6:72130646-72130707
  hyper
  lymphoid_neoplasm vs. melanoma,pancreas_gallbladder, ovary,breast,prostate

SEQ ID NO: 467576 - DNA, 281 bp, Homo sapiens
  chr6:75915989-75916270
  hyper
  lymphoid_neoplasm vs. lung
agaagggagggagcgtagagggggacagccgcagccgggttccctgccaagggaagccgcgtactccgccacttggggcggactgggatttctttaatgaagctcgggtttccctatccctgagatttctttaatgaatttttctacattaagaacaatggggaggggaccgactcccattttcggaaatgcaaggatgcgtaacccattcacccccgctcctgcggatctccatccttcatctgatatcaccacctccatcttcctccccctctgtcctg

SEQ ID NO: 467577 - DNA, 83 bp, Homo sapiens; identical to SEQ ID NO: 350409
  chr6:80657600-80657683
  hyper
  lymphoid_neoplasm vs. sarcoma,thyroid,anorectal

SEQ ID NO: 467578 - DNA, 165 bp, Homo sapiens
  chr6:83073044-83073209
  hyper
  lymphoid_neoplasm vs. renal,head_and_neck
cggcctcaagtaccactttgatggggagagcttctgaagcttccatacaacctgccgtgcctttgctgctgccgcagtagattttcagctcatttctttctgctgctgcttcgcgctgctctgtcatgcctaaatctatctcgtcactgccaaaggtgcctgaat

SEQ ID NO: 467579 - DNA, 269 bp, Homo sapiens
  chr6:83073251-83073520
  hyper
  lymphoid_neoplasm vs. renal,head_and_neck
ccaaggtaaatacagtatgcaaaatgaggaaccacccaaggatgtcggggaggggggagagaaagggattccctcaccttttccggcacattcctcgttaatttccaccaggaggaggcgcgcagcccagctcccctagtctctcttcttaaatccccctacctacggctgccgaggttggccgcgcgtcgggaatctccccgacagtcctggccctcccccgccccccgggttggtttttcccagctgcggaggttgggaggttgggc

SEQ ID NO: 467580 - DNA, 214 bp, Homo sapiens
  chr6:83073590-83073804
  hyper
  lymphoid_neoplasm vs. renal,head_and_neck
actcagagttggttctggaggcggcggacgcggaggtgagcagtgggagcccgcggcctgggagagacccgggaggcgtcgttggggcccctccccatcctcgggtggagagtagggttggttcgggttgccactgtaccccgagtcccactgctgctttgttcccagactctcccctcctctttggagatgacttgaacccctttgagatccg

SEQ ID NO: 467581 - DNA, 129 bp, Homo sapiens; identical to SEQ ID NO: 350413
  chr6:83073835-83073964
  hyper
  lymphoid_neoplasm vs. renal,head_and_neck

SEQ ID NO: 467582 - DNA, 48 bp, Homo sapiens
  chr6:83073472-83073520
  hyper
  lymphoid_neoplasm vs. lung,colorectal,renal,prostate, ovary,head_and_neck
cgccccccgggttggtttttcccagctgcggaggttgggaggttgggc

SEQ ID NO: 467583 - DNA, 214 bp, Homo sapiens; identical to SEQ ID NO: 467580
  chr6:83073590-83073804
  hyper
  lymphoid_neoplasm vs. lung,colorectal,renal,prostate, ovary,head_and_neck

SEQ ID NO: 467584 - DNA, 621 bp, Homo sapiens
  chr6:83073835-83074456
  hyper
  lymphoid_neoplasm vs. lung,colorectal,renal,prostate, ovary,head_and_neck
cagttgtagctccacttcctgctaatgcgagaaggtacaaaaagagatcaaaaagtcctgtaacctgaaacttccctcgcatcctaaccgggacctggtggagaggtctgggcgggggcggagacacccggaggccgaccttccgccgaggcggtgcaggaaggaacgggagagggagaagtttggtagggaaggaattggggattaagcggtaagttagacgcgggagacgagtctcctcgggaaaggcggagggcgggaggccggtcgggtttatttagtgtgggccagggaagaaggaagactttgcggtctgggtgtcggatgcgcgtccccctccggagtaaaagtgaccggaggggttggggaggcgaggccggggcgggcttttggaaggaggtctctgggacagactggagacgactagactcgaaaaggccggtttttgcactccggaagccgcggcagccaccgctgttcacgcctctctcctgcttgtcccaggtccctcagaggatccagcgaggggcgccaacaagaggcgaagaggtggcaccagggcggcggcaggaagaggagcgggagcaggagcgcggagcggagcgtcccgacccgccgtgc

SEQ ID NO: 467585 - DNA, 548 bp, Homo sapiens
  chr6:83073970-83074518
  hyper
  lymphoid_neoplasm vs. cervical,prostate,head_and_neck, lung,colorectal,renal,pancreas_gallbladder,myeloid_neoplasm, ovary,non_cancer
cgaccttccgccgaggcggtgcaggaaggaacgggagagggagaagtttggtagggaaggaattggggattaagcggtaagttagacgcgggagacgagtctcctcgggaaaggcggagggcgggaggccggtcgggtttatttagtgtgggccagggaagaaggaagactttgcggtctgggtgtcggatgcgcgtccccctccggagtaaaagtgaccggaggggttggggaggcgaggccggggcgggcttttggaaggaggtctctgggacagactggagacgactagactcgaaaaggccggtttttgcactccggaagccgcggcagccaccgctgttcacgcctctctcctgcttgtcccaggtccctcagaggatccagcgaggggcgccaacaagaggcgaagaggtggcaccagggcggcggcaggaagaggagcgggagcaggagcgcggagcggagcgtcccgacccgccgtgcgtactttctggagggaaggggcgggggaatcggcccctgagggaagcgcccggtggcgaggg

SEQ ID NO: 467586 - DNA, 66 bp, Homo sapiens; identical to SEQ ID NO: 350415
  chr6:83074829-83074895
  hyper
  lymphoid_neoplasm vs. cervical,prostate,head_and_neck, lung,colorectal,renal,pancreas_gallbladder,myeloid_neoplasm, ovary,non_cancer

SEQ ID NO: 467587 - DNA, 354 bp, Homo sapiens; identical to SEQ ID NO: 458212
  chr6:86159095-86159449
  hyper
  lymphoid_neoplasm vs. liver_bileduct,upper_gi

SEQ ID NO: 467588 - DNA, 270 bp, Homo sapiens; identical to SEQ ID NO: 458213
  chr6:86159509-86159779
  hyper
  lymphoid_neoplasm vs. liver_bileduct,upper_gi

SEQ ID NO: 467589 - DNA, 89 bp, Homo sapiens; identical to SEQ ID NO: 458214
  chr6:86159903-86159992
  hyper
  lymphoid_neoplasm vs. liver_bileduct,upper_gi

SEQ ID NO: 467590 - DNA, 270 bp, Homo sapiens; identical to SEQ ID NO: 458213
  chr6:86159509-86159779
  hyper
  lymphoid_neoplasm vs. uterine,pancreas_gallbladder, colorectal,upper_gi

SEQ ID NO: 467591 - DNA, 244 bp, Homo sapiens; identical to SEQ ID NO: 461234
  chr6:86159903-86160147
  hyper
  lymphoid_neoplasm vs. uterine,pancreas_gallbladder, colorectal,upper_gi

SEQ ID NO: 467592 - DNA, 477 bp, Homo sapiens
  chr6:128841101-128841578
  hyper
tttctctcttccccactagcccggcgcaggccacgcgagacgccgaagccagcaggtccccacactctccggctagaccgtgccagcctgagccccgagcaagcttcggagaggaacaatgggtgccccgcgtcccacctggcacgaactctggggacagccctccctctaccctgtgttccccacccccggacagagagagctccccacgatccttgtccccagccctagcggggacctggctcacccctcgtgagcccaggactccaggcgttcgtcggggacgccccccggccactcacctgcggagaactggccttgggccgatcccaggagaggccaaggagagaggagcaagagcgccacaaaagcaggcagcgccgccgccgcagtcgtatccatgccgagtttgggagaagtttcaagcagctttgcaaagagctgccggggggatcgccgcgaaatccacgacggagg

SEQ ID NO: 467593 - DNA, 294 bp, Homo sapiens
  chr6:128841719-128842013
  hyper
ctcggcggaggctgctcctgttagtcaagagttactttgctcggggagggacgggggcggagccgggggtgacgtcgccccgcgggctccgggcgcttctgaggaatgcgggctcgggcgcggcgccgccaccgcctcctgccggagagacgcgcgccagccccggccgcgcgccccgcgccgcctttgttcgcagcctgggccccgccgccagccgctgctcggagggagcgagcgagaaaggggagccggcgcagctcgctgccctgttccagaactcagaatttgagaggc

SEQ ID NO: 467594 - DNA, 32 bp, Homo sapiens
  chr6:128841546-128841578
  hyper
  lymphoid_neoplasm vs. upper_gi
cggggggatcgccgcgaaatccacgacggagg

SEQ ID NO: 467595 - DNA, 686 bp, Homo sapiens; identical to SEQ ID NO: 358648
  chr6:128841719-128842405
  hyper
  lymphoid_neoplasm vs. upper_gi

SEQ ID NO: 467596 - DNA, 57 bp, Homo sapiens; identical to SEQ ID NO: 458231
  chr6:146349455-146349512
  hyper
  lymphoid_neoplasm vs. prostate

SEQ ID NO: 467597 - DNA, 214 bp, Homo sapiens
  chr6:148663794-148664008
  hyper
  lymphoid_neoplasm vs. melanoma,pancreas_gallbladder, liver_bileduct
ggtcctgccaagacttgctagaaggaacgagtcgcgtgccttagttagttggttcccgtcacaggaagaaacgcctttgcagtgggtttaattgcttctgggccgagcgaattccccgccgtacaactcagtggtgcggactttgcctcctgctaccctgttgctgcgccgagcggggtgggaaagtttctggagttgtcagtcgcgcagcccg

SEQ ID NO: 467598 - DNA, 181 bp, Homo sapiens; identical to SEQ ID NO: 358671
  chr6:148664163-148664344
  hyper
  lymphoid_neoplasm vs. melanoma,pancreas_gallbladder, liver_bileduct

SEQ ID NO: 467599 - DNA, 42 bp, Homo sapiens; identical to SEQ ID NO: 371360
  chr6:153452827-153452869
  hyper
  lymphoid_neoplasm vs. renal

SEQ ID NO: 467600 - DNA, 89 bp, Homo sapiens
  chr6:166076007-166076096
  hyper
  lymphoid_neoplasm vs. renal,sarcoma
cgcgggccgcgacccagccgcagccgccgccgcgcgcagagagggcgccggggcccccagcggggctggggcggcctgcggaggagagg

SEQ ID NO: 467601 - DNA, 277 bp, Homo sapiens
  chr6:166077059-166077336
  hyper
  lymphoid_neoplasm vs. multiple_myeloma
cagtcagagttcccgggagagagttccaactcggacctttggttggagtttaaatcaactcgcagtgtttcccataaactagggtttgaaatacggttcctccccaggactccctttcgcatactcactttaaaacgaacttcgtgtgcacaagcccagtttgccttggttggggttagagaacggaaagggcaaactgtggccaaaaatgagcaagactgtgcgatcattgccccaaaccctgagaccgccttgccatatgcggctctcttggaca

SEQ ID NO: 467602 - DNA, 438 bp, Homo sapiens
  chr7:191993-192431
  hyper
  lymphoid_neoplasm vs. sarcoma,uterine,liver_bileduct
cgggaccggtgccgggagctccgctgccctggcgtcccctgggtccaggcccagtcgctccttgggcctctctcgcggggccgcctccgcctcctccttgccgagacgggcgtggggcacggggtcgccgcccggcggggagctcatccggcggcgcagacgccccgcggctccggggagggacttggcctgggccccggccccgcgctcctctggggaggagccgagaggctgcagctggcggcggcggccccgggcgggagggggtcccaggaagcggccaggccggagccccccactcggccgcagctgctggcctggccagaaccgagcgcgccctcccggtctccgccgcttccctctgcaaaccgcgggcaggaggagccctctccttagcgggcccggagctcagaggcgtcgcggggcgcggccgagggg

SEQ ID NO: 467603 - DNA, 136 bp, Homo sapiens
  chr7:192614-192750
  hyper
  lymphoid_neoplasm vs. sarcoma,uterine,liver_bileduct
acctgcccgggaccccgccggccgctccccgcgcccaccccttccgcccttcgccccccccttccccccagccccggtctcccgggcgcggcgtgagagcagagcccggcccggaggagccgccccttccccgccc

SEQ ID NO: 467604 - DNA, 161 bp, Homo sapiens
  chr7:192270-192431
  hyper
  lymphoid_neoplasm vs. liver_bileduct,anorectal,renal
cggccaggccggagccccccactcggccgcagctgctggcctggccagaaccgagcgcgccctcccggtctccgccgcttccctctgcaaaccgcgggcaggaggagccctctccttagcgggcccggagctcagaggcgtcgcggggcgcggccgagggg

SEQ ID NO: 467605 - DNA, 363 bp, Homo sapiens
  chr7:192614-192977
  hyper
  lymphoid_neoplasm vs. liver_bileduct,anorectal,renal
acctgcccgggaccccgccggccgctccccgcgcccaccccttccgcccttcgccccccccttccccccagccccggtctcccgggcgcggcgtgagagcagagcccggcccggaggagccgccccttccccgcccgcccgcccggcgcctggagaggagcgcgctgaggatcgggacgcctgcggccgccgccaccgcccaggcccgtcgcgccccggccgggatggacccacacgcccgatgagccccgcgccggcggctgcgagcgccgagcctccccctgctgcggccccagccgccccccgcgcgcccggctccgcggaccaggacccctgggctccccggctgagggcgcggccgct

SEQ ID NO: 467606 - DNA, 128 bp, Homo sapiens
  chr7:193101-193229
  hyper
  lymphoid_neoplasm vs. liver_bileduct,anorectal,renal
gaccttgacccgcgaggcggcgccgcgctcgtgcccagctgcagctagaggggcgcgcgggcagaacgcgctccaggcccgggccggcccgcgcggccatgaagatgatgctggtgcgccggttccgc

SEQ ID NO: 467607 - DNA, 224 bp, Homo sapiens
  chr7:192753-192977
  hyper
  lymphoid_neoplasm vs. pancreas_gallbladder, liver_bileduct
cgcccggcgcctggagaggagcgcgctgaggatcgggacgcctgcggccgccgccaccgcccaggcccgtcgcgccccggccgggatggacccacacgcccgatgagccccgcgccggcggctgcgagcgccgagcctccccctgctgcggccccagccgccccccgcgcgcccggctccgcggaccaggacccctgggctccccggctgagggcgcggccgct

SEQ ID NO: 467608 - DNA, 512 bp, Homo sapiens
  chr7:193101-193613
  hyper
  lymphoid_neoplasm vs. pancreas_gallbladder, liver_bileduct
gaccttgacccgcgaggcggcgccgcgctcgtgcccagctgcagctagaggggcgcgcgggcagaacgcgctccaggcccgggccggcccgcgcggccatgaagatgatgctggtgcgccggttccgcgtgctcatcctgatggtgttcctggtggcctgcgcgctgcacatcgccctggacctgctgcccaggctggagcgacgcggcgcgcggccctcgggggagcccggctgttcgtgcgcgcagcccgccgccgaggtggccgcgcccggctgggcccaggttcggggccgccccggggagcccccggccgcctcctccgccgccggcgacgcgggctggcccaacaagcacacgctccgcatcctgcaggacttcagctccgacccctcctccaacctctcgtcccactcgctggagaaactgccgcccgcggccgagccggccgagcgcgccttgcgggggcgggatcccggcgccctaagaccccacgaccccgcgcaccggccg

SEQ ID NO: 467609 - DNA, 34 bp, Homo sapiens; identical to SEQ ID NO: 358711
  chr7:193708-193742
  hyper
  lymphoid_neoplasm vs. pancreas_gallbladder, liver_bileduct

SEQ ID NO: 467610 - DNA, 352 bp, Homo sapiens
  chr7:193261-193613
  hyper
  lymphoid_neoplasm vs. cervical,liver_bileduct
cgcgctgcacatcgccctggacctgctgcccaggctggagcgacgcggcgcgcggccctcgggggagcccggctgttcgtgcgcgcagcccgccgccgaggtggccgcgcccggctgggcccaggttcggggccgccccggggagcccccggccgcctcctccgccgccggcgacgcgggctggcccaacaagcacacgctccgcatcctgcaggacttcagctccgacccctcctccaacctctcgtcccactcgctggagaaactgccgcccgcggccgagccggccgagcgcgccttgcgggggcgggatcccggcgccctaagaccccacgaccccgcgcaccggccg

SEQ ID NO: 467611 - DNA, 277 bp, Homo sapiens
  chr7:193708-193985
  hyper
  lymphoid_neoplasm vs. cervical,liver_bileduct
ccgggtggcggttccgccgctcacggaggaggacgtcctgttcaatgtgaacagcgacaccaggctcagccccaaagcggcggagaacccggactggtgagtgggggctggcaggtgcccacccccaagggagccgtgagcccaaggcatggtgtagagaggttcaggggccccagagggccgccccccatggaagaggccgggcagggagtgtggtgcgggaggaggcagccgcctacctcagggcgctgcctttgtctccagaataacctcctcc

SEQ ID NO: 467612 - DNA, 116 bp, Homo sapiens
  chr7:556571-556687
  hyper
  lymphoid_neoplasm vs. ovary
cgggccctgacccgggggccgcctccgcccgcccgcccgtcggaccgggagccgcgcctgcccttggggcctcgctccgcgggctgcccgcccggcgcacgggccagggctctgcg

SEQ ID NO: 467613 - DNA, 213 bp, Homo sapiens
  chr7:556716-556929
  hyper
  lymphoid_neoplasm vs. ovary
ccccggcccgagggcaggcgcggggcccgcacacctggcggaggccgcggctgaactttgtgtgacacacgcggcgttttccttaaaggcgaaaacaatcccggggcgagcgagcagccctcggccgccgctgggagagaaagtggagactggaagagaaactcctgactcatccgcccgggcgcttatggctggggattggattctgacctt

SEQ ID NO: 467614 - DNA, 111 bp, Homo sapiens
  chr7:556983-557094
  hyper
  lymphoid_neoplasm vs. ovary
gcccgcccgcgccctccccgcgcgcggagggaaggggcgcgatttacctacggagtctatctccaggagtcgctggaggtcccggatgctgtggatctgactgcgggccag

SEQ ID NO: 467615 - DNA, 77 bp, Homo sapiens; identical to SEQ ID NO: 358715
  chr7:557220-557297
  hyper
  lymphoid_neoplasm vs. ovary

SEQ ID NO: 467616 - DNA, 224 bp, Homo sapiens
  chr7:1270815-1271039
  hyper
  lymphoid_neoplasm vs. multiple_myeloma
cgcctctcggtctcctggattggctgggcctggtcctcaaccctgcgccgtcccctcctctcccgcaaggagagacaagagggtcattgaagtcggagtcagcgtggatcggcccgtccacgaccttcagttaggaacagggccagactgtgggtccagtcgcagggacaggcagtcgtgtggcaggacggggtggccttgcgcccgccaacccaagcattccc

SEQ ID NO: 467617 - DNA, 262 bp, Homo sapiens
  chr7:1277556-1277818
  hyper
  lymphoid_neoplasm vs. ovary,bladder_and_urothelial
ctgcactctttgtcagcgctcttgtagccggctatattaagatagatgcccaatgatatccctcattgttctgtcgcttatattgatgttgctgcgttatcagcctattgatcatgtgtcgcctgtaataggacaggcgccgccaacgcgactctttacaaaagccgtgcacatttgttctaatagggtccgggtccccaggggacccttcggggacttcaggacatctgcagcgaagaaatattagcaaacttggctggag

SEQ ID NO: 467618 - DNA, 115 bp, Homo sapiens
  chr7:1280235-1280350
  hyper
  lymphoid_neoplasm vs. multiple_myeloma
cggttagatgcagactggtttaattttgttgataaatcggttcgttgggggtggggacggggcgggggctgtggggagtggggagtgaggagagaagggtgttgtttctttgctg

SEQ ID NO: 467619 - DNA, 193 bp, Homo sapiens
  chr7:1287431-1287624
  hyper
  lymphoid_neoplasm vs. anorectal
cgggccgcaccccccggaccctcaggacctggagcgcgtggagggcgtggaccaccccggatcccccaccaccgggcgtgtctgccaagggtgtcattgggcgccgcgcagaaggggcttccgaggacccgcccctcccccgcagccgtcagggcgctgacggaggcagctgcgcctgtttaactgggagccg

SEQ ID NO: 467620 - DNA, 745 bp, Homo sapiens
  chr7:1498587-1499332
  hyper
  lymphoid_neoplasm vs. head_and_neck,pancreas_gallbladder
cgtctgactcagccggcgggcgggggatgccatggctctggcccagctgcattcggtgtccgggcacactgaggccactgaggacagcctcggggggctgcacggtgggctgtgcctgcccagtcccacgcctcggctccccatcccccagccgcccgggcctcagtttccccgcccgtgtcagcgcgcagccgaacagcagaagaatcaaagggcgccaggcaggacttacatgaggtcgggccggtggcggtgcaggatggcgcagaaagccaggccgtcgcggaacgacgtggtcatgttgcagatattcacgtcgcggtagccctcgcactgctgccggcaccactgttgcagcgccctgatggccgccatgtgggcggcgcgcccgccgcgcggcggaaccgccctccgacaccttcccgcggctgtgccgcgaccgcccggccggcgggacagacgctgggaccgctacggaaccgccagacccacggcgcccagccccagctgagccggactgagggcgacgagtgccgggtccctaagagaagccgagcccggccccgcccccgccggccccgcctccttgtaggccccgcccccagccgccaagtcctgcctccggataggccccgtcctcacacctcccagccccggcataggctcccgcccaggcaggccccacctcccgacaggccccgcccccagccgccgggtcctgcctcctgataggccccgttcccac

SEQ ID NO: 467621 - DNA, 742 bp, Homo sapiens
  chr7:1498850-1499592
  hyper
  lymphoid_neoplasm vs. head_and_neck
cgcagaaagccaggccgtcgcggaacgacgtggtcatgttgcagatattcacgtcgcggtagccctcgcactgctgccggcaccactgttgcagcgccctgatggccgccatgtgggcggcgcgcccgccgcgcggcggaaccgccctccgacaccttcccgcggctgtgccgcgaccgcccggccggcgggacagacgctgggaccgctacggaaccgccagacccacggcgcccagccccagctgagccggactgagggcgacgagtgccgggtccctaagagaagccgagcccggccccgcccccgccggccccgcctccttgtaggccccgcccccagccgccaagtcctgcctccggataggccccgtcctcacacctcccagccccggcataggctcccgcccaggcaggccccacctcccgacaggccccgcccccagccgccgggtcctgcctcctgataggccccgttcccacgcctcctggccccggcacaggctcccgctccaggcaggccccgactccggacaggccccgcccccagcctccaggttttgcctcccgagaggccccgccccacgccgcccggccccagtacgggctcgcgccctaggcacgtcccgcctcctggtaagtcccgcccccacgctgtcaggtcccgcccgacaggccccgccccacgccgcctggcccctccccaggccccgccccgccgctgagggccgagacccccaacc

SEQ ID NO: 467622 - DNA, 294 bp, Homo sapiens
  chr7:4922256-4922550
  hyper
  lymphoid_neoplasm vs. multiple_myeloma
cgaagcgcagactttacacactcagctctctcccctccttccatgaatcctatctttacagccccagcccgagccacgctttcaaatgcaaacataattcaatcagatttaattctgacctgctagctgctggagaggagaccgacttgccccccagcaaaagggactttcaagactggttcctgtctggaatgcacaagaggtggcctatattaaccgcgggacacgagcaatcagattcttctgtgcaattcagattagccaaacacttgacaggcgacagggcagggcagg

SEQ ID NO: 467623 - DNA, 50 bp, Homo sapiens
  chr7:12442871-12442921
  hyper
  lymphoid_neoplasm vs. uterine
cggttggaggtggaattcgtgcagtatggaattcaactctgttctgagaa

SEQ ID NO: 467624 - DNA, 345 bp, Homo sapiens
  chr7:12442950-12443295
  hyper
  lymphoid_neoplasm vs. uterine
gcagatccggcgaaagtttcttacagtaaattacaatgacctcaaagagcaggataacagcaggaaacaaccaaaaacagaaccaagggtcgtagagtaagaggaggcaacaaccgcatgtgcgcaaaagaaaagtgtagagttttcaagctggaaattgaccttttcaaagacagcagagggacagagaggaggcgggtgaggaacaaacatcgcttgctgccttaaaacgcacagggacgctccccaagtcgtccaaaaagtctagcctagtccctctaccgcccacgcggcgccactgcgcgcccacccccgcgcgccctacctcgcttaccttccccccag

SEQ ID NO: 467625 - DNA, 52 bp, Homo sapiens; identical to SEQ ID NO: 371439
  chr7:12443718-12443770
  hyper
  lymphoid_neoplasm vs. uterine

SEQ ID NO: 467626 - DNA, 105 bp, Homo sapiens; identical to SEQ ID NO: 463001
  chr7:18125868-18125973
  hyper
  lymphoid_neoplasm vs. bladder_and_urothelial,ovary, anorectal,thyroid,non_cancer

SEQ ID NO: 467627 - DNA, 219 bp, Homo sapiens; identical to SEQ ID NO: 463002
  chr7:18126225-18126444
  hyper
  lymphoid_neoplasm vs. bladder_and_urothelial,ovary, anorectal,thyroid,non_cancer

SEQ ID NO: 467628 - DNA, 219 bp, Homo sapiens; identical to SEQ ID NO: 463002
  chr7:18126225-18126444
  hyper
  lymphoid_neoplasm vs. bladder_and_urothelial,anorectal, ovary,thyroid,cervical,non_cancer,lung,myeloid_neoplasm

SEQ ID NO: 467629 - DNA, 120 bp, Homo sapiens
  chr7:20825260-20825380
  hyper
  lymphoid_neoplasm vs. anorectal,myeloid_neoplasm
aagaagaggacgaggagcgtttccaggggtggaagcctttgccgaaggaagaagagctgtccgagagggaggagggagacgggctggggctgcctatcttattacaggtagcggcaagca

SEQ ID NO: 467630 - DNA, 16 bp, Homo sapiens
  chr7:20826098-20826114
  hyper
  lymphoid_neoplasm vs. colorectal
cgaaatcggtgcctgt

SEQ ID NO: 467631 - DNA, 298 bp, Homo sapiens
  chr7:20826202-20826500
  hyper
  lymphoid_neoplasm vs. colorectal
gctgaaaaaaagtgactctgcccccttctccccctttttcttttctccaaactcacttgtatttaaagaaaaaaaaaaaaagctctcaatagagagactgatagcccgtggcctggccggggcgactttaaccccctccaatcggcaataaaaggaaactaattaaaccagcaagagaaaatcctgagactcacccctagaagtgaagttgccatcacacaaaagtgccctcctcctctcagaggatcttttttatattgataaatcagaggcagtgttttttttagaggtgtgcaat

SEQ ID NO: 467632 - DNA, 11 bp, Homo sapiens
  chr7:20826838-20826849
  hyper
  lymphoid_neoplasm vs. colorectal
gtggtaaaggc

SEQ ID NO: 467633 - DNA, 1 bp, Homo sapiens
  chr7:27208953-27208954
  hyper
c

SEQ ID NO: 467634 - DNA, 419 bp, Homo sapiens
  chr7:27209044-27209463
  hyper
cgtgatgccccgcccggcccgacccccgcgcgcagaggtacctggagacgatttcaactgaagtaatgaaggcagtgtcgtgctgtcgagagaaaggtggatcccaacaacaggaaactacctaaatcaccgaccagttctggtgctgcccgcgaagggctgcctcgcccgccgccgccgccgcctccgccgctgccgccgccgccaaggagagaaccctgccatcgcgcctggcccggcccagcccagcccctaggcaacctgcgcccgccagtgcaacagagtgccccaggcggccgcaaatgcgtcaaggaaggggaagccacaggccccagtaaggtattcctgggagggagagggaggaaaagagagggaggaaaggcagggagagaggaataaaggcggggagcaggcgagac

SEQ ID NO: 467635 - DNA, 109 bp, Homo sapiens
  chr7:27209681-27209790
  hyper
gcccccgccccccccactctggcaagcaggaaacgcgtggccctaaggagtgccgccaggtgggggaggccgtactgggggagggggaggcccccatgcagtccagccc

SEQ ID NO: 467636 - DNA, 12 bp, Homo sapiens
  chr7:27209886-27209898
  hyper
cgcaaaataacc

SEQ ID NO: 467637 - DNA, 158 bp, Homo sapiens; identical to SEQ ID NO: 463017
  chr7:27238984-27239142
  hyper
  lymphoid_neoplasm vs. anorectal,myeloid_neoplasm,sarcoma, colorectal

SEQ ID NO: 467638 - DNA, 78 bp, Homo sapiens; identical to SEQ ID NO: 456132
  chr7:27281871-27281949
  hyper
  lymphoid_neoplasm vs. multiple_myeloma

SEQ ID NO: 467639 - DNA, 186 bp, Homo sapiens
  chr7:28995382-28995568
  hyper
  lymphoid_neoplasm vs. uterine,anorectal,myeloid_neoplasm, thyroid
cgagaagtcggcggacacgccggtgcccatggagcgcaggggccgtcgggtggagtacatgtgccgaacgtggaccggggccccgcccttccgcctagcccgcagtttcctacgcagccagcgagacgcccaggccgccaaggccaggagcaccagcagcgcgttgaccgtcagcagggccaaggt

SEQ ID NO: 467640 - DNA, 330 bp, Homo sapiens
  chr7:28995992-28996322
  hyper
  lymphoid_neoplasm vs. uterine,anorectal,myeloid_neoplasm, thyroid
gtgcccagacgatgcttcgtcgcgcgctgccaggggtcgccggcgggcgatggcgcagagccaggagaggccgttggggtgggctccgcgagggcgggatctgcccgagtcggacggccccgctggggcttcttgtgcaggtctagggactgtggagccgggcccgcggcggcagcgacggaggggctgggctgctggaggcccgggccccgccgactcagccttagggcgctgcggttgcctaccagctccctggcggccccatcccaggccaccccagctagaaatcgcccctgctgctggagctgcggctgcggcggcagctcctcc

SEQ ID NO: 467641 - DNA, 333 bp, Homo sapiens
  chr7:28995992-28996325
  hyper
  lymphoid_neoplasm vs. myeloid_neoplasm,cervical,ovary, non_cancer,breast,bladder_and_urothelial
gtgcccagacgatgcttcgtcgcgcgctgccaggggtcgccggcgggcgatggcgcagagccaggagaggccgttggggtgggctccgcgagggcgggatctgcccgagtcggacggccccgctggggcttcttgtgcaggtctagggactgtggagccgggcccgcggcggcagcgacggaggggctgggctgctggaggcccgggccccgccgactcagccttagggcgctgcggttgcctaccagctccctggcggccccatcccaggccaccccagctagaaatcgcccctgctgctggagctgcggctgcggcggcagctcctccgcg

SEQ ID NO: 467642 - DNA, 55 bp, Homo sapiens; identical to SEQ ID NO: 371518
  chr7:28998209-28998264
  hyper
  lymphoid_neoplasm vs. anorectal

SEQ ID NO: 467643 - DNA, 497 bp, Homo sapiens
  chr7:29234008-29234505
  hyper
  lymphoid_neoplasm vs. colorectal,pancreas_gallbladder, uterine,ovary,prostate,bladder_and_urothelial,non_cancer, myeloid_neoplasm,breast,sarcoma,upper_gi,anorectal,thyroid,lung
cgagcgaccgcgtctcctcttcttcctttgtgtgtgcgcgagcggagttggggcggagggagaagggggaggtcgctctgtctgtccgtctcccgccgcctctgcccggtctactcgaagtgcggcgggagaggcgggagcccaggagagggtgcgggagctggcggggcggctcggagctgccaggacgccctggtcccagccgcgcacaggggagcgtggacggcagaggggctcggcgggagccgagatccgcccgtcccggctgcccctcggcctccctctgctcccacctaccccctgacacccatagaaaagcgtgcaaaggcgcggagcgggacggaaaccacaaataaatagcggcggcggcagcgcgtcatctggtggagcaggaagtgcaggcagagtccggaggctggtgctttctgcgcgtccccaggactttgccatgggctgggggccgcggaggctgcgagcggccgggcgagggcagcggc

SEQ ID NO: 467644 - DNA, 224 bp, Homo sapiens
  chr7:29234281-29234505
  hyper
  lymphoid_neoplasm vs. pancreas_gallbladder,colorectal, thyroid,bladder_and_urothelial,ovary,non_cancer,uterine,sarcoma, myeloid_neoplasm,upper_gi,breast,prostate,anorectal,cervical, lung
cggcctccctctgctcccacctaccccctgacacccatagaaaagcgtgcaaaggcgcggagcgggacggaaaccacaaataaatagcggcggcggcagcgcgtcatctggtggagcaggaagtgcaggcagagtccggaggctggtgctttctgcgcgtccccaggactttgccatgggctgggggccgcggaggctgcgagcggccgggcgagggcagcggc

SEQ ID NO: 467645 - DNA, 159 bp, Homo sapiens; identical to SEQ ID NO: 345272
  chr7:29234886-29235045
  hyper
  lymphoid_neoplasm vs. pancreas_gallbladder,colorectal, thyroid,bladder_and_urothelial,ovary,non_cancer,uterine,sarcoma, myeloid_neoplasm,upper_gi,breast,prostate,anorectal,cervical, lung

SEQ ID NO: 467646 - DNA, 66 bp, Homo sapiens; identical to SEQ ID NO: 350563
  chr7:29604726-29604792
  hyper
  lymphoid_neoplasm vs. colorectal,anorectal,upper_gi

SEQ ID NO: 467647 - DNA, 213 bp, Homo sapiens
  chr7:32996732-32996945
  hyper
  lymphoid_neoplasm vs. lung,sarcoma
cggccacgtaggagcccctcacggcaccaaacccggtgtctccagggacgggcggagaccagcgggtgggcttgggcagtacgcgcttttctcttccgactttgggccaaagccttgtccggagatcacagtgtctcgctcggggacacgccctctctaggcccagacttggtccccactggagttcccagcccccctccccgctgcggcacg

SEQ ID NO: 467648 - DNA, 155 bp, Homo sapiens; identical to SEQ ID NO: 358825
  chr7:32997454-32997609
  hyper
  lymphoid_neoplasm vs. lung,sarcoma

SEQ ID NO: 467649 - DNA, 1 bp, Homo sapiens
  chr7:45613422-45613423
  hyper
  lymphoid_neoplasm vs. thyroid
c

SEQ ID NO: 467650 - DNA, 55 bp, Homo sapiens; identical to SEQ ID NO: 200968
  chr7:48075904-48075959
  hyper
  lymphoid_neoplasm vs. thyroid

SEQ ID NO: 467651 - DNA, 42 bp, Homo sapiens
  chr7:50860152-50860194
  hyper
  lymphoid_neoplasm vs. anorectal
cgcacatgctccaaggcagtcgtcaggcaggcgtttggagag

SEQ ID NO: 467652 - DNA, 1 bp, Homo sapiens
  chr7:50861127-50861128
  hyper
  lymphoid_neoplasm vs. anorectal
c

SEQ ID NO: 467653 - DNA, 209 bp, Homo sapiens
  chr7:50861127-50861336
  hyper
  lymphoid_neoplasm vs. cervical,colorectal,breast,thyroid, liver_bileduct
cgcttccctctctgcctcctcccgacctccccaccccctcgatgggctttaaactcgcccggccccgcccgccctccccgcctctgccgccgccgccgcctccgcctccgcctcctcccccggctacttttcctgctcctcctcccgccgccgccgcccggaccgctcggcggccgccagcgcgggaggagccggggcctgggcgcagg

SEQ ID NO: 467654 - DNA, 106 bp, Homo sapiens; identical to SEQ ID NO: 350580
  chr7:50861531-50861637
  hyper
  lymphoid_neoplasm vs. cervical,colorectal,breast,thyroid, liver_bileduct

SEQ ID NO: 467655 - DNA, 363 bp, Homo sapiens
  chr7:51383392-51383755
  hyper
  lymphoid_neoplasm vs. liver_bileduct
cagcctgcaccgctggccgggatgagcacggcgcacctggctcggggtctgaataatgagcagggctgctcgtcctgtttgagggaaattactctttctgagagtcaaatcctgaatgtgacgtgtaatccctgcacgcaaggtgtggggatagcaaacagaaaccgggagaggtttgggcaaaagcggaatcgcgaagacagggatgggccgccagactcgcgggtccgctacggatgtctgcgcctcaggcctggccccactaggacgccccttccactgccaggggagaccctggaataaaggcagggagggagagctgctgccatgaaaccctccgggcaatccgaacaccttccgaga

SEQ ID NO: 467656 - DNA, 428 bp, Homo sapiens
  chr7:51383790-51384218
  hyper
  lymphoid_neoplasm vs. liver_bileduct
ctcccctccacgctgccgggagagccgatcctggggctgccgccgaggccgggagagggaagacttgatgggaaccggccaggggcaagcccgcagggaagaggccggagtcaaaggccgggcgtcccctcgctccccgctccacccctacggcaaacacttggggggcctgaggaaagctcggagctgagtgggggctgtgctggcggggacccccataaggacgcctgcatacaaaccaccccgcgcgaaaagtgcgctccggccccggcccgacacggttacctgggcaacgacccgggtgcccaaagtacacagcacgcaccaccacccaacaccagcacccaacaccagcaccgcaccacctgctccaccactaccaccagcacccgctggggcggcagagagggcgccctgcccgggagcgc

SEQ ID NO: 467657 - DNA, 25 bp, Homo sapiens
  chr7:51383730-51383755
  hyper
  lymphoid_neoplasm vs. pancreas_gallbladder,colorectal, uterine,cervical,liver_bileduct,lung
cgggcaatccgaacaccttccgaga

SEQ ID NO: 467658 - DNA, 462 bp, Homo sapiens
  chr7:51383790-51384252
  hyper
  lymphoid_neoplasm vs. pancreas_gallbladder,colorectal, uterine,cervical,liver_bileduct,lung
ctcccctccacgctgccgggagagccgatcctggggctgccgccgaggccgggagagggaagacttgatgggaaccggccaggggcaagcccgcagggaagaggccggagtcaaaggccgggcgtcccctcgctccccgctccacccctacggcaaacacttggggggcctgaggaaagctcggagctgagtgggggctgtgctggcggggacccccataaggacgcctgcatacaaaccaccccgcgcgaaaagtgcgctccggccccggcccgacacggttacctgggcaacgacccgggtgcccaaagtacacagcacgcaccaccacccaacaccagcacccaacaccagcaccgcaccacctgctccaccactaccaccagcacccgctggggcggcagagagggcgccctgcccgggagcgcgcggtgcggacgcgggcgtccgagcccagggaag

SEQ ID NO: 467659 - DNA, 33 bp, Homo sapiens
  chr7:51384219-51384252
  hyper
cggtgcggacgcgggcgtccgagcccagggaag

SEQ ID NO: 467660 - DNA, 152 bp, Homo sapiens; identical to SEQ ID NO: 358851
  chr7:51384951-51385103
  hyper

SEQ ID NO: 467661 - DNA, 295 bp, Homo sapiens
  chr7:55086689-55086984
  hyper
  lymphoid_neoplasm vs. bladder_and_urothelial,lung, pancreas_gallbladder,ovary,colorectal,head_and_neck,sarcoma, melanoma,non_cancer,cervical,renal,uterine,liver_bileduct, thyroid,prostate,anorectal,breast,upper_gi
cgcctcggcccgcgcgagctagacgtccgggcagcccccggcgcagcgcggccgcagcagcctccgccccccgcacggtgtgagcgcccgacgcggccgaggcggccggagtcccgagctagccccggcggccgccgccgcccagaccggacgacaggccacctcgtcggcgtccgcccgagtccccgcctcgccgccaacgccacaaccaccgcgcacggccccctgactccgtccagtattgatcgggagagccggagcgagctcttcggggagcagcgatgcgaccctccgg

SEQ ID NO: 467662 - DNA, 170 bp, Homo sapiens
  chr7:55086814-55086984
  hyper
  lymphoid_neoplasm vs. uterine
cggcggccgccgccgcccagaccggacgacaggccacctcgtcggcgtccgcccgagtccccgcctcgccgccaacgccacaaccaccgcgcacggccccctgactccgtccagtattgatcgggagagccggagcgagctcttcggggagcagcgatgcgaccctccgg

SEQ ID NO: 467663 - DNA, 2 bp, Homo sapiens
  chr7:55087803-55087805
  hyper
  lymphoid_neoplasm vs. uterine
tc

SEQ ID NO: 467664 - DNA, 145 bp, Homo sapiens
  chr7:55087803-55087948
  hyper
  lymphoid_neoplasm vs. head_and_neck,renal
tcgttggcaaaaggcaggtggggtccgacccgccccttgggcgcagaccccggccgctcgcctcgcccggtgcgccctcgtcttgcctatccaagagtgccccccacctcccggggaccccagctccctcctgggcgcccgcgcc

SEQ ID NO: 467665 - DNA, 78 bp, Homo sapiens; identical to SEQ ID NO: 358854
  chr7:55087982-55088060
  hyper
  lymphoid_neoplasm vs. head_and_neck,renal

SEQ ID NO: 467666 - DNA, 24 bp, Homo sapiens
  chr7:79764134-79764158
  hyper
  lymphoid_neoplasm vs. bladder_and_urothelial,melanoma, multiple_myeloma
cgcgcggaggccgagctcggctgg

SEQ ID NO: 467667 - DNA, 259 bp, Homo sapiens
  chr7:79764213-79764472
  hyper
  lymphoid_neoplasm vs. bladder_and_urothelial,melanoma, multiple_myeloma
gagattcaaaaccccaaacccgggacttgggggcgctgagccgggccgggaagcagagcctggtcgtgaggaacagccgcccgttgctgtctgcccctttgcggacagcgtctccctcgactccgcttaggaagtggtgggggcggcgtggcccccgtcgggaggcgttcgaacgcccgctaggagagagaaaggattcccctgtgcttggagcccgcactcgggcgcggagggagcggcggcaggctctcgctttcgg

SEQ ID NO: 467668 - DNA, 217 bp, Homo sapiens
  chr7:79764712-79764929
  hyper
  lymphoid_neoplasm vs. bladder_and_urothelial,melanoma, multiple_myeloma
gcgggagctgggtccggcggtgcggaggcaaggcgggtccccctctcccggtgtctggtctctctccgccccggcgggcgaggactccccgcggcggggcgggcgcgtcacttcactcggatgctttcgtgcgacccagcaaagagcccaggcgcgagtccgaggcggcgggtcgcgtggaaaccctttgctttgaagtttagctcagccttgtaaa

SEQ ID NO: 467669 - DNA, 217 bp, Homo sapiens; identical to SEQ ID NO: 467668
  chr7:79764712-79764929
  hyper
  lymphoid_neoplasm vs. bladder_and_urothelial,renal, myeloid_neoplasm,thyroid

SEQ ID NO: 467670 - DNA, 229 bp, Homo sapiens; identical to SEQ ID NO: 358877
  chr7:79765213-79765442
  hyper
  lymphoid_neoplasm vs. bladder_and_urothelial,renal, myeloid_neoplasm,thyroid

SEQ ID NO: 467671 - DNA, 173 bp, Homo sapiens
  chr7:82073323-82073496
  hyper
  lymphoid_neoplasm vs. lung,renal
cgggcggagacgggccgggagcagccctccatacaaggcagccaggaactcccaaagtcggcgccggctcgctcccgccgcccggcgtgcgcaggcggagcggaccagccccgcggggctcccgggggacggccagccgcccagcgggcatccacaggctgcagaggctccaa

SEQ ID NO: 467672 - DNA, 40 bp, Homo sapiens; identical to SEQ ID NO: 358882
  chr7:82073533-82073573
  hyper
  lymphoid_neoplasm vs. lung,renal

SEQ ID NO: 467673 - DNA, 1 bp, Homo sapiens
  chr7:87257895-87257896
  hyper
  lymphoid_neoplasm vs. liver_bileduct
c

SEQ ID NO: 467674 - DNA, 107 bp, Homo sapiens
  chr7:87936014-87936121
  hyper
  lymphoid_neoplasm vs. multiple_myeloma, bladder_and_urothelial,colorectal,uterine
cgatgggctggggagtggggtcctagcagcagggactggaggtgagctgaagcagataagggacgggagccttgtggcgaaaagtgacccacctgagggagaggcgc

SEQ ID NO: 467675 - DNA, 19 bp, Homo sapiens
  chr7:87936206-87936225
  hyper
  lymphoid_neoplasm vs. multiple_myeloma, bladder_and_urothelial,colorectal,uterine
gctgtggcttgtggctctc

SEQ ID NO: 467676 - DNA, 187 bp, Homo sapiens
  chr7:87936227-87936414
  hyper
  lymphoid_neoplasm vs. multiple_myeloma, bladder_and_urothelial,colorectal,uterine
tgctataagaagccagagaagggcgggacggtctgctggatttcgcaagagaagcggaaaagaacttgtttcctggaagagttcaagctgagaatcccagcagctggaaggaccggaacttctatactgcggtgctgctgatggtgccgctgacccccgggaagcggggattttaagggttacaccc

SEQ ID NO: 467677 - DNA, 186 bp, Homo sapiens
  chr7:89840705-89840891
  hyper
  lymphoid_neoplasm vs. uterine,pancreas_gallbladder,renal
cgcgtaagaaaagcaatttctagagcggaaaggtgaccccacattacaaaaagaaatggagtagaaaaataggcttgactattctaaagctgcttcagaaagaatctccggaagaccacggaggaaccccgcaggggagccaggcggatactcagccgctcgcggtagaagggcgcgcaaagctgc

SEQ ID NO: 467678 - DNA, 92 bp, Homo sapiens
  chr7:89841066-89841158
  hyper
  lymphoid_neoplasm vs. uterine,pancreas_gallbladder,renal
cgggccctcggcgccacgagctgtccgggcacgcagcccctagcggcgcgtcgctgccaagccggcctccgcgcgcctccctccttccttct

SEQ ID NO: 467679 - DNA, 57 bp, Homo sapiens; identical to SEQ ID NO: 371610
  chr7:89841396-89841453
  hyper
  lymphoid_neoplasm vs. uterine,pancreas_gallbladder,renal

SEQ ID NO: 467680 - DNA, 204 bp, Homo sapiens; identical to SEQ ID NO: 358894
  chr7:93203842-93204046
  hyper
  lymphoid_neoplasm vs. multiple_myeloma

SEQ ID NO: 467681 - DNA, 170 bp, Homo sapiens; identical to SEQ ID NO: 458273
  chr7:93204048-93204218
  hyper
  lymphoid_neoplasm vs. multiple_myeloma

SEQ ID NO: 467682 - DNA, 39 bp, Homo sapiens; identical to SEQ ID NO: 458274
  chr7:94536809-94536848
  hyper
  lymphoid_neoplasm vs. renal,uterine,ovary, multiple_myeloma,lung,prostate

SEQ ID NO: 467683 - DNA, 280 bp, Homo sapiens; identical to SEQ ID NO: 458275
  chr7:94537598-94537878
  hyper
  lymphoid_neoplasm vs. ovary,lung,renal,breast,colorectal, thyroid,sarcoma

SEQ ID NO: 467684 - DNA, 101 bp, Homo sapiens; identical to SEQ ID NO: 358900
  chr7:95226207-95226308
  hyper
  lymphoid_neoplasm vs. liver_bileduct

SEQ ID NO: 467685 - DNA, 3 bp, Homo sapiens
  chr7:96652889-96652892
  hyper
  lymphoid_neoplasm vs. bladder_and_urothelial, myeloid_neoplasm
cgg

SEQ ID NO: 467686 - DNA, 262 bp, Homo sapiens
  chr7:96652921-96653183
  hyper
  lymphoid_neoplasm vs. bladder_and_urothelial, myeloid_neoplasm
tgggcgcctatggagacagaaaaaaaaatctatcctacaacgtgacccctcagcaaccctcctccacctttaaatggctttttgtttttggaaatgcctggataaaccgcaaaactctcggcgcgctcttctctggctggctacaactccttaacccccccacccccacccagcgtgctcagggcacccgcaccgtgctagcttgtggcggctctcaaactaatcctgactgagtttttgaggcagccttctattcccactc

SEQ ID NO: 467687 - DNA, 169 bp, Homo sapiens
  chr7:100815484-100815653
  hyper
  lymphoid_neoplasm vs. uterine,anorectal,prostate,thyroid, non_cancer,sarcoma,breast,multiple_myeloma,renal,cervical,lung
cgttgaggccaacgaggcgcggggcctggcgctgcaggtgccacagcagctggctctgcacctgcgcgccgtcgctaccgaaggcgtcgatgttgagatagcgccaagtgccgtcccctccgtgcgggatggggaaggggcgcgtgcacagcgtgagcacgcgcgggcg

SEQ ID NO: 467688 - DNA, 101 bp, Homo sapiens; identical to SEQ ID NO: 346925
  chr7:100815930-100816031
  hyper
  lymphoid_neoplasm vs. uterine,anorectal,prostate,thyroid, non_cancer,sarcoma,breast,multiple_myeloma,renal,cervical,lung

SEQ ID NO: 467689 - DNA, 2 bp, Homo sapiens
  chr7:100816610-100816612
  hyper
  lymphoid_neoplasm vs. liver_bileduct,ovary,colorectal, pancreas_gallbladder
cg

SEQ ID NO: 467690 - DNA, 257 bp, Homo sapiens; identical to SEQ ID NO: 350629
  chr7:100816655-100816912
  hyper
  lymphoid_neoplasm vs. liver_bileduct,ovary,colorectal, pancreas_gallbladder

SEQ ID NO: 467691 - DNA, 260 bp, Homo sapiens
  chr7:107642811-107643071
  hyper
  lymphoid_neoplasm vs. uterine
cgccaggtcctgctgtttctggtgccatccggagacaaacagagatggttaattaaagccacatggcccccatctgttcccagaatgaagcctccgctcagctcaggcactctcctgggcaatggatttttggagagccctcctcggtcagcaccgccaaccccagggaacctgccctctgcggtggggaaacccagggtgaaccggccgagggtgcaaaaccctgagcgggggccgcgggaggccgcaggggccggggc

SEQ ID NO: 467692 - DNA, 540 bp, Homo sapiens
  chr7:107643183-107643723
  hyper
  lymphoid_neoplasm vs. uterine
gtccctctcccaagcccccaggatcccacgaaggtgagcaagcagcttttgggttttccttccccatgcccaagtccgtccgcctccccgcaccgtttccacggaattacctaagaaactgaaagctagcaactggagaagccccatgccggctccctgcagccacggggacgcggcagaggagtggagaagacgcccgccgagccgcctgccctttcttcccgtcttcctttctggagaggtggaaaggaggggaaaaaaggcaaatgttcaaagagagaagaggcgcccttccatttcctgtcgctcccacggaagcggggggtgggctggaaagtggggaaaatcgtgcagccactttgttctcctcacccggcgacgcgagctctcgccctgctccgggagcccccgagcccaaagaagggaattagaaagtttagccttgggaggaacagagggaggcgcctctgctcatgcgcatacggagagccggggctgaaggggcgggcggccgcaactctgcgaggaccgggtgaggtc

SEQ ID NO: 467693 - DNA, 483 bp, Homo sapiens; identical to SEQ ID NO: 458282
  chr7:113726887-113727370
  hyper
  lymphoid_neoplasm vs. myeloid_neoplasm,anorectal,thyroid, head_and_neck

SEQ ID NO: 467694 - DNA, 408 bp, Homo sapiens
  chr7:113726962-113727370
  hyper
  lymphoid_neoplasm vs. head_and_neck
cggatgatttttagtttggataatgcaaaatgttgcttcgtccggagagacctcggctggaggagaatgtgtgtcgaaacaccagatgtgtgtttgtttactctcttctttttaattgtttgttgtcttttccccttcctccccgcacccccacccccaacctcgggaggagaaacaacagtaaaaacatctggcggttagaagcacacactttattgatccaactgctgacctttatttactcagttgggcaagtgcacgcttctcgcgtctaagttgggcacttcagcgttcatctcagaagtacttctccaggaaggagagagatggaaaggggacactcctgtttctggagtcaagaaactcctgggccctactgacgcttcgggataaccgtgcacagggatg

SEQ ID NO: 467695 - DNA, 259 bp, Homo sapiens
  chr7:117513178-117513437
  hyper
  lymphoid_neoplasm vs. ovary
ggatccccagccagggtggccgctccgctcccccccgcggcctccgccgtgtgggcatcccgaggaaggggggccccgatgaaggggcaccggagagtcccgggcttacggaacgccccgggggtgcgaagtcgggtccggctgggaccccggcgccgcccccggcccgcgtctacactagccccgcgcccgccccgggaactcggttaccgccgcctccgccgcggcccccgccgcgtcctccggggcccgggacaag

SEQ ID NO: 467696 - DNA, 185 bp, Homo sapiens; identical to SEQ ID NO: 358938
  chr7:117513471-117513656
  hyper
  lymphoid_neoplasm vs. ovary

SEQ ID NO: 467697 - DNA, 428 bp, Homo sapiens; identical to SEQ ID NO: 201161
  chr7:121512905-121513333
  hyper
  lymphoid_neoplasm vs. cervical,melanoma

SEQ ID NO: 467698 - DNA, 465 bp, Homo sapiens
  chr7:121945147-121945612
  hyper
  lymphoid_neoplasm vs. colorectal
cggagtctaattcaggggcaaacgccaggctatatttatcaaacgccaagctccagaaagcctcggctaggaagcctcggcagtgaaatccgaggtttcgctgcttggttccactgggcctgggtgggccgggctgggccgggctgggccgggtcagatctgtgccacctccgcagacctatttcttcctccagggctcggggttgcccgctcccggaatcccggagtctccgcggcccgaaccgagtctggaccatttagaagacgccggcaggtaactggcctccccaaacgccccgaaaattaaaagccttaggaggcttgttctgtgtttgtggttttgtaaaggcaatgcccgcggcaataggcctgggaaagtcgcactttcatccacaaagttgaggagttgcaaggaataattgggtgtcacaccacaagcaaccttgactcgatcggaccccaccc

SEQ ID NO: 467699 - DNA, 620 bp, Homo sapiens
  chr7:122526214-122526834
  hyper
  lymphoid_neoplasm vs. liver_bileduct
cgggctcacagatctggccgcgccgccgccgcccgcgcgccccggcgcgtcccgccgcccttcccgagtcggggctggaggagctcgctgcgagctgccggctgccaccagcacatcgcggctttcctcttccagcccctcgtccgactcctcttcgctggaagacgggtccagcatggtgctcggggatccccgccgctcggcccgcggtccccaagcgcctcacccccggcggctgcgcccgcgggtctgagggagccgcggggctggctgcagcggccgcagaacgaaaggaaaactggccagggctttccggacacgtcgagttagattcaggagtgtttcctaccaccagggcgaaaggggcgggcaggagccgggaggaggattgggaggggggagagggggagccgccgggactgaataggcggagttagcgttgggggtgagcttgggcgcctcaggaattgctccgccagccccgggcgcgccgacccagcggttccccagagcccgccggcagaggcggagccgcccgagcgcccggacgcaggtggggaacctgtggcgcctacaacaagcaacacgtggaattgaatgttgaagagccgcgcggggcc

SEQ ID NO: 467700 - DNA, 279 bp, Homo sapiens; identical to SEQ ID NO: 371680
  chr7:122526873-122527152
  hyper
  lymphoid_neoplasm vs. liver_bileduct

SEQ ID NO: 467701 - DNA, 204 bp, Homo sapiens
  chr7:123673023-123673227
  hyper
  lymphoid_neoplasm vs. pancreas_gallbladder
cggggccctcgctgtccacgtcgctccccgccatgggctcggaggctgtccgaacgcccgaggctgcaccgccgccgctgccgggtgcgcggagctgcagggccgagcggccgagccccgcgccgcctcctggccgctgccggcccccggggggcgcgcagggagctccgtcccggccgcggtcccgcggcagcgggggctgat

SEQ ID NO: 467702 - DNA, 204 bp, Homo sapiens; identical to SEQ ID NO: 467701
  chr7:123673023-123673227
  hyper
  lymphoid_neoplasm vs. bladder_and_urothelial

SEQ ID NO: 467703 - DNA, 296 bp, Homo sapiens; identical to SEQ ID NO: 358945
  chr7:123673383-123673679
  hyper
  lymphoid_neoplasm vs. bladder_and_urothelial

SEQ ID NO: 467704 - DNA, 24 bp, Homo sapiens
  chr7:139208222-139208246
  hyper
  lymphoid_neoplasm vs. ovary
cggctggggagatggagctgagtt

SEQ ID NO: 467705 - DNA, 968 bp, Homo sapiens; identical to SEQ ID NO: 358996
  chr7:151572574-151573542
  hyper
  lymphoid_neoplasm vs. liver_bileduct

SEQ ID NO: 467706 - DNA, 698 bp, Homo sapiens
  chr7:151722447-151723145
  hyper
  lymphoid_neoplasm vs. renal,myeloid_neoplasm, bladder_and_urothelial,sarcoma,anorectal,pancreas_gallbladder, colorectal,non_cancer,lung,uterine,liver_bileduct,breast, upper_gi
cggaacacagatgcgtgtcgccgcgcaatgggcacagcgcatacagcgcagagctcccgggctcaagcgctgctcccgcctcagcctccggagtagccggggccacaggcagggcatttgtcattaatggggtcttttgagaccgcgggtgacagacaacaggagccaggccacgcgcggcgcctctgcgcgaacgctagggaggactcagcgcgcggcggccggtgacgtcagggcagcgagaggtttcgtcaccgcggcgcgggggcggggccgcctgtcacgcggcgccggcggacgcgcggcgctgggcggaggcagcggctcggggactgggcgagggccctgggcctgaggaggcgcggccgccactgcgcccagcgcctgcgcgacgcctggctgctgggccccggggcagttcagcccgcgccgctcctgcgggtcggactggggctgtggcgggagagaagatgccgcagcccgagtcccagaaggcggcgatcctgggctgcgggcaaggcggtgagtaccctctaggcggcggcctcccggcgtccctcagcacctcgagagctgcggcggcggcggcgcgcggggcctgggcaggctgggggcggcggcggggcagcgcctggctccccgcgggtcctgggctcccgcacgccccctgggcgaggctcgtgtctccgggagacgcc

SEQ ID NO: 467707 - DNA, 4 bp, Homo sapiens
  chr7:151723167-151723171
  hyper
  lymphoid_neoplasm vs. renal,myeloid_neoplasm, bladder_and_urothelial,sarcoma,anorectal,pancreas_gallbladder, colorectal,non_cancer,lung,uterine,liver_bileduct,breast, upper_gi
cgtc

SEQ ID NO: 467708 - DNA, 34 bp, Homo sapiens; identical to SEQ ID NO: 346947
  chr7:151723206-151723240
  hyper
  lymphoid_neoplasm vs. renal,myeloid_neoplasm, bladder_and_urothelial,sarcoma,anorectal,pancreas_gallbladder, colorectal,non_cancer,lung,uterine,liver_bileduct,breast, upper_gi

SEQ ID NO: 467709 - DNA, 105 bp, Homo sapiens
  chr7:155246271-155246376
  hyper
  lymphoid_neoplasm vs. multiple_myeloma
cgcccccctccccgggcgagcctgggctaagtatcaagtcaggacagaagggcggtccccagtcggctcctggcccactctgcttccccaacacctagggagctt

SEQ ID NO: 467710 - DNA, 388 bp, Homo sapiens
  chr7:155604534-155604922
  hyper
  lymphoid_neoplasm vs. pancreas_gallbladder
cgctccggtgttttcttcatccttaaatatgatgtcggggttgtaattgggggtgagttccttaaatcgctcggagtttctggagatcttcccttcataccttccgctggcgcctagggtcttctcggccacattggggataaactgcttgtaggctaaaggggtcagctttttggggtgcctcctcttcccgaaccccctgcccggtccgcacgccagtcccgagcataccagcagcgaggagacgaggactagcagcagacatctcgccagcagcagcatctcgcccatggaactgatgacttccgagctgtccccgtgcgggtccgtgcgcgagtgcgcgcggcgggtgtgtgcgtgtgcgctctctcttgcgctttcccttcct

SEQ ID NO: 467711 - DNA, 75 bp, Homo sapiens; identical to SEQ ID NO: 359006
  chr7:155605019-155605094
  hyper
  lymphoid_neoplasm vs. pancreas_gallbladder

SEQ ID NO: 467712 - DNA, 217 bp, Homo sapiens; identical to SEQ ID NO: 458290
  chr7:157476655-157476872
  hyper
  lymphoid_neoplasm vs. multiple_myeloma

SEQ ID NO: 467713 - DNA, 107 bp, Homo sapiens; identical to SEQ ID NO: 350690
  chr7:158379699-158379806
  hyper
  lymphoid_neoplasm vs. melanoma,prostate,renal

SEQ ID NO: 467714 - DNA, 21 bp, Homo sapiens
  chr7:158380259-158380280
  hyper
  lymphoid_neoplasm vs. sarcoma,upper_gi,thyroid,melanoma, colorectal,lung
cgggagctgccggccgcgggg

SEQ ID NO: 467715 - DNA, 94 bp, Homo sapiens; identical to SEQ ID NO: 463046
  chr7:158380396-158380490
  hyper
  lymphoid_neoplasm vs. sarcoma,upper_gi,thyroid,melanoma, colorectal,lung

SEQ ID NO: 467716 - DNA, 126 bp, Homo sapiens; identical to SEQ ID NO: 346954
  chr7:158380510-158380636
  hyper
  lymphoid_neoplasm vs. sarcoma,upper_gi,thyroid,melanoma, colorectal,lung

SEQ ID NO: 467717 - DNA, 3 bp, Homo sapiens
  chr7:158380811-158380814
  hyper
  lymphoid_neoplasm vs. melanoma,upper_gi
cgc

SEQ ID NO: 467718 - DNA, 72 bp, Homo sapiens
  chr7:158823238-158823310
  hyper
  lymphoid_neoplasm vs. renal,liver_bileduct
cggcgtctcagccccgcagaagccccgaaccgtgggcctcccgccgcgtccgacaggcaggggtggggctag

SEQ ID NO: 467719 - DNA, 77 bp, Homo sapiens; identical to SEQ ID NO: 359022
  chr7:158823665-158823742
  hyper
  lymphoid_neoplasm vs. renal,liver_bileduct

SEQ ID NO: 467720 - DNA, 43 bp, Homo sapiens
  chr8:495481-495524
  hyper
  lymphoid_neoplasm vs. liver_bileduct
cgtggccacgtccgctcgggtcaccaaggcaacggccgggagc

SEQ ID NO: 467721 - DNA, 69 bp, Homo sapiens
  chr8:495635-495704
  hyper
  lymphoid_neoplasm vs. liver_bileduct
cggggcctgggcgccgggcatccgggactcatcccctccggcgcccgaggtcgcgggatagtgggggcg

SEQ ID NO: 467722 - DNA, 18 bp, Homo sapiens
  chr8:496001-496019
  hyper
  lymphoid_neoplasm vs. liver_bileduct
ggacggagccgcgggaac

SEQ ID NO: 467723 - DNA, 7 bp, Homo sapiens
  chr8:1771715-1771722
  hyper
  lymphoid_neoplasm vs. bladder_and_urothelial
cggcgca

SEQ ID NO: 467724 - DNA, 287 bp, Homo sapiens; identical to SEQ ID NO: 359025
  chr8:1771751-1772038
  hyper
  lymphoid_neoplasm vs. bladder_and_urothelial

SEQ ID NO: 467725 - DNA, 4 bp, Homo sapiens
  chr8:11550022-11550026
  hyper
cgtg

SEQ ID NO: 467726 - DNA, 252 bp, Homo sapiens; identical to SEQ ID NO: 453440
  chr8:11550368-11550620
  hyper

SEQ ID NO: 467727 - DNA, 7 bp, Homo sapiens
  chr8:11550701-11550708
  hyper
cggtggc

SEQ ID NO: 467728 - DNA, 151 bp, Homo sapiens
  chr8:12808911-12809062
  hyper
  lymphoid_neoplasm vs. anorectal,myeloid_neoplasm,uterine, renal,lung,colorectal
ggccgaccaggtgctcccgccggggcgtcttctcctacgcaggaagggccacgccgagagaggcaggcaacaagggcacggctggaggccggaaggtcaccccgtccccggcggggcgggcgcggcccagcctcacttcccgggcacgttc

SEQ ID NO: 467729 - DNA, 144 bp, Homo sapiens
  chr8:12809462-12809606
  hyper
  lymphoid_neoplasm vs. anorectal,myeloid_neoplasm,uterine, renal,lung,colorectal
ggcccgcgcgcgcgctcccccacggccacgcgcgcaccctgccgcccgcacccccgcgcgccctccgtctattttttcctcttcctttcatcctcacactctaaaataggtcaaggggtggaagttacacctggtgcagccctc

SEQ ID NO: 467730 - DNA, 186 bp, Homo sapiens
  chr8:12809462-12809648
  hyper
  lymphoid_neoplasm vs. melanoma,pancreas_gallbladder, ovary,anorectal,renal,colorectal,uterine
ggcccgcgcgcgcgctcccccacggccacgcgcgcaccctgccgcccgcacccccgcgcgccctccgtctattttttcctcttcctttcatcctcacactctaaaataggtcaaggggtggaagttacacctggtgcagccctcggctctgatgcaaaagcagcttttgcccctggctgcgggaca

SEQ ID NO: 467731 - DNA, 62 bp, Homo sapiens; identical to SEQ ID NO: 346964
  chr8:12809799-12809861
  hyper
  lymphoid_neoplasm vs. melanoma,pancreas_gallbladder, ovary,anorectal,renal,colorectal,uterine

SEQ ID NO: 467732 - DNA, 211 bp, Homo sapiens
  chr8:17354241-17354452
  hyper
  lymphoid_neoplasm vs. bladder_and_urothelial
cggggggaccaaaaccccacttagaactctgcttagaagattcggaaatgcccttgaggtttggtcctcccaggagagcacgaagtttatcctcgcgcgcagcctctcttccccggcccgcgcccaccggcctagcccggggctagcgcccgcccacgtgtgctcggctccaggcaaaccccgctgagcagcggccgcacaccgcccaccc

SEQ ID NO: 467733 - DNA, 545 bp, Homo sapiens; identical to SEQ ID NO: 371813
  chr8:17354600-17355145
  hyper
  lymphoid_neoplasm vs. bladder_and_urothelial

SEQ ID NO: 467734 - DNA, 591 bp, Homo sapiens
  chr8:19796843-19797434
  hyper
  lymphoid_neoplasm vs. thyroid
cgacttgctcagcgccaaaccgcggctccagccctctccagcctccggctcagccggctcatcagtcggtccgcgccttgcagctcctccagagggacgcgccccgagatggagagcaaagccctgctcgtgctgactctggccgtgtggctccagagtctgaccgcctcccgcggaggggtggccgccgccgaccgtaagttttgcgcgcaaactcccctccacctgcagacccggcgggtggccactgccacccgaactgaggatgagaagaaggaagttggaaggggcggtggatgcgcccagggactctcccagcctgggctctagccccgaaacggtccccggagtgggatccaggaggggccgggagggaatctcctcccgatcgtgaagcggcggcgcccagttcccgctttttctctctgccgggttcccgcgctatcccttccactctggctgggaccgcgttcccgggctcgcaggctccgccggggaggttccggggtgtgggggccgggacggcggaggcggggagtaagggcccggctggcggtgacctgcagtcacctctctgccggaggggccctg

SEQ ID NO: 467735 - DNA, 28 bp, Homo sapiens
  chr8:19797463-19797491
  hyper
  lymphoid_neoplasm vs. thyroid
tcgccttggttggcactgcggctcagcc

SEQ ID NO: 467736 - DNA, 2 bp, Homo sapiens
  chr8:24812767-24812769
  hyper
  lymphoid_neoplasm vs. multiple_myeloma
cg

SEQ ID NO: 467737 - DNA, 305 bp, Homo sapiens
  chr8:24812836-24813141
  hyper
  lymphoid_neoplasm vs. multiple_myeloma
ccacccctcccacacagtggccaaggagccaagccctatccctaagagctgcgtgcagccgcaccacccctggtctccactttctgggcgcaccaactcccccccttgctcgagtcccccgcccccctgtgtttctggccgtgccgcacctgcatagcgctgatgtcggcgttctgcttgtcctccagctcctgcagctgcttctccagcgcttcattcatgccccggcatgcttcgatttccagggtcttggccttgagcagacgacggctctcggacacctcgtccttggcggcgcgcacggc

SEQ ID NO: 467738 - DNA, 303 bp, Homo sapiens
  chr8:25041946-25042249
  hyper
  lymphoid_neoplasm vs. upper_gi,liver_bileduct,renal
cgggacccagcctccggggtatcagccgggtggggagggcgggagaaaggcaaagtgccgccagcgtcaaagtcccgccggcccaggaagccgctccagggaagcgcgcgaggcggagccgcagtcggcccccgcccggcagagcgcagagagcggcgcgggcgggagaggccgggcgcccgcggctcggaggcggccccggcgggcggagggtgcggccggcgggagggactggggcggcgccaggaggggcgcgcactgctgcgctgcagcccggcccagcaggtgaccgcgggcggcgcg

SEQ ID NO: 467739 - DNA, 127 bp, Homo sapiens
  chr8:25042284-25042411
  hyper
  lymphoid_neoplasm vs. upper_gi,liver_bileduct,renal
gcggcccgcggagtccagcgaagtttggcggaacatggcggaagcgtctggggcacgcaggagcgcggggcggcggcggccggagcccgaggagctgtagcagccttagtcgccgccgccgcggggc

SEQ ID NO: 467740 - DNA, 303 bp, Homo sapiens; identical to SEQ ID NO: 467738
  chr8:25041946-25042249
  hyper
  lymphoid_neoplasm vs. liver_bileduct,upper_gi,lung, melanoma,renal,bladder_and_urothelial,colorectal, pancreas_gallbladder,anorectal

SEQ ID NO: 467741 - DNA, 251 bp, Homo sapiens
  chr8:25042284-25042535
  hyper
  lymphoid_neoplasm vs. liver_bileduct,upper_gi,lung, melanoma,renal,bladder_and_urothelial,colorectal, pancreas_gallbladder,anorectal
gcggcccgcggagtccagcgaagtttggcggaacatggcggaagcgtctggggcacgcaggagcgcggggcggcggcggccggagcccgaggagctgtagcagccttagtcgccgccgccgcggggcgaggtcgccgccatggcccgctggatcccgaccaagaggcagaagtacggggttggtgagtgcgcgccccaccttgtcccggcccgacccacgcggccaagttcgcggacagcggccctgccag

SEQ ID NO: 467742 - DNA, 63 bp, Homo sapiens; identical to SEQ ID NO: 201348
  chr8:25042567-25042630
  hyper
  lymphoid_neoplasm vs. liver_bileduct,upper_gi,lung, melanoma,renal,bladder_and_urothelial,colorectal, pancreas_gallbladder,anorectal

SEQ ID NO: 467743 - DNA, 106 bp, Homo sapiens
  chr8:25042632-25042738
  hyper
  lymphoid_neoplasm vs. liver_bileduct,upper_gi,lung, melanoma,renal,bladder_and_urothelial,colorectal, pancreas_gallbladder,anorectal
cgatggggaagtcgcccagggtttggggactccgagtgcttccaagtgcagctgagcttcgggaccgtaatcccgctcttgcatcccaatctccggcacttcacac

SEQ ID NO: 467744 - DNA, 73 bp, Homo sapiens; identical to SEQ ID NO: 346972
  chr8:25042833-25042906
  hyper
  lymphoid_neoplasm vs. liver_bileduct,upper_gi,lung, melanoma,renal,bladder_and_urothelial,colorectal, pancreas_gallbladder,anorectal

SEQ ID NO: 467745 - DNA, 119 bp, Homo sapiens
  chr8:25042416-25042535
  hyper
  lymphoid_neoplasm vs. melanoma
cgccgccatggcccgctggatcccgaccaagaggcagaagtacggggttggtgagtgcgcgccccaccttgtcccggcccgacccacgcggccaagttcgcggacagcggccctgccag

SEQ ID NO: 467746 - DNA, 63 bp, Homo sapiens; identical to SEQ ID NO: 201348
  chr8:25042567-25042630
  hyper
  lymphoid_neoplasm vs. melanoma

SEQ ID NO: 467747 - DNA, 106 bp, Homo sapiens; identical to SEQ ID NO: 467743
  chr8:25042632-25042738
  hyper
  lymphoid_neoplasm vs. melanoma

SEQ ID NO: 467748 - DNA, 436 bp, Homo sapiens; identical to SEQ ID NO: 371836
  chr8:25042833-25043269
  hyper
  lymphoid_neoplasm vs. melanoma

SEQ ID NO: 467749 - DNA, 500 bp, Homo sapiens
  chr8:25902969-25903469
  hyper
  lymphoid_neoplasm vs. melanoma
tttgcatggacgcgcgggattggccggcgcctggcaagccgggccgacgtcctccggcggcgcgcgccacgctctgcgttgccgggactccgggaggtgaaaggggacagaaagctgcgggcgtcgagtcctagcacgaaccccgtgtgcttgcgcaggattggggggcccccacaccctgcactgacttagggtagcaggtctctgcgggctggggacgcaggggttcggcctggctgcgggaagcctccctggatcctgcctctagatgtaggcttttgtagcctgccgggaggcacgttcgttcccggggttcggatctgtgtgcatgcttgtgagcgtggccacatgtgcttatgttttgcgcaaacgtcccccagagcacccagctccctgaatggctccccaggtctcctggagttccatggtgatatcagatgttgtgtgcggcttgcacgttgctgagagtggagaacatatgaaagaaggcgggggatggg

SEQ ID NO: 467750 - DNA, 88 bp, Homo sapiens; identical to SEQ ID NO: 350729
  chr8:25904367-25904455
  hyper
  lymphoid_neoplasm vs. melanoma,multiple_myeloma

SEQ ID NO: 467751 - DNA, 53 bp, Homo sapiens; identical to SEQ ID NO: 371844
  chr8:26724653-26724706
  hyper
  lymphoid_neoplasm vs. melanoma

SEQ ID NO: 467752 - DNA, 283 bp, Homo sapiens
  chr8:32405171-32405454
  hyper
  lymphoid_neoplasm vs. melanoma
cgcaacctagcatctttaaggttcgcttagcccttcctgtgcacctggaaggaagccttatcttaaactcccttccacctagagtttattttcgcctgcgtgcgacagggcttttgtacttaagtgagttaaggaatgaaccccgaactcttctgggaaagccaccaacgttccccccgcacccctcccagggttcctgaccacggagactctgcttggggcacaggtgtgggagtcgcaaacttttctctgcgccgtccttttccgcgtggaatgggacgga

SEQ ID NO: 467753 - DNA, 957 bp, Homo sapiens
  chr8:37552902-37553859
  hyper
  lymphoid_neoplasm vs. upper_gi
cggacacacacggcgggcggggttacagcccccgccagcatcaccccccacccacccagtggtgagaagggagagaggagagagagcggccggaaaggaggacggggcgcagagctcagggtcccggagaagtcccgtcccaggcgggggaccccagggcgaggaaggcccagtcggggggaggggaggaatcccgggagcggccgagaccgaggcagcggcggcgcgcggcgcggcccctttaaggctctccccgcccaccgatggagccggcctcagcccgccgctctccccgccccggggtcccggcgagagctgcgattgggcgggcgcggcgatccctttgaagtgtggctgccgatcgcggctatttgacgtgcggctcgaggaaggcgaaggtttttgtgttgctagccggggccagcggcggtggcggcggcggcggaggcgtcggtggaggaggggaggcggcgaggaggcgcagctcccgctgcaccgcgatcgacgctgcggagcgagcccacccgccccgggagctcgcctccccggtgctcccccgccctccccgcccccccagcggcgctgcctcctccaaatgagcgattcgcccgctggatctaacccaaggacacccgaaagcagcggcagcggcagcggcggcggcgggaagaggccggcggtgccggcagcggtgtccctcttgccaccggcggaccccctgcgccaggcgaaccggctcccgatcagggtcctgaagatgctgagcgctcacaccggtcacctcctgcacccggagtacctgcagccgctgtcctccactcccgtcagccccattgaggtcagtccccggccgctgcccccgggcgccggccccattcctcccaccgcgaccgggaccctgacccagctcccagcgccccggggctcggtgcgacacccaagtctggtcacgctggc

SEQ ID NO: 467754 - DNA, 795 bp, Homo sapiens; identical to SEQ ID NO: 350734
  chr8:37553381-37554176
  hyper
  lymphoid_neoplasm vs. pancreas_gallbladder

SEQ ID NO: 467755 - DNA, 12 bp, Homo sapiens
  chr8:41165698-41165710
  hyper
  lymphoid_neoplasm vs. sarcoma
cgctttgggttt

SEQ ID NO: 467756 - DNA, 128 bp, Homo sapiens
  chr8:53853387-53853515
  hyper
  lymphoid_neoplasm vs. myeloid_neoplasm,anorectal, prostate
cgccttcctggacgccagcttccgcaggaacctccgccagctgataacttgccgcgcggcagcctgactcccccagcgtccggctccgcaactgcccgccactcctggccagcgagggaggagccggc

SEQ ID NO: 467757 - DNA, 14 bp, Homo sapiens
  chr8:54163303-54163317
  hyper
  lymphoid_neoplasm vs. melanoma
cgcccagcccccag

SEQ ID NO: 467758 - DNA, 149 bp, Homo sapiens; identical to SEQ ID NO: 459864
  chr8:58906804-58906953
  hyper
  lymphoid_neoplasm vs. melanoma,sarcoma,thyroid, multiple_myeloma,non_cancer,prostate,anorectal,breast, pancreas_gallbladder,renal,uterine,lung

SEQ ID NO: 467759 - DNA, 115 bp, Homo sapiens; identical to SEQ ID NO: 371876
  chr8:58907941-58908056
  hyper
  lymphoid_neoplasm vs. non_cancer,myeloid_neoplasm, prostate

SEQ ID NO: 467760 - DNA, 41 bp, Homo sapiens
  chr8:62200462-62200503
  hyper
  lymphoid_neoplasm vs. melanoma
cggaggcatttaggacccaggggaaagctaggctccgtata

SEQ ID NO: 467761 - DNA, 131 bp, Homo sapiens; identical to SEQ ID NO: 359123
  chr8:62200984-62201115
  hyper
  lymphoid_neoplasm vs. melanoma

SEQ ID NO: 467762 - DNA, 24 bp, Homo sapiens
  chr8:65492354-65492378
  hyper
cggaaagtcccatccccaaatcca

SEQ ID NO: 467763 - DNA, 261 bp, Homo sapiens
  chr8:65492407-65492668
  hyper
tataattctcgcccggaagggtaatttagcacaagctgagacagcagtggcgagggaagggcagtggggggtggggtgcggtgggtgggggcgtctgctttccacaggactcccaggcttcgccgccgatctacaatttgctgaaggagcaaagaacatcctcggctctaagtagggcttttagtgtgctcattgatgagtgaaagtcgccacacatgtcaagctaaaggcagttgttgggttactaacaggacccagcgc

SEQ ID NO: 467764 - DNA, 8 bp, Homo sapiens
  chr8:72459564-72459572
  hyper
  lymphoid_neoplasm vs. multiple_myeloma
cgtccccc

SEQ ID NO: 467765 - DNA, 340 bp, Homo sapiens
  chr8:74005170-74005510
  hyper
  lymphoid_neoplasm vs. bladder_and_urothelial
gtccagcctccagccgcgggcgaagcaggcggggtcccggccgggacagcagcgcccggcctcggcgcagccggcctgggccccgggccacagccgcgacagcgcgcacagcgccatccacagggtcctcatggccagggctccggcggcgcctgcgacgcgacagacccccggggcaagcgctctgatcctcggctggccgcggcccgggagctgcccgagcggccggcgaggcacagccgggccctgccctgcgcccggcccccgccctccgcgccgcccctccccagccctggcggcgcgcccgtcgaggcccgggcgggtggcggggctgccctgc

SEQ ID NO: 467766 - DNA, 123 bp, Homo sapiens
  chr8:74005539-74005662
  hyper
  lymphoid_neoplasm vs. bladder_and_urothelial
gacgggcccgcaatcgacggtccgggcgccacccactccccgctgccagctcgcgccccagctccagcccggggacctccggggcgcgggagcggaaaagcaggtgctggcggggcgggggtc

SEQ ID NO: 467767 - DNA, 57 bp, Homo sapiens; identical to SEQ ID NO: 359144
  chr8:74005798-74005855
  hyper
  lymphoid_neoplasm vs. bladder_and_urothelial

SEQ ID NO: 467768 - DNA, 917 bp, Homo sapiens; identical to SEQ ID NO: 350777
  chr8:81785915-81786832
  hyper
  lymphoid_neoplasm vs. liver_bileduct,anorectal,cervical

SEQ ID NO: 467769 - DNA, 13 bp, Homo sapiens
  chr8:95651257-95651270
  hyper
  lymphoid_neoplasm vs. pancreas_gallbladder,lung, bladder_and_urothelial
cgcacggggttcc

SEQ ID NO: 467770 - DNA, 4 bp, Homo sapiens
  chr8:95651324-95651328
  hyper
  lymphoid_neoplasm vs. pancreas_gallbladder,lung, bladder_and_urothelial
cgcg

SEQ ID NO: 467771 - DNA, 29 bp, Homo sapiens
  chr8:95651510-95651539
  hyper
  lymphoid_neoplasm vs. pancreas_gallbladder,lung, bladder_and_urothelial
gcgaggctactgcagtaagccagccggaa

SEQ ID NO: 467772 - DNA, 72 bp, Homo sapiens
  chr8:95651655-95651727
  hyper
  lymphoid_neoplasm vs. pancreas_gallbladder,lung, bladder_and_urothelial
ggccttcgcccgctctcaggggacgagagctgccacctgtatcacgggaggccccgcctccgcctgcacctt

SEQ ID NO: 467773 - DNA, 176 bp, Homo sapiens; identical to SEQ ID NO: 346996
  chr8:95651845-95652021
  hyper
  lymphoid_neoplasm vs. pancreas_gallbladder,lung, bladder_and_urothelial

SEQ ID NO: 467774 - DNA, 68 bp, Homo sapiens
  chr8:95652747-95652815
  hyper
  lymphoid_neoplasm vs. upper_gi,cervical
cgccgcgccctgggcagctccgcgccccgggcctcacctctggcctcctttcgcctccctgcacctgg

SEQ ID NO: 467775 - DNA, 378 bp, Homo sapiens
  chr8:95652863-95653241
  hyper
  lymphoid_neoplasm vs. upper_gi,cervical
gtattctccgagcccccctgcacctctcagttacctccagtgggaacccctccccccagcgactccgagccctttacctctctgagccctttccccgtctggcctcgtctaccctctgggtgtcaaccgcctcttccctgcccctcacgtctccccctcctcctcccctgccctcgcctctccattcatccagccattgtctcccgccccttcctccccctcccgaagcggcctcctcccccaccgctgccacgtcgtggtttgaaggagccaatgggccggcgccgccaggtgtctcttacctgcaccacgtgggggagggggaaggggcgggcaggtaaagccacatcccaaaacagaaaagctttcagccattgc

SEQ ID NO: 467776 - DNA, 53 bp, Homo sapiens
  chr8:95653290-95653343
  hyper
  lymphoid_neoplasm vs. upper_gi,cervical
cgggcaactgaatacaaaaagggcaggcctcctgcgccctccttcccaccccc

SEQ ID NO: 467777 - DNA, 109 bp, Homo sapiens; identical to SEQ ID NO: 359170
  chr8:95653451-95653560
  hyper
  lymphoid_neoplasm vs. upper_gi,cervical

SEQ ID NO: 467778 - DNA, 55 bp, Homo sapiens
  chr8:97156910-97156965
  hyper
  lymphoid_neoplasm vs. myeloid_neoplasm,non_cancer, thyroid
cggggtggagccggggtccatggagttcatcagcgtctggatgatggcgtggttg

SEQ ID NO: 467779 - DNA, 188 bp, Homo sapiens; identical to SEQ ID NO: 333522
  chr8:98787253-98787441
  hyper
  lymphoid_neoplasm vs. uterine,liver_bileduct

SEQ ID NO: 467780 - DNA, 177 bp, Homo sapiens; identical to SEQ ID NO: 350794
  chr8:98787803-98787980
  hyper
  lymphoid_neoplasm vs. head_and_neck,uterine, pancreas_gallbladder,lung,sarcoma,breast

SEQ ID NO: 467781 - DNA, 356 bp, Homo sapiens
  chr8:98788437-98788793
  hyper
  lymphoid_neoplasm vs. ovary,cervical,melanoma,renal,lung, head_and_neck,non_cancer,bladder_and_urothelial,anorectal, myeloid_neoplasm,breast,thyroid,uterine
ctaaagttgtattattagaaacttaattctccgggtgccgcgtccgcacttcccccggctgggccagcgccgactgggggaggccaggagtttggggcgatgggggaggccaggggcgcggggcggagggccgcactcgacccttggcgcccaggtggtgtgggtcgccgatctccagcctccgcgcagccccgcggcctcgcgtagggcgcaccggggcagacaaactgagcttatctgccgagcacgtgtttcctttcttcttaaagcccgtgggctttgtgtttcgacggctgcggacggagcggtcgcggaggtgacggcgcatattttgcagctctgtggttagggttgcg

SEQ ID NO: 467782 - DNA, 27 bp, Homo sapiens
  chr8:98880996-98881023
  hyper
  lymphoid_neoplasm vs. liver_bileduct
cgcactcccaacccgacaggcccctaa

SEQ ID NO: 467783 - DNA, 766 bp, Homo sapiens
  chr8:98881052-98881818
  hyper
  lymphoid_neoplasm vs. liver_bileduct
ggacccctggagtctgatgcccgcctgggctcaggcacggacggagtggagccaggtggcagcaggcagggcgcgccgccagagtgcccagctcccggggctgcccacagggtggggccgccctcgccgccgctccctctccgcgccttccccatccccaaagaggacacccctccttccgcccggcccgctccccacccccgccgcggcaccgcctccccagccgcccgcccttgcccagcgcctcccaggcagccagcgagcgaagggagcgctctgggatgggacttggagcaagcggcggcggcggagacagaggcagaggcagaagctggggctccgtcctcgcctcccacgagcgatccccgaggagagccgcggccctcggcgaggcgaagaggccgacgaggaagacccgggtggctgcgcccctgcctcgcttcccaggcgccggcggctgcaggtgagcgcggcgcgctttcccccggctctgcgcggccgggcggcctcgaagtgcaggcggaccgacccaccgacagaataccgagcctgggctgcccgacgcgcaggcgccctccccaggcccgcactgcagcccccagcgccccggggccccggcgccttcgacccctccgaggacagggggagagggagggcggcgctgcccgacccctcggccgggagagctgggcgcgctccctgcgcaggacaagccgcgctgcagccgccccggagtgccccgtgggggcgctgtggcacgcagcgg

SEQ ID NO: 467784 - DNA, 43 bp, Homo sapiens; identical to SEQ ID NO: 359180
  chr8:98881884-98881927
  hyper
  lymphoid_neoplasm vs. liver_bileduct

SEQ ID NO: 467785 - DNA, 28 bp, Homo sapiens
  chr8:99438692-99438720
  hyper
  lymphoid_neoplasm vs. bladder_and_urothelial,breast, sarcoma,renal,ovary
cgaccagaactcagcgactcccgccccc

SEQ ID NO: 467786 - DNA, 75 bp, Homo sapiens
  chr8:99438739-99438814
  hyper
  lymphoid_neoplasm vs. bladder_and_urothelial,breast, sarcoma,renal,ovary
cgccccccgcgtactaagccgatctccaccttggacttcccggccccctcttttcccctccagctcctgttcccc

SEQ ID NO: 467787 - DNA, 38 bp, Homo sapiens
  chr8:105600489-105600527
  hyper
  lymphoid_neoplasm vs. lung,cervical,melanoma,uterine, multiple_myeloma,non_cancer,renal,anorectal
cgcccggattcggcagagcccttgcccccgaggtggag

SEQ ID NO: 467788 - DNA, 330 bp, Homo sapiens
  chr8:105600681-105601011
  hyper
  lymphoid_neoplasm vs. lung,cervical,melanoma,uterine, multiple_myeloma,non_cancer,renal,anorectal
tctcacagtcaagcatctttgtgtgtggattgtgccaggctacgggtcctggagcaactggccgcgggggccctcgaacccaggtcgggaagtccgcccgccaccccctcgctccgccggggccctcccggccgggccccccagcccctctccaccacccgagggtctggaggtggacgagtggagaaaagcatctccgtgtggggacacccgttccgccacatccaccccctcaccggtctttgtcccgccggtagccagggtctccgcgggagtctccaggggaacccccgtcctggaggcctcggggcccgggtcgcctcagctttg

SEQ ID NO: 467789 - DNA, 153 bp, Homo sapiens
  chr8:105600858-105601011
  hyper
  lymphoid_neoplasm vs. head_and_neck,ovary,sarcoma, anorectal,lung,renal,bladder_and_urothelial,thyroid
cgagtggagaaaagcatctccgtgtggggacacccgttccgccacatccaccccctcaccggtctttgtcccgccggtagccagggtctccgcgggagtctccaggggaacccccgtcctggaggcctcggggcccgggtcgcctcagctttg

SEQ ID NO: 467790 - DNA, 148 bp, Homo sapiens; identical to SEQ ID NO: 350811
  chr8:105601687-105601835
  hyper
  lymphoid_neoplasm vs. head_and_neck,ovary,sarcoma, anorectal,lung,renal,bladder_and_urothelial,thyroid

SEQ ID NO: 467791 - DNA, 245 bp, Homo sapiens
  chr8:105601687-105601932
  hyper
  lymphoid_neoplasm vs. lung
agcacggtcgctgtccgagggctgggctctggcccagcgggtggggggagggggggtgggataccagctgggaggctgaaggtggttccgtgttgggggaggcgtggatggtctgaagctgacaacttgggagttccttcctctatccggtacccccaagtctccacttgctgtcggcgcggagcttcgagtgggggtgggctcaagttagtgcggccaacctggcagctggtcggtcaaggggc

SEQ ID NO: 467792 - DNA, 142 bp, Homo sapiens; identical to SEQ ID NO: 359203
  chr8:105602083-105602225
  hyper
  lymphoid_neoplasm vs. lung

SEQ ID NO: 467793 - DNA, 29 bp, Homo sapiens
  chr8:106330407-106330436
  hyper
  lymphoid_neoplasm vs. cervical,lung,melanoma,renal
cgttgacgcggtgacaactgcagaaggtg

SEQ ID NO: 467794 - DNA, 358 bp, Homo sapiens; identical to SEQ ID NO: 359204
  chr8:106331443-106331801
  hyper
  lymphoid_neoplasm vs. cervical,melanoma,lung

SEQ ID NO: 467795 - DNA, 23 bp, Homo sapiens
  chr8:109093657-109093680
  hyper
  lymphoid_neoplasm vs. multiple_myeloma
cggcgacaaattctaattgcgca

SEQ ID NO: 467796 - DNA, 61 bp, Homo sapiens
  chr8:120220368-120220429
  hyper
  lymphoid_neoplasm vs. pancreas_gallbladder,uterine,renal, breast,liver_bileduct,ovary,lung,head_and_neck,prostate
cgatcaggggtatgggggtgcgcatggagacgcccgcggagcgctggcgctggccagcgga

SEQ ID NO: 467797 - DNA, 15 bp, Homo sapiens
  chr8:120220592-120220607
  hyper
  lymphoid_neoplasm vs. pancreas_gallbladder,uterine,renal, breast,liver_bileduct,ovary,lung,head_and_neck,prostate
ccgcgcggcgcgccc

SEQ ID NO: 467798 - DNA, 326 bp, Homo sapiens; identical to SEQ ID NO: 350825
  chr8:120220895-120221221
  hyper
  lymphoid_neoplasm vs. pancreas_gallbladder,uterine,renal, breast,liver_bileduct,ovary,lung,head_and_neck,prostate

SEQ ID NO: 467799 - DNA, 971 bp, Homo sapiens; identical to SEQ ID NO: 333568
  chr8:127569937-127570908
  hyper
  lymphoid_neoplasm vs. upper_gi

SEQ ID NO: 467800 - DNA, 854 bp, Homo sapiens
  chr8:136469302-136470156
  hyper
  lymphoid_neoplasm vs. renal
ttcccagctccagctcggcccttgtcccctcttcccaggatcactcgctgggtgaccttgggcgagccacttgacttctctgagccccagtttcccagtccgtgcatctgaaaggctgtaatagcgtcgtggggctccccactcggccctcagggccaaaggtgggcgccggacacgcgggaggggcccttggacgcaccccctctcgcaaacgcccggttagtcccggcggactcgcagtggagagcggccccaggaggcggcgggcggcggggcggtgggcgccagtgcgcaggcgcggcgcggcagggcggggcggcgggcgcggggcggggcggggcggagccgggcggggcggggccggcggcaggcgctgggcgctcggcgcggtggctcagagtgcgcggggcggcgcgcggcgtgcaggtcgcagctgtggctcgggtgctggcaggtgctggcgggactggcggggatcgccgtggactgcctcaggggcgccgcagcccgctcggcccgagggcccgcctaaccgcgccgcccgcgcccgctcctcctcggcccgcgcccggagcgcgggggccgccggcgctgggtactcggcggccaccggggatcggggctgagcggtcggttcccgcccccgtgccgccgccgccgccttccggccgaccgcccggcttggccgctgctgccgcgtctggcccccgggtccccgccgctgggggcgcgggcggggtcgggggttgccgggcgccgccccccgtgcgcctggagtccacatcccgggcccggcggccggcgagcatggaggagaagtacctgcccgagctgatggcggagaaggactccct

SEQ ID NO: 467801 - DNA, 91 bp, Homo sapiens
  chr8:143695816-143695907
  hyper
gaggacgccgcgcccgagctctgcgctgagtcctggccgccggctctttatgcagccagcgaggcccgtgggcggccggctcgccgagccc

SEQ ID NO: 467802 - DNA, 57 bp, Homo sapiens
  chr8:143859071-143859128
  hyper
  lymphoid_neoplasm vs. cervical,bladder_and_urothelial
cggctcgccgggcaagcgctgggaccccgaggccagtccaggcatctggatctccga

SEQ ID NO: 467803 - DNA, 49 bp, Homo sapiens; identical to SEQ ID NO: 359248
  chr8:143859361-143859410
  hyper
  lymphoid_neoplasm vs. cervical,bladder_and_urothelial

SEQ ID NO: 467804 - DNA, 220 bp, Homo sapiens; identical to SEQ ID NO: 463079
  chr8:144240980-144241200
  hyper
  lymphoid_neoplasm vs. cervical,sarcoma,prostate

SEQ ID NO: 467805 - DNA, 99 bp, Homo sapiens
  chr9:13278637-13278736
  hyper
  lymphoid_neoplasm vs. prostate,melanoma,sarcoma
cgcccatcagcgcggggggtgaggagactaagggagagacaagaccaacgtgctcccaccaacgggagcggcggttaaaagggcgccggtgccaggggt

SEQ ID NO: 467806 - DNA, 348 bp, Homo sapiens
  chr9:13278956-13279304
  hyper
  lymphoid_neoplasm vs. prostate,melanoma,sarcoma
acaccccacccccagccccccgacaccaagactgtgcccctctgggtcaaggaaaaggaaaaacttttaaacctcttagtcagcgagagcaaaagaaaggggtggcgggggtgctgaaaggtctaggattatccaccgcggggctggggggagtggagacttgcgagtagcaaaggaaacttctagaccccatccttttaaaaaagccacagcagcggcttccgcgaagcgccgggccgcgcggggtggggcaagcgcaccgccccaccgccccacggcccgccgccacccctacccccacccccacccccacccccatccccgcccccacccccacccccaagcgcc

SEQ ID NO: 467807 - DNA, 33 bp, Homo sapiens
  chr9:13279406-13279439
  hyper
  lymphoid_neoplasm vs. prostate,melanoma,sarcoma
cggcgcccgcccagggccgcgacgcgagggggc

SEQ ID NO: 467808 - DNA, 328 bp, Homo sapiens
  chr9:13278976-13279304
  hyper
  lymphoid_neoplasm vs. renal,cervical,melanoma,uterine
cgacaccaagactgtgcccctctgggtcaaggaaaaggaaaaacttttaaacctcttagtcagcgagagcaaaagaaaggggtggcgggggtgctgaaaggtctaggattatccaccgcggggctggggggagtggagacttgcgagtagcaaaggaaacttctagaccccatccttttaaaaaagccacagcagcggcttccgcgaagcgccgggccgcgcggggtggggcaagcgcaccgccccaccgccccacggcccgccgccacccctacccccacccccacccccacccccatccccgcccccacccccacccccaagcgcc

SEQ ID NO: 467809 - DNA, 228 bp, Homo sapiens
  chr9:13279406-13279634
  hyper
  lymphoid_neoplasm vs. renal,cervical,melanoma,uterine
cggcgcccgcccagggccgcgacgcgagggggcggaggactggggagcaggggtcgccggggcctctggatgcctcgcctcgcccacgctcactgtcttctcttctgaagtaacgacccggcgaggagcttcggatcaaaacgcacagacactcacgcgtgactgagaaacttaatcccgcggtggcccgacgccagcctagcgctccgccgcgccccctcccccagc

SEQ ID NO: 467810 - DNA, 26 bp, Homo sapiens
  chr9:13279749-13279775
  hyper
  lymphoid_neoplasm vs. renal,cervical,melanoma,uterine
ggggacgcggccgagcaggcctgtgc

SEQ ID NO: 467811 - DNA, 602 bp, Homo sapiens
  chr9:14313785-14314387
  hyper
  lymphoid_neoplasm vs. cervical,pancreas_gallbladder, renal,breast,lung,head_and_neck,bladder_and_urothelial,ovary, upper_gi
cgccgccgccgccggtgttggctgcttttcgcctgggtttggggatttgttttctattttgcagttgttgttgttgttggggtgtagggggtgcgcgaaggttcggtgtgggttggattggggtggtggttggtggtaaaatgctttttcaaaaaaggcggggaggggggcgcgggagggcgcaggagggcgagcgggcgggcgggagggagagcggggagaatgtgtcaccgcgctgggaaagttcaaggttacagccccaagcactgcggcaggatcccggagtggtgatcgcaggcgaaactttgccgcgagccgaccatgtgtgtgcgcgaggggcagcgtgagcgagtgcgcgcgggtggcggggcgcgcgcgggagagggccggggtgggggcggggtgggatgggggagaagggagaggccggggtgagggagggggcgcgagcgctgatctctggggcggaagaggctcgcggcgcgtggtccccggcagcagcagccgccgccgcccgcgccgggtcttcggcgcccggccgcccgcccgcccgcctcgccccgcgtctgacccggccgagcgtggaggctgctgttgccgcc

SEQ ID NO: 467812 - DNA, 952 bp, Homo sapiens
  chr9:14313943-14314895
  hyper
  lymphoid_neoplasm vs. cervical,thyroid, pancreas_gallbladder,bladder_and_urothelial,renal,sarcoma, breast,colorectal,lung,upper_gi,uterine,non_cancer
cggggaggggggcgcgggagggcgcaggagggcgagcgggcgggcgggagggagagcggggagaatgtgtcaccgcgctgggaaagttcaaggttacagccccaagcactgcggcaggatcccggagtggtgatcgcaggcgaaactttgccgcgagccgaccatgtgtgtgcgcgaggggcagcgtgagcgagtgcgcgcgggtggcggggcgcgcgcgggagagggccggggtgggggcggggtgggatgggggagaagggagaggccggggtgagggagggggcgcgagcgctgatctctggggcggaagaggctcgcggcgcgtggtccccggcagcagcagccgccgccgcccgcgccgggtcttcggcgcccggccgcccgcccgcccgcctcgccccgcgtctgacccggccgagcgtggaggctgctgttgccgccgctgcccagagcccaggggtatcaaaacgatctcctgaaaaattccaaacgataaatcccgctctcccgctcggctccaaactcctctcttttctgctctaggctcttttttttccctccctctcttgctttctttcgttgcaaaacttggaagttgaaaaattcaccggttccaccctctggaccccgctcgagctctctccaaatcagacttaaggattgttttattatttaattacacaatcatcgctttactcctcctcctgcaaacgcgcattccttttgcaccagcctctccacaccccccgcccccccaccttcctcctcctcctccttctccttctctccccccacctctccctcatttgttaaaggtatcctaccggtgctacagaaccatgactttttttttttttccaaaatagctcttctttccgctgccctccccacaccagcacacacatacacacccccgaaaacccgccctggaagaggtatttcggtgctc

SEQ ID NO: 467813 - DNA, 983 bp, Homo sapiens
  chr9:14314414-14315397
  hyper
  lymphoid_neoplasm vs. pancreas_gallbladder,renal,lung, liver_bileduct,thyroid,upper_gi,colorectal,breast,prostate, anorectal,non_cancer,cervical,bladder_and_urothelial,uterine, head_and_neck,ovary,melanoma
cgatctcctgaaaaattccaaacgataaatcccgctctcccgctcggctccaaactcctctcttttctgctctaggctcttttttttccctccctctcttgctttctttcgttgcaaaacttggaagttgaaaaattcaccggttccaccctctggaccccgctcgagctctctccaaatcagacttaaggattgttttattatttaattacacaatcatcgctttactcctcctcctgcaaacgcgcattccttttgcaccagcctctccacaccccccgcccccccaccttcctcctcctcctccttctccttctctccccccacctctccctcatttgttaaaggtatcctaccggtgctacagaaccatgactttttttttttttccaaaatagctcttctttccgctgccctccccacaccagcacacacatacacacccccgaaaacccgccctggaagaggtatttcggtgctcgctgcggactcttttaagccgcgggaacatccgagtgggagaagcaccgaaaccgtctgagcccgagaaaggaacgagtggaaaattccctcacacccaggccgcccccaggccggggctggggcgcggacactcgcacccggggcgggctcagtccgcggagcctgcggctgccgggaaaagggggaggccgagcaggcggggacctgagcgaacttgggctcaagtagttggggcgcgccggcgtggaccaggggggtgcggcgcccagcccccgacggccccgcccggagcccgggttcgcggatagggagggggtgcgggttcgtcccgggtctgcccaccaggggcccgcacccgaggcagtcgcggcgcgcggcgcttcgccgcggtttgccgccctccccgggggtgccccgtgcacgtggcctcgctctgagcgggaggaccgggccgagccgccgccgccgcctcttgctccctccacctcctccccgcgccc

SEQ ID NO: 467814 - DNA, 897 bp, Homo sapiens
  chr9:14314899-14315796
  hyper
  lymphoid_neoplasm vs. liver_bileduct,ovary,lung, pancreas_gallbladder,prostate,colorectal,cervical,upper_gi, anorectal,breast,thyroid,non_cancer,renal,uterine,sarcoma, bladder_and_urothelial,head_and_neck
cggactcttttaagccgcgggaacatccgagtgggagaagcaccgaaaccgtctgagcccgagaaaggaacgagtggaaaattccctcacacccaggccgcccccaggccggggctggggcgcggacactcgcacccggggcgggctcagtccgcggagcctgcggctgccgggaaaagggggaggccgagcaggcggggacctgagcgaacttgggctcaagtagttggggcgcgccggcgtggaccaggggggtgcggcgcccagcccccgacggccccgcccggagcccgggttcgcggatagggagggggtgcgggttcgtcccgggtctgcccaccaggggcccgcacccgaggcagtcgcggcgcgcggcgcttcgccgcggtttgccgccctccccgggggtgccccgtgcacgtggcctcgctctgagcgggaggaccgggccgagccgccgccgccgcctcttgctccctccacctcctccccgcgcccggcttcgctctcctcctcctcctcctgcagccccgctggctggctcccaatccccaccccccggggcccggggcgccggcggaaagcgtctccctacccgcccgggtgcaggcggggcggggccgcggcgcgcccggggctgcggggcgggccggcgggcgcgcgcgcgccgctgcagccctccagaggctgcgggccctgagccgctcggcgcccgcgccggctccccaccgcggcgctgccccgcccccaccccgtcgcccgtgcaggctccgagtgaatgaacttgattccagggattttgaagaaggcggttcgccttgcaccctttctgcaccccccgcccacatacacacaccgccccccaaatccagttttctgcttggggtggatggggac

SEQ ID NO: 467815 - DNA, 435 bp, Homo sapiens
  chr9:14347673-14348108
  hyper
  lymphoid_neoplasm vs. cervical
aggcactggggggtcgggtgactgtgcggagtgtaaaagacatttccttaggaaacagacaaggcagggccaggagttccgcggttttttttccgtgcagaaatcactacccggcgacggctcagggcggtagagggcaagtcttatctgccaaggcgggattagattctctcgccgagggtcccagtatcccgccgcccagcaagggccgagcgcgcgcgcgcgccagggagctttggagcgacgcgcgtagtttcgcgtcgcacgcggtgtctggtctccgcgcaccacgtgcgctcgcggtccttggcggggacgttggtgctagcgatccgacagagcacccaggactaggtttttgtgatgccctaacctgggcatttatgctgggggcggaacgaagtcgcccaacccaagttctccctgcaccctggg

SEQ ID NO: 467816 - DNA, 132 bp, Homo sapiens
  chr9:16871284-16871416
  hyper
  lymphoid_neoplasm vs. ovary
cgcccccccccccccccggggagctgcgggcgtggaggtagaggtggccgctagcgcccagctgtcacacacacacaaaaaaaaattgcggggcgggggtggggagcggagcaaggagaggaggctgcgaaa

SEQ ID NO: 467817 - DNA, 115 bp, Homo sapiens
  chr9:21559133-21559248
  hyper
  lymphoid_neoplasm vs. bladder_and_urothelial
cgctgtatgaaagcgctctccgccaacacgctcatggacacacacaactccttcctcgaggtttagggacagagagcgaacctgtgacttcgggccaggatgacgacctgagatt

SEQ ID NO: 467818 - DNA, 285 bp, Homo sapiens
  chr9:21559381-21559666
  hyper
  lymphoid_neoplasm vs. bladder_and_urothelial
gtgtgcccactgccgtgtgcccaggccccgaagcctcctcaactccttgaggggcgcctccctagccagctcagcgcgcagcgggaccaaggctctcccagcttacctgcgggtccgagtaggaggacagaagcgccgcccggcctcgcccaagcgcacacgaaggggccgcttcccgccccccgcaccccagaccaggcggctcacggaacaccgcctcccagctctggcccgggaccaggcggtcccccagccggcttcggcgccgcggccggggacgcgcgt

SEQ ID NO: 467819 - DNA, 74 bp, Homo sapiens
  chr9:21559702-21559776
  hyper
  lymphoid_neoplasm vs. bladder_and_urothelial
cccctggcggcgccccaagttatgcacaggtcgcagctgctcaccaagctcctcctgggaggccgccctggtcc

SEQ ID NO: 467820 - DNA, 1 bp, Homo sapiens
  chr9:21560118-21560119
  hyper
  lymphoid_neoplasm vs. bladder_and_urothelial
c

SEQ ID NO: 467821 - DNA, 245 bp, Homo sapiens
  chr9:22446681-22446926
  hyper
  lymphoid_neoplasm vs. liver_bileduct,lung,head_and_neck
cggattccccgccgccctcctcccagaaggtccccactccccgccccgggccctcccccggcttccgcgctgggccgggagcctgggtgggcggggtagcctctctagccttgccttcttggctggaggcacaaaggcattaacttagcgcccggggtctctgccaggctcacgggacagctgcacctctcagcgtctccagctccaggacgcggtcgtcccaactccttccgagtggaaagagt

SEQ ID NO: 467822 - DNA, 153 bp, Homo sapiens; identical to SEQ ID NO: 359290
  chr9:22447276-22447429
  hyper
  lymphoid_neoplasm vs. liver_bileduct,lung,head_and_neck

SEQ ID NO: 467823 - DNA, 300 bp, Homo sapiens
  chr9:29212828-29213128
  hyper
  lymphoid_neoplasm vs. multiple_myeloma,sarcoma,melanoma
tcctaacttgacttaacccccaccccatccccaacatctattttaagttattgtctctggcaattcaagcagcagctttgctgcctcttaccttgaggcgctgttaattctccttcgtgtccttaaaatcccaagccaaggatgcgacgcacacaagtccaggggcttttcctggacttccccctcctcagctctgaaggctcctcctttccaagggatcaggaggggatggcggttcaaaagccctcaccatagaggcgcctccaagccttcgtaccagtggaaatggagaccgggacc

SEQ ID NO: 467824 - DNA, 283 bp, Homo sapiens
  chr9:35161771-35162054
  hyper
  lymphoid_neoplasm vs. upper_gi,anorectal, bladder_and_urothelial,breast,lung,colorectal,prostate,renal
cgcgtcacacaactgagggtcaaccccttgctccctgcagtaagcctgattagtgggcggagcttccttcaggatcgcaagaaagaaaggaggaaggggaccccgcctcctacgtgctcgcgggggggggcggggtcggtggactgggcgtgagttaattggctggggggcggggcaccacgggttggctccgcccaggcgctcgcgcggatcccgggtggaatgacgggagggagtcccggcagctcctacctcccagcgatggcgtcgctgtgccgcgccc

SEQ ID NO: 467825 - DNA, 253 bp, Homo sapiens; identical to SEQ ID NO: 350865
  chr9:35162422-35162675
  hyper
  lymphoid_neoplasm vs. upper_gi,anorectal, bladder_and_urothelial,breast,lung,colorectal,prostate,renal

SEQ ID NO: 467826 - DNA, 137 bp, Homo sapiens
  chr9:38619917-38620054
  hyper
  lymphoid_neoplasm vs. colorectal
cggggaattgccagcgacggaaagcagctgaggctccatttggctccgctgctccgagggtgcccggcgccctccaaggtccccgccccaggggctgccgggctgcagggaagccgggcctgcggccccctcccacc

SEQ ID NO: 467827 - DNA, 128 bp, Homo sapiens
  chr9:38620403-38620531
  hyper
  lymphoid_neoplasm vs. colorectal
cccgcgatccacccccaaatccaagatccacccccaaacccgcaatgtagctcagaatccgcgatccagcccggtccaccacagccttcagcagcgacactcgcagactccgacctctcagaccgagt

SEQ ID NO: 467828 - DNA, 11 bp, Homo sapiens
  chr9:38620725-38620736
  hyper
  lymphoid_neoplasm vs. colorectal
tctcctgggct

SEQ ID NO: 467829 - DNA, 18 bp, Homo sapiens
  chr9:38620821-38620839
  hyper
  lymphoid_neoplasm vs. colorectal
cgaagagagatcggggcc

SEQ ID NO: 467830 - DNA, 51 bp, Homo sapiens
  chr9:74764247-74764298
  hyper
  lymphoid_neoplasm vs. colorectal,anorectal
cgcggagccaactcgcgggagaaaaatcctattggcattgaggaggtaggg

SEQ ID NO: 467831 - DNA, 42 bp, Homo sapiens; identical to SEQ ID NO: 359316
  chr9:74764879-74764921
  hyper
  lymphoid_neoplasm vs. colorectal,anorectal

SEQ ID NO: 467832 - DNA, 93 bp, Homo sapiens
  chr9:77501932-77502025
  hyper
  lymphoid_neoplasm vs. ovary,cervical,lung
cgagaccaagaaattaccaggatctccactactctcccaagcgtctccagtgctctcccaacagccaggagcaccctccctctccaagccccc

SEQ ID NO: 467833 - DNA, 381 bp, Homo sapiens
  chr9:77502233-77502614
  hyper
  lymphoid_neoplasm vs. ovary,cervical,lung
ctgggcacttctccagccgcctcggaaagccgcgacccccggctagtcagcgtccgggtctgagatctgtgcccgtggcagctcaaaacgcgccttctctcctccggattctcagctcaagccacctccgaactcctctccctccggcccggagcggaatcagagctgcctcctctcccggggtgtttcccaccgccccgagctgaacccccgacccccgctaggtttccgctctgacaccacctccgctatggccgcatcccagctcttgaaacgggggctgcgggacctgccctgtagtagcgtacactaccttagataggataatcatctttgggtggagaccagagaacttgaaagccggtatttcataaatcctag

SEQ ID NO: 467834 - DNA, 128 bp, Homo sapiens
  chr9:78505461-78505589
  hyper
  lymphoid_neoplasm vs. liver_bileduct,upper_gi
cgtcagcgcctggctgcggccgctttcaagagggcggaggagggagaggaggagggcgatgtgggaaaggaggggtgttaaggggggcgggggaagtcatttatgcagagcaggagctgctgccattg

SEQ ID NO: 467835 - DNA, 718 bp, Homo sapiens
  chr9:78505622-78506340
  hyper
  lymphoid_neoplasm vs. liver_bileduct,upper_gi
gagggagcgctgggagcgagcaagcgagcgtttggagcccgggccagcagagggggcgcccggtcgctgcctgtaccgctcccgctggtcatctccgccgcgctcgggggccccgggaggagcgagaccgagtcggagagtccgggagccaagccgggcgaaacccaactgcggaggacgcccgccccactcagcctcctcctgcgtccgagccggggagcatcgccgagcgccccacgggccggagagctgggagcacaggtcccggcagccccagggatggtctaggagccggcgtaaggctcgctgctctgctccctgccggggctagccgcctcctgccgatcgcccggggctgcgagctgcggcggcccggggctgctcgccgggcggcgcaggccggagaagttagttgtgcgcgcccttagtgcgcggaaccagccagcgagcgagggagcagcgaggcgccgggaccatgggctgggggagccgctgctgctgcccgggacgtttggacctgctgtgcgtgctggcgctgctcgggggctgcctgctccccgtgtgtcggacgcgcgtctacaccaaccactgggcagtcaaaatcgccgggggcttcccggaggccaaccgtatcgccagcaagtacggattcatcaacataggacaggtaacgaactacaggctagcccagccctcggccctgaagccactgggggct

SEQ ID NO: 467836 - DNA, 20 bp, Homo sapiens
  chr9:78506416-78506436
  hyper
  lymphoid_neoplasm vs. liver_bileduct,upper_gi
atgctctgtctcctgcgcgc

SEQ ID NO: 467837 - DNA, 423 bp, Homo sapiens
  chr9:79520881-79521304
  hyper
  lymphoid_neoplasm vs. multiple_myeloma
cgtggctaggggtttggaacccgggtactcggaggggcgcagtggaaaatctcggcccaaggaagacgagcggggtcccgggaaagtggcccgccggggcgcagcgaccgactgctccctcctgccgctctgaggcggctgcggcggaggctgtgcttgcgccctcgaccgtctcgcccagggctccccgccccacccctcgcccggccgccggctctgggcacccgactctgccctaataaggaaagtgggtgtgccgcccaggagccccggggcgcgccgggcacgctctctggcacgcgcctcgggcgccgtggcgcgtgggcggaggtgcaggggtatggcgaggggctcctccgccaatcgcagggccgtgctgcggcctcctgacgtggcgcgccgaaagctgctgcaaccatggac

SEQ ID NO: 467838 - DNA, 210 bp, Homo sapiens; identical to SEQ ID NO: 372117
  chr9:79521333-79521543
  hyper
  lymphoid_neoplasm vs. multiple_myeloma

SEQ ID NO: 467839 - DNA, 292 bp, Homo sapiens
  chr9:79632921-79633213
  hyper
  lymphoid_neoplasm vs. multiple_myeloma
tgcctattctattaatttcttggttactgttcgtctcaccctctataccgcgatggtggagctcggatactgtctcctgtctccctgcacctggtgcctcacatgcagttggcgcgcaataaaactgagatgaatttggcatttggtgaaaacaccccatgctttcttccccatgagtttttccctccagccctctaatcatcggggtttcttgcagagaagaggccttgaggacacgatactctgaacttgacccagagtgtctagcccaggaaaaagggtttgtaaggag

SEQ ID NO: 467840 - DNA, 277 bp, Homo sapiens
  chr9:80263018-80263295
  hyper
  lymphoid_neoplasm vs. cervical
cgggaagatgcgcgcgccccttggcacaggagccggacagcagtcgggggcgcagacgagttggaacgtcggtgctcgggggagagtaggatctcctgggcctaggggtgtccccaggcgggaggtaggcgcggagtgggttggaggcaaaggacctggctggcctttgcctggaaagttctgaaaacctcagcagtgaccgcagactaagactgagtggaaaggttcccgctagcgtttgtggctctaagtggcaggaggaggcggagcatcttga

SEQ ID NO: 467841 - DNA, 211 bp, Homo sapiens; identical to SEQ ID NO: 372124
  chr9:80263517-80263728
  hyper
  lymphoid_neoplasm vs. cervical

SEQ ID NO: 467842 - DNA, 322 bp, Homo sapiens
  chr9:80645546-80645868
  hyper
  lymphoid_neoplasm vs. cervical,breast,myeloid_neoplasm, thyroid,renal,bladder_and_urothelial,prostate,lung,non_cancer, liver_bileduct,upper_gi,melanoma,ovary
aacgtgccccggctccgctcgccacccgctgggccacacacacggctccccacgccaccaccccatggggtgccgcggccacgacactggaagttcaacccctctgcccacctttccacccccgcgcctctggtcggagtgatctgccatttagcagatgcacagcagataaggtacagccctcagggacacgaaaaggaacaagccaaggcaccgggcagggcagccccgacccctgtgctgcgtgtgtgtgtcgctgtgtgtgtgtgtgtgtgtgtgtgtgtgtgtgtctgtgtgtaacgcgcccgcgcgcccgcgcggg

SEQ ID NO: 467843 - DNA, 419 bp, Homo sapiens; identical to SEQ ID NO: 347028
  chr9:80645902-80646321
  hyper
  lymphoid_neoplasm vs. cervical,breast,myeloid_neoplasm, thyroid,renal,bladder_and_urothelial,prostate,lung,non_cancer, liver_bileduct,upper_gi,melanoma,ovary

SEQ ID NO: 467844 - DNA, 22 bp, Homo sapiens
  chr9:80645846-80645868
  hyper
  lymphoid_neoplasm vs. liver_bileduct,lung,renal,cervical, head_and_neck,myeloid_neoplasm,melanoma
cgcgcccgcgcgcccgcgcggg

SEQ ID NO: 467845 - DNA, 422 bp, Homo sapiens
  chr9:80645902-80646324
  hyper
  lymphoid_neoplasm vs. liver_bileduct,lung,renal,cervical, head_and_neck,myeloid_neoplasm,melanoma
aggggcgaaccgcgggcgccggggggcgggggcgccgaaggcagctgccccgcagggccaaggatggtgggctgggggcgcagaggcccggcggggccccggacggtactcaccgagcagcagcagcttgagctcccggcgggcgtcccgcttgtccctgcggagctgccgctcgatctcgtcgttgatccgccgggcttccttggcctcctcgctcaggcagcacgccatgatggactccagagtcattcttccaaagtgcctccgctgcagccccgccggcaccccctgctcacagcgcgcacacacaccctcccgccctcgctcccccgaggcagcggtggccgccgagcccccgccgcccgggcgcgcgtccgggacgagctccgggaaccgccgcgggggcggcggccagggccggg

SEQ ID NO: 467846 - DNA, 309 bp, Homo sapiens
  chr9:80646509-80646818
  hyper
  lymphoid_neoplasm vs. liver_bileduct,lung,renal,cervical, head_and_neck,myeloid_neoplasm,melanoma
cgccgccgccgccgcctgcgaggctcccctacgccgtgcgcctggcggcgagagctcattcaccggggtgtccccgcagcgagcggccgccgacggctccccgcgcccggcgcgcccgctcctcgccgccgcctgacacggctcccgggcgccctcggccctgtccgcgcccaccgcccggctcgcgcgcagacccggttcccgtcccgcccggcaaccgcgcgctcctccgcctccgcctccgcccccgcccccgccagacgcccaccccctgccccgattgccaggcgcggagcggctgctcagtgc

SEQ ID NO: 467847 - DNA, 663 bp, Homo sapiens
  chr9:80646509-80647172
  hyper
  lymphoid_neoplasm vs. ovary,upper_gi,sarcoma,renal, myeloid_neoplasm,cervical,liver_bileduct,lung,anorectal,breast
cgccgccgccgccgcctgcgaggctcccctacgccgtgcgcctggcggcgagagctcattcaccggggtgtccccgcagcgagcggccgccgacggctccccgcgcccggcgcgcccgctcctcgccgccgcctgacacggctcccgggcgccctcggccctgtccgcgcccaccgcccggctcgcgcgcagacccggttcccgtcccgcccggcaaccgcgcgctcctccgcctccgcctccgcccccgcccccgccagacgcccaccccctgccccgattgccaggcgcggagcggctgctcagtgcgagccctccccctcgccacacacacacattttcttctttctctgaactggagcacagatccgggagggaggaggcggcggcgaaaggaggaggaggaagaggcggaggggatgggcgcgggaggagggagccgggaggcggtgccgcccggcccctcctggaaggctttcctgggctcgcggccgccgcggcgcgcctcccagtgcggctctcgcctcgcccgcgcggctcccgggctgggccggcccccgcgggctctgcggacgcctactgctcccgcaccctcggcagagtccgcgggcgcagcagtcacggccgcccccggccgaagtcggggccagacccggccgccga

SEQ ID NO: 467848 - DNA, 62 bp, Homo sapiens
  chr9:80647247-80647309
  hyper
  lymphoid_neoplasm vs. ovary,upper_gi,sarcoma,renal, myeloid_neoplasm,cervical,liver_bileduct,lung,anorectal,breast
ggtgagacaggaatatggcggcctctgcctgcctcagcccaccggcccgggagcgcggccgc

SEQ ID NO: 467849 - DNA, 341 bp, Homo sapiens
  chr9:80646831-80647172
  hyper
  lymphoid_neoplasm vs. liver_bileduct, bladder_and_urothelial,renal,upper_gi,colorectal,sarcoma,ovary, cervical,pancreas_gallbladder,lung,melanoma,prostate, head_and_neck,thyroid,breast,myeloid_neoplasm
cgccacacacacacattttcttctttctctgaactggagcacagatccgggagggaggaggcggcggcgaaaggaggaggaggaagaggcggaggggatgggcgcgggaggagggagccgggaggcggtgccgcccggcccctcctggaaggctttcctgggctcgcggccgccgcggcgcgcctcccagtgcggctctcgcctcgcccgcgcggctcccgggctgggccggcccccgcgggctctgcggacgcctactgctcccgcaccctcggcagagtccgcgggcgcagcagtcacggccgcccccggccgaagtcggggccagacccggccgccga

SEQ ID NO: 467850 - DNA, 382 bp, Homo sapiens; identical to SEQ ID NO: 347030
  chr9:80647247-80647629
  hyper
  lymphoid_neoplasm vs. liver_bileduct, bladder_and_urothelial,renal,upper_gi,colorectal,sarcoma,ovary, cervical,pancreas_gallbladder,lung,melanoma,prostate, head_and_neck,thyroid,breast,myeloid_neoplasm

SEQ ID NO: 467851 - DNA, 466 bp, Homo sapiens
  chr9:85677440-85677906
  hyper
  lymphoid_neoplasm vs. head_and_neck, bladder_and_urothelial
cgccgccgccgcgtcctcgtcgccttcgtcctcctcgctgtcgtgtgtctccggccccgcctcagacacggcgggcgcgggatccagaggaccccagtcccggcgccgccccccgcggagggacccgaggaagccacgcgcgaactcctggaaggtgatggcgccgtcacggtcggcgtccagccgctggaatactgcctcggcgtcggccggccgcacccgcagctccgtgcacagtgcccggaactcctcgcgctccaggcgccccgagcggttcgcgtcgcaggcggcgaagactgagcgcagccgggccagctcctctccgtccccatccgcctccatcccgcctggcgggggcggccgagagggctccggagcgccgcggggcgcagggccctccctggaaggacggggccacctgctgccgccgggaggcccggcgagtttggctcgtccggctggttcg

SEQ ID NO: 467852 - DNA, 259 bp, Homo sapiens; identical to SEQ ID NO: 372136
  chr9:85677992-85678251
  hyper
  lymphoid_neoplasm vs. head_and_neck, bladder_and_urothelial

SEQ ID NO: 467853 - DNA, 432 bp, Homo sapiens; identical to SEQ ID NO: 459896
  chr9:89561318-89561750
  hyper
  lymphoid_neoplasm vs. ovary,prostate,non_cancer,cervical, sarcoma,myeloid_neoplasm

SEQ ID NO: 467854 - DNA, 432 bp, Homo sapiens; identical to SEQ ID NO: 459896
  chr9:89561318-89561750
  hyper
  lymphoid_neoplasm vs. cervical,sarcoma,anorectal, head_and_neck

SEQ ID NO: 467855 - DNA, 494 bp, Homo sapiens; identical to SEQ ID NO: 350894
  chr9:89561779-89562273
  hyper
  lymphoid_neoplasm vs. cervical,sarcoma,anorectal, head_and_neck

SEQ ID NO: 467856 - DNA, 277 bp, Homo sapiens
  chr9:90112514-90112791
  hyper
  lymphoid_neoplasm vs. pancreas_gallbladder,renal, liver_bileduct,upper_gi,bladder_and_urothelial,sarcoma, anorectal,non_cancer
cgcccgcgttccgggcggacgcactggctccccggccggcgtgggtgtggggcgagtgggtgtgtgcggggtgtgcgcggtagagcgcgccagcgagcccggagcgcggagctgggaggagcagcgagcgccgcgcagaacccgcagcgccggcctggcagggcagctcggaggtgggtgggccgcgccgccagcccgcttgcagggtccccattggccgcctgccggccgccctccgcccaaaaggcggcaaggagccgagaggctgcttcggagt

SEQ ID NO: 467857 - DNA, 271 bp, Homo sapiens
  chr9:90112856-90113127
  hyper
  lymphoid_neoplasm vs. pancreas_gallbladder,renal, liver_bileduct,upper_gi,bladder_and_urothelial,sarcoma, anorectal,non_cancer
aactcgcagcggcagggtctggggccggcgcctgggagggatctgcgccccccactcactccctagctgtgttcccgccgccgccccggctagtctccggcgctggcgcctatggtcggcctccgacagcgctccggagggaccgggggagctcccaggcgcccgggtgagtagccaggcgcggctccccggtccccccgacccccggcgccagcttttgctttcccagccagggcgcggtggggtttgtccgggcagtgcctcgagcaac

SEQ ID NO: 467858 - DNA, 115 bp, Homo sapiens; identical to SEQ ID NO: 350897
  chr9:90113156-90113271
  hyper
  lymphoid_neoplasm vs. pancreas_gallbladder,renal, liver_bileduct,upper_gi,bladder_and_urothelial,sarcoma, anorectal,non_cancer

SEQ ID NO: 467859 - DNA, 203 bp, Homo sapiens
  chr9:90340643-90340846
  hyper
  lymphoid_neoplasm vs. prostate,breast
cggctctgcggaccaaaaattccaggactaaggaatagcaaggttaggctgaaacagtccacacagggcttgcggtaaacgtcttttcaggagccactcgcccagtgcagtaagtcgtgtacttagttgactcgagcgctccagggagacgcccgaccctactctgcgccgccccggggcaccagctctgcttcctccaggtc

SEQ ID NO: 467860 - DNA, 322 bp, Homo sapiens
  chr9:90340943-90341265
  hyper
  lymphoid_neoplasm vs. prostate,breast
acagccaatcgcagcgcagccaggcggcggggcggtgccggccgaacccagacccgaggttttagaagcagagtcaggcgaagctgggccagaaccgcgacctccgcaaccttgagcggcatccgtggagtgcgcctgcgcagctacgaccgcagcaggaaagcgccgccggccaggcccagctgtggccggacagggactggaagagaggacgcggtcgagtaggtgtgcaccagccctggcaacgagagcgtctaccccgaactctgctggccttgaggtggggaagccggggagggcagttgaggaccccgcggaggcg

SEQ ID NO: 467861 - DNA, 198 bp, Homo sapiens; identical to SEQ ID NO: 350900
  chr9:90341343-90341541
  hyper
  lymphoid_neoplasm vs. prostate,breast

SEQ ID NO: 467862 - DNA, 106 bp, Homo sapiens
  chr9:91149028-91149134
  hyper
  lymphoid_neoplasm vs. anorectal
cggctgcgggacacctgcggcggggcccggcagggagcgcgagactggaagagaggccaggagggaaggagagcgacgcggggttttgggggaggggctgcgtggg

SEQ ID NO: 467863 - DNA, 80 bp, Homo sapiens; identical to SEQ ID NO: 372152
  chr9:91149326-91149406
  hyper
  lymphoid_neoplasm vs. anorectal

SEQ ID NO: 467864 - DNA, 78 bp, Homo sapiens
  chr9:91149647-91149725
  hyper
  lymphoid_neoplasm vs. bladder_and_urothelial,cervical, renal,lung,anorectal,myeloid_neoplasm,breast,ovary,prostate, thyroid,uterine,non_cancer
cgaggcgcagttggagaagagtgcggggatgtgggcggggcgcagtgaggggaaactgtggaatgtgggcgaggcgca

SEQ ID NO: 467865 - DNA, 223 bp, Homo sapiens
  chr9:91149754-91149977
  hyper
  lymphoid_neoplasm vs. bladder_and_urothelial,cervical, renal,lung,anorectal,myeloid_neoplasm,breast,ovary,prostate, thyroid,uterine,non_cancer
ggtgcggtgggggagggtgcggagatgtgggcggggcgcagtgggtggagagtgtagggatgtgggcccagcgcagtgggggacagtgtggggatgcgggcgaggcgcagtgggggcgggggcggggatgtgggcggggcgcagtgggtggagagtgcgggatgtgggcggggcgcagtgggtggagagtgcggaatgtgggcggggcgcagttggggagctt

SEQ ID NO: 467866 - DNA, 237 bp, Homo sapiens
  chr9:91150385-91150622
  hyper
  lymphoid_neoplasm vs. bladder_and_urothelial,cervical, renal,lung,anorectal,myeloid_neoplasm,breast,ovary,prostate, thyroid,uterine,non_cancer
tgtaagggcgcgacggtggaggccgaggcggcgctgcagaacaaggtggtggcactgtacttcgcggcggcccggtgcgcgccgagccgcgacttcacgccgctgctctgcgacttctatacggcgctggtggccgaggcgcggcggcccgcgcccttcgaagtggtcttcgtgtcagccgacggcagctcccaggagatgctggacttcatgcgcgagctgcatggcgcctggctg

SEQ ID NO: 467867 - DNA, 99 bp, Homo sapiens
  chr9:95946034-95946133
  hyper
  lymphoid_neoplasm vs. head_and_neck
cgctgagccccaccaggcttagccccaggctgggctcccgagggcggcggtacccctggtccttttcttcctagcctgcccattctgtcctggcacagg

SEQ ID NO: 467868 - DNA, 227 bp, Homo sapiens; identical to SEQ ID NO: 372162
  chr9:95946562-95946789
  hyper
  lymphoid_neoplasm vs. head_and_neck

SEQ ID NO: 467869 - DNA, 4 bp, Homo sapiens
  chr9:96716664-96716668
  hyper
  lymphoid_neoplasm vs. non_cancer,myeloid_neoplasm
cgaa

SEQ ID NO: 467870 - DNA, 175 bp, Homo sapiens; identical to SEQ ID NO: 458347
  chr9:96717633-96717808
  hyper
  lymphoid_neoplasm vs. myeloid_neoplasm,non_cancer, melanoma,sarcoma

SEQ ID NO: 467871 - DNA, 9 bp, Homo sapiens
  chr9:96717840-96717849
  hyper
  lymphoid_neoplasm vs. myeloid_neoplasm,non_cancer, melanoma,sarcoma
cgcacgccc

SEQ ID NO: 467872 - DNA, 175 bp, Homo sapiens; identical to SEQ ID NO: 458347
  chr9:96717633-96717808
  hyper
  lymphoid_neoplasm vs. anorectal

SEQ ID NO: 467873 - DNA, 9 bp, Homo sapiens
  chr9:96717840-96717849
  hyper
  lymphoid_neoplasm vs. anorectal
cgcacgccc

SEQ ID NO: 467874 - DNA, 11 bp, Homo sapiens
  chr9:96718256-96718267
  hyper
  lymphoid_neoplasm vs. anorectal
ggtgaggcagc

SEQ ID NO: 467875 - DNA, 28 bp, Homo sapiens
  chr9:104248623-104248651
  hyper
  lymphoid_neoplasm vs. upper_gi
gctggtttttcctggtcctgggagggac

SEQ ID NO: 467876 - DNA, 149 bp, Homo sapiens; identical to SEQ ID NO: 456192
  chr9:104248697-104248846
  hyper
  lymphoid_neoplasm vs. upper_gi

SEQ ID NO: 467877 - DNA, 186 bp, Homo sapiens; identical to SEQ ID NO: 347048
  chr9:104248975-104249161
  hyper
  lymphoid_neoplasm vs. upper_gi

SEQ ID NO: 467878 - DNA, 283 bp, Homo sapiens
  chr9:109622327-109622610
  hyper
  lymphoid_neoplasm vs. colorectal
cgtggaggcttggagaggaggtttggtttccaaggattggagcgctgtgaagggcggggccattccaagtccatctcccctttttgtcctcttctcccgggacgggagggtggagccaagtccccccgcggccggttcgggagctttctctatctcggtcgctcgaggtgagtgtgaaagggcggcagcccgtttaattgcagcgcaggttaatttcttgagttcaccgcagtcggtccgccagccgcttccccggtctttgccaagtgggtttacgaggtct

SEQ ID NO: 467879 - DNA, 58 bp, Homo sapiens
  chr9:110249882-110249940
  hyper
  lymphoid_neoplasm vs. cervical
cgccaccaccaccgggtggctgccgtcagggctgcctttgctgacgctgatgaccgac

SEQ ID NO: 467880 - DNA, 123 bp, Homo sapiens
  chr9:110250497-110250620
  hyper
  lymphoid_neoplasm vs. cervical
gggaagcactgggggaagtcgcttcatgtgggagagctcctcccgccagcgctgcggggacagggcgggagagacctgtcagtggtggtcccctgttgccacccgacatactgacgtgctggc

SEQ ID NO: 467881 - DNA, 202 bp, Homo sapiens; identical to SEQ ID NO: 359384
  chr9:110250630-110250832
  hyper
  lymphoid_neoplasm vs. cervical

SEQ ID NO: 467882 - DNA, 221 bp, Homo sapiens
  chr9:110252078-110252299
  hyper
  lymphoid_neoplasm vs. ovary,renal,pancreas_gallbladder, colorectal,upper_gi,anorectal
acttccttcgctacagccttttcctccgccttctcccatgccccgcccctccctttcttctctccgccccccccgaggctcccttccatcgttgctatggcagctaaatcaacaaactcggcgcacgtgggggcgggggaggggaaggaggggcgcgggcggggctgggccgggccgtgacgccagccaggcagctggcgggctggagccgagctgacgcc

SEQ ID NO: 467883 - DNA, 119 bp, Homo sapiens
  chr9:110252515-110252634
  hyper
  lymphoid_neoplasm vs. ovary,renal,pancreas_gallbladder, colorectal,upper_gi,anorectal
ggagaagagcgcgattatccgcgtgactcatccagccctccatctccccctccctctctgcgctcgcaggagtccgctctcgtcgctcagcgccagtgccggtggcggtgccggcgctc

SEQ ID NO: 467884 - DNA, 81 bp, Homo sapiens; identical to SEQ ID NO: 350923
  chr9:110252700-110252781
  hyper
  lymphoid_neoplasm vs. ovary,renal,pancreas_gallbladder, colorectal,upper_gi,anorectal

SEQ ID NO: 467885 - DNA, 217 bp, Homo sapiens
  chr9:112260252-112260469
  hyper
  lymphoid_neoplasm vs. liver_bileduct,melanoma,upper_gi, breast,colorectal,pancreas_gallbladder,ovary
gccgagccccacccggcgccccgcccgcgccctcccgccccggccccgccaggtgagcgcagcggggcgccccctccccgccccgacgtggtgcggggatcccggtgcagccgcacccgccagcccgcccgcgcgtccgccgcgcgccccagggacgggtgggggcggggtggcgccgagcgcgaccccggcccccggcagccccgcaccctgcccc

SEQ ID NO: 467886 - DNA, 162 bp, Homo sapiens; identical to SEQ ID NO: 347050
  chr9:112260523-112260685
  hyper
  lymphoid_neoplasm vs. liver_bileduct,melanoma,upper_gi, breast,colorectal,pancreas_gallbladder,ovary

SEQ ID NO: 467887 - DNA, 288 bp, Homo sapiens
  chr9:113800481-113800769
  hyper
  lymphoid_neoplasm vs. ovary
gcccccgggctggcttcaggccgcgcgcccagtcccggcggcccccgccccaccgccagccgagcccggccctccgcccgcccctcggcagtcgcccagagcggggccgccccctgcgcccaccccgccggggtcccgtgctcggccgggcggcggggagggctccgcggctccgggccctggccgccccagatccggcccgcgctccgcagcggggctggagacggagtcgccactcagggagcgtcagccgccagtcggcccctactgcccggctttggcgcgctg

SEQ ID NO: 467888 - DNA, 283 bp, Homo sapiens; identical to SEQ ID NO: 456195
  chr9:113800798-113801081
  hyper
  lymphoid_neoplasm vs. ovary

SEQ ID NO: 467889 - DNA, 66 bp, Homo sapiens
  chr9:120176629-120176695
  hyper
  lymphoid_neoplasm vs. multiple_myeloma
cgacctctgggcccctcctctaccctctgccaaccccactcggggcagccccgggcagggatcccc

SEQ ID NO: 467890 - DNA, 66 bp, Homo sapiens
  chr9:129375660-129375726
  hyper
  lymphoid_neoplasm vs. cervical,melanoma
cgcggaccaagcggccccgagcaggcgccgccgcccgggggactccgactcagcccccgcgaccta

SEQ ID NO: 467891 - DNA, 133 bp, Homo sapiens
  chr9:129387302-129387435
  hyper
  lymphoid_neoplasm vs. cervical
cgtttaatcagaggctgtgccgctcaaaccgcggggccctttgtcccacggagtgaacgacggaaacttgccatcctaatccccttattcatgtcaagcacagaaaagaagccgagcaccttacaaccgtgtc

SEQ ID NO: 467892 - DNA, 52 bp, Homo sapiens
  chr9:129387464-129387516
  hyper
  lymphoid_neoplasm vs. cervical
gagggggctccggccctgtagccccctgacgcttttcgtttccgagcgcgct

SEQ ID NO: 467893 - DNA, 259 bp, Homo sapiens
  chr9:132020659-132020918
  hyper
  lymphoid_neoplasm vs. ovary,myeloid_neoplasm,prostate, head_and_neck,bladder_and_urothelial,thyroid,renal,colorectal, breast,cervical,pancreas_gallbladder,uterine,non_cancer, anorectal
cgcggtaagacgtcagcccggtgagcatcctccgcactgcggaccgcccggggtcggggtcacccgggccccgccccgagcttgctgtcgtatcggccccgccccacccacgccctcccggcccctcctgctccgggcgcgctcggctccgcccccacgggcaacacggcctcccattggccgcggtttccatggttacgcgggccggcggagctgcgggctcccagacacgtgtccccgggagccgcccagaatttga

SEQ ID NO: 467894 - DNA, 73 bp, Homo sapiens; identical to SEQ ID NO: 350951
  chr9:132021110-132021183
  hyper
  lymphoid_neoplasm vs. ovary,myeloid_neoplasm,prostate, head_and_neck,bladder_and_urothelial,thyroid,renal,colorectal, breast,cervical,pancreas_gallbladder,uterine,non_cancer, anorectal

SEQ ID NO: 467895 - DNA, 188 bp, Homo sapiens
  chr9:132244512-132244700
  hyper
  lymphoid_neoplasm vs. upper_gi
cgcgctcctcccggaccccaccccgaggcagctttctcacaacgggatcctccccgggcggcgtggggacgcctcccgaccccgaggcccggcaggagagccgccaccgcggccgggtggtctccgcgtcgcatggcccctgccggcccccccgcccatggcagctacataattaattcgcccataaa

SEQ ID NO: 467896 - DNA, 543 bp, Homo sapiens; identical to SEQ ID NO: 350955
  chr9:132244741-132245284
  hyper
  lymphoid_neoplasm vs. upper_gi

SEQ ID NO: 467897 - DNA, 690 bp, Homo sapiens; identical to SEQ ID NO: 333804
  chr9:132258226-132258916
  hyper
  lymphoid_neoplasm vs. liver_bileduct,head_and_neck, cervical

SEQ ID NO: 467898 - DNA, 202 bp, Homo sapiens
  chr9:132312367-132312569
  hyper
  lymphoid_neoplasm vs. pancreas_gallbladder,uterine, prostate
cgacccccaagagagccccggccgggacgcgcggaccccagaagctcgggcgggggcgcccctcggaggaatgtttccggggcccggaccgcgccgccgccgcagcctttcctccctctccccgcccggctcgccggccgccctcgcgccccctccagggccccctatcttcccccacccgaaccccacatcactgccctcc

SEQ ID NO: 467899 - DNA, 164 bp, Homo sapiens; identical to SEQ ID NO: 372257
  chr9:132312620-132312784
  hyper
  lymphoid_neoplasm vs. pancreas_gallbladder,uterine, prostate

SEQ ID NO: 467900 - DNA, 11 bp, Homo sapiens
  chr9:136474214-136474225
  hyper
  lymphoid_neoplasm vs. melanoma,multiple_myeloma
cgcgctgcccc

SEQ ID NO: 467901 - DNA, 3 bp, Homo sapiens
  chr9:136474782-136474785
  hyper
  lymphoid_neoplasm vs. melanoma,multiple_myeloma
tcc

SEQ ID NO: 467902 - DNA, 357 bp, Homo sapiens
  chr9:137533140-137533497
  hyper
  lymphoid_neoplasm vs. head_and_neck, bladder_and_urothelial,cervical
cgccctgatctggctggatgggaagtttagtctccacccagaagaggagctctgaactcctccacgttaaagaaaaagttaggcggggtaaactgcaactttctttttaacccgaagtgatcaaacctcggggcccctctgcactggttcttggagcatggccaggtgcgggcacctggggtgggaacagtggggggaccagggtgggcccctgggctccgaggccgccccaggcccgcccgcctaccggctctcagagaaagaacagggggccgcgcccgccccacgtccgctccgccccgggccagccccttcctcgctgcgactcgcccgctgtccccaccccctcgcccgcgg

SEQ ID NO: 467903 - DNA, 150 bp, Homo sapiens; identical to SEQ ID NO: 333832
  chr9:137979104-137979254
  hyper
  lymphoid_neoplasm vs. renal

SEQ ID NO: 467904 - DNA, 100 bp, Homo sapiens
  chr9:138986173-138986273
  hyper
  lymphoid_neoplasm vs. liver_bileduct
cggctccacgacgagagtccaagaccaaacttcccccagagcctggcagaggggctgggaggtgacctctgacctccgaccccacacgatcccagcaaga

SEQ ID NO: 467905 - DNA, 619 bp, Homo sapiens
  chr9:138986333-138986952
  hyper
  lymphoid_neoplasm vs. liver_bileduct
gccccgggctccgctgagtttcttagagaaggagctggggccccccgacctcagctccgcagaggcacagaagctggcaagaggcagagccccctccccctgcggccggaccccagtttctccccaggctggggcccgagtgggggaggcgcgggaggcggtgacgacccacgaacgggcccacctggaccgggagggcgaggcgcgggcccggctgggccaggcagctgcgcagatgcgccgggaggggtgggtacctccgccctggccccgggccagtcctgccccggcttccccacccggagggctggatcggccagtcgggtccctggggaggccgcgcgggtccccagaaatccagggaaacccagcaggcggcggggagcgccccgggacgcccggagccggggtctccccgaacgcgcggcgcggcgtcccggcccggggtcgcgggcgcctccgccgggaccccccggccccgcccggcccccctccgcgggctcccgaggccggttcccgcgcgcacgcccgggccggcgcggaactcggccgcacccgccccgcgcggccggcactgcggcagggggctcgcgccaagttgggcggccgcggagtttgc

SEQ ID NO: 467906 - DNA, 689 bp, Homo sapiens
  chr9:138986469-138987158
  hyper
  lymphoid_neoplasm vs. pancreas_gallbladder
cgagtgggggaggcgcgggaggcggtgacgacccacgaacgggcccacctggaccgggagggcgaggcgcgggcccggctgggccaggcagctgcgcagatgcgccgggaggggtgggtacctccgccctggccccgggccagtcctgccccggcttccccacccggagggctggatcggccagtcgggtccctggggaggccgcgcgggtccccagaaatccagggaaacccagcaggcggcggggagcgccccgggacgcccggagccggggtctccccgaacgcgcggcgcggcgtcccggcccggggtcgcgggcgcctccgccgggaccccccggccccgcccggcccccctccgcgggctcccgaggccggttcccgcgcgcacgcccgggccggcgcggaactcggccgcacccgccccgcgcggccggcactgcggcagggggctcgcgccaagttgggcggccgcggagtttgcgggaagtgcgggcccggcccgtgggacgaccccgcccggcggcgtaacccgggggcggccgcgcgcgccaagttggcggtacctgcgggcgcccggcccggtccggcctgggcagctgcggcgcgccgcccgcggcaggaagtgcttggcgtcccggcgctccggctcccatggactttctccgacctcgcccagcaccggcggcc

SEQ ID NO: 467907 - DNA, 284 bp, Homo sapiens
  chr9:138987167-138987451
  hyper
  lymphoid_neoplasm vs. pancreas_gallbladder
cgggggcggggcggcggcgggggaggtgcccgcgggccgttaaagggacagcgcgccggccgcgcgcgcgcgcgcactggcagccaggtgggctcccggggtcggggctggggtccgggggccgggagggtccccagtgggggccggcggggcgtggggaaccccgagcgctggggaggggaggcggcagctcctcgcccctcgcgcgtcctccttccggagctgccggcggtcgaccctgcgcgggacacccggcgggagccggacgccgcggcgcagaggac

SEQ ID NO: 467908 - DNA, 198 bp, Homo sapiens
  chr9:138986960-138987158
  hyper
  lymphoid_neoplasm vs. pancreas_gallbladder
cgggcccggcccgtgggacgaccccgcccggcggcgtaacccgggggcggccgcgcgcgccaagttggcggtacctgcgggcgcccggcccggtccggcctgggcagctgcggcgcgccgcccgcggcaggaagtgcttggcgtcccggcgctccggctcccatggactttctccgacctcgcccagcaccggcggcc

SEQ ID NO: 467909 - DNA, 563 bp, Homo sapiens; identical to SEQ ID NO: 359462
  chr9:138987167-138987730
  hyper
  lymphoid_neoplasm vs. pancreas_gallbladder

SEQ ID NO: 467910 - DNA, 4 bp, Homo sapiens
  chr9:139739050-139739054
  hyper
  lymphoid_neoplasm vs. cervical
cggc

SEQ ID NO: 467911 - DNA, 29 bp, Homo sapiens
  chr9:139872820-139872849
  hyper
  lymphoid_neoplasm vs. ovary
gactgtcctcgggaggggcgtggccagac

SEQ ID NO: 467912 - DNA, 129 bp, Homo sapiens
  chrX:2846679-2846808
  hyper
  lymphoid_neoplasm vs. multiple_myeloma,upper_gi, liver_bileduct
cggggaacacggccgtgctggaaggcatcgagctggggggttgggggcgggacggggtgcctcttaggaagtggggcgggcaaggctacgcttcgggggatggagccttggggcgggacggggcgcgtc

SEQ ID NO: 467913 - DNA, 220 bp, Homo sapiens
  chrX:2846856-2847076
  hyper
  lymphoid_neoplasm vs. multiple_myeloma,upper_gi, liver_bileduct
ctttgaaggccgaatccgggcagcggtgtagctgggcgtggaaggcggaggacccagcagggcgtgaccggcccagtttccgctccctccgggtcccggccagccttcctccgccctcccttcccttcctcctttgttctctttccctgcccttccgccttcccttcagttcggtctcctccacccgcccttcgtcccctcagtcgccccccatccctgg

SEQ ID NO: 467914 - DNA, 314 bp, Homo sapiens; identical to SEQ ID NO: 362110
  chrX:2847196-2847510
  hyper
  lymphoid_neoplasm vs. multiple_myeloma,upper_gi, liver_bileduct

SEQ ID NO: 467915 - DNA, 10 bp, Homo sapiens
  chrX:8698495-8698505
  hyper
  lymphoid_neoplasm vs. multiple_myeloma
cgcgaacgcg

SEQ ID NO: 467916 - DNA, 84 bp, Homo sapiens; identical to SEQ ID NO: 458361
  chrX:8699223-8699307
  hyper
  lymphoid_neoplasm vs. multiple_myeloma

SEQ ID NO: 467917 - DNA, 214 bp, Homo sapiens; identical to SEQ ID NO: 458362
  chrX:8699223-8699437
  hyper
  lymphoid_neoplasm vs. multiple_myeloma

SEQ ID NO: 467918 - DNA, 13 bp, Homo sapiens
  chrX:8699750-8699763
  hyper
  lymphoid_neoplasm vs. multiple_myeloma
aggatcagccggc

SEQ ID NO: 467919 - DNA, 378 bp, Homo sapiens; identical to SEQ ID NO: 465876
  chr1:8085715-8086093
  hypo
  lymphoid_neoplasm vs. liver_bileduct

SEQ ID NO: 467920 - DNA, 164 bp, Homo sapiens; identical to SEQ ID NO: 465878
  chr1:8085929-8086093
  hypo
  lymphoid_neoplasm vs. liver_bileduct, pancreas_gallbladder,ovary,renal,colorectal,lung,prostate, cervical,upper_gi,uterine,non_cancer

SEQ ID NO: 467921 - DNA, 639 bp, Homo sapiens; identical to SEQ ID NO: 465904
  chr1:33896186-33896825
  hypo
  lymphoid_neoplasm vs. head_and_neck,breast

SEQ ID NO: 467922 - DNA, 225 bp, Homo sapiens; identical to SEQ ID NO: 457259
  chr1:34629913-34630138
  hypo
  lymphoid_neoplasm vs. sarcoma

SEQ ID NO: 467923 - DNA, 677 bp, Homo sapiens; identical to SEQ ID NO: 356759
  chr1:48462497-48463174
  hypo
  lymphoid_neoplasm vs. renal

SEQ ID NO: 467924 - DNA, 38 bp, Homo sapiens; identical to SEQ ID NO: 330814
  chr1:48463421-48463459
  hypo
  lymphoid_neoplasm vs. liver_bileduct

SEQ ID NO: 467925 - DNA, 121 bp, Homo sapiens; identical to SEQ ID NO: 465917
  chr1:57110528-57110649
  hypo

SEQ ID NO: 467926 - DNA, 169 bp, Homo sapiens; identical to SEQ ID NO: 465918
  chr1:57110714-57110883
  hypo

SEQ ID NO: 467927 - DNA, 206 bp, Homo sapiens; identical to SEQ ID NO: 465920
  chr1:62784150-62784356
  hypo
  lymphoid_neoplasm vs. multiple_myeloma,anorectal

SEQ ID NO: 467928 - DNA, 502 bp, Homo sapiens; identical to SEQ ID NO: 465934
  chr1:94702434-94702936
  hypo
  lymphoid_neoplasm vs. anorectal,breast, pancreas_gallbladder,uterine,upper_gi,melanoma,ovary,colorectal, liver_bileduct,sarcoma,renal

SEQ ID NO: 467929 - DNA, 89 bp, Homo sapiens; identical to SEQ ID NO: 465935
  chr1:94702990-94703079
  hypo
  lymphoid_neoplasm vs. anorectal,breast, pancreas_gallbladder,uterine,upper_gi,melanoma,ovary,colorectal, liver_bileduct,sarcoma,renal

SEQ ID NO: 467930 - DNA, 95 bp, Homo sapiens; identical to SEQ ID NO: 346356
  chr1:94703103-94703198
  hypo
  lymphoid_neoplasm vs. anorectal,breast, pancreas_gallbladder,uterine,upper_gi,melanoma,ovary,colorectal, liver_bileduct,sarcoma,renal

SEQ ID NO: 467931 - DNA, 199 bp, Homo sapiens; identical to SEQ ID NO: 465937
  chr1:94702737-94702936
  hypo
  lymphoid_neoplasm vs. pancreas_gallbladder,ovary, cervical,liver_bileduct,anorectal,upper_gi,uterine,breast

SEQ ID NO: 467932 - DNA, 89 bp, Homo sapiens; identical to SEQ ID NO: 465935
  chr1:94702990-94703079
  hypo
  lymphoid_neoplasm vs. pancreas_gallbladder,ovary, cervical,liver_bileduct,anorectal,upper_gi,uterine,breast

SEQ ID NO: 467933 - DNA, 222 bp, Homo sapiens; identical to SEQ ID NO: 465939
  chr1:94703103-94703325
  hypo
  lymphoid_neoplasm vs. pancreas_gallbladder,ovary, cervical,liver_bileduct,anorectal,upper_gi,uterine,breast

SEQ ID NO: 467934 - DNA, 157 bp, Homo sapiens; identical to SEQ ID NO: 356839
  chr1:94703357-94703514
  hypo
  lymphoid_neoplasm vs. pancreas_gallbladder,ovary, cervical,liver_bileduct,anorectal,upper_gi,uterine,breast

SEQ ID NO: 467935 - DNA, 760 bp, Homo sapiens; identical to SEQ ID NO: 465943
  chr1:99126872-99127632
  hypo
  lymphoid_neoplasm vs. renal,liver_bileduct,sarcoma, upper_gi,anorectal,thyroid,non_cancer,lung,colorectal,ovary, breast,head_and_neck,prostate

SEQ ID NO: 467936 - DNA, 5 bp, Homo sapiens
  chr1:99127671-99127676
  hypo
  lymphoid_neoplasm vs. renal,liver_bileduct,sarcoma, upper_gi,anorectal,thyroid,non_cancer,lung,colorectal,ovary, breast,head_and_neck,prostate
cagcc

SEQ ID NO: 467937 - DNA, 443 bp, Homo sapiens; identical to SEQ ID NO: 465945
  chr1:99127189-99127632
  hypo
  lymphoid_neoplasm vs. upper_gi,renal,sarcoma, liver_bileduct,lung,non_cancer,anorectal,prostate,ovary, colorectal,breast,thyroid,uterine,bladder_and_urothelial

SEQ ID NO: 467938 - DNA, 325 bp, Homo sapiens; identical to SEQ ID NO: 344965
  chr1:99127671-99127996
  hypo
  lymphoid_neoplasm vs. upper_gi,renal,sarcoma, liver_bileduct,lung,non_cancer,anorectal,prostate,ovary, colorectal,breast,thyroid,uterine,bladder_and_urothelial

SEQ ID NO: 467939 - DNA, 700 bp, Homo sapiens; identical to SEQ ID NO: 465950
  chr1:113932580-113933280
  hypo
  lymphoid_neoplasm vs. upper_gi,liver_bileduct,lung,ovary, cervical,breast,head_and_neck

SEQ ID NO: 467940 - DNA, 264 bp, Homo sapiens; identical to SEQ ID NO: 349309
  chr1:113933305-113933569
  hypo
  lymphoid_neoplasm vs. upper_gi,liver_bileduct,lung,ovary, cervical,breast,head_and_neck

SEQ ID NO: 467941 - DNA, 203 bp, Homo sapiens; identical to SEQ ID NO: 465952
  chr1:113933077-113933280
  hypo
  lymphoid_neoplasm vs. liver_bileduct

SEQ ID NO: 467942 - DNA, 764 bp, Homo sapiens; identical to SEQ ID NO: 369243
  chr1:113933305-113934069
  hypo
  lymphoid_neoplasm vs. liver_bileduct

SEQ ID NO: 467943 - DNA, 795 bp, Homo sapiens; identical to SEQ ID NO: 346366
  chr1:116184428-116185223
  hypo
  lymphoid_neoplasm vs. upper_gi,cervical, pancreas_gallbladder,melanoma,lung,colorectal,breast,sarcoma, ovary,bladder_and_urothelial

SEQ ID NO: 467944 - DNA, 811 bp, Homo sapiens; identical to SEQ ID NO: 465955
  chr1:116184749-116185560
  hypo
  lymphoid_neoplasm vs. lung,cervical,colorectal,sarcoma, upper_gi,melanoma,bladder_and_urothelial,pancreas_gallbladder

SEQ ID NO: 467945 - DNA, 903 bp, Homo sapiens; identical to SEQ ID NO: 331011
  chr1:162039148-162040051
  hypo
  lymphoid_neoplasm vs. upper_gi

SEQ ID NO: 467946 - DNA, 104 bp, Homo sapiens; identical to SEQ ID NO: 465963
  chr1:165204594-165204698
  hypo
  lymphoid_neoplasm vs. prostate,myeloid_neoplasm, non_cancer

SEQ ID NO: 467947 - DNA, 94 bp, Homo sapiens; identical to SEQ ID NO: 465964
  chr1:165204732-165204826
  hypo
  lymphoid_neoplasm vs. prostate,myeloid_neoplasm, non_cancer

SEQ ID NO: 467948 - DNA, 1 bp, Homo sapiens
  chr1:165204697-165204698
  hypo
  lymphoid_neoplasm vs. melanoma,prostate,sarcoma,uterine, ovary,myeloid_neoplasm,thyroid,non_cancer
c

SEQ ID NO: 467949 - DNA, 94 bp, Homo sapiens; identical to SEQ ID NO: 465964
  chr1:165204732-165204826
  hypo
  lymphoid_neoplasm vs. melanoma,prostate,sarcoma,uterine, ovary,myeloid_neoplasm,thyroid,non_cancer

SEQ ID NO: 467950 - DNA, 694 bp, Homo sapiens; identical to SEQ ID NO: 465970
  chr1:178062419-178063113
  hypo
  lymphoid_neoplasm vs. head_and_neck,liver_bileduct

SEQ ID NO: 467951 - DNA, 219 bp, Homo sapiens; identical to SEQ ID NO: 465971
  chr1:178063150-178063369
  hypo
  lymphoid_neoplasm vs. head_and_neck,liver_bileduct

SEQ ID NO: 467952 - DNA, 216 bp, Homo sapiens; identical to SEQ ID NO: 465972
  chr1:178062897-178063113
  hypo
  lymphoid_neoplasm vs. pancreas_gallbladder,head_and_neck, liver_bileduct,colorectal,bladder_and_urothelial

SEQ ID NO: 467953 - DNA, 476 bp, Homo sapiens; identical to SEQ ID NO: 465973
  chr1:178063150-178063626
  hypo
  lymphoid_neoplasm vs. pancreas_gallbladder,head_and_neck, liver_bileduct,colorectal,bladder_and_urothelial

SEQ ID NO: 467954 - DNA, 112 bp, Homo sapiens; identical to SEQ ID NO: 356942
  chr1:178063733-178063845
  hypo
  lymphoid_neoplasm vs. pancreas_gallbladder,head_and_neck, liver_bileduct,colorectal,bladder_and_urothelial

SEQ ID NO: 467955 - DNA, 592 bp, Homo sapiens; identical to SEQ ID NO: 331107
  chr1:216774207-216774799
  hypo
  lymphoid_neoplasm vs. liver_bileduct

SEQ ID NO: 467956 - DNA, 199 bp, Homo sapiens; identical to SEQ ID NO: 465997
  chr1:220921368-220921567
  hypo
  lymphoid_neoplasm vs. liver_bileduct,renal

SEQ ID NO: 467957 - DNA, 99 bp, Homo sapiens; identical to SEQ ID NO: 197977
  chr1:225117651-225117750
  hypo
  lymphoid_neoplasm vs. liver_bileduct,uterine,prostate, ovary,breast,renal

SEQ ID NO: 467958 - DNA, 65 bp, Homo sapiens; identical to SEQ ID NO: 466001
  chr1:225117752-225117817
  hypo
  lymphoid_neoplasm vs. liver_bileduct,uterine,prostate, ovary,breast,renal

SEQ ID NO: 467959 - DNA, 17 bp, Homo sapiens
  chr1:228645891-228645908
  hypo
  lymphoid_neoplasm vs. melanoma
aggcacagaagaaggac

SEQ ID NO: 467960 - DNA, 254 bp, Homo sapiens; identical to SEQ ID NO: 466007
  chr1:228646941-228647195
  hypo
  lymphoid_neoplasm vs. cervical,anorectal

SEQ ID NO: 467961 - DNA, 117 bp, Homo sapiens; identical to SEQ ID NO: 279362
  chr1:228647317-228647434
  hypo
  lymphoid_neoplasm vs. cervical,anorectal

SEQ ID NO: 467962 - DNA, 329 bp, Homo sapiens; identical to SEQ ID NO: 466010
  chr1:228870899-228871228
  hypo
  lymphoid_neoplasm vs. uterine,melanoma,lung, liver_bileduct,breast,ovary,prostate,anorectal,thyroid, non_cancer,myeloid_neoplasm,colorectal,pancreas_gallbladder, upper_gi,bladder_and_urothelial

SEQ ID NO: 467963 - DNA, 245 bp, Homo sapiens; identical to SEQ ID NO: 466011
  chr1:228870983-228871228
  hypo
  lymphoid_neoplasm vs. pancreas_gallbladder, bladder_and_urothelial,lung,prostate,uterine,upper_gi, colorectal,liver_bileduct,non_cancer,ovary,breast,sarcoma,renal, anorectal

SEQ ID NO: 467964 - DNA, 411 bp, Homo sapiens; identical to SEQ ID NO: 349432
  chr1:232765595-232766006
  hypo
  lymphoid_neoplasm vs. renal,pancreas_gallbladder,breast, prostate

SEQ ID NO: 467965 - DNA, 315 bp, Homo sapiens; identical to SEQ ID NO: 466022
  chr1:233749768-233750083
  hypo
  lymphoid_neoplasm vs. liver_bileduct

SEQ ID NO: 467966 - DNA, 282 bp, Homo sapiens; identical to SEQ ID NO: 466023
  chr1:233749801-233750083
  hypo
  lymphoid_neoplasm vs. upper_gi,pancreas_gallbladder, cervical,liver_bileduct,bladder_and_urothelial

SEQ ID NO: 467967 - DNA, 98 bp, Homo sapiens; identical to SEQ ID NO: 349438
  chr1:236850212-236850310
  hypo
  lymphoid_neoplasm vs. thyroid

SEQ ID NO: 467968 - DNA, 4 bp, Homo sapiens
  chr1:237205156-237205160
  hypo
  lymphoid_neoplasm vs. sarcoma
cgtg

SEQ ID NO: 467969 - DNA, 37 bp, Homo sapiens; identical to SEQ ID NO: 466027
  chr1:237205188-237205225
  hypo
  lymphoid_neoplasm vs. sarcoma

SEQ ID NO: 467970 - DNA, 42 bp, Homo sapiens; identical to SEQ ID NO: 350990
  chr10:11060746-11060788
  hypo
  lymphoid_neoplasm vs. thyroid,sarcoma,colorectal, non_cancer,uterine,myeloid_neoplasm

SEQ ID NO: 467971 - DNA, 628 bp, Homo sapiens; identical to SEQ ID NO: 466048
  chr10:25463893-25464521
  hypo
  lymphoid_neoplasm vs. melanoma

SEQ ID NO: 467972 - DNA, 508 bp, Homo sapiens; identical to SEQ ID NO: 345351
  chr10:30024793-30025301
  hypo
  lymphoid_neoplasm vs. sarcoma,liver_bileduct, myeloid_neoplasm,bladder_and_urothelial,pancreas_gallbladder, renal,lung,breast,uterine,ovary,colorectal,non_cancer,cervical, prostate,head_and_neck,thyroid,anorectal

SEQ ID NO: 467973 - DNA, 680 bp, Homo sapiens; identical to SEQ ID NO: 466058
  chr10:30024848-30025528
  hypo
  lymphoid_neoplasm vs. sarcoma,anorectal,lung, myeloid_neoplasm,pancreas_gallbladder,colorectal,breast,uterine, liver_bileduct,renal,non_cancer

SEQ ID NO: 467974 - DNA, 233 bp, Homo sapiens; identical to SEQ ID NO: 466070
  chr10:35103534-35103767
  hypo
  lymphoid_neoplasm vs. multiple_myeloma,lung,melanoma, ovary,liver_bileduct,upper_gi,head_and_neck

SEQ ID NO: 467975 - DNA, 545 bp, Homo sapiens; identical to SEQ ID NO: 466072
  chr10:35103534-35104079
  hypo
  lymphoid_neoplasm vs. renal,lung,prostate,ovary,upper_gi, cervical,liver_bileduct,breast,uterine

SEQ ID NO: 467976 - DNA, 310 bp, Homo sapiens; identical to SEQ ID NO: 466074
  chr10:35103769-35104079
  hypo
  lymphoid_neoplasm vs. cervical,colorectal,lung,renal, pancreas_gallbladder,sarcoma,breast,upper_gi,prostate,ovary, liver_bileduct,thyroid

SEQ ID NO: 467977 - DNA, 28 bp, Homo sapiens
  chr10:43571939-43571967
  hypo
  lymphoid_neoplasm vs. bladder_and_urothelial
cgcctcctgcctccggccccagcagagg

SEQ ID NO: 467978 - DNA, 407 bp, Homo sapiens; identical to SEQ ID NO: 466092
  chr10:77160017-77160424
  hypo
  lymphoid_neoplasm vs. colorectal,liver_bileduct,sarcoma, lung,melanoma,anorectal

SEQ ID NO: 467979 - DNA, 918 bp, Homo sapiens; identical to SEQ ID NO: 351062
  chr10:77160017-77160935
  hypo
  lymphoid_neoplasm vs. liver_bileduct

SEQ ID NO: 467980 - DNA, 113 bp, Homo sapiens; identical to SEQ ID NO: 466111
  chr10:95753372-95753485
  hypo
  lymphoid_neoplasm vs. renal

SEQ ID NO: 467981 - DNA, 373 bp, Homo sapiens; identical to SEQ ID NO: 466112
  chr10:95753760-95754133
  hypo
  lymphoid_neoplasm vs. renal

SEQ ID NO: 467982 - DNA, 5 bp, Homo sapiens
  chr10:102483746-102483751
  hypo
  lymphoid_neoplasm vs. bladder_and_urothelial
cgggg

SEQ ID NO: 467983 - DNA, 247 bp, Homo sapiens; identical to SEQ ID NO: 466122
  chr10:102988365-102988612
  hypo
  lymphoid_neoplasm vs. multiple_myeloma

SEQ ID NO: 467984 - DNA, 1 bp, Homo sapiens
  chr10:102988936-102988937
  hypo
  lymphoid_neoplasm vs. multiple_myeloma
c

SEQ ID NO: 467985 - DNA, 170 bp, Homo sapiens; identical to SEQ ID NO: 466124
  chr10:114711931-114712101
  hypo
  lymphoid_neoplasm vs. head_and_neck,colorectal

SEQ ID NO: 467986 - DNA, 427 bp, Homo sapiens; identical to SEQ ID NO: 359683
  chr10:114712446-114712873
  hypo
  lymphoid_neoplasm vs. head_and_neck,colorectal

SEQ ID NO: 467987 - DNA, 916 bp, Homo sapiens; identical to SEQ ID NO: 334075
  chr10:116527415-116528331
  hypo
  lymphoid_neoplasm vs. pancreas_gallbladder,cervical, liver_bileduct

SEQ ID NO: 467988 - DNA, 51 bp, Homo sapiens; identical to SEQ ID NO: 359690
  chr10:119001564-119001615
  hypo
  lymphoid_neoplasm vs. sarcoma,prostate

SEQ ID NO: 467989 - DNA, 204 bp, Homo sapiens; identical to SEQ ID NO: 466131
  chr10:119302490-119302694
  hypo
  lymphoid_neoplasm vs. sarcoma

SEQ ID NO: 467990 - DNA, 276 bp, Homo sapiens; identical to SEQ ID NO: 359707
  chr10:124134313-124134589
  hypo
  lymphoid_neoplasm vs. liver_bileduct

SEQ ID NO: 467991 - DNA, 128 bp, Homo sapiens; identical to SEQ ID NO: 372592
  chr10:134602414-134602542
  hypo
  lymphoid_neoplasm vs. melanoma

SEQ ID NO: 467992 - DNA, 683 bp, Homo sapiens; identical to SEQ ID NO: 466160
  chr11:416597-417280
  hypo
  lymphoid_neoplasm vs. colorectal,upper_gi,lung,cervical, pancreas_gallbladder

SEQ ID NO: 467993 - DNA, 753 bp, Homo sapiens; identical to SEQ ID NO: 466161
  chr11:416787-417540
  hypo
  lymphoid_neoplasm vs. upper_gi,pancreas_gallbladder, colorectal

SEQ ID NO: 467994 - DNA, 732 bp, Homo sapiens; identical to SEQ ID NO: 466162
  chr11:1410711-1411443
  hypo
  lymphoid_neoplasm vs. head_and_neck,anorectal,ovary, non_cancer,pancreas_gallbladder

SEQ ID NO: 467995 - DNA, 409 bp, Homo sapiens; identical to SEQ ID NO: 466163
  chr11:1411034-1411443
  hypo
  lymphoid_neoplasm vs. anorectal,prostate,thyroid, myeloid_neoplasm,non_cancer,ovary,renal,breast

SEQ ID NO: 467996 - DNA, 128 bp, Homo sapiens; identical to SEQ ID NO: 340930
  chr11:1845553-1845681
  hypo
  lymphoid_neoplasm vs. cervical

SEQ ID NO: 467997 - DNA, 291 bp, Homo sapiens; identical to SEQ ID NO: 466171
  chr11:3186311-3186602
  hypo
  lymphoid_neoplasm vs. upper_gi

SEQ ID NO: 467998 - DNA, 160 bp, Homo sapiens; identical to SEQ ID NO: 462330
  chr11:12030561-12030721
  hypo

SEQ ID NO: 467999 - DNA, 263 bp, Homo sapiens; identical to SEQ ID NO: 466175
  chr11:12030561-12030824
  hypo
  lymphoid_neoplasm vs. head_and_neck,thyroid, myeloid_neoplasm,lung,sarcoma,bladder_and_urothelial, multiple_myeloma

SEQ ID NO: 468000 - DNA, 53 bp, Homo sapiens; identical to SEQ ID NO: 359760
  chr11:12031006-12031059
  hypo
  lymphoid_neoplasm vs. head_and_neck,thyroid, myeloid_neoplasm,lung,sarcoma,bladder_and_urothelial, multiple_myeloma

SEQ ID NO: 468001 - DNA, 288 bp, Homo sapiens; identical to SEQ ID NO: 466178
  chr11:12132212-12132500
  hypo
  lymphoid_neoplasm vs. sarcoma,head_and_neck,lung, pancreas_gallbladder,anorectal,breast,uterine,renal,colorectal, bladder_and_urothelial,non_cancer,prostate,upper_gi,ovary

SEQ ID NO: 468002 - DNA, 403 bp, Homo sapiens; identical to SEQ ID NO: 466209
  chr11:17742811-17743214
  hypo
  lymphoid_neoplasm vs. multiple_myeloma

SEQ ID NO: 468003 - DNA, 37 bp, Homo sapiens; identical to SEQ ID NO: 351163
  chr11:17743245-17743282
  hypo
  lymphoid_neoplasm vs. multiple_myeloma

SEQ ID NO: 468004 - DNA, 768 bp, Homo sapiens; identical to SEQ ID NO: 466211
  chr11:19733708-19734476
  hypo
  lymphoid_neoplasm vs. liver_bileduct

SEQ ID NO: 468005 - DNA, 955 bp, Homo sapiens; identical to SEQ ID NO: 466212
  chr11:19733991-19734946
  hypo
  lymphoid_neoplasm vs. liver_bileduct,multiple_myeloma, lung,thyroid,anorectal,ovary,uterine,non_cancer,breast, colorectal,pancreas_gallbladder,cervical,renal, bladder_and_urothelial,head_and_neck,sarcoma,melanoma

SEQ ID NO: 468006 - DNA, 497 bp, Homo sapiens; identical to SEQ ID NO: 466213
  chr11:19734477-19734974
  hypo
  lymphoid_neoplasm vs. myeloid_neoplasm,renal,uterine, non_cancer,ovary,breast,lung,thyroid

SEQ ID NO: 468007 - DNA, 339 bp, Homo sapiens; identical to SEQ ID NO: 466214
  chr11:19735066-19735405
  hypo
  lymphoid_neoplasm vs. myeloid_neoplasm,renal,uterine, non_cancer,ovary,breast,lung,thyroid

SEQ ID NO: 468008 - DNA, 586 bp, Homo sapiens; identical to SEQ ID NO: 466223
  chr11:46299162-46299748
  hypo
  lymphoid_neoplasm vs. upper_gi

SEQ ID NO: 468009 - DNA, 4 bp, Homo sapiens
  chr11:61347876-61347880
  hypo
  lymphoid_neoplasm vs. cervical,breast,anorectal, head_and_neck,sarcoma,thyroid,uterine,colorectal,lung,ovary
cgcc

SEQ ID NO: 468010 - DNA, 604 bp, Homo sapiens; identical to SEQ ID NO: 347160
  chr11:61347974-61348578
  hypo
  lymphoid_neoplasm vs. cervical,breast,anorectal, head_and_neck,sarcoma,thyroid,uterine,colorectal,lung,ovary

SEQ ID NO: 468011 - DNA, 212 bp, Homo sapiens; identical to SEQ ID NO: 466235
  chr11:74022468-74022680
  hypo
  lymphoid_neoplasm vs. ovary

SEQ ID NO: 468012 - DNA, 137 bp, Homo sapiens; identical to SEQ ID NO: 359899
  chr11:74022716-74022853
  hypo
  lymphoid_neoplasm vs. ovary

SEQ ID NO: 468013 - DNA, 26 bp, Homo sapiens
  chr11:74441810-74441836
  hypo
  lymphoid_neoplasm vs. prostate
cgcatccctcctctgcccacccagcc

SEQ ID NO: 468014 - DNA, 775 bp, Homo sapiens; identical to SEQ ID NO: 466242
  chr11:77184258-77185033
  hypo
  lymphoid_neoplasm vs. colorectal

SEQ ID NO: 468015 - DNA, 977 bp, Homo sapiens; identical to SEQ ID NO: 359906
  chr11:77184557-77185534
  hypo
  lymphoid_neoplasm vs. liver_bileduct

SEQ ID NO: 468016 - DNA, 41 bp, Homo sapiens; identical to SEQ ID NO: 466255
  chr11:115374753-115374794
  hypo
  lymphoid_neoplasm vs. melanoma

SEQ ID NO: 468017 - DNA, 239 bp, Homo sapiens; identical to SEQ ID NO: 466256
  chr11:115374753-115374992
  hypo
  lymphoid_neoplasm vs. sarcoma

SEQ ID NO: 468018 - DNA, 122 bp, Homo sapiens; identical to SEQ ID NO: 466257
  chr11:115374870-115374992
  hypo
  lymphoid_neoplasm vs. sarcoma,uterine,prostate, liver_bileduct,myeloid_neoplasm

SEQ ID NO: 468019 - DNA, 399 bp, Homo sapiens; identical to SEQ ID NO: 452805
  chr11:115375434-115375833
  hypo
  lymphoid_neoplasm vs. sarcoma,uterine,prostate, liver_bileduct,myeloid_neoplasm

SEQ ID NO: 468020 - DNA, 399 bp, Homo sapiens; identical to SEQ ID NO: 452805
  chr11:115375434-115375833
  hypo
  lymphoid_neoplasm vs. bladder_and_urothelial,renal, uterine,breast,liver_bileduct,prostate

SEQ ID NO: 468021 - DNA, 224 bp, Homo sapiens; identical to SEQ ID NO: 466262
  chr11:120110626-120110850
  hypo
  lymphoid_neoplasm vs. cervical,ovary, pancreas_gallbladder

SEQ ID NO: 468022 - DNA, 155 bp, Homo sapiens; identical to SEQ ID NO: 351262
  chr11:120110967-120111122
  hypo
  lymphoid_neoplasm vs. cervical,ovary, pancreas_gallbladder

SEQ ID NO: 468023 - DNA, 544 bp, Homo sapiens; identical to SEQ ID NO: 466268
  chr11:129148497-129149041
  hypo
  lymphoid_neoplasm vs. liver_bileduct,melanoma,upper_gi, lung,colorectal,head_and_neck,breast,renal,anorectal, bladder_and_urothelial,sarcoma,pancreas_gallbladder,thyroid, myeloid_neoplasm,uterine,non_cancer,prostate,ovary

SEQ ID NO: 468024 - DNA, 361 bp, Homo sapiens; identical to SEQ ID NO: 466269
  chr11:129149096-129149457
  hypo
  lymphoid_neoplasm vs. liver_bileduct,melanoma,upper_gi, lung,colorectal,head_and_neck,breast,renal,anorectal, bladder_and_urothelial,sarcoma,pancreas_gallbladder,thyroid, myeloid_neoplasm,uterine,non_cancer,prostate,ovary

SEQ ID NO: 468025 - DNA, 68 bp, Homo sapiens; identical to SEQ ID NO: 466270
  chr11:129148973-129149041
  hypo
  lymphoid_neoplasm vs. bladder_and_urothelial, head_and_neck,prostate,upper_gi,breast,ovary,colorectal, anorectal,thyroid,uterine,lung,pancreas_gallbladder,non_cancer, renal,cervical,sarcoma,liver_bileduct,melanoma

SEQ ID NO: 468026 - DNA, 820 bp, Homo sapiens; identical to SEQ ID NO: 345406
  chr11:129149096-129149916
  hypo
  lymphoid_neoplasm vs. bladder_and_urothelial, head_and_neck,prostate,upper_gi,breast,ovary,colorectal, anorectal,thyroid,uterine,lung,pancreas_gallbladder,non_cancer, renal,cervical,sarcoma,liver_bileduct,melanoma

SEQ ID NO: 468027 - DNA, 73 bp, Homo sapiens; identical to SEQ ID NO: 351280
  chr11:134281810-134281883
  hypo
  lymphoid_neoplasm vs. multiple_myeloma

SEQ ID NO: 468028 - DNA, 91 bp, Homo sapiens; identical to SEQ ID NO: 466276
  chr12:2161370-2161461
  hypo
  lymphoid_neoplasm vs. uterine

SEQ ID NO: 468029 - DNA, 768 bp, Homo sapiens; identical to SEQ ID NO: 466277
  chr12:3186011-3186779
  hypo
  lymphoid_neoplasm vs. pancreas_gallbladder, liver_bileduct

SEQ ID NO: 468030 - DNA, 773 bp, Homo sapiens; identical to SEQ ID NO: 351295
  chr12:3186287-3187060
  hypo
  lymphoid_neoplasm vs. liver_bileduct,cervical,colorectal, upper_gi

SEQ ID NO: 468031 - DNA, 198 bp, Homo sapiens; identical to SEQ ID NO: 347198
  chr12:3600534-3600732
  hypo
  lymphoid_neoplasm vs. multiple_myeloma,melanoma

SEQ ID NO: 468032 - DNA, 235 bp, Homo sapiens; identical to SEQ ID NO: 466280
  chr12:3600534-3600769
  hypo
  lymphoid_neoplasm vs. multiple_myeloma,sarcoma

SEQ ID NO: 468033 - DNA, 6 bp, Homo sapiens
  chr12:3600982-3600988
  hypo
  lymphoid_neoplasm vs. multiple_myeloma,sarcoma
tctgcc

SEQ ID NO: 468034 - DNA, 805 bp, Homo sapiens; identical to SEQ ID NO: 466286
  chr12:15941612-15942417
  hypo
  lymphoid_neoplasm vs. upper_gi

SEQ ID NO: 468035 - DNA, 804 bp, Homo sapiens; identical to SEQ ID NO: 351321
  chr12:15941918-15942722
  hypo
  lymphoid_neoplasm vs. cervical,anorectal

SEQ ID NO: 468036 - DNA, 74 bp, Homo sapiens; identical to SEQ ID NO: 466288
  chr12:19282260-19282334
  hypo
  lymphoid_neoplasm vs. upper_gi,ovary,cervical,lung,renal, thyroid,colorectal,pancreas_gallbladder,prostate,breast, melanoma,non_cancer,head_and_neck,liver_bileduct,sarcoma, bladder_and_urothelial,myeloid_neoplasm

SEQ ID NO: 468037 - DNA, 772 bp, Homo sapiens; identical to SEQ ID NO: 345419
  chr12:19282363-19283135
  hypo
  lymphoid_neoplasm vs. upper_gi,ovary,cervical,lung,renal, thyroid,colorectal,pancreas_gallbladder,prostate,breast, melanoma,non_cancer,head_and_neck,liver_bileduct,sarcoma, bladder_and_urothelial,myeloid_neoplasm

SEQ ID NO: 468038 - DNA, 569 bp, Homo sapiens; identical to SEQ ID NO: 466290
  chr12:19282635-19283204
  hypo
  lymphoid_neoplasm vs. sarcoma,liver_bileduct, myeloid_neoplasm,lung,thyroid,prostate,renal,ovary,melanoma, breast,head_and_neck,pancreas_gallbladder, bladder_and_urothelial,upper_gi,colorectal,non_cancer

SEQ ID NO: 468039 - DNA, 144 bp, Homo sapiens; identical to SEQ ID NO: 347219
  chr12:19283425-19283569
  hypo
  lymphoid_neoplasm vs. sarcoma,liver_bileduct, myeloid_neoplasm,lung,thyroid,prostate,renal,ovary,melanoma, breast,head_and_neck,pancreas_gallbladder, bladder_and_urothelial,upper_gi,colorectal,non_cancer

SEQ ID NO: 468040 - DNA, 58 bp, Homo sapiens; identical to SEQ ID NO: 466292
  chr12:19283146-19283204
  hypo
  lymphoid_neoplasm vs. upper_gi,lung,melanoma,renal,ovary, head_and_neck,pancreas_gallbladder,sarcoma

SEQ ID NO: 468041 - DNA, 250 bp, Homo sapiens; identical to SEQ ID NO: 466293
  chr12:19283425-19283675
  hypo
  lymphoid_neoplasm vs. upper_gi,lung,melanoma,renal,ovary, head_and_neck,pancreas_gallbladder,sarcoma

SEQ ID NO: 468042 - DNA, 316 bp, Homo sapiens; identical to SEQ ID NO: 351334
  chr12:33049652-33049968
  hypo
  lymphoid_neoplasm vs. liver_bileduct,renal,cervical

SEQ ID NO: 468043 - DNA, 350 bp, Homo sapiens; identical to SEQ ID NO: 466299
  chr12:33049652-33050002
  hypo
  lymphoid_neoplasm vs. upper_gi

SEQ ID NO: 468044 - DNA, 303 bp, Homo sapiens; identical to SEQ ID NO: 466303
  chr12:54332438-54332741
  hypo
  lymphoid_neoplasm vs. bladder_and_urothelial

SEQ ID NO: 468045 - DNA, 104 bp, Homo sapiens; identical to SEQ ID NO: 464141
  chr12:54393256-54393360
  hypo
  lymphoid_neoplasm vs. breast

SEQ ID NO: 468046 - DNA, 217 bp, Homo sapiens; identical to SEQ ID NO: 466309
  chr12:59313943-59314160
  hypo
  lymphoid_neoplasm vs. upper_gi

SEQ ID NO: 468047 - DNA, 341 bp, Homo sapiens; identical to SEQ ID NO: 360136
  chr12:59314189-59314530
  hypo
  lymphoid_neoplasm vs. upper_gi

SEQ ID NO: 468048 - DNA, 386 bp, Homo sapiens; identical to SEQ ID NO: 466329
  chr12:81330352-81330738
  hypo
  lymphoid_neoplasm vs. liver_bileduct

SEQ ID NO: 468049 - DNA, 187 bp, Homo sapiens; identical to SEQ ID NO: 466330
  chr12:81330551-81330738
  hypo
  lymphoid_neoplasm vs. liver_bileduct

SEQ ID NO: 468050 - DNA, 473 bp, Homo sapiens; identical to SEQ ID NO: 334688
  chr12:123380333-123380806
  hypo
  lymphoid_neoplasm vs. cervical,renal, pancreas_gallbladder,ovary,uterine,anorectal,upper_gi,breast, thyroid,prostate,lung,non_cancer,colorectal,myeloid_neoplasm, bladder_and_urothelial

SEQ ID NO: 468051 - DNA, 703 bp, Homo sapiens; identical to SEQ ID NO: 341605
  chr12:124979300-124980003
  hypo
  lymphoid_neoplasm vs. upper_gi,bladder_and_urothelial, liver_bileduct

SEQ ID NO: 468052 - DNA, 783 bp, Homo sapiens; identical to SEQ ID NO: 334723
  chr13:24734971-24735754
  hypo
  lymphoid_neoplasm vs. upper_gi

SEQ ID NO: 468053 - DNA, 82 bp, Homo sapiens; identical to SEQ ID NO: 459404
  chr13:25746000-25746082
  hypo
  lymphoid_neoplasm vs. sarcoma,myeloid_neoplasm

SEQ ID NO: 468054 - DNA, 56 bp, Homo sapiens; identical to SEQ ID NO: 466371
  chr13:100620289-100620345
  hypo
  lymphoid_neoplasm vs. colorectal,myeloid_neoplasm, sarcoma

SEQ ID NO: 468055 - DNA, 112 bp, Homo sapiens; identical to SEQ ID NO: 466372
  chr13:100620374-100620486
  hypo
  lymphoid_neoplasm vs. colorectal,myeloid_neoplasm, sarcoma

SEQ ID NO: 468056 - DNA, 106 bp, Homo sapiens; identical to SEQ ID NO: 466373
  chr13:100620515-100620621
  hypo
  lymphoid_neoplasm vs. colorectal,myeloid_neoplasm, sarcoma

SEQ ID NO: 468057 - DNA, 10 bp, Homo sapiens
  chr13:100620631-100620641
  hypo
  lymphoid_neoplasm vs. colorectal,myeloid_neoplasm, sarcoma
cgcagagcca

SEQ ID NO: 468058 - DNA, 22 bp, Homo sapiens
  chr13:100622155-100622177
  hypo
  lymphoid_neoplasm vs. cervical
cgcggggcctgtgtgtgctatc

SEQ ID NO: 468059 - DNA, 367 bp, Homo sapiens; identical to SEQ ID NO: 351497
  chr13:100632514-100632881
  hypo
  lymphoid_neoplasm vs. anorectal

SEQ ID NO: 468060 - DNA, 576 bp, Homo sapiens; identical to SEQ ID NO: 466386
  chr13:100632514-100633090
  hypo
  lymphoid_neoplasm vs. anorectal

SEQ ID NO: 468061 - DNA, 36 bp, Homo sapiens; identical to SEQ ID NO: 289879
  chr13:100633184-100633220
  hypo
  lymphoid_neoplasm vs. anorectal

SEQ ID NO: 468062 - DNA, 147 bp, Homo sapiens; identical to SEQ ID NO: 466388
  chr13:100634131-100634278
  hypo
  lymphoid_neoplasm vs. cervical,colorectal

SEQ ID NO: 468063 - DNA, 8 bp, Homo sapiens
  chr13:100634307-100634315
  hypo
  lymphoid_neoplasm vs. cervical,colorectal
gcgcgctg

SEQ ID NO: 468064 - DNA, 1 bp, Homo sapiens
  chr13:108518657-108518658
  hypo
  lymphoid_neoplasm vs. liver_bileduct
c

SEQ ID NO: 468065 - DNA, 4 bp, Homo sapiens
  chr13:108518714-108518718
  hypo
  lymphoid_neoplasm vs. liver_bileduct
cgct

SEQ ID NO: 468066 - DNA, 22 bp, Homo sapiens
  chr13:108519410-108519432
  hypo
  lymphoid_neoplasm vs. liver_bileduct
tctcccctgccaggggcatgcc

SEQ ID NO: 468067 - DNA, 59 bp, Homo sapiens; identical to SEQ ID NO: 459416
  chr13:108519564-108519623
  hypo
  lymphoid_neoplasm vs. liver_bileduct

SEQ ID NO: 468068 - DNA, 22 bp, Homo sapiens
  chr13:108519410-108519432
  hypo
  lymphoid_neoplasm vs. multiple_myeloma,liver_bileduct
tctcccctgccaggggcatgcc

SEQ ID NO: 468069 - DNA, 59 bp, Homo sapiens; identical to SEQ ID NO: 459416
  chr13:108519564-108519623
  hypo
  lymphoid_neoplasm vs. multiple_myeloma,liver_bileduct

SEQ ID NO: 468070 - DNA, 166 bp, Homo sapiens; identical to SEQ ID NO: 452855
  chr13:108519932-108520098
  hypo
  lymphoid_neoplasm vs. multiple_myeloma,liver_bileduct

SEQ ID NO: 468071 - DNA, 229 bp, Homo sapiens; identical to SEQ ID NO: 466406
  chr13:114017991-114018220
  hypo
  lymphoid_neoplasm vs. pancreas_gallbladder,head_and_neck, colorectal,lung,renal,upper_gi

SEQ ID NO: 468072 - DNA, 30 bp, Homo sapiens; identical to SEQ ID NO: 460715
  chr14:60974092-60974122
  hypo
  lymphoid_neoplasm vs. multiple_myeloma

SEQ ID NO: 468073 - DNA, 188 bp, Homo sapiens; identical to SEQ ID NO: 466434
  chr14:92980770-92980958
  hypo
  lymphoid_neoplasm vs. bladder_and_urothelial,thyroid

SEQ ID NO: 468074 - DNA, 246 bp, Homo sapiens
  chr14:102355922-102356168
  hypo
  lymphoid_neoplasm vs. upper_gi,liver_bileduct
cgtgtcctggggctcccctagaagcaggcgcagtggacagagatgtctcagaggaagggagctgggtctgtcgcagatgggtgcttcagaaagatcgcacctgagacagcacggaggatgcgtgtgggtgtcagtggggaactgggcaggtagaataagaggagttcaggaatcacttctaccctttgcaggaactgtgctaaatattgcgggctttaaaattaagtaagacattggcctatgttg

SEQ ID NO: 468075 - DNA, 188 bp, Homo sapiens; identical to SEQ ID NO: 355182
  chr14:102356197-102356385
  hypo
  lymphoid_neoplasm vs. upper_gi,liver_bileduct

SEQ ID NO: 468076 - DNA, 78 bp, Homo sapiens; identical to SEQ ID NO: 342075
  chr14:104158805-104158883
  hypo
  lymphoid_neoplasm vs. upper_gi,liver_bileduct

SEQ ID NO: 468077 - DNA, 728 bp, Homo sapiens; identical to SEQ ID NO: 466461
  chr14:105330980-105331708
  hypo
  lymphoid_neoplasm vs. colorectal

SEQ ID NO: 468078 - DNA, 156 bp, Homo sapiens; identical to SEQ ID NO: 373579
  chr14:105331744-105331900
  hypo
  lymphoid_neoplasm vs. colorectal

SEQ ID NO: 468079 - DNA, 54 bp, Homo sapiens; identical to SEQ ID NO: 466465
  chr15:29130654-29130708
  hypo
  lymphoid_neoplasm vs. multiple_myeloma

SEQ ID NO: 468080 - DNA, 330 bp, Homo sapiens; identical to SEQ ID NO: 466471
  chr15:30113537-30113867
  hypo
  lymphoid_neoplasm vs. liver_bileduct,renal, myeloid_neoplasm,pancreas_gallbladder,colorectal,melanoma, anorectal,bladder_and_urothelial,lung,breast,head_and_neck

SEQ ID NO: 468081 - DNA, 320 bp, Homo sapiens; identical to SEQ ID NO: 466472
  chr15:30113984-30114304
  hypo
  lymphoid_neoplasm vs. liver_bileduct,renal, myeloid_neoplasm,pancreas_gallbladder,colorectal,melanoma, anorectal,bladder_and_urothelial,lung,breast,head_and_neck

SEQ ID NO: 468082 - DNA, 21 bp, Homo sapiens
  chr15:30114349-30114370
  hypo
  lymphoid_neoplasm vs. liver_bileduct,renal, myeloid_neoplasm,pancreas_gallbladder,colorectal,melanoma, anorectal,bladder_and_urothelial,lung,breast,head_and_neck
cgggggcggccggaagggccc

SEQ ID NO: 468083 - DNA, 320 bp, Homo sapiens; identical to SEQ ID NO: 466472
  chr15:30113984-30114304
  hypo
  lymphoid_neoplasm vs. liver_bileduct,melanoma,renal,lung, ovary

SEQ ID NO: 468084 - DNA, 432 bp, Homo sapiens; identical to SEQ ID NO: 466475
  chr15:30114349-30114781
  hypo
  lymphoid_neoplasm vs. liver_bileduct,melanoma,renal,lung, ovary

SEQ ID NO: 468085 - DNA, 61 bp, Homo sapiens; identical to SEQ ID NO: 466476
  chr15:30114810-30114871
  hypo
  lymphoid_neoplasm vs. liver_bileduct,melanoma,renal,lung, ovary

SEQ ID NO: 468086 - DNA, 387 bp, Homo sapiens; identical to SEQ ID NO: 466477
  chr15:30114394-30114781
  hypo
  lymphoid_neoplasm vs. liver_bileduct,lung,renal,melanoma, uterine,cervical,pancreas_gallbladder,colorectal

SEQ ID NO: 468087 - DNA, 376 bp, Homo sapiens; identical to SEQ ID NO: 466478
  chr15:30114810-30115186
  hypo
  lymphoid_neoplasm vs. liver_bileduct,lung,renal,melanoma, uterine,cervical,pancreas_gallbladder,colorectal

SEQ ID NO: 468088 - DNA, 210 bp, Homo sapiens; identical to SEQ ID NO: 466479
  chr15:32162282-32162492
  hypo
  lymphoid_neoplasm vs. myeloid_neoplasm, bladder_and_urothelial,thyroid,prostate,breast,anorectal, non_cancer,ovary,renal,uterine,cervical,head_and_neck, colorectal,lung,upper_gi,melanoma

SEQ ID NO: 468089 - DNA, 472 bp, Homo sapiens; identical to SEQ ID NO: 466480
  chr15:32162523-32162995
  hypo
  lymphoid_neoplasm vs. myeloid_neoplasm, bladder_and_urothelial,thyroid,prostate,breast,anorectal, non_cancer,ovary,renal,uterine,cervical,head_and_neck, colorectal,lung,upper_gi,melanoma

SEQ ID NO: 468090 - DNA, 761 bp, Homo sapiens; identical to SEQ ID NO: 345467
  chr15:32162523-32163284
  hypo
  lymphoid_neoplasm vs. colorectal,non_cancer,uterine, ovary,renal,breast,prostate,lung,thyroid,upper_gi, bladder_and_urothelial,cervical,head_and_neck,myeloid_neoplasm, pancreas_gallbladder,anorectal

SEQ ID NO: 468091 - DNA, 88 bp, Homo sapiens; identical to SEQ ID NO: 466499
  chr15:62456599-62456687
  hypo
  lymphoid_neoplasm vs. myeloid_neoplasm,anorectal, multiple_myeloma,non_cancer

SEQ ID NO: 468092 - DNA, 15 bp, Homo sapiens
  chr15:62456952-62456967
  hypo
  lymphoid_neoplasm vs. myeloid_neoplasm,anorectal, multiple_myeloma,non_cancer
gtccgtgcggccggc

SEQ ID NO: 468093 - DNA, 131 bp, Homo sapiens; identical to SEQ ID NO: 466501
  chr15:62457008-62457139
  hypo
  lymphoid_neoplasm vs. myeloid_neoplasm,anorectal, multiple_myeloma,non_cancer

SEQ ID NO: 468094 - DNA, 257 bp, Homo sapiens; identical to SEQ ID NO: 351695
  chr15:62457296-62457553
  hypo
  lymphoid_neoplasm vs. myeloid_neoplasm,anorectal, multiple_myeloma,non_cancer

SEQ ID NO: 468095 - DNA, 194 bp, Homo sapiens; identical to SEQ ID NO: 466512
  chr15:71184276-71184470
  hypo
  lymphoid_neoplasm vs. bladder_and_urothelial,upper_gi, lung,cervical,colorectal

SEQ ID NO: 468096 - DNA, 588 bp, Homo sapiens; identical to SEQ ID NO: 466513
  chr15:71184499-71185087
  hypo
  lymphoid_neoplasm vs. bladder_and_urothelial,upper_gi, lung,cervical,colorectal

SEQ ID NO: 468097 - DNA, 666 bp, Homo sapiens; identical to SEQ ID NO: 466514
  chr15:71184600-71185266
  hypo
  lymphoid_neoplasm vs. lung,colorectal,cervical,breast, bladder_and_urothelial,upper_gi

SEQ ID NO: 468098 - DNA, 588 bp, Homo sapiens; identical to SEQ ID NO: 466516
  chr15:71407569-71408157
  hypo
  lymphoid_neoplasm vs. lung,thyroid,non_cancer,renal, colorectal,breast,bladder_and_urothelial,prostate, liver_bileduct,sarcoma,head_and_neck,melanoma,upper_gi,uterine, ovary,pancreas_gallbladder,anorectal

SEQ ID NO: 468099 - DNA, 321 bp, Homo sapiens; identical to SEQ ID NO: 466517
  chr15:71407836-71408157
  hypo
  lymphoid_neoplasm vs. melanoma,lung,colorectal,thyroid, breast,upper_gi,bladder_and_urothelial,non_cancer,head_and_neck, liver_bileduct,uterine,renal,sarcoma,prostate,ovary, pancreas_gallbladder

SEQ ID NO: 468100 - DNA, 5 bp, Homo sapiens
  chr15:71408598-71408603
  hypo
  lymphoid_neoplasm vs. melanoma,lung,colorectal,thyroid, breast,upper_gi,bladder_and_urothelial,non_cancer,head_and_neck, liver_bileduct,uterine,renal,sarcoma,prostate,ovary, pancreas_gallbladder
tttcc

SEQ ID NO: 468101 - DNA, 461 bp, Homo sapiens; identical to SEQ ID NO: 466526
  chr15:96873798-96874259
  hypo
  lymphoid_neoplasm vs. cervical,colorectal

SEQ ID NO: 468102 - DNA, 30 bp, Homo sapiens; identical to SEQ ID NO: 466527
  chr15:96874333-96874363
  hypo
  lymphoid_neoplasm vs. cervical,colorectal

SEQ ID NO: 468103 - DNA, 19 bp, Homo sapiens
  chr15:100882092-100882111
  hypo
  lymphoid_neoplasm vs. breast,prostate,non_cancer,uterine, myeloid_neoplasm
gccgtcacacatggtaccc

SEQ ID NO: 468104 - DNA, 468 bp, Homo sapiens; identical to SEQ ID NO: 345483
  chr15:100882092-100882560
  hypo
  lymphoid_neoplasm vs. melanoma,uterine,prostate,renal, breast,non_cancer,myeloid_neoplasm,ovary,thyroid,head_and_neck

SEQ ID NO: 468105 - DNA, 326 bp, Homo sapiens; identical to SEQ ID NO: 346134
  chr16:3021581-3021907
  hypo
  lymphoid_neoplasm vs. multiple_myeloma,melanoma,renal, bladder_and_urothelial,liver_bileduct,non_cancer, myeloid_neoplasm,prostate,uterine,pancreas_gallbladder, anorectal,upper_gi,breast,lung,colorectal,sarcoma,ovary

SEQ ID NO: 468106 - DNA, 283 bp, Homo sapiens; identical to SEQ ID NO: 466539
  chr16:4165534-4165817
  hypo
  lymphoid_neoplasm vs. sarcoma,myeloid_neoplasm,upper_gi, breast,renal,colorectal

SEQ ID NO: 468107 - DNA, 648 bp, Homo sapiens; identical to SEQ ID NO: 466540
  chr16:4165852-4166500
  hypo
  lymphoid_neoplasm vs. sarcoma,myeloid_neoplasm,upper_gi, breast,renal,colorectal

SEQ ID NO: 468108 - DNA, 961 bp, Homo sapiens; identical to SEQ ID NO: 466541
  chr16:4166005-4166966
  hypo
  lymphoid_neoplasm vs. cervical,liver_bileduct,upper_gi, pancreas_gallbladder

SEQ ID NO: 468109 - DNA, 664 bp, Homo sapiens; identical to SEQ ID NO: 335281
  chr16:5007944-5008608
  hypo
  lymphoid_neoplasm vs. pancreas_gallbladder

SEQ ID NO: 468110 - DNA, 204 bp, Homo sapiens; identical to SEQ ID NO: 360846
  chr16:57318412-57318616
  hypo
  lymphoid_neoplasm vs. pancreas_gallbladder,uterine

SEQ ID NO: 468111 - DNA, 206 bp, Homo sapiens; identical to SEQ ID NO: 466568
  chr16:65157317-65157523
  hypo
  lymphoid_neoplasm vs. prostate

SEQ ID NO: 468112 - DNA, 102 bp, Homo sapiens; identical to SEQ ID NO: 466582
  chr16:79804457-79804559
  hypo
  lymphoid_neoplasm vs. sarcoma,myeloid_neoplasm,anorectal, colorectal,breast,renal,bladder_and_urothelial,non_cancer, prostate,uterine

SEQ ID NO: 468113 - DNA, 97 bp, Homo sapiens; identical to SEQ ID NO: 351841
  chr16:79804596-79804693
  hypo
  lymphoid_neoplasm vs. sarcoma,myeloid_neoplasm,anorectal, colorectal,breast,renal,bladder_and_urothelial,non_cancer, prostate,uterine

SEQ ID NO: 468114 - DNA, 816 bp, Homo sapiens; identical to SEQ ID NO: 351849
  chr16:85202563-85203379
  hypo
  lymphoid_neoplasm vs. renal,ovary,lung,prostate, colorectal

SEQ ID NO: 468115 - DNA, 513 bp, Homo sapiens; identical to SEQ ID NO: 466586
  chr16:85202887-85203400
  hypo
  lymphoid_neoplasm vs. renal,prostate

SEQ ID NO: 468116 - DNA, 389 bp, Homo sapiens; identical to SEQ ID NO: 335407
  chr16:86609636-86610025
  hypo
  lymphoid_neoplasm vs. cervical,ovary

SEQ ID NO: 468117 - DNA, 802 bp, Homo sapiens; identical to SEQ ID NO: 345501
  chr16:87525701-87526503
  hypo
  lymphoid_neoplasm vs. cervical,upper_gi,renal,prostate, breast,lung,uterine,sarcoma,colorectal,ovary,non_cancer, head_and_neck,bladder_and_urothelial

SEQ ID NO: 468118 - DNA, 505 bp, Homo sapiens; identical to SEQ ID NO: 335410
  chr16:87526565-87527070
  hypo
  lymphoid_neoplasm vs. head_and_neck,lung,ovary, pancreas_gallbladder,renal,upper_gi,breast,cervical,thyroid, melanoma,colorectal,bladder_and_urothelial,uterine,prostate, non_cancer,anorectal,multiple_myeloma,myeloid_neoplasm,
  CONT. FROM ABOVE: liver_bileduct

SEQ ID NO: 468119 - DNA, 60 bp, Homo sapiens; identical to SEQ ID NO: 462521
  chr16:87635912-87635972
  hypo
  lymphoid_neoplasm vs. melanoma

SEQ ID NO: 468120 - DNA, 190 bp, Homo sapiens; identical to SEQ ID NO: 462522
  chr16:87636008-87636198
  hypo
  lymphoid_neoplasm vs. melanoma

SEQ ID NO: 468121 - DNA, 122 bp, Homo sapiens; identical to SEQ ID NO: 342747
  chr16:88699839-88699961
  hypo
  lymphoid_neoplasm vs. liver_bileduct

SEQ ID NO: 468122 - DNA, 225 bp, Homo sapiens; identical to SEQ ID NO: 367064
  chr16:88800137-88800362
  hypo

SEQ ID NO: 468123 - DNA, 9 bp, Homo sapiens
  chr16:89268343-89268352
  hypo
  lymphoid_neoplasm vs. thyroid
cgggggcgt

SEQ ID NO: 468124 - DNA, 440 bp, Homo sapiens; identical to SEQ ID NO: 360932
  chr17:2756601-2757041
  hypo
  lymphoid_neoplasm vs. pancreas_gallbladder

SEQ ID NO: 468125 - DNA, 507 bp, Homo sapiens; identical to SEQ ID NO: 342855
  chr17:4795549-4796056
  hypo
  lymphoid_neoplasm vs. melanoma,cervical,upper_gi

SEQ ID NO: 468126 - DNA, 965 bp, Homo sapiens; identical to SEQ ID NO: 360956
  chr17:9548277-9549242
  hypo
  lymphoid_neoplasm vs. liver_bileduct

SEQ ID NO: 468127 - DNA, 731 bp, Homo sapiens; identical to SEQ ID NO: 466606
  chr17:9548765-9549496
  hypo
  lymphoid_neoplasm vs. head_and_neck

SEQ ID NO: 468128 - DNA, 280 bp, Homo sapiens; identical to SEQ ID NO: 466613
  chr17:39683530-39683810
  hypo
  lymphoid_neoplasm vs. pancreas_gallbladder,cervical

SEQ ID NO: 468129 - DNA, 487 bp, Homo sapiens; identical to SEQ ID NO: 466614
  chr17:39683839-39684326
  hypo
  lymphoid_neoplasm vs. pancreas_gallbladder,cervical

SEQ ID NO: 468130 - DNA, 744 bp, Homo sapiens; identical to SEQ ID NO: 466615
  chr17:39683889-39684633
  hypo
  lymphoid_neoplasm vs. cervical

SEQ ID NO: 468131 - DNA, 669 bp, Homo sapiens; identical to SEQ ID NO: 335649
  chr17:64187889-64188558
  hypo
  lymphoid_neoplasm vs. upper_gi,pancreas_gallbladder, colorectal,ovary,liver_bileduct,uterine

SEQ ID NO: 468132 - DNA, 675 bp, Homo sapiens; identical to SEQ ID NO: 352002
  chr17:64298985-64299660
  hypo
  lymphoid_neoplasm vs. renal,ovary,uterine,sarcoma, upper_gi

SEQ ID NO: 468133 - DNA, 205 bp, Homo sapiens; identical to SEQ ID NO: 454239
  chr17:68164928-68165133
  hypo
  lymphoid_neoplasm vs. renal

SEQ ID NO: 468134 - DNA, 205 bp, Homo sapiens; identical to SEQ ID NO: 454239
  chr17:68164928-68165133
  hypo
  lymphoid_neoplasm vs. renal,anorectal

SEQ ID NO: 468135 - DNA, 360 bp, Homo sapiens; identical to SEQ ID NO: 466647
  chr17:72449954-72450314
  hypo
  lymphoid_neoplasm vs. head_and_neck,pancreas_gallbladder, colorectal,myeloid_neoplasm,upper_gi,bladder_and_urothelial, sarcoma,prostate

SEQ ID NO: 468136 - DNA, 336 bp, Homo sapiens; identical to SEQ ID NO: 347467
  chr17:72450330-72450666
  hypo
  lymphoid_neoplasm vs. head_and_neck,pancreas_gallbladder, colorectal,myeloid_neoplasm,upper_gi,bladder_and_urothelial, sarcoma,prostate

SEQ ID NO: 468137 - DNA, 658 bp, Homo sapiens
  chr17:75206857-75207515
  hypo
  lymphoid_neoplasm vs. cervical,upper_gi,breast, bladder_and_urothelial,renal,thyroid,non_cancer,uterine, myeloid_neoplasm,colorectal,lung,prostate
cgctcttgtccatgtttcaagaacttggggtgcagtgtgtttcgtgtgaatcgggggcatctgtagacatccacatggtaaaaacctccgttctgctttgggtattaaataaagcacagatccgagatggcaacaaactgaaaggaaggctgaagcggaggcccccactgtgaatgcaggaaagaggttccgtcagcacagggggccgaggcctcaggatggagctgcctggggagccactttgctgaagagggggccgtgccacgtggtgccgcctgctgttcttagacaggacccttgtacctcactgaatctgctgtggaaggacattctgaagtggcgtttcagtggtgaggtggcagtggtgggattaaaggggcccggctcgtagagcagccacgcgctgaagggcacagcagacagcgtgcatgggctgagaggggccgtgggcctggctctgctgcttccttaggtggagttttcagtgactgcagaactctgcacagctgcttttcattctcacgtccgcccccgcccaatctttgaaactaactttgattattccctcctgggtagctctgtcggtgctgtgtaagtttggttttcaattggttctcagcacccagggggtgaccacctcaaccccatctctactatg

SEQ ID NO: 468138 - DNA, 88 bp, Homo sapiens
  chr17:75207630-75207718
  hypo
  lymphoid_neoplasm vs. cervical,upper_gi,breast, bladder_and_urothelial,renal,thyroid,non_cancer,uterine, myeloid_neoplasm,colorectal,lung,prostate
cccctgcctgctctttctttagctttcaccttctccagggccttctgttctgtccagcccagggcagtcctctgaaccactcatgtac

SEQ ID NO: 468139 - DNA, 136 bp, Homo sapiens
  chr17:75207379-75207515
  hypo
  lymphoid_neoplasm vs. upper_gi,bladder_and_urothelial, breast,renal,anorectal,non_cancer,uterine,thyroid,lung, colorectal,head_and_neck,myeloid_neoplasm,pancreas_gallbladder, cervical
cgtccgcccccgcccaatctttgaaactaactttgattattccctcctgggtagctctgtcggtgctgtgtaagtttggttttcaattggttctcagcacccagggggtgaccacctcaaccccatctctactatg

SEQ ID NO: 468140 - DNA, 210 bp, Homo sapiens
  chr17:75207630-75207840
  hypo
  lymphoid_neoplasm vs. upper_gi,bladder_and_urothelial, breast,renal,anorectal,non_cancer,uterine,thyroid,lung, colorectal,head_and_neck,myeloid_neoplasm,pancreas_gallbladder, cervical
cccctgcctgctctttctttagctttcaccttctccagggccttctgttctgtccagcccagggcagtcctctgaaccactcatgtacgagctcacagtgtttggtgtttctaagacctggcctcttagagtgtgtgtgaagatggtgtatgggagatcttggacctctaggtgcaggtcacaaagaacacagagcttggtgcatgacat

SEQ ID NO: 468141 - DNA, 328 bp, Homo sapiens; identical to SEQ ID NO: 346172
  chr17:75207987-75208315
  hypo
  lymphoid_neoplasm vs. upper_gi,bladder_and_urothelial, breast,renal,anorectal,non_cancer,uterine,thyroid,lung, colorectal,head_and_neck,myeloid_neoplasm,pancreas_gallbladder, cervical

SEQ ID NO: 468142 - DNA, 282 bp, Homo sapiens; identical to SEQ ID NO: 343151
  chr17:76167747-76168029
  hypo
  lymphoid_neoplasm vs. bladder_and_urothelial,anorectal, upper_gi,non_cancer,uterine,breast,prostate,lung, myeloid_neoplasm,renal,liver_bileduct,ovary

SEQ ID NO: 468143 - DNA, 42 bp, Homo sapiens; identical to SEQ ID NO: 464314
  chr17:77788305-77788347
  hypo
  lymphoid_neoplasm vs. anorectal,myeloid_neoplasm

SEQ ID NO: 468144 - DNA, 234 bp, Homo sapiens; identical to SEQ ID NO: 464315
  chr17:77788400-77788634
  hypo
  lymphoid_neoplasm vs. anorectal,myeloid_neoplasm

SEQ ID NO: 468145 - DNA, 754 bp, Homo sapiens; identical to SEQ ID NO: 466655
  chr17:79008842-79009596
  hypo
  lymphoid_neoplasm vs. pancreas_gallbladder,lung,ovary, uterine,colorectal,breast,upper_gi,prostate,cervical,anorectal, renal,non_cancer

SEQ ID NO: 468146 - DNA, 620 bp, Homo sapiens; identical to SEQ ID NO: 466659
  chr17:80655727-80656347
  hypo
  lymphoid_neoplasm vs. upper_gi,colorectal

SEQ ID NO: 468147 - DNA, 991 bp, Homo sapiens; identical to SEQ ID NO: 466660
  chr17:80655854-80656845
  hypo
  lymphoid_neoplasm vs. colorectal

SEQ ID NO: 468148 - DNA, 340 bp, Homo sapiens; identical to SEQ ID NO: 466661
  chr17:80692978-80693318
  hypo
  lymphoid_neoplasm vs. liver_bileduct

SEQ ID NO: 468149 - DNA, 285 bp, Homo sapiens; identical to SEQ ID NO: 374309
  chr17:80693554-80693839
  hypo
  lymphoid_neoplasm vs. liver_bileduct

SEQ ID NO: 468150 - DNA, 443 bp, Homo sapiens; identical to SEQ ID NO: 361178
  chr17:81036717-81037160
  hypo
  lymphoid_neoplasm vs. pancreas_gallbladder,lung

SEQ ID NO: 468151 - DNA, 763 bp, Homo sapiens; identical to SEQ ID NO: 466665
  chr18:811501-812264
  hypo
  lymphoid_neoplasm vs. upper_gi,head_and_neck, pancreas_gallbladder,lung,sarcoma,ovary,bladder_and_urothelial, uterine,breast,renal

SEQ ID NO: 468152 - DNA, 919 bp, Homo sapiens; identical to SEQ ID NO: 466666
  chr18:811789-812708
  hypo
  lymphoid_neoplasm vs. upper_gi,bladder_and_urothelial, head_and_neck,lung,pancreas_gallbladder,ovary,breast,prostate, colorectal,renal

SEQ ID NO: 468153 - DNA, 529 bp, Homo sapiens; identical to SEQ ID NO: 466667
  chr18:812288-812817
  hypo
  lymphoid_neoplasm vs. colorectal,head_and_neck,upper_gi, breast,lung,anorectal,pancreas_gallbladder

SEQ ID NO: 468154 - DNA, 190 bp, Homo sapiens; identical to SEQ ID NO: 347475
  chr18:812869-813059
  hypo
  lymphoid_neoplasm vs. colorectal,head_and_neck,upper_gi, breast,lung,anorectal,pancreas_gallbladder

SEQ ID NO: 468155 - DNA, 6 bp, Homo sapiens
  chr18:7116852-7116858
  hypo
  lymphoid_neoplasm vs. prostate
cgcccg

SEQ ID NO: 468156 - DNA, 26 bp, Homo sapiens
  chr18:7566557-7566583
  hypo
  lymphoid_neoplasm vs. renal,sarcoma,myeloid_neoplasm, liver_bileduct,thyroid,lung,bladder_and_urothelial
cgccttccgtgtactgcctgcggctc

SEQ ID NO: 468157 - DNA, 217 bp, Homo sapiens; identical to SEQ ID NO: 466675
  chr18:7566793-7567010
  hypo
  lymphoid_neoplasm vs. renal,sarcoma,myeloid_neoplasm, liver_bileduct,thyroid,lung,bladder_and_urothelial

SEQ ID NO: 468158 - DNA, 137 bp, Homo sapiens; identical to SEQ ID NO: 466676
  chr18:7567335-7567472
  hypo
  lymphoid_neoplasm vs. renal,sarcoma,myeloid_neoplasm, liver_bileduct,thyroid,lung,bladder_and_urothelial

SEQ ID NO: 468159 - DNA, 22 bp, Homo sapiens
  chr18:7566988-7567010
  hypo
  lymphoid_neoplasm vs. renal,melanoma,lung, myeloid_neoplasm,prostate,sarcoma,uterine,thyroid,non_cancer, anorectal
cgcggctcgtgacccgggacaa

SEQ ID NO: 468160 - DNA, 416 bp, Homo sapiens; identical to SEQ ID NO: 466678
  chr18:7567335-7567751
  hypo
  lymphoid_neoplasm vs. renal,melanoma,lung, myeloid_neoplasm,prostate,sarcoma,uterine,thyroid,non_cancer, anorectal

SEQ ID NO: 468161 - DNA, 273 bp, Homo sapiens; identical to SEQ ID NO: 459494
  chr18:7567478-7567751
  hypo
  lymphoid_neoplasm vs. liver_bileduct,renal, bladder_and_urothelial

SEQ ID NO: 468162 - DNA, 105 bp, Homo sapiens; identical to SEQ ID NO: 352078
  chr18:25756986-25757091
  hypo
  lymphoid_neoplasm vs. melanoma

SEQ ID NO: 468163 - DNA, 42 bp, Homo sapiens; identical to SEQ ID NO: 452945
  chr18:25757146-25757188
  hypo
  lymphoid_neoplasm vs. liver_bileduct

SEQ ID NO: 468164 - DNA, 201 bp, Homo sapiens; identical to SEQ ID NO: 466718
  chr18:31803102-31803303
  hypo
  lymphoid_neoplasm vs. prostate,bladder_and_urothelial

SEQ ID NO: 468165 - DNA, 412 bp, Homo sapiens; identical to SEQ ID NO: 466721
  chr18:35146241-35146653
  hypo
  lymphoid_neoplasm vs. multiple_myeloma

SEQ ID NO: 468166 - DNA, 190 bp, Homo sapiens; identical to SEQ ID NO: 361257
  chr18:43914608-43914798
  hypo
  lymphoid_neoplasm vs. bladder_and_urothelial,sarcoma, anorectal

SEQ ID NO: 468167 - DNA, 275 bp, Homo sapiens; identical to SEQ ID NO: 466723
  chr18:43914608-43914883
  hypo
  lymphoid_neoplasm vs. head_and_neck

SEQ ID NO: 468168 - DNA, 796 bp, Homo sapiens; identical to SEQ ID NO: 335809
  chr18:45687770-45688566
  hypo
  lymphoid_neoplasm vs. liver_bileduct,head_and_neck, breast,upper_gi,lung,anorectal

SEQ ID NO: 468169 - DNA, 165 bp, Homo sapiens; identical to SEQ ID NO: 466732
  chr18:45934609-45934774
  hypo
  lymphoid_neoplasm vs. pancreas_gallbladder,lung

SEQ ID NO: 468170 - DNA, 222 bp, Homo sapiens; identical to SEQ ID NO: 466733
  chr18:45934810-45935032
  hypo
  lymphoid_neoplasm vs. pancreas_gallbladder,lung

SEQ ID NO: 468171 - DNA, 144 bp, Homo sapiens; identical to SEQ ID NO: 466734
  chr18:45935196-45935340
  hypo
  lymphoid_neoplasm vs. pancreas_gallbladder,lung

SEQ ID NO: 468172 - DNA, 155 bp, Homo sapiens; identical to SEQ ID NO: 466735
  chr18:45934877-45935032
  hypo
  lymphoid_neoplasm vs. lung,ovary,anorectal,breast, pancreas_gallbladder

SEQ ID NO: 468173 - DNA, 660 bp, Homo sapiens; identical to SEQ ID NO: 352093
  chr18:45935196-45935856
  hypo
  lymphoid_neoplasm vs. lung,ovary,anorectal,breast, pancreas_gallbladder

SEQ ID NO: 468174 - DNA, 994 bp, Homo sapiens; identical to SEQ ID NO: 466737
  chr18:45935359-45936353
  hypo
  lymphoid_neoplasm vs. pancreas_gallbladder, bladder_and_urothelial,uterine

SEQ ID NO: 468175 - DNA, 994 bp, Homo sapiens; identical to SEQ ID NO: 466738
  chr18:45935857-45936851
  hypo
  lymphoid_neoplasm vs. pancreas_gallbladder,anorectal, breast,head_and_neck,uterine,colorectal,ovary

SEQ ID NO: 468176 - DNA, 725 bp, Homo sapiens; identical to SEQ ID NO: 466739
  chr18:45936357-45937082
  hypo
  lymphoid_neoplasm vs. anorectal,head_and_neck,cervical, breast,colorectal,uterine,ovary,pancreas_gallbladder,prostate, non_cancer,lung,renal,upper_gi

SEQ ID NO: 468177 - DNA, 436 bp, Homo sapiens; identical to SEQ ID NO: 347511
  chr18:47720908-47721344
  hypo
  lymphoid_neoplasm vs. uterine,pancreas_gallbladder, head_and_neck,breast,liver_bileduct

SEQ ID NO: 468178 - DNA, 831 bp, Homo sapiens; identical to SEQ ID NO: 374432
  chr18:47720908-47721739
  hypo
  lymphoid_neoplasm vs. head_and_neck

SEQ ID NO: 468179 - DNA, 513 bp, Homo sapiens; identical to SEQ ID NO: 367726
  chr19:899625-900138
  hypo
  lymphoid_neoplasm vs. bladder_and_urothelial,cervical, liver_bileduct

SEQ ID NO: 468180 - DNA, 250 bp, Homo sapiens; identical to SEQ ID NO: 466775
  chr19:1491131-1491381
  hypo
  lymphoid_neoplasm vs. ovary,liver_bileduct,renal

SEQ ID NO: 468181 - DNA, 281 bp, Homo sapiens; identical to SEQ ID NO: 466780
  chr19:1748599-1748880
  hypo
  lymphoid_neoplasm vs. multiple_myeloma, pancreas_gallbladder,prostate,anorectal

SEQ ID NO: 468182 - DNA, 350 bp, Homo sapiens; identical to SEQ ID NO: 466781
  chr19:1748939-1749289
  hypo
  lymphoid_neoplasm vs. multiple_myeloma, pancreas_gallbladder,prostate,anorectal

SEQ ID NO: 468183 - DNA, 70 bp, Homo sapiens; identical to SEQ ID NO: 352140
  chr19:1749318-1749388
  hypo
  lymphoid_neoplasm vs. multiple_myeloma, pancreas_gallbladder,prostate,anorectal

SEQ ID NO: 468184 - DNA, 350 bp, Homo sapiens; identical to SEQ ID NO: 466781
  chr19:1748939-1749289
  hypo
  lymphoid_neoplasm vs. melanoma,sarcoma

SEQ ID NO: 468185 - DNA, 201 bp, Homo sapiens; identical to SEQ ID NO: 466784
  chr19:1749318-1749519
  hypo
  lymphoid_neoplasm vs. melanoma,sarcoma

SEQ ID NO: 468186 - DNA, 221 bp, Homo sapiens; identical to SEQ ID NO: 466785
  chr19:1749556-1749777
  hypo
  lymphoid_neoplasm vs. melanoma,sarcoma

SEQ ID NO: 468187 - DNA, 123 bp, Homo sapiens; identical to SEQ ID NO: 466786
  chr19:1749396-1749519
  hypo
  lymphoid_neoplasm vs. upper_gi,myeloid_neoplasm, pancreas_gallbladder

SEQ ID NO: 468188 - DNA, 221 bp, Homo sapiens; identical to SEQ ID NO: 466785
  chr19:1749556-1749777
  hypo
  lymphoid_neoplasm vs. upper_gi,myeloid_neoplasm, pancreas_gallbladder

SEQ ID NO: 468189 - DNA, 197 bp, Homo sapiens; identical to SEQ ID NO: 361357
  chr19:1754950-1755147
  hypo
  lymphoid_neoplasm vs. myeloid_neoplasm,thyroid,upper_gi, cervical,non_cancer

SEQ ID NO: 468190 - DNA, 228 bp, Homo sapiens; identical to SEQ ID NO: 466790
  chr19:1754950-1755178
  hypo
  lymphoid_neoplasm vs. ovary

SEQ ID NO: 468191 - DNA, 378 bp, Homo sapiens; identical to SEQ ID NO: 293287
  chr19:1755227-1755605
  hypo
  lymphoid_neoplasm vs. ovary

SEQ ID NO: 468192 - DNA, 107 bp, Homo sapiens; identical to SEQ ID NO: 335912
  chr19:4432865-4432972
  hypo
  lymphoid_neoplasm vs. cervical,liver_bileduct,upper_gi, renal,breast

SEQ ID NO: 468193 - DNA, 146 bp, Homo sapiens; identical to SEQ ID NO: 335953
  chr19:11466008-11466154
  hypo
  lymphoid_neoplasm vs. melanoma,bladder_and_urothelial, lung,renal,upper_gi,anorectal,pancreas_gallbladder,uterine, non_cancer,cervical,breast,thyroid,prostate,myeloid_neoplasm

SEQ ID NO: 468194 - DNA, 301 bp, Homo sapiens; identical to SEQ ID NO: 466799
  chr19:11590392-11590693
  hypo
  lymphoid_neoplasm vs. ovary,anorectal

SEQ ID NO: 468195 - DNA, 37 bp, Homo sapiens; identical to SEQ ID NO: 466802
  chr19:19383975-19384012
  hypo
  lymphoid_neoplasm vs. colorectal

SEQ ID NO: 468196 - DNA, 61 bp, Homo sapiens; identical to SEQ ID NO: 455841
  chr19:30718934-30718995
  hypo
  lymphoid_neoplasm vs. non_cancer,thyroid,melanoma, prostate

SEQ ID NO: 468197 - DNA, 61 bp, Homo sapiens; identical to SEQ ID NO: 455841
  chr19:30718934-30718995
  hypo
  lymphoid_neoplasm vs. thyroid,prostate,non_cancer, melanoma,renal,myeloid_neoplasm,uterine

SEQ ID NO: 468198 - DNA, 59 bp, Homo sapiens; identical to SEQ ID NO: 462632
  chr19:31839508-31839567
  hypo
  lymphoid_neoplasm vs. sarcoma,anorectal

SEQ ID NO: 468199 - DNA, 234 bp, Homo sapiens; identical to SEQ ID NO: 466807
  chr19:31841177-31841411
  hypo
  lymphoid_neoplasm vs. prostate,bladder_and_urothelial, non_cancer,myeloid_neoplasm,ovary

SEQ ID NO: 468200 - DNA, 234 bp, Homo sapiens; identical to SEQ ID NO: 466807
  chr19:31841177-31841411
  hypo
  lymphoid_neoplasm vs. thyroid,prostate,non_cancer,renal, cervical

SEQ ID NO: 468201 - DNA, 326 bp, Homo sapiens; identical to SEQ ID NO: 466809
  chr19:31841583-31841909
  hypo
  lymphoid_neoplasm vs. thyroid,prostate,non_cancer,renal, cervical

SEQ ID NO: 468202 - DNA, 326 bp, Homo sapiens; identical to SEQ ID NO: 466809
  chr19:31841583-31841909
  hypo
  lymphoid_neoplasm vs. thyroid,prostate,non_cancer, cervical

SEQ ID NO: 468203 - DNA, 299 bp, Homo sapiens; identical to SEQ ID NO: 466814
  chr19:33791861-33792160
  hypo
  lymphoid_neoplasm vs. pancreas_gallbladder,breast, anorectal,head_and_neck,non_cancer,upper_gi,thyroid, myeloid_neoplasm,uterine

SEQ ID NO: 468204 - DNA, 197 bp, Homo sapiens; identical to SEQ ID NO: 466815
  chr19:33792630-33792827
  hypo
  lymphoid_neoplasm vs. pancreas_gallbladder,breast, anorectal,head_and_neck,non_cancer,upper_gi,thyroid, myeloid_neoplasm,uterine

SEQ ID NO: 468205 - DNA, 710 bp, Homo sapiens; identical to SEQ ID NO: 466816
  chr19:33792630-33793340
  hypo
  lymphoid_neoplasm vs. pancreas_gallbladder,head_and_neck, anorectal,colorectal,uterine,breast,ovary,myeloid_neoplasm,lung, non_cancer,thyroid

SEQ ID NO: 468206 - DNA, 974 bp, Homo sapiens; identical to SEQ ID NO: 466817
  chr19:33792849-33793823
  hypo
  lymphoid_neoplasm vs. uterine,breast,colorectal,cervical, thyroid,pancreas_gallbladder,upper_gi,ovary

SEQ ID NO: 468207 - DNA, 530 bp, Homo sapiens; identical to SEQ ID NO: 466818
  chr19:33793347-33793877
  hypo
  lymphoid_neoplasm vs. pancreas_gallbladder,uterine, breast,ovary,upper_gi,lung

SEQ ID NO: 468208 - DNA, 49 bp, Homo sapiens; identical to SEQ ID NO: 352281
  chr19:34114303-34114352
  hypo
  lymphoid_neoplasm vs. prostate

SEQ ID NO: 468209 - DNA, 725 bp, Homo sapiens; identical to SEQ ID NO: 466831
  chr19:45349502-45350227
  hypo
  lymphoid_neoplasm vs. cervical,upper_gi,colorectal, head_and_neck,liver_bileduct,myeloid_neoplasm,breast,sarcoma, lung,prostate,pancreas_gallbladder

SEQ ID NO: 468210 - DNA, 749 bp, Homo sapiens; identical to SEQ ID NO: 466832
  chr19:45349755-45350504
  hypo
  lymphoid_neoplasm vs. upper_gi,colorectal,lung,breast, liver_bileduct,myeloid_neoplasm,head_and_neck,uterine,sarcoma

SEQ ID NO: 468211 - DNA, 140 bp, Homo sapiens; identical to SEQ ID NO: 466834
  chr19:46931914-46932054
  hypo
  lymphoid_neoplasm vs. myeloid_neoplasm,non_cancer, cervical

SEQ ID NO: 468212 - DNA, 12 bp, Homo sapiens
  chr19:46932336-46932348
  hypo
  lymphoid_neoplasm vs. myeloid_neoplasm,non_cancer, cervical
agaagcgcccgc

SEQ ID NO: 468213 - DNA, 453 bp, Homo sapiens; identical to SEQ ID NO: 344024
  chr19:47223627-47224080
  hypo
  lymphoid_neoplasm vs. sarcoma

SEQ ID NO: 468214 - DNA, 18 bp, Homo sapiens
  chr19:49242357-49242375
  hypo
  lymphoid_neoplasm vs. ovary
cgcgcaggtgctccgccc

SEQ ID NO: 468215 - DNA, 142 bp, Homo sapiens; identical to SEQ ID NO: 459532
  chr19:49242393-49242535
  hypo
  lymphoid_neoplasm vs. ovary

SEQ ID NO: 468216 - DNA, 36 bp, Homo sapiens; identical to SEQ ID NO: 459533
  chr19:49242773-49242809
  hypo
  lymphoid_neoplasm vs. ovary

SEQ ID NO: 468217 - DNA, 19 bp, Homo sapiens
  chr19:49242911-49242930
  hypo
  lymphoid_neoplasm vs. ovary
cgccggggaacagagtcgc

SEQ ID NO: 468218 - DNA, 435 bp, Homo sapiens; identical to SEQ ID NO: 336213
  chr19:49660929-49661364
  hypo
  lymphoid_neoplasm vs. liver_bileduct

SEQ ID NO: 468219 - DNA, 177 bp, Homo sapiens
  chr19:50919593-50919770
  hypo
  lymphoid_neoplasm vs. cervical,non_cancer,anorectal, prostate,breast
cgtgtccaccccggtgccctttccctggctgcccgggtgtgactgccatgtggccgcaggacccgctgttcgtgctggagcacagcctgcccattgacacgcagtactacctggagcagcagctggccaagcccctcctgcgcatcttcgagcccatcctgggcgagggccgtgccg

SEQ ID NO: 468220 - DNA, 3 bp, Homo sapiens
  chr19:51830757-51830760
  hypo
  lymphoid_neoplasm vs. multiple_myeloma
cga

SEQ ID NO: 468221 - DNA, 85 bp, Homo sapiens; identical to SEQ ID NO: 457790
  chr19:54412564-54412649
  hypo
  lymphoid_neoplasm vs. multiple_myeloma

SEQ ID NO: 468222 - DNA, 412 bp, Homo sapiens; identical to SEQ ID NO: 361743
  chr19:55866046-55866458
  hypo
  lymphoid_neoplasm vs. cervical,head_and_neck

SEQ ID NO: 468223 - DNA, 271 bp, Homo sapiens; identical to SEQ ID NO: 466865
  chr2:7005163-7005434
  hypo
  lymphoid_neoplasm vs. upper_gi,thyroid

SEQ ID NO: 468224 - DNA, 460 bp, Homo sapiens; identical to SEQ ID NO: 466866
  chr2:7005469-7005929
  hypo
  lymphoid_neoplasm vs. upper_gi,thyroid

SEQ ID NO: 468225 - DNA, 728 bp, Homo sapiens; identical to SEQ ID NO: 349448
  chr2:7005469-7006197
  hypo
  lymphoid_neoplasm vs. upper_gi,uterine,myeloid_neoplasm, non_cancer

SEQ ID NO: 468226 - DNA, 292 bp, Homo sapiens; identical to SEQ ID NO: 466868
  chr2:7057762-7058054
  hypo
  lymphoid_neoplasm vs. myeloid_neoplasm,prostate,melanoma, thyroid,sarcoma,renal,breast,ovary,anorectal,uterine,non_cancer, cervical,head_and_neck,bladder_and_urothelial,lung, multiple_myeloma,liver_bileduct

SEQ ID NO: 468227 - DNA, 12 bp, Homo sapiens
  chr2:7058378-7058390
  hypo
  lymphoid_neoplasm vs. myeloid_neoplasm,prostate,melanoma, thyroid,sarcoma,renal,breast,ovary,anorectal,uterine,non_cancer, cervical,head_and_neck,bladder_and_urothelial,lung, multiple_myeloma,liver_bileduct
cgcccgagcccc

SEQ ID NO: 468228 - DNA, 40 bp, Homo sapiens; identical to SEQ ID NO: 466870
  chr2:7058392-7058432
  hypo
  lymphoid_neoplasm vs. myeloid_neoplasm,prostate,melanoma, thyroid,sarcoma,renal,breast,ovary,anorectal,uterine,non_cancer, cervical,head_and_neck,bladder_and_urothelial,lung, multiple_myeloma,liver_bileduct

SEQ ID NO: 468229 - DNA, 202 bp, Homo sapiens; identical to SEQ ID NO: 466871
  chr2:10183602-10183804
  hypo
  lymphoid_neoplasm vs. head_and_neck,pancreas_gallbladder, liver_bileduct

SEQ ID NO: 468230 - DNA, 439 bp, Homo sapiens; identical to SEQ ID NO: 357085
  chr2:10183814-10184253
  hypo
  lymphoid_neoplasm vs. head_and_neck,pancreas_gallbladder, liver_bileduct

SEQ ID NO: 468231 - DNA, 203 bp, Homo sapiens; identical to SEQ ID NO: 337540
  chr2:10517952-10518155
  hypo
  lymphoid_neoplasm vs. liver_bileduct

SEQ ID NO: 468232 - DNA, 135 bp, Homo sapiens; identical to SEQ ID NO: 466879
  chr2:14774684-14774819
  hypo
  lymphoid_neoplasm vs. head_and_neck

SEQ ID NO: 468233 - DNA, 256 bp, Homo sapiens; identical to SEQ ID NO: 466880
  chr2:14774684-14774940
  hypo
  lymphoid_neoplasm vs. head_and_neck,breast,colorectal, upper_gi

SEQ ID NO: 468234 - DNA, 416 bp, Homo sapiens; identical to SEQ ID NO: 466890
  chr2:42274691-42275107
  hypo
  lymphoid_neoplasm vs. upper_gi

SEQ ID NO: 468235 - DNA, 904 bp, Homo sapiens; identical to SEQ ID NO: 466891
  chr2:42274691-42275595
  hypo
  lymphoid_neoplasm vs. head_and_neck,upper_gi

SEQ ID NO: 468236 - DNA, 665 bp, Homo sapiens; identical to SEQ ID NO: 466892
  chr2:42275112-42275777
  hypo

SEQ ID NO: 468237 - DNA, 951 bp, Homo sapiens; identical to SEQ ID NO: 331322
  chr2:66660936-66661887
  hypo
  lymphoid_neoplasm vs. liver_bileduct

SEQ ID NO: 468238 - DNA, 128 bp, Homo sapiens; identical to SEQ ID NO: 466911
  chr2:72374248-72374376
  hypo
  lymphoid_neoplasm vs. multiple_myeloma,head_and_neck, anorectal,ovary

SEQ ID NO: 468239 - DNA, 259 bp, Homo sapiens; identical to SEQ ID NO: 345015
  chr2:72374932-72375191
  hypo
  lymphoid_neoplasm vs. multiple_myeloma,head_and_neck, anorectal,ovary

SEQ ID NO: 468240 - DNA, 410 bp, Homo sapiens; identical to SEQ ID NO: 466924
  chr2:96011863-96012273
  hypo
  lymphoid_neoplasm vs. liver_bileduct,head_and_neck

SEQ ID NO: 468241 - DNA, 579 bp, Homo sapiens; identical to SEQ ID NO: 466925
  chr2:96011863-96012442
  hypo
  lymphoid_neoplasm vs. head_and_neck,pancreas_gallbladder, ovary,sarcoma,breast,bladder_and_urothelial,prostate,anorectal, renal,uterine,thyroid,upper_gi,myeloid_neoplasm,non_cancer

SEQ ID NO: 468242 - DNA, 48 bp, Homo sapiens; identical to SEQ ID NO: 346460
  chr2:96012683-96012731
  hypo
  lymphoid_neoplasm vs. head_and_neck,pancreas_gallbladder, ovary,sarcoma,breast,bladder_and_urothelial,prostate,anorectal, renal,uterine,thyroid,upper_gi,myeloid_neoplasm,non_cancer

SEQ ID NO: 468243 - DNA, 519 bp, Homo sapiens; identical to SEQ ID NO: 331387
  chr2:102758965-102759484
  hypo
  lymphoid_neoplasm vs. bladder_and_urothelial,renal, prostate,colorectal

SEQ ID NO: 468244 - DNA, 294 bp, Homo sapiens; identical to SEQ ID NO: 466948
  chr2:111490023-111490317
  hypo
  lymphoid_neoplasm vs. uterine

SEQ ID NO: 468245 - DNA, 171 bp, Homo sapiens; identical to SEQ ID NO: 369707
  chr2:111490689-111490860
  hypo
  lymphoid_neoplasm vs. uterine

SEQ ID NO: 468246 - DNA, 61 bp, Homo sapiens; identical to SEQ ID NO: 466964
  chr2:137523039-137523100
  hypo
  lymphoid_neoplasm vs. multiple_myeloma

SEQ ID NO: 468247 - DNA, 699 bp, Homo sapiens; identical to SEQ ID NO: 280266
  chr2:150186988-150187687
  hypo
  lymphoid_neoplasm vs. upper_gi

SEQ ID NO: 468248 - DNA, 877 bp, Homo sapiens; identical to SEQ ID NO: 466974
  chr2:159313069-159313946
  hypo
  lymphoid_neoplasm vs. lung,upper_gi,pancreas_gallbladder, sarcoma,breast,anorectal,prostate,uterine,renal,head_and_neck, myeloid_neoplasm,colorectal,non_cancer,liver_bileduct

SEQ ID NO: 468249 - DNA, 988 bp, Homo sapiens; identical to SEQ ID NO: 466975
  chr2:159313477-159314465
  hypo
  lymphoid_neoplasm vs. upper_gi,lung,anorectal,uterine, myeloid_neoplasm,prostate,thyroid,breast,colorectal, head_and_neck,pancreas_gallbladder

SEQ ID NO: 468250 - DNA, 904 bp, Homo sapiens; identical to SEQ ID NO: 345046
  chr2:159313976-159314880
  hypo
  lymphoid_neoplasm vs. myeloid_neoplasm, bladder_and_urothelial,pancreas_gallbladder,upper_gi, head_and_neck,uterine,lung,anorectal,non_cancer,breast, liver_bileduct,prostate,thyroid,renal,sarcoma,colorectal,ovary,
  CONT. FROM ABOVE: cervical

SEQ ID NO: 468251 - DNA, 402 bp, Homo sapiens; identical to SEQ ID NO: 466977
  chr2:169312417-169312819
  hypo
  lymphoid_neoplasm vs. sarcoma,pancreas_gallbladder, upper_gi,liver_bileduct,uterine,lung,renal,breast,cervical, non_cancer,colorectal,anorectal

SEQ ID NO: 468252 - DNA, 461 bp, Homo sapiens; identical to SEQ ID NO: 466978
  chr2:169312881-169313342
  hypo
  lymphoid_neoplasm vs. sarcoma,pancreas_gallbladder, upper_gi,liver_bileduct,uterine,lung,renal,breast,cervical, non_cancer,colorectal,anorectal

SEQ ID NO: 468253 - DNA, 904 bp, Homo sapiens; identical to SEQ ID NO: 349616
  chr2:169312881-169313785
  hypo
  lymphoid_neoplasm vs. renal,pancreas_gallbladder,sarcoma, upper_gi,thyroid,uterine,breast

SEQ ID NO: 468254 - DNA, 220 bp, Homo sapiens; identical to SEQ ID NO: 466996
  chr2:177052744-177052964
  hypo
  lymphoid_neoplasm vs. renal

SEQ ID NO: 468255 - DNA, 91 bp, Homo sapiens; identical to SEQ ID NO: 466998
  chr2:183902312-183902403
  hypo
  lymphoid_neoplasm vs. head_and_neck,cervical,colorectal, ovary,breast,renal,upper_gi,pancreas_gallbladder,anorectal, non_cancer,liver_bileduct,prostate,melanoma,lung, bladder_and_urothelial,uterine

SEQ ID NO: 468256 - DNA, 569 bp, Homo sapiens; identical to SEQ ID NO: 466999
  chr2:183902442-183903011
  hypo
  lymphoid_neoplasm vs. head_and_neck,cervical,colorectal, ovary,breast,renal,upper_gi,pancreas_gallbladder,anorectal, non_cancer,liver_bileduct,prostate,melanoma,lung, bladder_and_urothelial,uterine

SEQ ID NO: 468257 - DNA, 176 bp, Homo sapiens; identical to SEQ ID NO: 345057
  chr2:183903037-183903213
  hypo
  lymphoid_neoplasm vs. head_and_neck,cervical,colorectal, ovary,breast,renal,upper_gi,pancreas_gallbladder,anorectal, non_cancer,liver_bileduct,prostate,melanoma,lung, bladder_and_urothelial,uterine

SEQ ID NO: 468258 - DNA, 273 bp, Homo sapiens; identical to SEQ ID NO: 467001
  chr2:183902738-183903011
  hypo
  lymphoid_neoplasm vs. melanoma,anorectal,liver_bileduct, head_and_neck,thyroid,colorectal,breast,uterine,non_cancer, cervical,ovary,renal,bladder_and_urothelial, pancreas_gallbladder,lung

SEQ ID NO: 468259 - DNA, 587 bp, Homo sapiens; identical to SEQ ID NO: 346507
  chr2:183903037-183903624
  hypo
  lymphoid_neoplasm vs. melanoma,anorectal,liver_bileduct, head_and_neck,thyroid,colorectal,breast,uterine,non_cancer, cervical,ovary,renal,bladder_and_urothelial, pancreas_gallbladder,lung

SEQ ID NO: 468260 - DNA, 448 bp, Homo sapiens; identical to SEQ ID NO: 467007
  chr2:192109730-192110178
  hypo
  lymphoid_neoplasm vs. anorectal,melanoma,breast, pancreas_gallbladder,sarcoma,prostate,colorectal,ovary,uterine, liver_bileduct,renal,thyroid,non_cancer,bladder_and_urothelial, lung,upper_gi,cervical,myeloid_neoplasm

SEQ ID NO: 468261 - DNA, 254 bp, Homo sapiens; identical to SEQ ID NO: 467008
  chr2:192110303-192110557
  hypo
  lymphoid_neoplasm vs. anorectal,melanoma,breast, pancreas_gallbladder,sarcoma,prostate,colorectal,ovary,uterine, liver_bileduct,renal,thyroid,non_cancer,bladder_and_urothelial, lung,upper_gi,cervical,myeloid_neoplasm

SEQ ID NO: 468262 - DNA, 1 bp, Homo sapiens
  chr2:192110584-192110585
  hypo
  lymphoid_neoplasm vs. anorectal,melanoma,breast, pancreas_gallbladder,sarcoma,prostate,colorectal,ovary,uterine, liver_bileduct,renal,thyroid,non_cancer,bladder_and_urothelial, lung,upper_gi,cervical,myeloid_neoplasm
c

SEQ ID NO: 468263 - DNA, 41 bp, Homo sapiens; identical to SEQ ID NO: 467010
  chr2:192110137-192110178
  hypo
  lymphoid_neoplasm vs. liver_bileduct,breast,sarcoma, anorectal,melanoma,prostate,pancreas_gallbladder,renal, colorectal,non_cancer,bladder_and_urothelial,ovary,thyroid,lung, upper_gi,uterine,myeloid_neoplasm,cervical,multiple_myeloma

SEQ ID NO: 468264 - DNA, 254 bp, Homo sapiens; identical to SEQ ID NO: 467008
  chr2:192110303-192110557
  hypo
  lymphoid_neoplasm vs. liver_bileduct,breast,sarcoma, anorectal,melanoma,prostate,pancreas_gallbladder,renal, colorectal,non_cancer,bladder_and_urothelial,ovary,thyroid,lung, upper_gi,uterine,myeloid_neoplasm,cervical,multiple_myeloma

SEQ ID NO: 468265 - DNA, 439 bp, Homo sapiens; identical to SEQ ID NO: 345062
  chr2:192110584-192111023
  hypo
  lymphoid_neoplasm vs. liver_bileduct,breast,sarcoma, anorectal,melanoma,prostate,pancreas_gallbladder,renal, colorectal,non_cancer,bladder_and_urothelial,ovary,thyroid,lung, upper_gi,uterine,myeloid_neoplasm,cervical,multiple_myeloma

SEQ ID NO: 468266 - DNA, 62 bp, Homo sapiens; identical to SEQ ID NO: 357429
  chr2:200322611-200322673
  hypo
  lymphoid_neoplasm vs. liver_bileduct

SEQ ID NO: 468267 - DNA, 82 bp, Homo sapiens; identical to SEQ ID NO: 467028
  chr2:220435308-220435390
  hypo
  lymphoid_neoplasm vs. liver_bileduct,head_and_neck, cervical,bladder_and_urothelial

SEQ ID NO: 468268 - DNA, 379 bp, Homo sapiens; identical to SEQ ID NO: 467032
  chr2:222436961-222437340
  hypo
  lymphoid_neoplasm vs. thyroid,non_cancer, myeloid_neoplasm,pancreas_gallbladder,bladder_and_urothelial, uterine,renal,lung,ovary,prostate

SEQ ID NO: 468269 - DNA, 407 bp, Homo sapiens; identical to SEQ ID NO: 467033
  chr2:222436961-222437368
  hypo
  lymphoid_neoplasm vs. multiple_myeloma, pancreas_gallbladder,prostate,head_and_neck,non_cancer,thyroid, uterine,myeloid_neoplasm,sarcoma,renal,lung,breast,ovary

SEQ ID NO: 468270 - DNA, 415 bp, Homo sapiens; identical to SEQ ID NO: 345066
  chr2:222437421-222437836
  hypo
  lymphoid_neoplasm vs. multiple_myeloma, pancreas_gallbladder,prostate,head_and_neck,non_cancer,thyroid, uterine,myeloid_neoplasm,sarcoma,renal,lung,breast,ovary

SEQ ID NO: 468271 - DNA, 806 bp, Homo sapiens; identical to SEQ ID NO: 346522
  chr2:222437421-222438227
  hypo
  lymphoid_neoplasm vs. multiple_myeloma,uterine

SEQ ID NO: 468272 - DNA, 441 bp, Homo sapiens; identical to SEQ ID NO: 331646
  chr2:231902096-231902537
  hypo
  lymphoid_neoplasm vs. liver_bileduct

SEQ ID NO: 468273 - DNA, 340 bp, Homo sapiens; identical to SEQ ID NO: 467037
  chr2:233497841-233498181
  hypo
  lymphoid_neoplasm vs. cervical

SEQ ID NO: 468274 - DNA, 104 bp, Homo sapiens; identical to SEQ ID NO: 467038
  chr2:233498077-233498181
  hypo
  lymphoid_neoplasm vs. ovary

SEQ ID NO: 468275 - DNA, 593 bp, Homo sapiens; identical to SEQ ID NO: 467041
  chr2:235860154-235860747
  hypo
  lymphoid_neoplasm vs. head_and_neck,pancreas_gallbladder, bladder_and_urothelial,colorectal,breast,cervical,prostate, myeloid_neoplasm,lung

SEQ ID NO: 468276 - DNA, 439 bp, Homo sapiens; identical to SEQ ID NO: 467042
  chr2:235860308-235860747
  hypo
  lymphoid_neoplasm vs. pancreas_gallbladder,colorectal, breast,melanoma,upper_gi,liver_bileduct,uterine,prostate, head_and_neck,lung,anorectal,bladder_and_urothelial,ovary

SEQ ID NO: 468277 - DNA, 298 bp, Homo sapiens; identical to SEQ ID NO: 467048
  chr2:236402404-236402702
  hypo
  lymphoid_neoplasm vs. cervical,upper_gi,colorectal, prostate,lung,melanoma,renal,bladder_and_urothelial,ovary, uterine,breast,sarcoma,anorectal,non_cancer

SEQ ID NO: 468278 - DNA, 298 bp, Homo sapiens; identical to SEQ ID NO: 467048
  chr2:236402404-236402702
  hypo
  lymphoid_neoplasm vs. liver_bileduct,prostate,upper_gi, colorectal,breast,ovary,head_and_neck,renal,non_cancer,lung, thyroid,uterine,pancreas_gallbladder,bladder_and_urothelial

SEQ ID NO: 468279 - DNA, 428 bp, Homo sapiens; identical to SEQ ID NO: 467070
  chr20:6747996-6748424
  hypo
  lymphoid_neoplasm vs. upper_gi,bladder_and_urothelial, renal,pancreas_gallbladder,colorectal

SEQ ID NO: 468280 - DNA, 294 bp, Homo sapiens; identical to SEQ ID NO: 467071
  chr20:6748470-6748764
  hypo
  lymphoid_neoplasm vs. upper_gi,bladder_and_urothelial, renal,pancreas_gallbladder,colorectal

SEQ ID NO: 468281 - DNA, 101 bp, Homo sapiens; identical to SEQ ID NO: 467072
  chr20:6748323-6748424
  hypo
  lymphoid_neoplasm vs. upper_gi

SEQ ID NO: 468282 - DNA, 294 bp, Homo sapiens; identical to SEQ ID NO: 467071
  chr20:6748470-6748764
  hypo
  lymphoid_neoplasm vs. upper_gi

SEQ ID NO: 468283 - DNA, 258 bp, Homo sapiens; identical to SEQ ID NO: 467074
  chr20:6749063-6749321
  hypo
  lymphoid_neoplasm vs. upper_gi

SEQ ID NO: 468284 - DNA, 587 bp, Homo sapiens; identical to SEQ ID NO: 361809
  chr20:6749063-6749650
  hypo
  lymphoid_neoplasm vs. liver_bileduct

SEQ ID NO: 468285 - DNA, 339 bp, Homo sapiens; identical to SEQ ID NO: 460983
  chr20:9048825-9049164
  hypo
  lymphoid_neoplasm vs. uterine

SEQ ID NO: 468286 - DNA, 230 bp, Homo sapiens; identical to SEQ ID NO: 460984
  chr20:9049238-9049468
  hypo
  lymphoid_neoplasm vs. uterine

SEQ ID NO: 468287 - DNA, 80 bp, Homo sapiens; identical to SEQ ID NO: 467084
  chr20:18039568-18039648
  hypo

SEQ ID NO: 468288 - DNA, 94 bp, Homo sapiens; identical to SEQ ID NO: 361824
  chr20:18039936-18040030
  hypo

SEQ ID NO: 468289 - DNA, 268 bp, Homo sapiens; identical to SEQ ID NO: 462763
  chr20:19193616-19193884
  hypo
  lymphoid_neoplasm vs. breast,uterine,non_cancer, myeloid_neoplasm,multiple_myeloma,ovary

SEQ ID NO: 468290 - DNA, 222 bp, Homo sapiens; identical to SEQ ID NO: 453162
  chr20:21686742-21686964
  hypo
  lymphoid_neoplasm vs. multiple_myeloma

SEQ ID NO: 468291 - DNA, 331 bp, Homo sapiens; identical to SEQ ID NO: 467093
  chr20:22563824-22564155
  hypo
  lymphoid_neoplasm vs. liver_bileduct

SEQ ID NO: 468292 - DNA, 554 bp, Homo sapiens; identical to SEQ ID NO: 467095
  chr20:22564265-22564819
  hypo
  lymphoid_neoplasm vs. liver_bileduct

SEQ ID NO: 468293 - DNA, 923 bp, Homo sapiens; identical to SEQ ID NO: 347661
  chr20:22564324-22565247
  hypo
  lymphoid_neoplasm vs. liver_bileduct,renal,ovary, upper_gi,uterine,colorectal

SEQ ID NO: 468294 - DNA, 265 bp, Homo sapiens; identical to SEQ ID NO: 467101
  chr20:23617984-23618249
  hypo
  lymphoid_neoplasm vs. head_and_neck,cervical, liver_bileduct,colorectal,sarcoma

SEQ ID NO: 468295 - DNA, 68 bp, Homo sapiens; identical to SEQ ID NO: 352469
  chr20:23618645-23618713
  hypo
  lymphoid_neoplasm vs. head_and_neck,cervical, liver_bileduct,colorectal,sarcoma

SEQ ID NO: 468296 - DNA, 540 bp, Homo sapiens; identical to SEQ ID NO: 375128
  chr20:48100505-48101045
  hypo
  lymphoid_neoplasm vs. sarcoma

SEQ ID NO: 468297 - DNA, 571 bp, Homo sapiens; identical to SEQ ID NO: 467112
  chr20:50383675-50384246
  hypo
  lymphoid_neoplasm vs. liver_bileduct,colorectal,uterine, breast,anorectal,lung,thyroid,upper_gi,ovary

SEQ ID NO: 468298 - DNA, 249 bp, Homo sapiens; identical to SEQ ID NO: 467114
  chr20:50383997-50384246
  hypo
  lymphoid_neoplasm vs. upper_gi,liver_bileduct,breast, myeloid_neoplasm,anorectal,colorectal,bladder_and_urothelial, thyroid,lung,ovary,non_cancer,renal,cervical,head_and_neck

SEQ ID NO: 468299 - DNA, 68 bp, Homo sapiens; identical to SEQ ID NO: 467116
  chr20:50384928-50384996
  hypo
  lymphoid_neoplasm vs. upper_gi,liver_bileduct,breast, myeloid_neoplasm,anorectal,colorectal,bladder_and_urothelial, thyroid,lung,ovary,non_cancer,renal,cervical,head_and_neck

SEQ ID NO: 468300 - DNA, 244 bp, Homo sapiens; identical to SEQ ID NO: 467118
  chr20:50384928-50385172
  hypo
  lymphoid_neoplasm vs. liver_bileduct,upper_gi,renal, bladder_and_urothelial,breast,anorectal,head_and_neck

SEQ ID NO: 468301 - DNA, 3 bp, Homo sapiens
  chr20:57875361-57875364
  hypo
  lymphoid_neoplasm vs. multiple_myeloma
cgc

SEQ ID NO: 468302 - DNA, 176 bp, Homo sapiens; identical to SEQ ID NO: 457936
  chr20:57875366-57875542
  hypo
  lymphoid_neoplasm vs. multiple_myeloma

SEQ ID NO: 468303 - DNA, 220 bp, Homo sapiens; identical to SEQ ID NO: 352521
  chr20:57875889-57876109
  hypo
  lymphoid_neoplasm vs. multiple_myeloma

SEQ ID NO: 468304 - DNA, 74 bp, Homo sapiens; identical to SEQ ID NO: 361931
  chr20:58180712-58180786
  hypo
  lymphoid_neoplasm vs. multiple_myeloma

SEQ ID NO: 468305 - DNA, 331 bp, Homo sapiens; identical to SEQ ID NO: 344356
  chr20:60563069-60563400
  hypo
  lymphoid_neoplasm vs. liver_bileduct

SEQ ID NO: 468306 - DNA, 248 bp, Homo sapiens; identical to SEQ ID NO: 459641
  chr20:61810310-61810558
  hypo
  lymphoid_neoplasm vs. ovary

SEQ ID NO: 468307 - DNA, 284 bp, Homo sapiens; identical to SEQ ID NO: 344428
  chr20:62578699-62578983
  hypo
  lymphoid_neoplasm vs. liver_bileduct,cervical

SEQ ID NO: 468308 - DNA, 311 bp, Homo sapiens; identical to SEQ ID NO: 467135
  chr21:39288394-39288705
  hypo
  lymphoid_neoplasm vs. multiple_myeloma,lung,renal, melanoma

SEQ ID NO: 468309 - DNA, 6 bp, Homo sapiens
  chr21:39288901-39288907
  hypo
  lymphoid_neoplasm vs. multiple_myeloma,lung,renal, melanoma
aggacc

SEQ ID NO: 468310 - DNA, 290 bp, Homo sapiens; identical to SEQ ID NO: 467137
  chr21:39288415-39288705
  hypo
  lymphoid_neoplasm vs. multiple_myeloma,myeloid_neoplasm, non_cancer,uterine,prostate

SEQ ID NO: 468311 - DNA, 280 bp, Homo sapiens; identical to SEQ ID NO: 467138
  chr21:39288901-39289181
  hypo
  lymphoid_neoplasm vs. multiple_myeloma,myeloid_neoplasm, non_cancer,uterine,prostate

SEQ ID NO: 468312 - DNA, 39 bp, Homo sapiens; identical to SEQ ID NO: 467139
  chr21:40032283-40032322
  hypo
  lymphoid_neoplasm vs. anorectal,sarcoma

SEQ ID NO: 468313 - DNA, 159 bp, Homo sapiens; identical to SEQ ID NO: 467140
  chr21:40032367-40032526
  hypo
  lymphoid_neoplasm vs. anorectal,sarcoma

SEQ ID NO: 468314 - DNA, 65 bp, Homo sapiens; identical to SEQ ID NO: 361990
  chr21:40032848-40032913
  hypo
  lymphoid_neoplasm vs. anorectal,sarcoma

SEQ ID NO: 468315 - DNA, 136 bp, Homo sapiens; identical to SEQ ID NO: 462780
  chr21:40032971-40033107
  hypo
  lymphoid_neoplasm vs. sarcoma

SEQ ID NO: 468316 - DNA, 220 bp, Homo sapiens; identical to SEQ ID NO: 383215
  chr21:43290534-43290754
  hypo
  lymphoid_neoplasm vs. liver_bileduct

SEQ ID NO: 468317 - DNA, 236 bp, Homo sapiens; identical to SEQ ID NO: 344547
  chr21:45628864-45629100
  hypo
  lymphoid_neoplasm vs. breast,upper_gi,renal,anorectal

SEQ ID NO: 468318 - DNA, 143 bp, Homo sapiens; identical to SEQ ID NO: 453174
  chr21:47063290-47063433
  hypo
  lymphoid_neoplasm vs. thyroid,non_cancer,melanoma

SEQ ID NO: 468319 - DNA, 241 bp, Homo sapiens; identical to SEQ ID NO: 467159
  chr22:25348202-25348443
  hypo
  lymphoid_neoplasm vs. upper_gi,prostate,lung, head_and_neck,breast,cervical,myeloid_neoplasm,anorectal, thyroid,non_cancer,liver_bileduct,ovary,uterine,sarcoma,renal, colorectal,pancreas_gallbladder,bladder_and_urothelial,melanoma

SEQ ID NO: 468320 - DNA, 487 bp, Homo sapiens; identical to SEQ ID NO: 467160
  chr22:25348485-25348972
  hypo
  lymphoid_neoplasm vs. upper_gi,prostate,lung, head_and_neck,breast,cervical,myeloid_neoplasm,anorectal, thyroid,non_cancer,liver_bileduct,ovary,uterine,sarcoma,renal, colorectal,pancreas_gallbladder,bladder_and_urothelial,melanoma

SEQ ID NO: 468321 - DNA, 788 bp, Homo sapiens; identical to SEQ ID NO: 467161
  chr22:25348485-25349273
  hypo
  lymphoid_neoplasm vs. cervical,head_and_neck,upper_gi, renal,thyroid,anorectal,colorectal,ovary,melanoma,lung,uterine, non_cancer,prostate,breast,myeloid_neoplasm,liver_bileduct

SEQ ID NO: 468322 - DNA, 125 bp, Homo sapiens; identical to SEQ ID NO: 345656
  chr22:25349348-25349473
  hypo
  lymphoid_neoplasm vs. cervical,head_and_neck,upper_gi, renal,thyroid,anorectal,colorectal,ovary,melanoma,lung,uterine, non_cancer,prostate,breast,myeloid_neoplasm,liver_bileduct

SEQ ID NO: 468323 - DNA, 295 bp, Homo sapiens; identical to SEQ ID NO: 467163
  chr22:25348978-25349273
  hypo
  lymphoid_neoplasm vs. upper_gi,colorectal, bladder_and_urothelial,multiple_myeloma,renal

SEQ ID NO: 468324 - DNA, 395 bp, Homo sapiens; identical to SEQ ID NO: 352589
  chr22:25349348-25349743
  hypo
  lymphoid_neoplasm vs. upper_gi,colorectal, bladder_and_urothelial,multiple_myeloma,renal

SEQ ID NO: 468325 - DNA, 395 bp, Homo sapiens; identical to SEQ ID NO: 362057
  chr22:31198752-31199147
  hypo
  lymphoid_neoplasm vs. uterine,colorectal,upper_gi

SEQ ID NO: 468326 - DNA, 82 bp, Homo sapiens; identical to SEQ ID NO: 461010
  chr22:32571858-32571940
  hypo
  lymphoid_neoplasm vs. multiple_myeloma

SEQ ID NO: 468327 - DNA, 192 bp, Homo sapiens; identical to SEQ ID NO: 344782
  chr22:40812801-40812993
  hypo
  lymphoid_neoplasm vs. liver_bileduct,cervical,upper_gi, melanoma

SEQ ID NO: 468328 - DNA, 35 bp, Homo sapiens; identical to SEQ ID NO: 467176
  chr22:45064203-45064238
  hypo
  lymphoid_neoplasm vs. anorectal,prostate,uterine,breast, thyroid,ovary,renal,bladder_and_urothelial,non_cancer

SEQ ID NO: 468329 - DNA, 390 bp, Homo sapiens; identical to SEQ ID NO: 467177
  chr22:45064286-45064676
  hypo
  lymphoid_neoplasm vs. anorectal,prostate,uterine,breast, thyroid,ovary,renal,bladder_and_urothelial,non_cancer

SEQ ID NO: 468330 - DNA, 147 bp, Homo sapiens; identical to SEQ ID NO: 352628
  chr22:45064918-45065065
  hypo
  lymphoid_neoplasm vs. anorectal,prostate,uterine,breast, thyroid,ovary,renal,bladder_and_urothelial,non_cancer

SEQ ID NO: 468331 - DNA, 554 bp, Homo sapiens; identical to SEQ ID NO: 467179
  chr22:45097777-45098331
  hypo
  lymphoid_neoplasm vs. upper_gi,pancreas_gallbladder, uterine,non_cancer,breast,bladder_and_urothelial,colorectal, anorectal,lung,renal,thyroid,prostate,myeloid_neoplasm,ovary, head_and_neck,cervical,melanoma,liver_bileduct

SEQ ID NO: 468332 - DNA, 254 bp, Homo sapiens; identical to SEQ ID NO: 467180
  chr22:45098381-45098635
  hypo
  lymphoid_neoplasm vs. upper_gi,pancreas_gallbladder, uterine,non_cancer,breast,bladder_and_urothelial,colorectal, anorectal,lung,renal,thyroid,prostate,myeloid_neoplasm,ovary, head_and_neck,cervical,melanoma,liver_bileduct

SEQ ID NO: 468333 - DNA, 187 bp, Homo sapiens; identical to SEQ ID NO: 467181
  chr22:45098144-45098331
  hypo
  lymphoid_neoplasm vs. pancreas_gallbladder,upper_gi, colorectal,uterine,breast,non_cancer,bladder_and_urothelial, myeloid_neoplasm,lung,prostate,liver_bileduct,renal,anorectal, thyroid,head_and_neck,ovary,cervical,melanoma

SEQ ID NO: 468334 - DNA, 471 bp, Homo sapiens; identical to SEQ ID NO: 467182
  chr22:45098381-45098852
  hypo
  lymphoid_neoplasm vs. pancreas_gallbladder,upper_gi, colorectal,uterine,breast,non_cancer,bladder_and_urothelial, myeloid_neoplasm,lung,prostate,liver_bileduct,renal,anorectal, thyroid,head_and_neck,ovary,cervical,melanoma

SEQ ID NO: 468335 - DNA, 479 bp, Homo sapiens; identical to SEQ ID NO: 467197
  chr3:13936742-13937221
  hypo
  lymphoid_neoplasm vs. anorectal,colorectal,uterine, non_cancer,ovary,bladder_and_urothelial

SEQ ID NO: 468336 - DNA, 124 bp, Homo sapiens; identical to SEQ ID NO: 349739
  chr3:13937250-13937374
  hypo
  lymphoid_neoplasm vs. anorectal,colorectal,uterine, non_cancer,ovary,bladder_and_urothelial

SEQ ID NO: 468337 - DNA, 244 bp, Homo sapiens; identical to SEQ ID NO: 467210
  chr3:43147038-43147282
  hypo
  lymphoid_neoplasm vs. sarcoma,melanoma,thyroid, multiple_myeloma,lung,breast,pancreas_gallbladder,non_cancer, renal,uterine,bladder_and_urothelial,ovary,head_and_neck, prostate,upper_gi,anorectal,cervical,liver_bileduct,colorectal,
  CONT. FROM ABOVE: myeloid_neoplasm

SEQ ID NO: 468338 - DNA, 105 bp, Homo sapiens; identical to SEQ ID NO: 345089
  chr3:43147607-43147712
  hypo
  lymphoid_neoplasm vs. sarcoma,melanoma,thyroid, multiple_myeloma,lung,breast,pancreas_gallbladder,non_cancer, renal,uterine,bladder_and_urothelial,ovary,head_and_neck, prostate,upper_gi,anorectal,cervical,liver_bileduct,colorectal,
  CONT. FROM ABOVE: myeloid_neoplasm

SEQ ID NO: 468339 - DNA, 9 bp, Homo sapiens
  chr3:45188139-45188148
  hypo
  lymphoid_neoplasm vs. colorectal,lung,upper_gi, pancreas_gallbladder,anorectal,uterine,bladder_and_urothelial
gcgaaggtc

SEQ ID NO: 468340 - DNA, 130 bp, Homo sapiens; identical to SEQ ID NO: 467217
  chr3:64673134-64673264
  hypo
  lymphoid_neoplasm vs. bladder_and_urothelial

SEQ ID NO: 468341 - DNA, 507 bp, Homo sapiens; identical to SEQ ID NO: 357632
  chr3:64673419-64673926
  hypo
  lymphoid_neoplasm vs. bladder_and_urothelial

SEQ ID NO: 468342 - DNA, 970 bp, Homo sapiens; identical to SEQ ID NO: 346569
  chr3:66024122-66025092
  hypo
  lymphoid_neoplasm vs. breast,uterine,colorectal,thyroid, upper_gi,renal,lung,prostate,pancreas_gallbladder,non_cancer, liver_bileduct,cervical

SEQ ID NO: 468343 - DNA, 847 bp, Homo sapiens; identical to SEQ ID NO: 467220
  chr3:66024594-66025441
  hypo
  lymphoid_neoplasm vs. breast,colorectal,liver_bileduct, upper_gi,pancreas_gallbladder,thyroid,non_cancer

SEQ ID NO: 468344 - DNA, 56 bp, Homo sapiens; identical to SEQ ID NO: 349784
  chr3:66025506-66025562
  hypo
  lymphoid_neoplasm vs. breast,colorectal,liver_bileduct, upper_gi,pancreas_gallbladder,thyroid,non_cancer

SEQ ID NO: 468345 - DNA, 778 bp, Homo sapiens; identical to SEQ ID NO: 331805
  chr3:69788429-69789207
  hypo
  lymphoid_neoplasm vs. bladder_and_urothelial

SEQ ID NO: 468346 - DNA, 281 bp, Homo sapiens; identical to SEQ ID NO: 467226
  chr3:98619774-98620055
  hypo
  lymphoid_neoplasm vs. sarcoma,thyroid,cervical, myeloid_neoplasm,anorectal,melanoma,lung,ovary,head_and_neck, uterine,prostate,non_cancer,breast,renal,colorectal

SEQ ID NO: 468347 - DNA, 58 bp, Homo sapiens; identical to SEQ ID NO: 345096
  chr3:98621126-98621184
  hypo
  lymphoid_neoplasm vs. head_and_neck,myeloid_neoplasm, melanoma,uterine,lung,sarcoma,anorectal,cervical,non_cancer, pancreas_gallbladder,renal,thyroid,ovary,colorectal,breast

SEQ ID NO: 468348 - DNA, 732 bp, Homo sapiens; identical to SEQ ID NO: 467233
  chr3:123751654-123752386
  hypo
  lymphoid_neoplasm vs. melanoma,liver_bileduct,sarcoma, lung,pancreas_gallbladder,breast,uterine,head_and_neck

SEQ ID NO: 468349 - DNA, 427 bp, Homo sapiens; identical to SEQ ID NO: 467234
  chr3:123751959-123752386
  hypo
  lymphoid_neoplasm vs. liver_bileduct,lung,melanoma

SEQ ID NO: 468350 - DNA, 81 bp, Homo sapiens; identical to SEQ ID NO: 467241
  chr3:133748401-133748482
  hypo
  lymphoid_neoplasm vs. pancreas_gallbladder,head_and_neck, breast

SEQ ID NO: 468351 - DNA, 73 bp, Homo sapiens; identical to SEQ ID NO: 467242
  chr3:133748576-133748649
  hypo
  lymphoid_neoplasm vs. pancreas_gallbladder,head_and_neck, breast

SEQ ID NO: 468352 - DNA, 296 bp, Homo sapiens; identical to SEQ ID NO: 467245
  chr3:135684609-135684905
  hypo
  lymphoid_neoplasm vs. prostate,head_and_neck,thyroid, anorectal,uterine,ovary,non_cancer,colorectal,breast, bladder_and_urothelial,sarcoma,lung,renal,upper_gi, pancreas_gallbladder,cervical

SEQ ID NO: 468353 - DNA, 4 bp, Homo sapiens
  chr3:135685442-135685446
  hypo
  lymphoid_neoplasm vs. prostate,head_and_neck,thyroid, anorectal,uterine,ovary,non_cancer,colorectal,breast, bladder_and_urothelial,sarcoma,lung,renal,upper_gi, pancreas_gallbladder,cervical
tccc

SEQ ID NO: 468354 - DNA, 556 bp, Homo sapiens; identical to SEQ ID NO: 467248
  chr3:138067014-138067570
  hypo
  lymphoid_neoplasm vs. myeloid_neoplasm,uterine,prostate, bladder_and_urothelial,thyroid,breast,lung,non_cancer,renal, upper_gi,colorectal,head_and_neck

SEQ ID NO: 468355 - DNA, 637 bp, Homo sapiens; identical to SEQ ID NO: 467249
  chr3:138067081-138067718
  hypo
  lymphoid_neoplasm vs. liver_bileduct,thyroid,renal, prostate,sarcoma,lung,ovary,pancreas_gallbladder, myeloid_neoplasm,colorectal,anorectal,upper_gi,breast,uterine, non_cancer,head_and_neck,cervical

SEQ ID NO: 468356 - DNA, 106 bp, Homo sapiens; identical to SEQ ID NO: 346595
  chr3:138067747-138067853
  hypo
  lymphoid_neoplasm vs. liver_bileduct,thyroid,renal, prostate,sarcoma,lung,ovary,pancreas_gallbladder, myeloid_neoplasm,colorectal,anorectal,upper_gi,breast,uterine, non_cancer,head_and_neck,cervical

SEQ ID NO: 468357 - DNA, 174 bp, Homo sapiens; identical to SEQ ID NO: 467256
  chr3:145878695-145878869
  hypo
  lymphoid_neoplasm vs. renal,head_and_neck,uterine,lung, sarcoma,breast,colorectal

SEQ ID NO: 468358 - DNA, 349 bp, Homo sapiens; identical to SEQ ID NO: 349836
  chr3:145878937-145879286
  hypo
  lymphoid_neoplasm vs. renal,head_and_neck,uterine,lung, sarcoma,breast,colorectal

SEQ ID NO: 468359 - DNA, 289 bp, Homo sapiens; identical to SEQ ID NO: 332005
  chr4:819440-819729
  hypo
  lymphoid_neoplasm vs. pancreas_gallbladder

SEQ ID NO: 468360 - DNA, 10 bp, Homo sapiens
  chr4:1399981-1399991
  hypo
  lymphoid_neoplasm vs. melanoma
cgagaaggag

SEQ ID NO: 468361 - DNA, 137 bp, Homo sapiens; identical to SEQ ID NO: 467281
  chr4:1400112-1400249
  hypo
  lymphoid_neoplasm vs. melanoma

SEQ ID NO: 468362 - DNA, 187 bp, Homo sapiens; identical to SEQ ID NO: 467282
  chr4:1796303-1796490
  hypo
  lymphoid_neoplasm vs. pancreas_gallbladder

SEQ ID NO: 468363 - DNA, 275 bp, Homo sapiens; identical to SEQ ID NO: 349902
  chr4:3768207-3768482
  hypo
  lymphoid_neoplasm vs. anorectal,thyroid,prostate,breast, sarcoma,non_cancer,uterine

SEQ ID NO: 468364 - DNA, 145 bp, Homo sapiens; identical to SEQ ID NO: 349905
  chr4:5890606-5890751
  hypo
  lymphoid_neoplasm vs. melanoma,bladder_and_urothelial, sarcoma,anorectal,uterine,non_cancer,head_and_neck,prostate, multiple_myeloma,ovary

SEQ ID NO: 468365 - DNA, 821 bp, Homo sapiens; identical to SEQ ID NO: 332029
  chr4:6271360-6272181
  hypo
  lymphoid_neoplasm vs. liver_bileduct,lung

SEQ ID NO: 468366 - DNA, 142 bp, Homo sapiens; identical to SEQ ID NO: 357835
  chr4:8160429-8160571
  hypo
  lymphoid_neoplasm vs. upper_gi

SEQ ID NO: 468367 - DNA, 33 bp, Homo sapiens; identical to SEQ ID NO: 370387
  chr4:8873984-8874017
  hypo
  lymphoid_neoplasm vs. melanoma

SEQ ID NO: 468368 - DNA, 145 bp, Homo sapiens; identical to SEQ ID NO: 467305
  chr4:24914262-24914407
  hypo
  lymphoid_neoplasm vs. cervical,pancreas_gallbladder,lung, liver_bileduct,melanoma

SEQ ID NO: 468369 - DNA, 72 bp, Homo sapiens; identical to SEQ ID NO: 357849
  chr4:24914804-24914876
  hypo
  lymphoid_neoplasm vs. cervical,pancreas_gallbladder,lung, liver_bileduct,melanoma

SEQ ID NO: 468370 - DNA, 53 bp, Homo sapiens; identical to SEQ ID NO: 467315
  chr4:41362252-41362305
  hypo
  lymphoid_neoplasm vs. liver_bileduct

SEQ ID NO: 468371 - DNA, 349 bp, Homo sapiens; identical to SEQ ID NO: 467316
  chr4:41363167-41363516
  hypo
  lymphoid_neoplasm vs. liver_bileduct

SEQ ID NO: 468372 - DNA, 362 bp, Homo sapiens; identical to SEQ ID NO: 467325
  chr4:77227668-77228030
  hypo
  lymphoid_neoplasm vs. upper_gi

SEQ ID NO: 468373 - DNA, 78 bp, Homo sapiens; identical to SEQ ID NO: 357893
  chr4:77228452-77228530
  hypo
  lymphoid_neoplasm vs. upper_gi

SEQ ID NO: 468374 - DNA, 20 bp, Homo sapiens
  chr4:85503892-85503912
  hypo
  lymphoid_neoplasm vs. upper_gi,colorectal
cagcctcctcccgccccacc

SEQ ID NO: 468375 - DNA, 251 bp, Homo sapiens; identical to SEQ ID NO: 453250
  chr4:85503985-85504236
  hypo
  lymphoid_neoplasm vs. upper_gi,colorectal

SEQ ID NO: 468376 - DNA, 307 bp, Homo sapiens; identical to SEQ ID NO: 467337
  chr4:85886808-85887115
  hypo
  lymphoid_neoplasm vs. bladder_and_urothelial

SEQ ID NO: 468377 - DNA, 409 bp, Homo sapiens; identical to SEQ ID NO: 467338
  chr4:85887200-85887609
  hypo
  lymphoid_neoplasm vs. bladder_and_urothelial

SEQ ID NO: 468378 - DNA, 679 bp, Homo sapiens; identical to SEQ ID NO: 467339
  chr4:85887200-85887879
  hypo
  lymphoid_neoplasm vs. liver_bileduct

SEQ ID NO: 468379 - DNA, 192 bp, Homo sapiens; identical to SEQ ID NO: 357914
  chr4:85887927-85888119
  hypo
  lymphoid_neoplasm vs. liver_bileduct

SEQ ID NO: 468380 - DNA, 249 bp, Homo sapiens; identical to SEQ ID NO: 467341
  chr4:85887630-85887879
  hypo
  lymphoid_neoplasm vs. liver_bileduct

SEQ ID NO: 468381 - DNA, 439 bp, Homo sapiens; identical to SEQ ID NO: 467342
  chr4:85887927-85888366
  hypo
  lymphoid_neoplasm vs. liver_bileduct

SEQ ID NO: 468382 - DNA, 49 bp, Homo sapiens; identical to SEQ ID NO: 370495
  chr4:85888399-85888448
  hypo
  lymphoid_neoplasm vs. liver_bileduct

SEQ ID NO: 468383 - DNA, 271 bp, Homo sapiens; identical to SEQ ID NO: 467365
  chr4:121843731-121844002
  hypo
  lymphoid_neoplasm vs. ovary

SEQ ID NO: 468384 - DNA, 277 bp, Homo sapiens; identical to SEQ ID NO: 467367
  chr4:121843731-121844008
  hypo
  lymphoid_neoplasm vs. renal,bladder_and_urothelial

SEQ ID NO: 468385 - DNA, 170 bp, Homo sapiens; identical to SEQ ID NO: 357955
  chr4:121844206-121844376
  hypo
  lymphoid_neoplasm vs. renal,bladder_and_urothelial

SEQ ID NO: 468386 - DNA, 824 bp, Homo sapiens; identical to SEQ ID NO: 332200
  chr4:142557243-142558067
  hypo
  lymphoid_neoplasm vs. liver_bileduct,cervical

SEQ ID NO: 468387 - DNA, 765 bp, Homo sapiens; identical to SEQ ID NO: 467377
  chr4:152329824-152330589
  hypo
  lymphoid_neoplasm vs. pancreas_gallbladder

SEQ ID NO: 468388 - DNA, 766 bp, Homo sapiens; identical to SEQ ID NO: 467378
  chr4:152330106-152330872
  hypo
  lymphoid_neoplasm vs. upper_gi,pancreas_gallbladder

SEQ ID NO: 468389 - DNA, 726 bp, Homo sapiens; identical to SEQ ID NO: 370601
  chr4:159690014-159690740
  hypo

SEQ ID NO: 468390 - DNA, 113 bp, Homo sapiens; identical to SEQ ID NO: 467395
  chr4:184019900-184020013
  hypo
  lymphoid_neoplasm vs. renal,cervical,anorectal,uterine, myeloid_neoplasm,non_cancer,head_and_neck,colorectal,breast, pancreas_gallbladder,bladder_and_urothelial,upper_gi,ovary

SEQ ID NO: 468391 - DNA, 207 bp, Homo sapiens; identical to SEQ ID NO: 467396
  chr4:184019900-184020107
  hypo
  lymphoid_neoplasm vs. renal,anorectal, bladder_and_urothelial,ovary,colorectal,cervical,head_and_neck, non_cancer,myeloid_neoplasm,uterine,pancreas_gallbladder,breast, thyroid,upper_gi,prostate,lung

SEQ ID NO: 468392 - DNA, 72 bp, Homo sapiens; identical to SEQ ID NO: 467397
  chr4:184020035-184020107
  hypo
  lymphoid_neoplasm vs. melanoma,pancreas_gallbladder, thyroid,anorectal,lung,liver_bileduct,head_and_neck,ovary, cervical,breast,upper_gi,non_cancer,myeloid_neoplasm,uterine, bladder_and_urothelial,prostate,colorectal,renal

SEQ ID NO: 468393 - DNA, 364 bp, Homo sapiens; identical to SEQ ID NO: 467405
  chr4:187647669-187648033
  hypo
  lymphoid_neoplasm vs. liver_bileduct,multiple_myeloma

SEQ ID NO: 468394 - DNA, 394 bp, Homo sapiens; identical to SEQ ID NO: 467407
  chr4:187647669-187648063
  hypo
  lymphoid_neoplasm vs. liver_bileduct,upper_gi

SEQ ID NO: 468395 - DNA, 239 bp, Homo sapiens; identical to SEQ ID NO: 350024
  chr4:187648119-187648358
  hypo
  lymphoid_neoplasm vs. liver_bileduct,upper_gi

SEQ ID NO: 468396 - DNA, 991 bp, Homo sapiens; identical to SEQ ID NO: 332283
  chr5:1111396-1112387
  hypo
  lymphoid_neoplasm vs. renal,bladder_and_urothelial, melanoma,upper_gi,lung,liver_bileduct

SEQ ID NO: 468397 - DNA, 89 bp, Homo sapiens; identical to SEQ ID NO: 467420
  chr5:16935468-16935557
  hypo
  lymphoid_neoplasm vs. uterine

SEQ ID NO: 468398 - DNA, 267 bp, Homo sapiens; identical to SEQ ID NO: 467421
  chr5:16935617-16935884
  hypo
  lymphoid_neoplasm vs. uterine

SEQ ID NO: 468399 - DNA, 92 bp, Homo sapiens; identical to SEQ ID NO: 467422
  chr5:16935792-16935884
  hypo
  lymphoid_neoplasm vs. uterine,sarcoma,colorectal

SEQ ID NO: 468400 - DNA, 34 bp, Homo sapiens; identical to SEQ ID NO: 467423
  chr5:16936321-16936355
  hypo
  lymphoid_neoplasm vs. uterine,sarcoma,colorectal

SEQ ID NO: 468401 - DNA, 71 bp, Homo sapiens; identical to SEQ ID NO: 467424
  chr5:16936514-16936585
  hypo
  lymphoid_neoplasm vs. uterine,sarcoma,colorectal

SEQ ID NO: 468402 - DNA, 34 bp, Homo sapiens; identical to SEQ ID NO: 467423
  chr5:16936321-16936355
  hypo
  lymphoid_neoplasm vs. ovary,cervical,upper_gi,colorectal, uterine,breast,lung

SEQ ID NO: 468403 - DNA, 71 bp, Homo sapiens; identical to SEQ ID NO: 467424
  chr5:16936514-16936585
  hypo
  lymphoid_neoplasm vs. ovary,cervical,upper_gi,colorectal, uterine,breast,lung

SEQ ID NO: 468404 - DNA, 278 bp, Homo sapiens; identical to SEQ ID NO: 467441
  chr5:42424338-42424616
  hypo
  lymphoid_neoplasm vs. sarcoma

SEQ ID NO: 468405 - DNA, 369 bp, Homo sapiens; identical to SEQ ID NO: 467445
  chr5:74349128-74349497
  hypo
  lymphoid_neoplasm vs. sarcoma,lung,upper_gi, head_and_neck

SEQ ID NO: 468406 - DNA, 20 bp, Homo sapiens
  chr5:75380048-75380068
  hypo
  lymphoid_neoplasm vs. myeloid_neoplasm
cgcctgctgtgcgccaggcc

SEQ ID NO: 468407 - DNA, 29 bp, Homo sapiens
  chr5:75380974-75381003
  hypo
  lymphoid_neoplasm vs. myeloid_neoplasm
catggcaagttccgaaaggcctcgtgctc

SEQ ID NO: 468408 - DNA, 42 bp, Homo sapiens; identical to SEQ ID NO: 462893
  chr5:79865662-79865704
  hypo
  lymphoid_neoplasm vs. sarcoma

SEQ ID NO: 468409 - DNA, 91 bp, Homo sapiens; identical to SEQ ID NO: 462894
  chr5:79865744-79865835
  hypo
  lymphoid_neoplasm vs. sarcoma

SEQ ID NO: 468410 - DNA, 735 bp, Homo sapiens; identical to SEQ ID NO: 345179
  chr5:87436769-87437504
  hypo
  lymphoid_neoplasm vs. uterine,myeloid_neoplasm,lung, bladder_and_urothelial,thyroid,breast,ovary,non_cancer,sarcoma

SEQ ID NO: 468411 - DNA, 299 bp, Homo sapiens; identical to SEQ ID NO: 467463
  chr5:107005685-107005984
  hypo
  lymphoid_neoplasm vs. pancreas_gallbladder,lung

SEQ ID NO: 468412 - DNA, 85 bp, Homo sapiens; identical to SEQ ID NO: 467464
  chr5:107006260-107006345
  hypo
  lymphoid_neoplasm vs. pancreas_gallbladder,lung

SEQ ID NO: 468413 - DNA, 138 bp, Homo sapiens; identical to SEQ ID NO: 467465
  chr5:107005846-107005984
  hypo
  lymphoid_neoplasm vs. bladder_and_urothelial,lung, head_and_neck,pancreas_gallbladder,anorectal,renal,cervical, non_cancer,prostate,ovary,breast

SEQ ID NO: 468414 - DNA, 450 bp, Homo sapiens; identical to SEQ ID NO: 467466
  chr5:107006260-107006710
  hypo
  lymphoid_neoplasm vs. bladder_and_urothelial,lung, head_and_neck,pancreas_gallbladder,anorectal,renal,cervical, non_cancer,prostate,ovary,breast

SEQ ID NO: 468415 - DNA, 358 bp, Homo sapiens; identical to SEQ ID NO: 467467
  chr5:107006352-107006710
  hypo
  lymphoid_neoplasm vs. renal,breast,lung

SEQ ID NO: 468416 - DNA, 168 bp, Homo sapiens; identical to SEQ ID NO: 467470
  chr5:129239570-129239738
  hypo
  lymphoid_neoplasm vs. uterine

SEQ ID NO: 468417 - DNA, 35 bp, Homo sapiens; identical to SEQ ID NO: 467473
  chr5:129240901-129240936
  hypo
  lymphoid_neoplasm vs. melanoma,bladder_and_urothelial, uterine,multiple_myeloma,head_and_neck,myeloid_neoplasm, anorectal,cervical,thyroid,breast,lung,renal

SEQ ID NO: 468418 - DNA, 5 bp, Homo sapiens
  chr5:129240962-129240967
  hypo
  lymphoid_neoplasm vs. melanoma,bladder_and_urothelial, uterine,multiple_myeloma,head_and_neck,myeloid_neoplasm, anorectal,cervical,thyroid,breast,lung,renal
cggcc

SEQ ID NO: 468419 - DNA, 35 bp, Homo sapiens; identical to SEQ ID NO: 467473
  chr5:129240901-129240936
  hypo
  lymphoid_neoplasm vs. head_and_neck,melanoma,anorectal, uterine,myeloid_neoplasm,prostate,thyroid,lung,non_cancer, breast

SEQ ID NO: 468420 - DNA, 144 bp, Homo sapiens; identical to SEQ ID NO: 467476
  chr5:129240962-129241106
  hypo
  lymphoid_neoplasm vs. head_and_neck,melanoma,anorectal, uterine,myeloid_neoplasm,prostate,thyroid,lung,non_cancer, breast

SEQ ID NO: 468421 - DNA, 274 bp, Homo sapiens; identical to SEQ ID NO: 467477
  chr5:129241140-129241414
  hypo
  lymphoid_neoplasm vs. head_and_neck,melanoma,anorectal, uterine,myeloid_neoplasm,prostate,thyroid,lung,non_cancer, breast

SEQ ID NO: 468422 - DNA, 1 bp, Homo sapiens
  chr5:136835144-136835145
  hypo
  lymphoid_neoplasm vs. myeloid_neoplasm,prostate, non_cancer,uterine,anorectal,bladder_and_urothelial,breast, thyroid,melanoma
c

SEQ ID NO: 468423 - DNA, 253 bp, Homo sapiens; identical to SEQ ID NO: 467490
  chr5:148650971-148651224
  hypo
  lymphoid_neoplasm vs. ovary,bladder_and_urothelial, myeloid_neoplasm,anorectal,thyroid,renal,head_and_neck, non_cancer,lung

SEQ ID NO: 468424 - DNA, 227 bp, Homo sapiens; identical to SEQ ID NO: 467498
  chr5:169930945-169931172
  hypo
  lymphoid_neoplasm vs. bladder_and_urothelial

SEQ ID NO: 468425 - DNA, 22 bp, Homo sapiens
  chr5:169931484-169931506
  hypo
  lymphoid_neoplasm vs. bladder_and_urothelial
caattcagagtagacaaaccac

SEQ ID NO: 468426 - DNA, 34 bp, Homo sapiens; identical to SEQ ID NO: 370969
  chr5:175084709-175084743
  hypo
  lymphoid_neoplasm vs. bladder_and_urothelial

SEQ ID NO: 468427 - DNA, 75 bp, Homo sapiens; identical to SEQ ID NO: 462926
  chr5:175084745-175084820
  hypo
  lymphoid_neoplasm vs. bladder_and_urothelial

SEQ ID NO: 468428 - DNA, 244 bp, Homo sapiens; identical to SEQ ID NO: 467515
  chr5:179498011-179498255
  hypo
  lymphoid_neoplasm vs. head_and_neck,lung,cervical, liver_bileduct,prostate,uterine,breast,non_cancer,colorectal, sarcoma,anorectal

SEQ ID NO: 468429 - DNA, 505 bp, Homo sapiens; identical to SEQ ID NO: 467516
  chr5:179498363-179498868
  hypo
  lymphoid_neoplasm vs. head_and_neck,lung,cervical, liver_bileduct,prostate,uterine,breast,non_cancer,colorectal, sarcoma,anorectal

SEQ ID NO: 468430 - DNA, 65 bp, Homo sapiens; identical to SEQ ID NO: 200293
  chr6:17281262-17281327
  hypo
  lymphoid_neoplasm vs. sarcoma

SEQ ID NO: 468431 - DNA, 89 bp, Homo sapiens; identical to SEQ ID NO: 467553
  chr6:17281329-17281418
  hypo
  lymphoid_neoplasm vs. sarcoma

SEQ ID NO: 468432 - DNA, 432 bp, Homo sapiens; identical to SEQ ID NO: 467554
  chr6:17281534-17281966
  hypo
  lymphoid_neoplasm vs. sarcoma

SEQ ID NO: 468433 - DNA, 565 bp, Homo sapiens; identical to SEQ ID NO: 467555
  chr6:17281534-17282099
  hypo
  lymphoid_neoplasm vs. myeloid_neoplasm,liver_bileduct, non_cancer,breast,renal,prostate,pancreas_gallbladder

SEQ ID NO: 468434 - DNA, 813 bp, Homo sapiens; identical to SEQ ID NO: 332677
  chr6:20212279-20213092
  hypo

SEQ ID NO: 468435 - DNA, 3 bp, Homo sapiens
  chr6:39901917-39901920
  hypo
  lymphoid_neoplasm vs. melanoma,multiple_myeloma,renal
cgg

SEQ ID NO: 468436 - DNA, 29 bp, Homo sapiens
  chr6:39902362-39902391
  hypo
  lymphoid_neoplasm vs. melanoma,multiple_myeloma,renal
gggcagaagggtaaactcaggtaaggaac

SEQ ID NO: 468437 - DNA, 156 bp, Homo sapiens; identical to SEQ ID NO: 459772
  chr6:72129577-72129733
  hypo
  lymphoid_neoplasm vs. breast,melanoma,renal,non_cancer, ovary,pancreas_gallbladder

SEQ ID NO: 468438 - DNA, 83 bp, Homo sapiens; identical to SEQ ID NO: 350409
  chr6:80657600-80657683
  hypo
  lymphoid_neoplasm vs. sarcoma,thyroid,anorectal

SEQ ID NO: 468439 - DNA, 438 bp, Homo sapiens; identical to SEQ ID NO: 467602
  chr7:191993-192431
  hypo
  lymphoid_neoplasm vs. sarcoma,uterine,liver_bileduct

SEQ ID NO: 468440 - DNA, 136 bp, Homo sapiens; identical to SEQ ID NO: 467603
  chr7:192614-192750
  hypo
  lymphoid_neoplasm vs. sarcoma,uterine,liver_bileduct

SEQ ID NO: 468441 - DNA, 161 bp, Homo sapiens; identical to SEQ ID NO: 467604
  chr7:192270-192431
  hypo
  lymphoid_neoplasm vs. liver_bileduct,anorectal,renal

SEQ ID NO: 468442 - DNA, 363 bp, Homo sapiens; identical to SEQ ID NO: 467605
  chr7:192614-192977
  hypo
  lymphoid_neoplasm vs. liver_bileduct,anorectal,renal

SEQ ID NO: 468443 - DNA, 128 bp, Homo sapiens; identical to SEQ ID NO: 467606
  chr7:193101-193229
  hypo
  lymphoid_neoplasm vs. liver_bileduct,anorectal,renal

SEQ ID NO: 468444 - DNA, 224 bp, Homo sapiens; identical to SEQ ID NO: 467607
  chr7:192753-192977
  hypo
  lymphoid_neoplasm vs. pancreas_gallbladder, liver_bileduct

SEQ ID NO: 468445 - DNA, 512 bp, Homo sapiens; identical to SEQ ID NO: 467608
  chr7:193101-193613
  hypo
  lymphoid_neoplasm vs. pancreas_gallbladder, liver_bileduct

SEQ ID NO: 468446 - DNA, 34 bp, Homo sapiens; identical to SEQ ID NO: 358711
  chr7:193708-193742
  hypo
  lymphoid_neoplasm vs. pancreas_gallbladder, liver_bileduct

SEQ ID NO: 468447 - DNA, 352 bp, Homo sapiens; identical to SEQ ID NO: 467610
  chr7:193261-193613
  hypo
  lymphoid_neoplasm vs. cervical,liver_bileduct

SEQ ID NO: 468448 - DNA, 277 bp, Homo sapiens; identical to SEQ ID NO: 467611
  chr7:193708-193985
  hypo
  lymphoid_neoplasm vs. cervical,liver_bileduct

SEQ ID NO: 468449 - DNA, 745 bp, Homo sapiens; identical to SEQ ID NO: 467620
  chr7:1498587-1499332
  hypo
  lymphoid_neoplasm vs. head_and_neck,pancreas_gallbladder

SEQ ID NO: 468450 - DNA, 742 bp, Homo sapiens; identical to SEQ ID NO: 467621
  chr7:1498850-1499592
  hypo
  lymphoid_neoplasm vs. head_and_neck

SEQ ID NO: 468451 - DNA, 392 bp, Homo sapiens; identical to SEQ ID NO: 339338
  chr7:2298049-2298441
  hypo
  lymphoid_neoplasm vs. liver_bileduct

SEQ ID NO: 468452 - DNA, 105 bp, Homo sapiens; identical to SEQ ID NO: 463001
  chr7:18125868-18125973
  hypo
  lymphoid_neoplasm vs. bladder_and_urothelial,ovary, anorectal,thyroid,non_cancer

SEQ ID NO: 468453 - DNA, 219 bp, Homo sapiens; identical to SEQ ID NO: 463002
  chr7:18126225-18126444
  hypo
  lymphoid_neoplasm vs. bladder_and_urothelial,ovary, anorectal,thyroid,non_cancer

SEQ ID NO: 468454 - DNA, 219 bp, Homo sapiens; identical to SEQ ID NO: 463002
  chr7:18126225-18126444
  hypo
  lymphoid_neoplasm vs. bladder_and_urothelial,anorectal, ovary,thyroid,cervical,non_cancer,lung,myeloid_neoplasm

SEQ ID NO: 468455 - DNA, 16 bp, Homo sapiens
  chr7:20826098-20826114
  hypo
  lymphoid_neoplasm vs. colorectal
cgaaatcggtgcctgt

SEQ ID NO: 468456 - DNA, 298 bp, Homo sapiens; identical to SEQ ID NO: 467631
  chr7:20826202-20826500
  hypo
  lymphoid_neoplasm vs. colorectal

SEQ ID NO: 468457 - DNA, 497 bp, Homo sapiens; identical to SEQ ID NO: 467643
  chr7:29234008-29234505
  hypo
  lymphoid_neoplasm vs. colorectal,pancreas_gallbladder, uterine,ovary,prostate,bladder_and_urothelial,non_cancer, myeloid_neoplasm,breast,sarcoma,upper_gi,anorectal,thyroid,lung

SEQ ID NO: 468458 - DNA, 224 bp, Homo sapiens; identical to SEQ ID NO: 467644
  chr7:29234281-29234505
  hypo
  lymphoid_neoplasm vs. pancreas_gallbladder,colorectal, thyroid,bladder_and_urothelial,ovary,non_cancer,uterine,sarcoma, myeloid_neoplasm,upper_gi,breast,prostate,anorectal,cervical, lung

SEQ ID NO: 468459 - DNA, 159 bp, Homo sapiens; identical to SEQ ID NO: 345272
  chr7:29234886-29235045
  hypo
  lymphoid_neoplasm vs. pancreas_gallbladder,colorectal, thyroid,bladder_and_urothelial,ovary,non_cancer,uterine,sarcoma, myeloid_neoplasm,upper_gi,breast,prostate,anorectal,cervical, lung

SEQ ID NO: 468460 - DNA, 213 bp, Homo sapiens; identical to SEQ ID NO: 467647
  chr7:32996732-32996945
  hypo
  lymphoid_neoplasm vs. lung,sarcoma

SEQ ID NO: 468461 - DNA, 155 bp, Homo sapiens; identical to SEQ ID NO: 358825
  chr7:32997454-32997609
  hypo
  lymphoid_neoplasm vs. lung,sarcoma

SEQ ID NO: 468462 - DNA, 1 bp, Homo sapiens
  chr7:45613422-45613423
  hypo
  lymphoid_neoplasm vs. thyroid
c

SEQ ID NO: 468463 - DNA, 1 bp, Homo sapiens
  chr7:87257895-87257896
  hypo
  lymphoid_neoplasm vs. liver_bileduct
c

SEQ ID NO: 468464 - DNA, 483 bp, Homo sapiens; identical to SEQ ID NO: 458282
  chr7:113726887-113727370
  hypo
  lymphoid_neoplasm vs. myeloid_neoplasm,anorectal,thyroid, head_and_neck

SEQ ID NO: 468465 - DNA, 408 bp, Homo sapiens; identical to SEQ ID NO: 467694
  chr7:113726962-113727370
  hypo
  lymphoid_neoplasm vs. head_and_neck

SEQ ID NO: 468466 - DNA, 968 bp, Homo sapiens; identical to SEQ ID NO: 358996
  chr7:151572574-151573542
  hypo
  lymphoid_neoplasm vs. liver_bileduct

SEQ ID NO: 468467 - DNA, 698 bp, Homo sapiens; identical to SEQ ID NO: 467706
  chr7:151722447-151723145
  hypo
  lymphoid_neoplasm vs. renal,myeloid_neoplasm, bladder_and_urothelial,sarcoma,anorectal,pancreas_gallbladder, colorectal,non_cancer,lung,uterine,liver_bileduct,breast, upper_gi

SEQ ID NO: 468468 - DNA, 4 bp, Homo sapiens
  chr7:151723167-151723171
  hypo
  lymphoid_neoplasm vs. renal,myeloid_neoplasm, bladder_and_urothelial,sarcoma,anorectal,pancreas_gallbladder, colorectal,non_cancer,lung,uterine,liver_bileduct,breast, upper_gi
cgtc

SEQ ID NO: 468469 - DNA, 34 bp, Homo sapiens; identical to SEQ ID NO: 346947
  chr7:151723206-151723240
  hypo
  lymphoid_neoplasm vs. renal,myeloid_neoplasm, bladder_and_urothelial,sarcoma,anorectal,pancreas_gallbladder, colorectal,non_cancer,lung,uterine,liver_bileduct,breast, upper_gi

SEQ ID NO: 468470 - DNA, 107 bp, Homo sapiens; identical to SEQ ID NO: 350690
  chr7:158379699-158379806
  hypo
  lymphoid_neoplasm vs. melanoma,prostate,renal

SEQ ID NO: 468471 - DNA, 43 bp, Homo sapiens; identical to SEQ ID NO: 467720
  chr8:495481-495524
  hypo
  lymphoid_neoplasm vs. liver_bileduct

SEQ ID NO: 468472 - DNA, 69 bp, Homo sapiens; identical to SEQ ID NO: 467721
  chr8:495635-495704
  hypo
  lymphoid_neoplasm vs. liver_bileduct

SEQ ID NO: 468473 - DNA, 4 bp, Homo sapiens
  chr8:11550022-11550026
  hypo
cgtg

SEQ ID NO: 468474 - DNA, 252 bp, Homo sapiens; identical to SEQ ID NO: 453440
  chr8:11550368-11550620
  hypo

SEQ ID NO: 468475 - DNA, 591 bp, Homo sapiens; identical to SEQ ID NO: 467734
  chr8:19796843-19797434
  hypo
  lymphoid_neoplasm vs. thyroid

SEQ ID NO: 468476 - DNA, 28 bp, Homo sapiens
  chr8:19797463-19797491
  hypo
  lymphoid_neoplasm vs. thyroid
tcgccttggttggcactgcggctcagcc

SEQ ID NO: 468477 - DNA, 957 bp, Homo sapiens; identical to SEQ ID NO: 467753
  chr8:37552902-37553859
  hypo
  lymphoid_neoplasm vs. upper_gi

SEQ ID NO: 468478 - DNA, 795 bp, Homo sapiens; identical to SEQ ID NO: 350734
  chr8:37553381-37554176
  hypo
  lymphoid_neoplasm vs. pancreas_gallbladder

SEQ ID NO: 468479 - DNA, 128 bp, Homo sapiens; identical to SEQ ID NO: 467756
  chr8:53853387-53853515
  hypo
  lymphoid_neoplasm vs. myeloid_neoplasm,anorectal, prostate

SEQ ID NO: 468480 - DNA, 8 bp, Homo sapiens
  chr8:72459564-72459572
  hypo
  lymphoid_neoplasm vs. multiple_myeloma
cgtccccc

SEQ ID NO: 468481 - DNA, 917 bp, Homo sapiens; identical to SEQ ID NO: 350777
  chr8:81785915-81786832
  hypo
  lymphoid_neoplasm vs. liver_bileduct,anorectal,cervical

SEQ ID NO: 468482 - DNA, 27 bp, Homo sapiens
  chr8:98880996-98881023
  hypo
  lymphoid_neoplasm vs. liver_bileduct
cgcactcccaacccgacaggcccctaa

SEQ ID NO: 468483 - DNA, 766 bp, Homo sapiens; identical to SEQ ID NO: 467783
  chr8:98881052-98881818
  hypo
  lymphoid_neoplasm vs. liver_bileduct

SEQ ID NO: 468484 - DNA, 43 bp, Homo sapiens; identical to SEQ ID NO: 359180
  chr8:98881884-98881927
  hypo
  lymphoid_neoplasm vs. liver_bileduct

SEQ ID NO: 468485 - DNA, 28 bp, Homo sapiens
  chr8:99438692-99438720
  hypo
  lymphoid_neoplasm vs. bladder_and_urothelial,breast, sarcoma,renal,ovary
cgaccagaactcagcgactcccgccccc

SEQ ID NO: 468486 - DNA, 75 bp, Homo sapiens; identical to SEQ ID NO: 467786
  chr8:99438739-99438814
  hypo
  lymphoid_neoplasm vs. bladder_and_urothelial,breast, sarcoma,renal,ovary

SEQ ID NO: 468487 - DNA, 29 bp, Homo sapiens
  chr8:106330407-106330436
  hypo
  lymphoid_neoplasm vs. cervical,lung,melanoma,renal
cgttgacgcggtgacaactgcagaaggtg

SEQ ID NO: 468488 - DNA, 971 bp, Homo sapiens; identical to SEQ ID NO: 333568
  chr8:127569937-127570908
  hypo
  lymphoid_neoplasm vs. upper_gi

SEQ ID NO: 468489 - DNA, 854 bp, Homo sapiens; identical to SEQ ID NO: 467800
  chr8:136469302-136470156
  hypo
  lymphoid_neoplasm vs. renal

SEQ ID NO: 468490 - DNA, 348 bp, Homo sapiens; identical to SEQ ID NO: 467806
  chr9:13278956-13279304
  hypo
  lymphoid_neoplasm vs. prostate,melanoma,sarcoma

SEQ ID NO: 468491 - DNA, 33 bp, Homo sapiens; identical to SEQ ID NO: 467807
  chr9:13279406-13279439
  hypo
  lymphoid_neoplasm vs. prostate,melanoma,sarcoma

SEQ ID NO: 468492 - DNA, 328 bp, Homo sapiens; identical to SEQ ID NO: 467808
  chr9:13278976-13279304
  hypo
  lymphoid_neoplasm vs. renal,cervical,melanoma,uterine

SEQ ID NO: 468493 - DNA, 228 bp, Homo sapiens; identical to SEQ ID NO: 467809
  chr9:13279406-13279634
  hypo
  lymphoid_neoplasm vs. renal,cervical,melanoma,uterine

SEQ ID NO: 468494 - DNA, 26 bp, Homo sapiens
  chr9:13279749-13279775
  hypo
  lymphoid_neoplasm vs. renal,cervical,melanoma,uterine
ggggacgcggccgagcaggcctgtgc

SEQ ID NO: 468495 - DNA, 602 bp, Homo sapiens; identical to SEQ ID NO: 467811
  chr9:14313785-14314387
  hypo
  lymphoid_neoplasm vs. cervical,pancreas_gallbladder, renal,breast,lung,head_and_neck,bladder_and_urothelial,ovary, upper_gi

SEQ ID NO: 468496 - DNA, 952 bp, Homo sapiens; identical to SEQ ID NO: 467812
  chr9:14313943-14314895
  hypo
  lymphoid_neoplasm vs. cervical,thyroid, pancreas_gallbladder,bladder_and_urothelial,renal,sarcoma, breast,colorectal,lung,upper_gi,uterine,non_cancer

SEQ ID NO: 468497 - DNA, 983 bp, Homo sapiens; identical to SEQ ID NO: 467813
  chr9:14314414-14315397
  hypo
  lymphoid_neoplasm vs. pancreas_gallbladder,renal,lung, liver_bileduct,thyroid,upper_gi,colorectal,breast,prostate, anorectal,non_cancer,cervical,bladder_and_urothelial,uterine, head_and_neck,ovary,melanoma

SEQ ID NO: 468498 - DNA, 897 bp, Homo sapiens; identical to SEQ ID NO: 467814
  chr9:14314899-14315796
  hypo
  lymphoid_neoplasm vs. liver_bileduct,ovary,lung, pancreas_gallbladder,prostate,colorectal,cervical,upper_gi, anorectal,breast,thyroid,non_cancer,renal,uterine,sarcoma, bladder_and_urothelial,head_and_neck

SEQ ID NO: 468499 - DNA, 132 bp, Homo sapiens; identical to SEQ ID NO: 467816
  chr9:16871284-16871416
  hypo
  lymphoid_neoplasm vs. ovary

SEQ ID NO: 468500 - DNA, 300 bp, Homo sapiens; identical to SEQ ID NO: 467823
  chr9:29212828-29213128
  hypo
  lymphoid_neoplasm vs. multiple_myeloma,sarcoma,melanoma

SEQ ID NO: 468501 - DNA, 283 bp, Homo sapiens; identical to SEQ ID NO: 467824
  chr9:35161771-35162054
  hypo
  lymphoid_neoplasm vs. upper_gi,anorectal, bladder_and_urothelial,breast,lung,colorectal,prostate,renal

SEQ ID NO: 468502 - DNA, 423 bp, Homo sapiens; identical to SEQ ID NO: 467837
  chr9:79520881-79521304
  hypo
  lymphoid_neoplasm vs. multiple_myeloma

SEQ ID NO: 468503 - DNA, 210 bp, Homo sapiens; identical to SEQ ID NO: 372117
  chr9:79521333-79521543
  hypo
  lymphoid_neoplasm vs. multiple_myeloma

SEQ ID NO: 468504 - DNA, 419 bp, Homo sapiens; identical to SEQ ID NO: 347028
  chr9:80645902-80646321
  hypo
  lymphoid_neoplasm vs. cervical,breast,myeloid_neoplasm, thyroid,renal,bladder_and_urothelial,prostate,lung,non_cancer, liver_bileduct,upper_gi,melanoma,ovary

SEQ ID NO: 468505 - DNA, 422 bp, Homo sapiens; identical to SEQ ID NO: 467845
  chr9:80645902-80646324
  hypo
  lymphoid_neoplasm vs. liver_bileduct,lung,renal,cervical, head_and_neck,myeloid_neoplasm,melanoma

SEQ ID NO: 468506 - DNA, 309 bp, Homo sapiens; identical to SEQ ID NO: 467846
  chr9:80646509-80646818
  hypo
  lymphoid_neoplasm vs. liver_bileduct,lung,renal,cervical, head_and_neck,myeloid_neoplasm,melanoma

SEQ ID NO: 468507 - DNA, 663 bp, Homo sapiens; identical to SEQ ID NO: 467847
  chr9:80646509-80647172
  hypo
  lymphoid_neoplasm vs. ovary,upper_gi,sarcoma,renal, myeloid_neoplasm,cervical,liver_bileduct,lung,anorectal,breast

SEQ ID NO: 468508 - DNA, 341 bp, Homo sapiens; identical to SEQ ID NO: 467849
  chr9:80646831-80647172
  hypo
  lymphoid_neoplasm vs. liver_bileduct, bladder_and_urothelial,renal,upper_gi,colorectal,sarcoma,ovary, cervical,pancreas_gallbladder,lung,melanoma,prostate, head_and_neck,thyroid,breast,myeloid_neoplasm

SEQ ID NO: 468509 - DNA, 432 bp, Homo sapiens; identical to SEQ ID NO: 459896
  chr9:89561318-89561750
  hypo
  lymphoid_neoplasm vs. ovary,prostate,non_cancer,cervical, sarcoma,myeloid_neoplasm

SEQ ID NO: 468510 - DNA, 432 bp, Homo sapiens; identical to SEQ ID NO: 459896
  chr9:89561318-89561750
  hypo
  lymphoid_neoplasm vs. cervical,sarcoma,anorectal, head_and_neck

SEQ ID NO: 468511 - DNA, 494 bp, Homo sapiens; identical to SEQ ID NO: 350894
  chr9:89561779-89562273
  hypo
  lymphoid_neoplasm vs. cervical,sarcoma,anorectal, head_and_neck

SEQ ID NO: 468512 - DNA, 277 bp, Homo sapiens; identical to SEQ ID NO: 467856
  chr9:90112514-90112791
  hypo
  lymphoid_neoplasm vs. pancreas_gallbladder,renal, liver_bileduct,upper_gi,bladder_and_urothelial,sarcoma, anorectal,non_cancer

SEQ ID NO: 468513 - DNA, 310 bp, Homo sapiens; identical to SEQ ID NO: 340239
  chr9:95492133-95492443
  hypo
  lymphoid_neoplasm vs. liver_bileduct,cervical,upper_gi, breast,colorectal,lung

SEQ ID NO: 468514 - DNA, 175 bp, Homo sapiens; identical to SEQ ID NO: 458347
  chr9:96717633-96717808
  hypo
  lymphoid_neoplasm vs. myeloid_neoplasm,non_cancer, melanoma,sarcoma

SEQ ID NO: 468515 - DNA, 9 bp, Homo sapiens
  chr9:96717840-96717849
  hypo
  lymphoid_neoplasm vs. myeloid_neoplasm,non_cancer, melanoma,sarcoma
cgcacgccc

SEQ ID NO: 468516 - DNA, 175 bp, Homo sapiens; identical to SEQ ID NO: 458347
  chr9:96717633-96717808
  hypo
  lymphoid_neoplasm vs. anorectal

SEQ ID NO: 468517 - DNA, 9 bp, Homo sapiens
  chr9:96717840-96717849
  hypo
  lymphoid_neoplasm vs. anorectal
cgcacgccc

SEQ ID NO: 468518 - DNA, 28 bp, Homo sapiens
  chr9:104248623-104248651
  hypo
  lymphoid_neoplasm vs. upper_gi
gctggtttttcctggtcctgggagggac

SEQ ID NO: 468519 - DNA, 149 bp, Homo sapiens; identical to SEQ ID NO: 456192
  chr9:104248697-104248846
  hypo
  lymphoid_neoplasm vs. upper_gi

SEQ ID NO: 468520 - DNA, 186 bp, Homo sapiens; identical to SEQ ID NO: 347048
  chr9:104248975-104249161
  hypo
  lymphoid_neoplasm vs. upper_gi

SEQ ID NO: 468521 - DNA, 690 bp, Homo sapiens; identical to SEQ ID NO: 333804
  chr9:132258226-132258916
  hypo
  lymphoid_neoplasm vs. liver_bileduct,head_and_neck, cervical

SEQ ID NO: 468522 - DNA, 100 bp, Homo sapiens; identical to SEQ ID NO: 467904
  chr9:138986173-138986273
  hypo
  lymphoid_neoplasm vs. liver_bileduct

SEQ ID NO: 468523 - DNA, 619 bp, Homo sapiens; identical to SEQ ID NO: 467905
  chr9:138986333-138986952
  hypo
  lymphoid_neoplasm vs. liver_bileduct

SEQ ID NO: 468524 - DNA, 689 bp, Homo sapiens; identical to SEQ ID NO: 467906
  chr9:138986469-138987158
  hypo
  lymphoid_neoplasm vs. pancreas_gallbladder

SEQ ID NO: 468525 - DNA, 284 bp, Homo sapiens; identical to SEQ ID NO: 467907
  chr9:138987167-138987451
  hypo
  lymphoid_neoplasm vs. pancreas_gallbladder

SEQ ID NO: 468526 - DNA, 198 bp, Homo sapiens; identical to SEQ ID NO: 467908
  chr9:138986960-138987158
  hypo
  lymphoid_neoplasm vs. pancreas_gallbladder

SEQ ID NO: 468527 - DNA, 563 bp, Homo sapiens; identical to SEQ ID NO: 359462
  chr9:138987167-138987730
  hypo
  lymphoid_neoplasm vs. pancreas_gallbladder

SEQ ID NO: 468528 - DNA, 129 bp, Homo sapiens; identical to SEQ ID NO: 467912
  chrX:2846679-2846808
  hypo
  lymphoid_neoplasm vs. multiple_myeloma,upper_gi, liver_bileduct

SEQ ID NO: 468529 - DNA, 220 bp, Homo sapiens; identical to SEQ ID NO: 467913
  chrX:2846856-2847076
  hypo
  lymphoid_neoplasm vs. multiple_myeloma,upper_gi, liver_bileduct

SEQ ID NO: 468530 - DNA, 314 bp, Homo sapiens; identical to SEQ ID NO: 362110
  chrX:2847196-2847510
  hypo
  lymphoid_neoplasm vs. multiple_myeloma,upper_gi, liver_bileduct

SEQ ID NO: 468531 - DNA, 10 bp, Homo sapiens
  chrX:8698495-8698505
  hypo
  lymphoid_neoplasm vs. multiple_myeloma
cgcgaacgcg

SEQ ID NO: 468532 - DNA, 584 bp, Homo sapiens; identical to SEQ ID NO: 336742
  AC211344.3_7702-13588:3943-4527
  hyper
  melanoma vs. cervical,colorectal,multiple_myeloma, upper_gi,bladder_and_urothelial,lymphoid_neoplasm,breast, pancreas_gallbladder,uterine,prostate,myeloid_neoplasm,thyroid, lung,non_cancer

SEQ ID NO: 468533 - DNA, 195 bp, Homo sapiens
  chr1:2460612-2460807
  hyper
  melanoma vs. bladder_and_urothelial,myeloid_neoplasm, thyroid,head_and_neck,uterine,non_cancer,sarcoma,ovary, multiple_myeloma,colorectal,lung,pancreas_gallbladder,breast, anorectal
cgggcggccggggacttcccagaagtcacttgcttaaatgcaaacacagaacaaccccatggggtcagacacttggcagaagatgggccctgattgtcctaaaacggcagggactctgcacacacattctctgagaatggggctcctgcgggccggccagcttggggccagagccttccggagaagggcgcgtcc

SEQ ID NO: 468534 - DNA, 414 bp, Homo sapiens
  chr1:2460898-2461312
  hyper
  melanoma vs. bladder_and_urothelial,myeloid_neoplasm, thyroid,head_and_neck,uterine,non_cancer,sarcoma,ovary, multiple_myeloma,colorectal,lung,pancreas_gallbladder,breast, anorectal
cccgccgggtcaccagggccgccagaggccgcaggcgggctggtgcgcggcggcggcggcggcggtggccttggcggagagcgcgggcgggggcgcggcgcccggcgccttgggctccttggcgggcgcggcgggcgcggccgggggccgctggaagtggtacagcagcttcatctgcgtgtcgctggcggcgtggagcgtcaggaactgcacggcctcctgcaggcaccacgagtagccttcgctgtagtcctggtgcaggctcttggggccggcggcggcgacgaaggctgcggggagacgcggcggcggtgagcgggcggcggggcgcgggggagccggggcgcggtgggaactcggggcgcggggggcccgggcgcgctcacctttgctgtgcttcaggtagctgacagc

SEQ ID NO: 468535 - DNA, 288 bp, Homo sapiens
  chr1:2461024-2461312
  hyper
  melanoma vs. anorectal,myeloid_neoplasm,non_cancer, sarcoma,head_and_neck,bladder_and_urothelial,colorectal,uterine, pancreas_gallbladder,ovary,thyroid,renal,multiple_myeloma,lung, cervical,upper_gi,breast
cgcggcgggcgcggccgggggccgctggaagtggtacagcagcttcatctgcgtgtcgctggcggcgtggagcgtcaggaactgcacggcctcctgcaggcaccacgagtagccttcgctgtagtcctggtgcaggctcttggggccggcggcggcgacgaaggctgcggggagacgcggcggcggtgagcgggcggcggggcgcgggggagccggggcgcggtgggaactcggggcgcggggggcccgggcgcgctcacctttgctgtgcttcaggtagctgacagc

SEQ ID NO: 468536 - DNA, 21 bp, Homo sapiens
  chr1:2461988-2462009
  hyper
  melanoma vs. anorectal,myeloid_neoplasm,non_cancer, sarcoma,head_and_neck,bladder_and_urothelial,colorectal,uterine, pancreas_gallbladder,ovary,thyroid,renal,multiple_myeloma,lung, cervical,upper_gi,breast
ccttttcccaggccgccaaac

SEQ ID NO: 468537 - DNA, 443 bp, Homo sapiens; identical to SEQ ID NO: 344934
  chr1:2461988-2462431
  hyper
  melanoma vs. colorectal,cervical,bladder_and_urothelial, anorectal,myeloid_neoplasm,non_cancer,head_and_neck,ovary, multiple_myeloma,sarcoma,pancreas_gallbladder,uterine,renal, thyroid,lung,upper_gi,breast

SEQ ID NO: 468538 - DNA, 165 bp, Homo sapiens; identical to SEQ ID NO: 330668
  chr1:6265347-6265512
  hyper
  melanoma vs. liver_bileduct,upper_gi, pancreas_gallbladder,renal,bladder_and_urothelial

SEQ ID NO: 468539 - DNA, 696 bp, Homo sapiens
  chr1:6265789-6266485
  hyper
  melanoma vs. renal,head_and_neck,upper_gi,thyroid, cervical,anorectal,pancreas_gallbladder,non_cancer, liver_bileduct,uterine,ovary,breast,prostate, bladder_and_urothelial,myeloid_neoplasm,colorectal,
  CONT. FROM ABOVE: multiple_myeloma,lung,sarcoma
cgtgagccaccgcgcccggcctacccttgaagaccccgcagccaaggtcctccggccccgctctgcgcggcgctctggtcttggggctccggactctgtcatgccgggcaggggccagtccgatccttgcacccttgcctggcaccgtccctggagccttggcgtcctggcctctcctccccgcgggctggaggtggagtggccgggccggaaccagtgcgcaaagcagatggcgagcgcggaggtcggttcggccccgccgcgcctcaaggcagcagccaccctggggaaggtggatgccggaagaggcgtcgcctgcgggtcacccagaggacacccggcggggaattccgagggtgggagtgaggagaggtaggagaggccacggcagagggaggccccgcgcagagtgggaaccatcgcccggtgcgggcctgaacttccagggccggctactcctcggcagagcgaccgcgcggtgtctcagagcgcggcccggagccgcactaagagcgctggacggcgggagagaggctcggaggaccggtagctcccagcaaagcggcccagcgggtaggtacaaggccccgcccctcgccagtcctcactgcctgttctccctgcgccggggagctccaggccccagccctaacctgggccctagcggctccccactccatgacctctggacgccca

SEQ ID NO: 468540 - DNA, 64 bp, Homo sapiens; identical to SEQ ID NO: 344936
  chr1:6266713-6266777
  hyper
  melanoma vs. renal,head_and_neck,upper_gi,thyroid, cervical,anorectal,pancreas_gallbladder,non_cancer, liver_bileduct,uterine,ovary,breast,prostate, bladder_and_urothelial,myeloid_neoplasm,colorectal,
  CONT. FROM ABOVE: multiple_myeloma,lung,sarcoma

SEQ ID NO: 468541 - DNA, 5 bp, Homo sapiens
  chr1:6309178-6309183
  hyper
  melanoma vs. anorectal,prostate,thyroid
cggga

SEQ ID NO: 468542 - DNA, 2 bp, Homo sapiens
  chr1:6310089-6310091
  hyper
  melanoma vs. anorectal,prostate,thyroid
cc

SEQ ID NO: 468543 - DNA, 517 bp, Homo sapiens; identical to SEQ ID NO: 455503
  chr1:12226892-12227409
  hyper
  melanoma vs. anorectal

SEQ ID NO: 468544 - DNA, 207 bp, Homo sapiens; identical to SEQ ID NO: 455504
  chr1:12227438-12227645
  hyper
  melanoma vs. anorectal

SEQ ID NO: 468545 - DNA, 247 bp, Homo sapiens; identical to SEQ ID NO: 455505
  chr1:12227162-12227409
  hyper
  melanoma vs. anorectal,multiple_myeloma,colorectal

SEQ ID NO: 468546 - DNA, 207 bp, Homo sapiens; identical to SEQ ID NO: 455504
  chr1:12227438-12227645
  hyper
  melanoma vs. anorectal,multiple_myeloma,colorectal

SEQ ID NO: 468547 - DNA, 844 bp, Homo sapiens
  chr1:12677012-12677856
  hyper
  melanoma vs. liver_bileduct,sarcoma,breast,lung, bladder_and_urothelial,ovary,head_and_neck,pancreas_gallbladder, upper_gi,colorectal,renal,prostate,anorectal,uterine
cgactagctcagcactcgtgggtggcgcggagaagtggggtggccggcgactctcagctcccgggcgcgggatcccgcagcggcagcaggtgggcttacccccgcccctgcggccccccactccctggagtcgcagtgcctggtacctttctggcgccgcgctccgcgaactcgcgggcgagctgacgcccgatgcctctcccgccgccggtgatgaggacgttctcccgcgacaggtcccgcagcttggcgggcagcaccagtccgacggctgctttcaccaccagatagatcatctgtagagggaacatcaccagcgcgcccagccgtttccacaccatcctccgcgccgcggagccgggcagggggcgaaactccccgggccgagcaatacaggaattaaaaaacaccccgaacaataaatagtaaaccgaataaggaggagagaggcgtcccacctggccactcttgaaatcacctcttcccaaatgcaaagcaccgggtgagaaaaagaaaaaaaaaaaaaaaaaaaaagataaattctcctctgggggagaaaaagcgtctcctaaggttgggacggtaaaagaggtggagggggaagccggaggtggaaagttctaacaagaagtttcttgccccagcagccgtttcggctggggaattctcaggtaatgtttacagactgacagaggagtttagggaggggaagaaaaaaaaaaaaaggcaccaaccacacgcgcgcaccctgcctcggtcccgcggtttcaaagtgcaagattaaaaaaaaaaaaaaaaaaaaaaaaaagctgattccaaattgtagcgcccccacccccacccc

SEQ ID NO: 468548 - DNA, 985 bp, Homo sapiens
  chr1:12677391-12678376
  hyper
  melanoma vs. liver_bileduct,breast,lung,sarcoma,uterine, pancreas_gallbladder,bladder_and_urothelial,head_and_neck, upper_gi,ovary,colorectal,renal,anorectal,myeloid_neoplasm, cervical
cgggccgagcaatacaggaattaaaaaacaccccgaacaataaatagtaaaccgaataaggaggagagaggcgtcccacctggccactcttgaaatcacctcttcccaaatgcaaagcaccgggtgagaaaaagaaaaaaaaaaaaaaaaaaaaagataaattctcctctgggggagaaaaagcgtctcctaaggttgggacggtaaaagaggtggagggggaagccggaggtggaaagttctaacaagaagtttcttgccccagcagccgtttcggctggggaattctcaggtaatgtttacagactgacagaggagtttagggaggggaagaaaaaaaaaaaaaggcaccaaccacacgcgcgcaccctgcctcggtcccgcggtttcaaagtgcaagattaaaaaaaaaaaaaaaaaaaaaaaaaagctgattccaaattgtagcgcccccacccccaccccgtctccagaaaaaaaaaaaaaaaaaaaagtggggggaaaaagtgcttggagctcccaatttcagcccgcgaaagtctcccgactcattgctattcttgggctcaggaaattgcttaaacgcgatctgattgccagcaacgtgcaggagaagtggggggtccgggtgtcagtttctttacgtgcagcgctcgccctcgcgcgcgctcgctcgctccggctccctccctccctctctgttccagcagaggctgggagttgccgctcgatccagctccccttctctccctttttagcatttattgccttctttttgtcctttccaacttggagagggtccgggtgtggagcgcgcgtggatcggacgccttggtctgcgcggccctattcattcgctccccgggcagccgcgtcgcggagagggcggcccctttttcccccattttttcaataccccattaagtctgattgacagttaaagttgttgggaggcttcactaccgttcctctgagtggctgctgc

SEQ ID NO: 468549 - DNA, 839 bp, Homo sapiens; identical to SEQ ID NO: 346319
  chr1:12677922-12678761
  hyper
  melanoma vs. lung,head_and_neck,bladder_and_urothelial, upper_gi,breast,ovary,renal,sarcoma,uterine, pancreas_gallbladder,anorectal,colorectal,cervical, liver_bileduct,prostate,myeloid_neoplasm,thyroid,non_cancer,
  CONT. FROM ABOVE: multiple_myeloma

SEQ ID NO: 468550 - DNA, 530 bp, Homo sapiens
  chr1:17445328-17445858
  hyper
  melanoma vs. breast
cggcaagtctccgcggaagctccgctgaactgggagtgggaagcaggagaggggctgggttgaggtgggtccgaggggaagtgaggtgcggaggggaagtgaaaggggagaggacggcagggaagctgaaggggtgtgaggtcccccgggaggagaactggagagggccagacggagggttacgggtgaaagggagggtctgtgagggagctggggctgaggctgtgttagggggtctgggagagtctcagggtttctggaaggtggacacaaggttcgggggttgtcaggtttctggatgagattcttaggatttctgggctcgggggctcgggatgagggacaactcgggctggacaaaggctgtccacgtccccgagtctgagcgcgtctcaggatttctgggctcgagatctcggcccgggcatcacggtgggccggctcacctgtagacatcggtccagaggtaggtgcccagcacgtacaccgcctccacgcggctcccgtactgcagccgcacggtccgctcg

SEQ ID NO: 468551 - DNA, 144 bp, Homo sapiens; identical to SEQ ID NO: 356681
  chr1:17445943-17446087
  hyper
  melanoma vs. breast

SEQ ID NO: 468552 - DNA, 259 bp, Homo sapiens; identical to SEQ ID NO: 465897
  chr1:20810336-20810595
  hyper
  melanoma vs. liver_bileduct,renal,bladder_and_urothelial

SEQ ID NO: 468553 - DNA, 260 bp, Homo sapiens; identical to SEQ ID NO: 465898
  chr1:20810930-20811190
  hyper
  melanoma vs. liver_bileduct,renal,bladder_and_urothelial

SEQ ID NO: 468554 - DNA, 68 bp, Homo sapiens; identical to SEQ ID NO: 465899
  chr1:20811219-20811287
  hyper
  melanoma vs. liver_bileduct,renal,bladder_and_urothelial

SEQ ID NO: 468555 - DNA, 260 bp, Homo sapiens; identical to SEQ ID NO: 465898
  chr1:20810930-20811190
  hyper
  melanoma vs. liver_bileduct

SEQ ID NO: 468556 - DNA, 68 bp, Homo sapiens; identical to SEQ ID NO: 465899
  chr1:20811219-20811287
  hyper
  melanoma vs. liver_bileduct

SEQ ID NO: 468557 - DNA, 66 bp, Homo sapiens; identical to SEQ ID NO: 369033
  chr1:20811755-20811821
  hyper
  melanoma vs. liver_bileduct

SEQ ID NO: 468558 - DNA, 234 bp, Homo sapiens; identical to SEQ ID NO: 330728
  chr1:24742017-24742251
  hyper
  melanoma vs. liver_bileduct,lymphoid_neoplasm,lung, head_and_neck,upper_gi,renal

SEQ ID NO: 468559 - DNA, 796 bp, Homo sapiens; identical to SEQ ID NO: 330729
  chr1:24882115-24882911
  hyper
  melanoma vs. breast,pancreas_gallbladder,lung,colorectal, cervical,uterine,anorectal,prostate,ovary,liver_bileduct, multiple_myeloma,upper_gi,myeloid_neoplasm,thyroid, head_and_neck,non_cancer,bladder_and_urothelial,renal

SEQ ID NO: 468560 - DNA, 738 bp, Homo sapiens; identical to SEQ ID NO: 330739
  chr1:28286184-28286922
  hyper
  melanoma vs. liver_bileduct,pancreas_gallbladder, prostate,breast,renal,uterine,upper_gi,colorectal,head_and_neck, ovary,lung,cervical,myeloid_neoplasm,bladder_and_urothelial, thyroid,multiple_myeloma,anorectal,non_cancer

SEQ ID NO: 468561 - DNA, 24 bp, Homo sapiens
  chr1:32226178-32226202
  hyper
  melanoma vs. lung,ovary,uterine,pancreas_gallbladder
cgctgggtggcgggggaggggcgg

SEQ ID NO: 468562 - DNA, 143 bp, Homo sapiens; identical to SEQ ID NO: 356717
  chr1:32226391-32226534
  hyper
  melanoma vs. lung,ovary,uterine,pancreas_gallbladder

SEQ ID NO: 468563 - DNA, 21 bp, Homo sapiens
  chr1:36042458-36042479
  hyper
  melanoma vs. multiple_myeloma
cgggacgcggccgcgcggact

SEQ ID NO: 468564 - DNA, 697 bp, Homo sapiens
  chr1:39956640-39957337
  hyper
  melanoma vs. sarcoma,cervical
cggagcctcctccgcaaagctggatcagtaccggggacgcagggcgcacagctagggctggcgggggcggcccgactggggcgctgcctgggctcacgcgggagccaggtgggggacgcagggagaagcagccgagcaggtgccgagaaggaggcgcccgcagaagcgcatgcaggggccacggggaaggcgccaggaggcggtgaggggccgcggtggccggaacccgggccggctgctgcgggcagaggaacaggccccacccgcggggcttggctggcaccgcccggctctccagacggggctacggccgcgtgtcgggcccggtggcgaccacggcacaccacggcgaggcagccgggtggcaccactggcgggaccgggacggcgccgcggccttaggatctctgcgccgaggcccgcggcgggagccacgacggccctgaccacgctgacgcccaggctgcgggctcctcgcccggaccaaccgccagccacgccgaggtcgcacctcggggtcgccccacccgcaacacctgccgccgcccggggctcctagcgggcgcggcctccgcgcccaggccccgcccccgcgcccccattggtcagtcccgggggtgggcgggcggcacagacggctgagccggggcaaggactcgcgggaatcgcgccgcccgggtcgctgccggagctcgcc

SEQ ID NO: 468565 - DNA, 352 bp, Homo sapiens
  chr1:40782323-40782675
  hyper
  melanoma vs. cervical,multiple_myeloma,ovary,non_cancer, prostate,breast,myeloid_neoplasm,head_and_neck,thyroid
cgcgcgcccgcagcccccggcggccctcggaagggagacgtgggtaggcgggcagggccgagaggccgcctcggggcgacagcggcgtctggttggagccggcgccccctgggaggcggcgggggcggaggctgcgcagcgggtgaatgagcaccattgtatgccccgccacctgggctccccgggctgccaggaccgggcgccagctcctgccccacgctgcctgtcccgggccgggccgcgcgtctggggacgggtcccgtttgactctccggctcagccacctccattcacggtgccgcgatgggcaccatgtatgcacccaccgaggggacctgcccgcggcgctgtc

SEQ ID NO: 468566 - DNA, 52 bp, Homo sapiens; identical to SEQ ID NO: 349222
  chr1:40782908-40782960
  hyper
  melanoma vs. cervical,multiple_myeloma,ovary,non_cancer, prostate,breast,myeloid_neoplasm,head_and_neck,thyroid

SEQ ID NO: 468567 - DNA, 21 bp, Homo sapiens
  chr1:42128212-42128233
  hyper
  melanoma vs. lymphoid_neoplasm,head_and_neck
cgggatgccttcgcggccggg

SEQ ID NO: 468568 - DNA, 189 bp, Homo sapiens
  chr1:46954676-46954865
  hyper
  melanoma vs. pancreas_gallbladder,colorectal,breast, uterine,ovary,upper_gi,cervical,head_and_neck,thyroid,lung, bladder_and_urothelial,non_cancer
cgagcctctgcctgattgagagccggccccagaacgtcctcttcctatgagccggttcccgcctggagggagcagagcgctggtaagagcaggaccatctcaggcccaggattttcccgaagtggaccggtcgccgagtgtgtttgttcccccagtcccggcgacaggtgcctgtgctgtgtgtgaagc

SEQ ID NO: 468569 - DNA, 392 bp, Homo sapiens; identical to SEQ ID NO: 349231
  chr1:46954904-46955296
  hyper
  melanoma vs. pancreas_gallbladder,colorectal,breast, uterine,ovary,upper_gi,cervical,head_and_neck,thyroid,lung, bladder_and_urothelial,non_cancer

SEQ ID NO: 468570 - DNA, 137 bp, Homo sapiens; identical to SEQ ID NO: 452716
  chr1:53168691-53168828
  hyper
  melanoma vs. lymphoid_neoplasm

SEQ ID NO: 468571 - DNA, 41 bp, Homo sapiens
  chr1:65468262-65468303
  hyper
  melanoma vs. lymphoid_neoplasm,liver_bileduct,cervical
cgctcagtaacgcagcgctgaggagtaggccaccccggagg

SEQ ID NO: 468572 - DNA, 155 bp, Homo sapiens; identical to SEQ ID NO: 197574
  chr1:65468660-65468815
  hyper
  melanoma vs. lymphoid_neoplasm,liver_bileduct,cervical

SEQ ID NO: 468573 - DNA, 179 bp, Homo sapiens
  chr1:65468817-65468996
  hyper
  melanoma vs. lymphoid_neoplasm,liver_bileduct,cervical
gtgactcggcgggagcccaaaagtttcccaggtttcctcagcctagaaaagcgtgggtgggtgtcccggcctggctccaggcgccctttaagttgtatttcttcgggtaactgggttgccctttaaaatgtggagattgtcctttagaaagaaagaaaatctcacgagctcgctggccc

SEQ ID NO: 468574 - DNA, 61 bp, Homo sapiens; identical to SEQ ID NO: 455531
  chr1:66999412-66999473
  hyper
  melanoma vs. sarcoma

SEQ ID NO: 468575 - DNA, 36 bp, Homo sapiens; identical to SEQ ID NO: 349259
  chr1:66999673-66999709
  hyper
  melanoma vs. sarcoma

SEQ ID NO: 468576 - DNA, 45 bp, Homo sapiens
  chr1:70035044-70035089
  hyper
  melanoma vs. bladder_and_urothelial
cgagaagctggtgaacctgcctattcccaatccagcgctgggtcc

SEQ ID NO: 468577 - DNA, 92 bp, Homo sapiens; identical to SEQ ID NO: 356800
  chr1:70035537-70035629
  hyper
  melanoma vs. bladder_and_urothelial

SEQ ID NO: 468578 - DNA, 61 bp, Homo sapiens; identical to SEQ ID NO: 455537
  chr1:91185065-91185126
  hyper
  melanoma vs. multiple_myeloma,myeloid_neoplasm,thyroid

SEQ ID NO: 468579 - DNA, 171 bp, Homo sapiens; identical to SEQ ID NO: 455538
  chr1:92948154-92948325
  hyper
  melanoma vs. multiple_myeloma,thyroid, bladder_and_urothelial,ovary,non_cancer

SEQ ID NO: 468580 - DNA, 142 bp, Homo sapiens; identical to SEQ ID NO: 344962
  chr1:92949466-92949608
  hyper
  melanoma vs. sarcoma,non_cancer,thyroid,myeloid_neoplasm, multiple_myeloma,bladder_and_urothelial,uterine,ovary, colorectal

SEQ ID NO: 468581 - DNA, 226 bp, Homo sapiens; identical to SEQ ID NO: 452727
  chr1:92949466-92949692
  hyper
  melanoma vs. multiple_myeloma,bladder_and_urothelial, non_cancer,colorectal,lymphoid_neoplasm

SEQ ID NO: 468582 - DNA, 2 bp, Homo sapiens
  chr1:101701717-101701719
  hyper
  melanoma vs. uterine,non_cancer
cg

SEQ ID NO: 468583 - DNA, 289 bp, Homo sapiens; identical to SEQ ID NO: 452731
  chr1:101702081-101702370
  hyper
  melanoma vs. uterine,non_cancer

SEQ ID NO: 468584 - DNA, 289 bp, Homo sapiens; identical to SEQ ID NO: 452731
  chr1:101702081-101702370
  hyper
  melanoma vs. sarcoma

SEQ ID NO: 468585 - DNA, 152 bp, Homo sapiens; identical to SEQ ID NO: 452732
  chr1:101702796-101702948
  hyper
  melanoma vs. sarcoma

SEQ ID NO: 468586 - DNA, 393 bp, Homo sapiens; identical to SEQ ID NO: 452733
  chr1:101702796-101703189
  hyper
  melanoma vs. sarcoma

SEQ ID NO: 468587 - DNA, 185 bp, Homo sapiens; identical to SEQ ID NO: 455547
  chr1:101774910-101775095
  hyper

SEQ ID NO: 468588 - DNA, 25 bp, Homo sapiens
  chr1:101775488-101775513
  hyper
ctcttgtgttgcacttgtgtccccc

SEQ ID NO: 468589 - DNA, 244 bp, Homo sapiens; identical to SEQ ID NO: 346359
  chr1:103574168-103574412
  hyper
  melanoma vs. multiple_myeloma,prostate,non_cancer, sarcoma,myeloid_neoplasm,renal

SEQ ID NO: 468590 - DNA, 306 bp, Homo sapiens; identical to SEQ ID NO: 452735
  chr1:108506290-108506596
  hyper
  melanoma vs. multiple_myeloma,non_cancer, myeloid_neoplasm,lymphoid_neoplasm,thyroid

SEQ ID NO: 468591 - DNA, 122 bp, Homo sapiens; identical to SEQ ID NO: 462242
  chr1:109656099-109656221
  hyper
  melanoma vs. breast,prostate,anorectal,non_cancer, thyroid,myeloid_neoplasm,cervical,upper_gi, bladder_and_urothelial,pancreas_gallbladder,uterine,ovary, colorectal,multiple_myeloma,lung

SEQ ID NO: 468592 - DNA, 204 bp, Homo sapiens; identical to SEQ ID NO: 462243
  chr1:109656291-109656495
  hyper
  melanoma vs. breast,prostate,anorectal,non_cancer, thyroid,myeloid_neoplasm,cervical,upper_gi, bladder_and_urothelial,pancreas_gallbladder,uterine,ovary, colorectal,multiple_myeloma,lung

SEQ ID NO: 468593 - DNA, 63 bp, Homo sapiens; identical to SEQ ID NO: 462244
  chr1:109656432-109656495
  hyper
  melanoma vs. breast,prostate,cervical,anorectal, non_cancer,multiple_myeloma,thyroid,myeloid_neoplasm, bladder_and_urothelial,pancreas_gallbladder,upper_gi,uterine, colorectal,lung

SEQ ID NO: 468594 - DNA, 116 bp, Homo sapiens; identical to SEQ ID NO: 344968
  chr1:109657070-109657186
  hyper
  melanoma vs. breast,prostate,cervical,anorectal, non_cancer,multiple_myeloma,thyroid,myeloid_neoplasm, bladder_and_urothelial,pancreas_gallbladder,upper_gi,uterine, colorectal,lung

SEQ ID NO: 468595 - DNA, 144 bp, Homo sapiens
  chr1:110186004-110186148
  hyper
  melanoma vs. lymphoid_neoplasm,bladder_and_urothelial, upper_gi,breast,multiple_myeloma,head_and_neck, pancreas_gallbladder,cervical,anorectal,prostate,colorectal, uterine
cgtgccccttgcaggtgggtagcgctgagagcagagcagcgcccgcgggactggcctgaggatcccgcaggcaggagggaccccgcgggcctttccctacctgggaggtgcacggttggccaccagggcgcgctgctggactct

SEQ ID NO: 468596 - DNA, 35 bp, Homo sapiens; identical to SEQ ID NO: 349301
  chr1:110186177-110186212
  hyper
  melanoma vs. lymphoid_neoplasm,bladder_and_urothelial, upper_gi,breast,multiple_myeloma,head_and_neck, pancreas_gallbladder,cervical,anorectal,prostate,colorectal, uterine

SEQ ID NO: 468597 - DNA, 736 bp, Homo sapiens; identical to SEQ ID NO: 344971
  chr1:111746588-111747324
  hyper
  melanoma vs. liver_bileduct,lung,multiple_myeloma, pancreas_gallbladder,colorectal,cervical,renal,ovary,upper_gi, head_and_neck,anorectal,non_cancer,thyroid,myeloid_neoplasm, prostate,bladder_and_urothelial,lymphoid_neoplasm,breast,
  CONT. FROM ABOVE: uterine,sarcoma

SEQ ID NO: 468598 - DNA, 637 bp, Homo sapiens; identical to SEQ ID NO: 330936
  chr1:113256965-113257602
  hyper
  melanoma vs. head_and_neck

SEQ ID NO: 468599 - DNA, 47 bp, Homo sapiens; identical to SEQ ID NO: 349313
  chr1:116711292-116711339
  hyper
  melanoma vs. sarcoma

SEQ ID NO: 468600 - DNA, 287 bp, Homo sapiens; identical to SEQ ID NO: 330949
  chr1:118149482-118149769
  hyper
  melanoma vs. sarcoma,breast,pancreas_gallbladder,lung, ovary,upper_gi

SEQ ID NO: 468601 - DNA, 430 bp, Homo sapiens; identical to SEQ ID NO: 330957
  chr1:150669495-150669925
  hyper
  melanoma vs. lymphoid_neoplasm,pancreas_gallbladder, renal,liver_bileduct,colorectal

SEQ ID NO: 468602 - DNA, 154 bp, Homo sapiens; identical to SEQ ID NO: 330960
  chr1:151566699-151566853
  hyper
  melanoma vs. lymphoid_neoplasm,lung,upper_gi, head_and_neck,liver_bileduct,pancreas_gallbladder,breast,ovary, renal,prostate,uterine,colorectal

SEQ ID NO: 468603 - DNA, 2 bp, Homo sapiens
  chr1:153651442-153651444
  hyper
  melanoma vs. anorectal,myeloid_neoplasm,thyroid, multiple_myeloma,cervical,non_cancer
cg

SEQ ID NO: 468604 - DNA, 229 bp, Homo sapiens; identical to SEQ ID NO: 330977
  chr1:156326789-156327018
  hyper
  melanoma vs. liver_bileduct,upper_gi,lung,head_and_neck, colorectal,prostate,breast,pancreas_gallbladder, lymphoid_neoplasm,cervical

SEQ ID NO: 468605 - DNA, 43 bp, Homo sapiens; identical to SEQ ID NO: 455561
  chr1:156390054-156390097
  hyper
  melanoma vs. non_cancer,thyroid,multiple_myeloma, lymphoid_neoplasm,myeloid_neoplasm

SEQ ID NO: 468606 - DNA, 93 bp, Homo sapiens; identical to SEQ ID NO: 346376
  chr1:161276123-161276216
  hyper
  melanoma vs. multiple_myeloma,thyroid,lymphoid_neoplasm, non_cancer,myeloid_neoplasm

SEQ ID NO: 468607 - DNA, 60 bp, Homo sapiens; identical to SEQ ID NO: 346381
  chr1:162792553-162792613
  hyper
  melanoma vs. bladder_and_urothelial,ovary,head_and_neck, myeloid_neoplasm,uterine,thyroid,non_cancer,renal

SEQ ID NO: 468608 - DNA, 227 bp, Homo sapiens; identical to SEQ ID NO: 331035
  chr1:175161560-175161787
  hyper
  melanoma vs. breast,upper_gi,renal,lung,liver_bileduct, pancreas_gallbladder,prostate,bladder_and_urothelial,colorectal, cervical,ovary,head_and_neck,uterine,lymphoid_neoplasm, multiple_myeloma,non_cancer

SEQ ID NO: 468609 - DNA, 110 bp, Homo sapiens; identical to SEQ ID NO: 331048
  chr1:182361452-182361562
  hyper
  melanoma vs. liver_bileduct,sarcoma,lung,breast,ovary, head_and_neck,colorectal

SEQ ID NO: 468610 - DNA, 138 bp, Homo sapiens
  chr1:200271204-200271342
  hyper
  melanoma vs. sarcoma,cervical,breast,anorectal,upper_gi, uterine,pancreas_gallbladder,bladder_and_urothelial,ovary, liver_bileduct,multiple_myeloma,lung,prostate,myeloid_neoplasm, thyroid,non_cancer,lymphoid_neoplasm,head_and_neck,renal
cgcgtaccaaacaacgaagctcctgcccttgggagtttatacacaggctatgttaatatttgcaaagggccccgagtgtctaagcggctaatgaacgtcttgggtcggtttcctcaaaatccagcccattgtttcccc

SEQ ID NO: 468611 - DNA, 528 bp, Homo sapiens; identical to SEQ ID NO: 344985
  chr1:200271373-200271901
  hyper
  melanoma vs. sarcoma,cervical,breast,anorectal,upper_gi, uterine,pancreas_gallbladder,bladder_and_urothelial,ovary, liver_bileduct,multiple_myeloma,lung,prostate,myeloid_neoplasm, thyroid,non_cancer,lymphoid_neoplasm,head_and_neck,renal

SEQ ID NO: 468612 - DNA, 43 bp, Homo sapiens; identical to SEQ ID NO: 465975
  chr1:201252452-201252495
  hyper
  melanoma vs. head_and_neck

SEQ ID NO: 468613 - DNA, 134 bp, Homo sapiens; identical to SEQ ID NO: 356971
  chr1:201252816-201252950
  hyper
  melanoma vs. head_and_neck

SEQ ID NO: 468614 - DNA, 494 bp, Homo sapiens; identical to SEQ ID NO: 331083
  chr1:204347108-204347602
  hyper
  melanoma vs. liver_bileduct

SEQ ID NO: 468615 - DNA, 179 bp, Homo sapiens; identical to SEQ ID NO: 331096
  chr1:212838662-212838841
  hyper
  melanoma vs. lymphoid_neoplasm,liver_bileduct, pancreas_gallbladder,upper_gi,bladder_and_urothelial,renal, prostate,multiple_myeloma,colorectal,sarcoma,uterine,non_cancer, thyroid

SEQ ID NO: 468616 - DNA, 457 bp, Homo sapiens
  chr1:218519313-218519770
  hyper
  melanoma vs. liver_bileduct,head_and_neck,sarcoma,breast, pancreas_gallbladder,lung,ovary,prostate,cervical
cggcacccgaccgagtaccgagcgccctgcgaagcgcaccctcctccccgcggtgcgctgggctcgcccccagcgcgcgcacacgcacacacacacacacacacacacacgcacgcacacacgtgtgcgcttctctgctccggagctgctgctgctcctgctctcagcgccgcagtggaaggcaggaccgaaccgctccttctttaaatatataaatttcagcccaggtcagcctcggcggcccccctcaccgcgctcccggcgcccctcccgtcagttcgccagctgccagccccgggaccttttcatctcttcccttttggccggaggagccgagttcagatccgccactccgcacccgagactgacacactgaactccacttcctcctcttaaatttatttctacttaatagccactcgtctctttttttccccatctcattgctccaagaatt

SEQ ID NO: 468617 - DNA, 1 bp, Homo sapiens
  chr1:218520063-218520064
  hyper
  melanoma vs. sarcoma
c

SEQ ID NO: 468618 - DNA, 4 bp, Homo sapiens
  chr1:218520772-218520776
  hyper
  melanoma vs. sarcoma
cgat

SEQ ID NO: 468619 - DNA, 54 bp, Homo sapiens; identical to SEQ ID NO: 357007
  chr1:218520805-218520859
  hyper
  melanoma vs. sarcoma

SEQ ID NO: 468620 - DNA, 936 bp, Homo sapiens; identical to SEQ ID NO: 331128
  chr1:225614356-225615292
  hyper
  melanoma vs. liver_bileduct

SEQ ID NO: 468621 - DNA, 270 bp, Homo sapiens; identical to SEQ ID NO: 466012
  chr1:228871596-228871866
  hyper
  melanoma vs. liver_bileduct

SEQ ID NO: 468622 - DNA, 252 bp, Homo sapiens; identical to SEQ ID NO: 349424
  chr1:228872003-228872255
  hyper
  melanoma vs. liver_bileduct

SEQ ID NO: 468623 - DNA, 58 bp, Homo sapiens; identical to SEQ ID NO: 349429
  chr1:231297569-231297627
  hyper
  melanoma vs. non_cancer,ovary,prostate

SEQ ID NO: 468624 - DNA, 199 bp, Homo sapiens; identical to SEQ ID NO: 369447
  chr1:232941054-232941253
  hyper
  melanoma vs. liver_bileduct

SEQ ID NO: 468625 - DNA, 345 bp, Homo sapiens
  chr1:232941255-232941600
  hyper
  melanoma vs. liver_bileduct
ttggaagcccggctgctgccgtcccccgctgccgcagtggagcaggaggaggaagaggaggaaaaggagcagggggaggcctcgtcgccgcgcggtctgtgccccgccgtggccttccgcctgctggacttccccacgctgttggtttaccctcctgacggccccggcgctcccgccgccgaaccgtggcccggtgtcatccgcttcggtcgcggcaagtcctgcctcttccgcctgcagcctgctaccctgcactgccggctcctgcggaccccgcttgccaccttgctgctgcagctgccccctgggcgcccgacgcccaccccacagctcctgggggcctgc

SEQ ID NO: 468626 - DNA, 82 bp, Homo sapiens
  chr1:235811934-235812016
  hyper
  melanoma vs. cervical,prostate,breast,ovary,thyroid
cggcacacctcactcatgagcagacgacaggactggcacgttttaatggagcacacgggcgcagcctaggcggccttttgct

SEQ ID NO: 468627 - DNA, 184 bp, Homo sapiens; identical to SEQ ID NO: 279411
  chr1:235813161-235813345
  hyper
  melanoma vs. anorectal,sarcoma

SEQ ID NO: 468628 - DNA, 28 bp, Homo sapiens
  chr10:6018609-6018637
  hyper
  melanoma vs. liver_bileduct,lymphoid_neoplasm,upper_gi, renal,colorectal
cgggacaaaacccctaggaatcgctcat

SEQ ID NO: 468629 - DNA, 298 bp, Homo sapiens; identical to SEQ ID NO: 350977
  chr10:6018666-6018964
  hyper
  melanoma vs. liver_bileduct,lymphoid_neoplasm,upper_gi, renal,colorectal

SEQ ID NO: 468630 - DNA, 100 bp, Homo sapiens
  chr10:13933035-13933135
  hyper
  melanoma vs. ovary,multiple_myeloma,breast,prostate, uterine,myeloid_neoplasm,thyroid,non_cancer,sarcoma,anorectal, bladder_and_urothelial
gagcagctgcctccaatatagaagcactgcatttagccaattttaaatgagcacgtactaaagggggttcccttctgttctcctccccttccgagcgtcc

SEQ ID NO: 468631 - DNA, 191 bp, Homo sapiens
  chr10:13933246-13933437
  hyper
  melanoma vs. ovary,multiple_myeloma,breast,prostate, uterine,myeloid_neoplasm,thyroid,non_cancer,sarcoma,anorectal, bladder_and_urothelial
cgccctgtcctgcacccaaaggaaagggctcccctggcactctcagaaaatggttttaaaaaaagcctacacagctctgcctaaagccatgtcctttcctatctccccgggtagattcagacagcgtgggactgaggtgcccaaggaaagtaggtgtgtgtgtgccgaggggagggttgcagaagaaagca

SEQ ID NO: 468632 - DNA, 193 bp, Homo sapiens; identical to SEQ ID NO: 351011
  chr10:24497856-24498049
  hyper
  melanoma vs. sarcoma

SEQ ID NO: 468633 - DNA, 472 bp, Homo sapiens
  chr10:25241259-25241731
  hyper
  melanoma vs. lung,sarcoma,liver_bileduct, pancreas_gallbladder,bladder_and_urothelial,breast
cgggactcagagtttcgtcagattgggggcggggagaggaggcccgggtccgaggatggaagcgatccccgccgggagggagaacaaagcggtggccctctctctcccccgacgcacggcaagcatttaatctacaagcagggtgccagggagggaggggagcgggccgagccccaaaatagggagtttgcatttaccacgacgcctcgcccgtagtctggcgcctcctcgctgctcccggccatgtttctcccggggaacgcgggaagggaagacggcgcgggaaggagcagggagggcgaaggctgcgtgggggatgggacgtggggatggggacggggacggggacggggacggggacggggacgggtccgccccgccccgggcccgccggcgggaagcagcggcctgacgcggatccatggccccggcgctgcgccccctcccctggctaggccgcgggggcgcgggg

SEQ ID NO: 468634 - DNA, 17 bp, Homo sapiens
  chr10:29011000-29011017
  hyper
  melanoma vs. liver_bileduct
cgtggggctgtctccct

SEQ ID NO: 468635 - DNA, 343 bp, Homo sapiens
  chr10:29011162-29011505
  hyper
  melanoma vs. liver_bileduct
tgaattaatgggttcagcttcatgttgagcacaagtgggaggctattttagagaaaccttcccaggccagccgtcactgatgtggcaaactcagcctctgggcagaccggctggaaatagaaacgtctccgcttcacgatggcgcacgcccggacgtccccttccgagagcgggtcccctttgtcccccgaggccccgccgccctgtgtcacgtccccacctcgctctgggtccactgatctcttgatgcacgcgtcccatcagcagcagccgaaagagggtgctcgggcgggagtgaaatccctgtgaaatgtgatcaagaacacaaaatgctgaggcagct

SEQ ID NO: 468636 - DNA, 157 bp, Homo sapiens; identical to SEQ ID NO: 333915
  chr10:31607149-31607306
  hyper
  melanoma vs. lymphoid_neoplasm,liver_bileduct,lung

SEQ ID NO: 468637 - DNA, 791 bp, Homo sapiens; identical to SEQ ID NO: 457329
  chr10:31607954-31608745
  hyper
  melanoma vs. liver_bileduct

SEQ ID NO: 468638 - DNA, 256 bp, Homo sapiens; identical to SEQ ID NO: 351043
  chr10:62492589-62492845
  hyper
  melanoma vs. head_and_neck,upper_gi,breast,lung, anorectal,colorectal,prostate,uterine,cervical, bladder_and_urothelial,multiple_myeloma,pancreas_gallbladder, ovary

SEQ ID NO: 468639 - DNA, 147 bp, Homo sapiens; identical to SEQ ID NO: 455589
  chr10:73846836-73846983
  hyper
  melanoma vs. non_cancer,myeloid_neoplasm,thyroid, pancreas_gallbladder

SEQ ID NO: 468640 - DNA, 164 bp, Homo sapiens; identical to SEQ ID NO: 351056
  chr10:73847427-73847591
  hyper
  melanoma vs. non_cancer,myeloid_neoplasm,thyroid, pancreas_gallbladder

SEQ ID NO: 468641 - DNA, 262 bp, Homo sapiens
  chr10:73847427-73847689
  hyper
  melanoma vs. myeloid_neoplasm,thyroid
gatgccaccctcactgccggccccacccagacctgccggtgctgcagtgccccgtatgtgcagcctgcagcatcccagcggctggggcaggcccgggggcggctcgcacaacgcagctggggaccgggtcggggtccagcggcagccggggtccgggtccccccggccccgcaccccttcccactcccggcccgcaggggagaccccggagcgcgcgaccccggagcgtcgggcaggtgtggagctgggggtcccggggctg

SEQ ID NO: 468642 - DNA, 413 bp, Homo sapiens
  chr10:74079281-74079694
  hyper
  melanoma vs. lymphoid_neoplasm,liver_bileduct,lung, pancreas_gallbladder,head_and_neck,breast
cgtttgtccgctcagaccagacggggcaaagggcagccatcaaaggtgtctgggacgagcccggcggggtaatgggccgctagggactcagtctggcccgggtctcagccggggcagaaggcagccgggcgagggccgcgggtggggggcagggggccggggacaagcagccccgcccaggccggcgcgctgtgtgcacaacgtgcagggctgcgaaagcggatgcggcctgatggggcaatcgctggcaacgcgccgcgggttgtcagcgggcgctggggggtgggagcccggcgccggcgggccctgcctccagcattggccccgcccccagttccgcagtcgtggctgggtttcggggagggcgcccggtgcggggggcgcccagggcctgcgcacacgggtaggcccgc

SEQ ID NO: 468643 - DNA, 179 bp, Homo sapiens; identical to SEQ ID NO: 345357
  chr10:74079752-74079931
  hyper
  melanoma vs. lymphoid_neoplasm,liver_bileduct,lung, pancreas_gallbladder,head_and_neck,breast

SEQ ID NO: 468644 - DNA, 74 bp, Homo sapiens; identical to SEQ ID NO: 455591
  chr10:75670652-75670726
  hyper
  melanoma vs. head_and_neck,colorectal

SEQ ID NO: 468645 - DNA, 45 bp, Homo sapiens; identical to SEQ ID NO: 359601
  chr10:75670755-75670800
  hyper
  melanoma vs. head_and_neck,colorectal

SEQ ID NO: 468646 - DNA, 418 bp, Homo sapiens
  chr10:89621342-89621760
  hyper
  melanoma vs. prostate,breast,multiple_myeloma, pancreas_gallbladder,liver_bileduct,upper_gi,myeloid_neoplasm, thyroid,bladder_and_urothelial,cervical,anorectal,renal, colorectal,non_cancer,uterine,lymphoid_neoplasm,head_and_neck,
  CONT. FROM ABOVE: lung,ovary
cgaatcagctctctcacggtgacaggtcagcccaatcggggctgtaaacagacttgacaggtttgttctgggctgacggccattgactaggttctcagaccagataagtcacttggctgagtccacagtaggtggggcgcgctcaccagctcaggggtagtgactggacgtttgttgcaacatcggagaatgcacgctctgggctgcagcaggagataccctcaagcacagaaccaaaagggttcaccctaagcggcagggcatcagcgatggagaggcccgagagccctagcgcccagctccttttcccacgtttgggaaggcgcagaataggtcgatgtagagcaaggagtgagtctcaggtctcagtcctttggcttgctcttagggtagcaggcgaggagtggcaccagtttgg

SEQ ID NO: 468647 - DNA, 148 bp, Homo sapiens; identical to SEQ ID NO: 202167
  chr10:89621836-89621984
  hyper
  melanoma vs. prostate,breast,multiple_myeloma, pancreas_gallbladder,liver_bileduct,upper_gi,myeloid_neoplasm, thyroid,bladder_and_urothelial,cervical,anorectal,renal, colorectal,non_cancer,uterine,lymphoid_neoplasm,head_and_neck,
  CONT. FROM ABOVE: lung,ovary

SEQ ID NO: 468648 - DNA, 352 bp, Homo sapiens
  chr10:89621986-89622338
  hyper
  melanoma vs. prostate,breast,multiple_myeloma, pancreas_gallbladder,liver_bileduct,upper_gi,myeloid_neoplasm, thyroid,bladder_and_urothelial,cervical,anorectal,renal, colorectal,non_cancer,uterine,lymphoid_neoplasm,head_and_neck,
  CONT. FROM ABOVE: lung,ovary
cttgcctccggagctatcactggggagtgggaatttggaaagttccccaactagggacacacgtgacctccttcggaaagtagttccgactgtggcccgtgtatccttccacctccttttgaaccctcctaggtctcctcgccccgcccactcgctgggctgcagcttcctaccgttccgtactttccactcaacccggtaaccccaaacgtgcacggtccggccggggcgcgcggagcctggccccgggcgatccatcctgccgggttttcacggcggccaagggggggcggggctaggtggtctctgagaaccgagcttgactccgacgccgcgaaccgacctggagccc

SEQ ID NO: 468649 - DNA, 123 bp, Homo sapiens
  chr10:89621861-89621984
  hyper
  melanoma vs. breast,pancreas_gallbladder,uterine, bladder_and_urothelial,prostate,renal,upper_gi,colorectal, multiple_myeloma,cervical,non_cancer,head_and_neck,anorectal, thyroid,liver_bileduct,myeloid_neoplasm,lymphoid_neoplasm,lung,
  CONT. FROM ABOVE: ovary
cgccagccccgacagcgctccttcgggaggctggtccgagcccctgtttccgccgcggcgcaggaagggttggggttccgctgcctgcaccaggcaagagcaccccgagcaaaggaagaagac

SEQ ID NO: 468650 - DNA, 852 bp, Homo sapiens
  chr10:89621986-89622838
  hyper
  melanoma vs. breast,pancreas_gallbladder,uterine, bladder_and_urothelial,prostate,renal,upper_gi,colorectal, multiple_myeloma,cervical,non_cancer,head_and_neck,anorectal, thyroid,liver_bileduct,myeloid_neoplasm,lymphoid_neoplasm,lung,
  CONT. FROM ABOVE: ovary
cttgcctccggagctatcactggggagtgggaatttggaaagttccccaactagggacacacgtgacctccttcggaaagtagttccgactgtggcccgtgtatccttccacctccttttgaaccctcctaggtctcctcgccccgcccactcgctgggctgcagcttcctaccgttccgtactttccactcaacccggtaaccccaaacgtgcacggtccggccggggcgcgcggagcctggccccgggcgatccatcctgccgggttttcacggcggccaagggggggcggggctaggtggtctctgagaaccgagcttgactccgacgccgcgaaccgacctggagcccgaggggaaagatgctcgactctcttgggggcaccggagcgggcgcaggagaggcctgcggggtgcgtcccactcacagggatcctctttcagttcatttagataggtgccctttgggcccttgaaattcaacggctatgtgttcacgttcagcacgctcggctgagagctttcatttttagggcaaacgagccgagttaccggggaagcgagaggtggggcgctgcaagggagccggatgaggtgatacacgctggcgacacaatagcaggttgctctttgtgctaagactgacaccatgaggacacagatttgggggaagggggaatctctaggcaaaggctgttacagtcaaatctctgcgaacgattgtgatccgacagcggtgcaaaaggaaagagcgaatgcagtccacgccgcggaaatctaggggtagaggcaaggggggagggtattccccttgcagggaccgtccctgcatttccctctacactgagcagc

SEQ ID NO: 468651 - DNA, 79 bp, Homo sapiens; identical to SEQ ID NO: 287325
  chr10:94449318-94449397
  hyper
  melanoma vs. liver_bileduct,cervical, pancreas_gallbladder

SEQ ID NO: 468652 - DNA, 173 bp, Homo sapiens; identical to SEQ ID NO: 334004
  chr10:97051022-97051195
  hyper
  melanoma vs. liver_bileduct

SEQ ID NO: 468653 - DNA, 231 bp, Homo sapiens; identical to SEQ ID NO: 455594
  chr10:98272415-98272646
  hyper
  melanoma vs. colorectal,cervical,pancreas_gallbladder, sarcoma,anorectal,ovary

SEQ ID NO: 468654 - DNA, 420 bp, Homo sapiens; identical to SEQ ID NO: 455595
  chr10:98272768-98273188
  hyper
  melanoma vs. colorectal,cervical,pancreas_gallbladder, sarcoma,anorectal,ovary

SEQ ID NO: 468655 - DNA, 715 bp, Homo sapiens; identical to SEQ ID NO: 351083
  chr10:98272768-98273483
  hyper
  melanoma vs. sarcoma

SEQ ID NO: 468656 - DNA, 761 bp, Homo sapiens; identical to SEQ ID NO: 345363
  chr10:98479725-98480486
  hyper
  melanoma vs. liver_bileduct,lymphoid_neoplasm

SEQ ID NO: 468657 - DNA, 569 bp, Homo sapiens; identical to SEQ ID NO: 334036
  chr10:102822304-102822873
  hyper
  melanoma vs. cervical,colorectal,breast

SEQ ID NO: 468658 - DNA, 34 bp, Homo sapiens; identical to SEQ ID NO: 455599
  chr10:102995986-102996020
  hyper
  melanoma vs. thyroid

SEQ ID NO: 468659 - DNA, 457 bp, Homo sapiens; identical to SEQ ID NO: 334070
  chr10:114135846-114136303
  hyper
  melanoma vs. lymphoid_neoplasm

SEQ ID NO: 468660 - DNA, 117 bp, Homo sapiens; identical to SEQ ID NO: 334148
  chr11:441960-442077
  hyper
  melanoma vs. lung,pancreas_gallbladder,head_and_neck, upper_gi,breast,colorectal,uterine,cervical,ovary

SEQ ID NO: 468661 - DNA, 672 bp, Homo sapiens; identical to SEQ ID NO: 334150
  chr11:705963-706635
  hyper
  melanoma vs. liver_bileduct,renal,head_and_neck

SEQ ID NO: 468662 - DNA, 149 bp, Homo sapiens
  chr11:7694738-7694887
  hyper
  melanoma vs. anorectal,cervical,head_and_neck,breast
cggaatccgagccggcccgccccactccccgcccttcgcggtcccgcccacgacctctccccacgcctcccgctccggcccccaacctcccggtcggacgttcgttcccggctctagccggcctccgcgcctctggcctctttccttcc

SEQ ID NO: 468663 - DNA, 164 bp, Homo sapiens; identical to SEQ ID NO: 120256
  chr11:7695108-7695272
  hyper
  melanoma vs. anorectal,cervical,head_and_neck,breast

SEQ ID NO: 468664 - DNA, 401 bp, Homo sapiens
  chr11:10326048-10326449
  hyper
  melanoma vs. liver_bileduct
cgaaacgccggggtcttggtcctctgggggactagtgagtcctgctcctctcggctttgctccgtccctgccccggcccctccgcgggagtctggggtcgcggcccggtcaggcgccaagccggcaggggggcgcggtccacttgaggccacagctccccaggtccagggctcgggccatccgcgctgtcccttccgcgggctcttgctgttcttcgccaggaggctttgcactccgggccgcatgggtcctggataaggacctcaagaggttgtagtggcgccccttcgctccggcgtactgtctgaaccctgtgcccaaagagggctgtggcagttcctgcaccaaccgcctggagcccatacctaagccctctgggcacgagggacctcctctccccc

SEQ ID NO: 468665 - DNA, 229 bp, Homo sapiens; identical to SEQ ID NO: 359758
  chr11:10326499-10326728
  hyper
  melanoma vs. liver_bileduct

SEQ ID NO: 468666 - DNA, 798 bp, Homo sapiens; identical to SEQ ID NO: 347138
  chr11:17034991-17035789
  hyper
  melanoma vs. breast,liver_bileduct, bladder_and_urothelial,lung,pancreas_gallbladder,upper_gi, colorectal,uterine,renal,ovary,prostate,thyroid,head_and_neck, myeloid_neoplasm,cervical,anorectal,non_cancer

SEQ ID NO: 468667 - DNA, 993 bp, Homo sapiens
  chr11:17035292-17036285
  hyper
  melanoma vs. breast,upper_gi,lung,uterine,ovary, liver_bileduct,pancreas_gallbladder,bladder_and_urothelial, colorectal,head_and_neck,prostate,anorectal,cervical,renal, thyroid,myeloid_neoplasm
cgcagagtctgcggcctcttcccccccggcccaggtccccagcgtaggtgcggcccccaccgccttcctctcggaggccgccaaacaacttgggcacacaaaacgttgagtgtggccgcggcgcagcgcgcgccaacgagcccgggccggcgggagcagaggaagggcggggcgcccggcgggaacggggagggaccccccccccgcggcacaggtgcgagcgcggcggccccactcactcactcgatgaagtagctggcgccctcctccgtgaagccctcctcccagccgcggggcaggtctgcggaaacgccagaaaagtcgggtcaaacttgggccgccgctgcgcgcgccccccacccgccggcccggcgcccacctgagcggatcatgtggcccgagttgacgggctccccggtgcgcggatgcagccaggtcgtgcagcggagctggtcactgcgggcagagaggtgcacctgttagcgccgccacagcccgccgggtgcccgcccggcccccgcccccgcgcccccacccgcgtccccgcgtccccgggtcctcgcgccgcacttgatgaagaagacgcggccatcccggcacaccccgtaggaccaatgctcaggtaaagtgtcccgcccgaccgtcgccgccgccatgttcgccgagcgcggagccgccgcggggtgggggggagggggcgggggcgcgggcaggggcggaggcgggggcggtggcgggggctcggcctgcgcgtggcccggcggcgccgcgaggcgctccatccaggcgcgggctcctgagggagcgaccgcccggccgggtcctggcgcccggagttcgcagccgctccggccaacccagcgcagtgcccgcggcctttgtccccgagccttccccgcccccagcctgctggcaccggcgctcccctttgcccccgaggccgggagacccgggcggcgcggggggccgctggcgggggccgctggcgggcgc

SEQ ID NO: 468668 - DNA, 796 bp, Homo sapiens; identical to SEQ ID NO: 345378
  chr11:17035791-17036587
  hyper
  melanoma vs. breast,ovary,prostate,uterine,lung, pancreas_gallbladder,cervical,upper_gi,bladder_and_urothelial, colorectal,anorectal,renal,head_and_neck,liver_bileduct, non_cancer,myeloid_neoplasm,thyroid,multiple_myeloma

SEQ ID NO: 468669 - DNA, 108 bp, Homo sapiens
  chr11:17373019-17373127
  hyper
  melanoma vs. upper_gi,renal,ovary,breast
cgcgccaacggtaagatgtcgctctggacgcgtgcacctgctctcgcaatcaccgactgcggtcagcatcttccttagagcagcgccccgggccacttggatcccggt

SEQ ID NO: 468670 - DNA, 167 bp, Homo sapiens
  chr11:17373405-17373572
  hyper
  melanoma vs. upper_gi,renal,ovary,breast
gctgtgtctccgtcaactctttacgcaacagaggtctccccctgcccttggtttctaccgggccgcctgctcccactcggcgaaaaaaattacacaacagcagccgcggcgatgacgtggagggctgccgcctccacgtgcgcggcgctcctgattctgctgtgggc

SEQ ID NO: 468671 - DNA, 116 bp, Homo sapiens; identical to SEQ ID NO: 7948
  chr11:17373642-17373758
  hyper
  melanoma vs. upper_gi,renal,ovary,breast

SEQ ID NO: 468672 - DNA, 8 bp, Homo sapiens
  chr11:19264049-19264057
  hyper
  melanoma vs. non_cancer,thyroid,bladder_and_urothelial
ggtctctc

SEQ ID NO: 468673 - DNA, 28 bp, Homo sapiens
  chr11:19264093-19264121
  hyper
  melanoma vs. non_cancer,thyroid,bladder_and_urothelial
cgcgtgtctttaggctccagcagggccc

SEQ ID NO: 468674 - DNA, 917 bp, Homo sapiens; identical to SEQ ID NO: 345381
  chr11:19798519-19799436
  hyper
  melanoma vs. liver_bileduct,upper_gi, pancreas_gallbladder,breast,ovary,lung,colorectal,cervical, prostate,anorectal,non_cancer,renal,head_and_neck,thyroid, sarcoma,multiple_myeloma,myeloid_neoplasm,
  CONT. FROM ABOVE: bladder_and_urothelial,uterine, lymphoid_neoplasm

SEQ ID NO: 468675 - DNA, 67 bp, Homo sapiens
  chr11:20153468-20153535
  hyper
  melanoma vs. head_and_neck,bladder_and_urothelial,breast, pancreas_gallbladder,prostate,anorectal,uterine, multiple_myeloma,renal,thyroid,non_cancer,cervical,upper_gi
cgtgcagcaatactcgcagcgtggagagttccagtcccgaaatggcagcgtcaggcaagctgcttcc

SEQ ID NO: 468676 - DNA, 197 bp, Homo sapiens
  chr11:20385084-20385281
  hyper
  melanoma vs. liver_bileduct
cgcctgggtgagctgagcccagcaggtgagggaaaacgcgggaagagggtcttgcagattccaaacttaggaagggtcgcggctccgcgcacgtgctctcggggtcaccttccccgcgcctgtgagggtgccaggagttcgtctccaggtcccgcccctgtgggcggggcgaggcagcgtcgccgcgaggccacccg

SEQ ID NO: 468677 - DNA, 238 bp, Homo sapiens
  chr11:20385481-20385719
  hyper
  melanoma vs. liver_bileduct
gagctgggccaggtctcctggccgggccggggataccgtggggtatgcccagtgatgccagcagcttgtggcacctgggcgcaccctccagctcgggccccttccgatgggtctgctggctcaggtgcgggcgatggccggggagccgcgccccgcacgtgactcagcactttccccagagcccggactgcggagaacaatatcctcctccctaacagataaacagcccttgttcctc

SEQ ID NO: 468678 - DNA, 268 bp, Homo sapiens; identical to SEQ ID NO: 372688
  chr11:31833155-31833423
  hyper

SEQ ID NO: 468679 - DNA, 384 bp, Homo sapiens; identical to SEQ ID NO: 334231
  chr11:32851566-32851950
  hyper
  melanoma vs. liver_bileduct,lung,renal,anorectal, bladder_and_urothelial,breast,colorectal,upper_gi,head_and_neck, myeloid_neoplasm

SEQ ID NO: 468680 - DNA, 57 bp, Homo sapiens; identical to SEQ ID NO: 455607
  chr11:35547041-35547098
  hyper
  melanoma vs. multiple_myeloma,cervical,anorectal,uterine, ovary,non_cancer,thyroid,myeloid_neoplasm, bladder_and_urothelial,pancreas_gallbladder,head_and_neck, prostate,lung,upper_gi,colorectal,renal

SEQ ID NO: 468681 - DNA, 209 bp, Homo sapiens; identical to SEQ ID NO: 455608
  chr11:35547127-35547336
  hyper
  melanoma vs. multiple_myeloma,cervical,anorectal,uterine, ovary,non_cancer,thyroid,myeloid_neoplasm, bladder_and_urothelial,pancreas_gallbladder,head_and_neck, prostate,lung,upper_gi,colorectal,renal

SEQ ID NO: 468682 - DNA, 18 bp, Homo sapiens
  chr11:35547575-35547593
  hyper
  melanoma vs. multiple_myeloma,cervical,anorectal,uterine, ovary,non_cancer,thyroid,myeloid_neoplasm, bladder_and_urothelial,pancreas_gallbladder,head_and_neck, prostate,lung,upper_gi,colorectal,renal
ccctctctgactgcacgc

SEQ ID NO: 468683 - DNA, 87 bp, Homo sapiens; identical to SEQ ID NO: 454128
  chr11:47208495-47208582
  hyper
  melanoma vs. myeloid_neoplasm,non_cancer,thyroid,uterine, multiple_myeloma

SEQ ID NO: 468684 - DNA, 231 bp, Homo sapiens
  chr11:61062458-61062689
  hyper
  melanoma vs. thyroid,non_cancer,myeloid_neoplasm, multiple_myeloma,uterine,renal
cggcagcaggagcgcgacacaggcggcccgaaggagcagtccggcccacatgaccggcggcggcgggtcccccgggctgggctcggctcctgcgccgcgcgcgggagagggggctgccggccctcgcccctcctcctggcgccgtggggagcgaaccagcgatccccgaaatggcacgcagagctgagcaggggggcttgggacgccgagaggaggggccgagggccgcga

SEQ ID NO: 468685 - DNA, 260 bp, Homo sapiens
  chr11:61595492-61595752
  hyper
  melanoma vs. sarcoma
gcgggaggatgtggaacccgaggcggggggagccggaggggcgggcagaggaggtgtcgaggccctgagctcccggggagtttttactggaggcaaaagtccatagcgggagggctgagggaggggcggaggaaggggaccgcttgggggcactgggaagccagggatcctccgccaggaaggcagggacactcccgagcgcaggcgagaaggctgggggagggggcgcggtgggaggagtaggagaagacaaaagccga

SEQ ID NO: 468686 - DNA, 34 bp, Homo sapiens; identical to SEQ ID NO: 359849
  chr11:61596695-61596729
  hyper
  melanoma vs. sarcoma

SEQ ID NO: 468687 - DNA, 18 bp, Homo sapiens
  chr11:61722665-61722683
  hyper
  melanoma vs. anorectal,multiple_myeloma,cervical,renal, breast,bladder_and_urothelial
cgtgctgggtgagttccc

SEQ ID NO: 468688 - DNA, 96 bp, Homo sapiens; identical to SEQ ID NO: 334322
  chr11:73358566-73358662
  hyper
  melanoma vs. lymphoid_neoplasm,lung

SEQ ID NO: 468689 - DNA, 240 bp, Homo sapiens; identical to SEQ ID NO: 460659
  chr11:86382607-86382847
  hyper
  melanoma vs. sarcoma,renal,upper_gi,liver_bileduct, pancreas_gallbladder

SEQ ID NO: 468690 - DNA, 63 bp, Homo sapiens; identical to SEQ ID NO: 460660
  chr11:86383105-86383168
  hyper
  melanoma vs. sarcoma,renal,upper_gi,liver_bileduct, pancreas_gallbladder

SEQ ID NO: 468691 - DNA, 38 bp, Homo sapiens
  chr11:101918139-101918177
  hyper
  melanoma vs. sarcoma
cgacacgacggccgccgcgtctccatggaaacggccca

SEQ ID NO: 468692 - DNA, 2 bp, Homo sapiens
  chr11:111385464-111385466
  hyper
  melanoma vs. bladder_and_urothelial
gc

SEQ ID NO: 468693 - DNA, 345 bp, Homo sapiens
  chr12:1639977-1640322
  hyper
  melanoma vs. head_and_neck,prostate,sarcoma,anorectal, uterine,ovary,cervical,bladder_and_urothelial,breast, myeloid_neoplasm,non_cancer,lung
ccgggccccgccggccgccccctgcgcccccgcgggccgcgcctcgcccgccgacccagcgcagccgggcgcaggaagagccgggccgggccgagcggcgcccggagcccgcgggcctgacacgcggcgggacatgcaggtaagcgccggccctcgcccccggggacggccccgccgccgccgccgccgccccggctgccgaacctcgcgcggctcctccgccttcccggccccgcggccgcgctgggtgtccgccgggtgggtctgcgcgccgcgggcgtcgggtcggggcgggccggggtcaggtcgggggaagggagtcgccccgggccggggcggcgaaca

SEQ ID NO: 468694 - DNA, 273 bp, Homo sapiens; identical to SEQ ID NO: 351285
  chr12:1640476-1640749
  hyper
  melanoma vs. head_and_neck,prostate,sarcoma,anorectal, uterine,ovary,cervical,bladder_and_urothelial,breast, myeloid_neoplasm,non_cancer,lung

SEQ ID NO: 468695 - DNA, 526 bp, Homo sapiens; identical to SEQ ID NO: 372930
  chr12:6419603-6420129
  hyper
  melanoma vs. liver_bileduct

SEQ ID NO: 468696 - DNA, 565 bp, Homo sapiens; identical to SEQ ID NO: 334461
  chr12:12502899-12503464
  hyper
  melanoma vs. lung,breast,sarcoma,cervical

SEQ ID NO: 468697 - DNA, 23 bp, Homo sapiens
  chr12:25102288-25102311
  hyper
  melanoma vs. lymphoid_neoplasm,bladder_and_urothelial, multiple_myeloma
ccgtgtaacatttatatggagac

SEQ ID NO: 468698 - DNA, 335 bp, Homo sapiens
  chr12:46766939-46767274
  hyper
  melanoma vs. head_and_neck,colorectal,cervical
cgggggacacatcaaggcttttgggggacaccaccctcccaccaaacactttcttgattgttatttttgtgatttacagtgaagttttgtctcacaaacttgggccaaggcagcaaggttgtcctgatggtttgttgttctttcttttccacctagacctgctttcactcttcaaaactagccggaggtcggcgagcagctccttttcgggatgtgctttttgtacggccatggaaactggactagcggaaaggctaccttttggccagcaagccaggccccttagaaagaggccccagtggggagcccggcgctcctaaggccgtttgggagtc

SEQ ID NO: 468699 - DNA, 181 bp, Homo sapiens; identical to SEQ ID NO: 351339
  chr12:48299205-48299386
  hyper
  melanoma vs. ovary,pancreas_gallbladder,upper_gi,breast, renal,lung,bladder_and_urothelial,cervical,colorectal, liver_bileduct,thyroid,uterine,non_cancer,prostate, head_and_neck

SEQ ID NO: 468700 - DNA, 32 bp, Homo sapiens
  chr12:48299388-48299420
  hyper
  melanoma vs. ovary,pancreas_gallbladder,upper_gi,breast, renal,lung,bladder_and_urothelial,cervical,colorectal, liver_bileduct,thyroid,uterine,non_cancer,prostate, head_and_neck
cattgctcccacccgatatcaccttggcagcg

SEQ ID NO: 468701 - DNA, 42 bp, Homo sapiens; identical to SEQ ID NO: 351341
  chr12:48299465-48299507
  hyper
  melanoma vs. ovary,pancreas_gallbladder,upper_gi,breast, renal,lung,bladder_and_urothelial,cervical,colorectal, liver_bileduct,thyroid,uterine,non_cancer,prostate, head_and_neck

SEQ ID NO: 468702 - DNA, 176 bp, Homo sapiens; identical to SEQ ID NO: 351342
  chr12:48398744-48398920
  hyper
  melanoma vs. myeloid_neoplasm,sarcoma

SEQ ID NO: 468703 - DNA, 61 bp, Homo sapiens; identical to SEQ ID NO: 455654
  chr12:49392537-49392598
  hyper
  melanoma vs. multiple_myeloma,thyroid,non_cancer,renal, upper_gi,uterine,myeloid_neoplasm,cervical,colorectal

SEQ ID NO: 468704 - DNA, 61 bp, Homo sapiens; identical to SEQ ID NO: 455654
  chr12:49392537-49392598
  hyper
  melanoma vs. multiple_myeloma,cervical, pancreas_gallbladder,anorectal,upper_gi,colorectal,non_cancer, thyroid,head_and_neck,bladder_and_urothelial,uterine,lung,renal

SEQ ID NO: 468705 - DNA, 295 bp, Homo sapiens; identical to SEQ ID NO: 351347
  chr12:49392636-49392931
  hyper
  melanoma vs. multiple_myeloma,cervical, pancreas_gallbladder,anorectal,upper_gi,colorectal,non_cancer, thyroid,head_and_neck,bladder_and_urothelial,uterine,lung,renal

SEQ ID NO: 468706 - DNA, 78 bp, Homo sapiens
  chr12:49487994-49488072
  hyper
  melanoma vs. multiple_myeloma,bladder_and_urothelial, anorectal,breast
cggtcatcaggcggtcggctccactgttctcctcatccttgaagatgatgtcggggttgtagttgggcacgaggtccc

SEQ ID NO: 468707 - DNA, 78 bp, Homo sapiens; identical to SEQ ID NO: 122207
  chr12:49488131-49488209
  hyper
  melanoma vs. multiple_myeloma,bladder_and_urothelial, anorectal,breast

SEQ ID NO: 468708 - DNA, 145 bp, Homo sapiens; identical to SEQ ID NO: 455657
  chr12:49735822-49735967
  hyper
  melanoma vs. multiple_myeloma,cervical,non_cancer, colorectal,lung,uterine,myeloid_neoplasm,ovary, bladder_and_urothelial

SEQ ID NO: 468709 - DNA, 647 bp, Homo sapiens; identical to SEQ ID NO: 455658
  chr12:49736083-49736730
  hyper
  melanoma vs. multiple_myeloma,cervical,non_cancer, colorectal,lung,uterine,myeloid_neoplasm,ovary, bladder_and_urothelial

SEQ ID NO: 468710 - DNA, 540 bp, Homo sapiens; identical to SEQ ID NO: 455659
  chr12:49736253-49736793
  hyper
  melanoma vs. sarcoma,prostate,uterine,non_cancer, bladder_and_urothelial,cervical,lung,pancreas_gallbladder, myeloid_neoplasm,multiple_myeloma,colorectal,upper_gi, lymphoid_neoplasm,ovary,renal,head_and_neck

SEQ ID NO: 468711 - DNA, 336 bp, Homo sapiens; identical to SEQ ID NO: 345425
  chr12:49736828-49737164
  hyper
  melanoma vs. sarcoma,prostate,uterine,non_cancer, bladder_and_urothelial,cervical,lung,pancreas_gallbladder, myeloid_neoplasm,multiple_myeloma,colorectal,upper_gi, lymphoid_neoplasm,ovary,renal,head_and_neck

SEQ ID NO: 468712 - DNA, 893 bp, Homo sapiens
  chr12:49738834-49739727
  hyper
  melanoma vs. ovary,bladder_and_urothelial,cervical, upper_gi,head_and_neck,lung,uterine,prostate,thyroid,renal, myeloid_neoplasm,colorectal,breast,multiple_myeloma,non_cancer, lymphoid_neoplasm,pancreas_gallbladder,sarcoma,liver_bileduct
cgagccttagagggatcgatgcggcccgggggccccgcccggggtcgatattcctgattgggaagcggccgcttcgcggagcccgcgtgtaaatcacctgggctgggggagggggcgtggggagcctaccacgtcccaggctcgcgaagccaggaggggtcgggacccgggcggtaccggagggcgacggaatgagaacgacaggccttagagaaccagagagaagcccgcccagggcctccccctcccccgctcagccctgccaactcccccagcaggctccagtctcgcttcagcggccgccacccttcgttgcccctggagccgccggggaggccagtgtcggagccagccatgcggcggctcctctctggccgctcccgcggggccggggcttcggcggctgctgtcacggagccgacaggccgggccggccgggaaggggcgggtggcgggggggagaggcggcggggtgaggctggctcagcgctggcactcagtgggcgcgcaacgtatgtttgccgaattgaaaggctgggacaccgagcggcgcagggcagagggtcggagggcacaggcggggtaggagatggcccagaccgggtgagggcagaagcctcactcacgggggaagaaggcactcgaggtcgctctgaggaccgctgggctgggatagaccacccatcccccgccggggagacccgggtagtaaagaacaagacagaatgggacaggcaggacggtttggaccccacctacaagcgcctccaccaccccagcctccgatccttgtcacgctctgctggggaaaccgaggcagccgatgctgagaatagccaaaaagttaaaagcggggtcagcgacgaagctggggcagcaaccagaattcctgc

SEQ ID NO: 468713 - DNA, 976 bp, Homo sapiens
  chr12:49739246-49740222
  hyper
  melanoma vs. ovary,cervical,head_and_neck,uterine, prostate,bladder_and_urothelial,lung,breast,myeloid_neoplasm, thyroid,upper_gi,colorectal,multiple_myeloma,lymphoid_neoplasm, pancreas_gallbladder,non_cancer
cggagccgacaggccgggccggccgggaaggggcgggtggcgggggggagaggcggcggggtgaggctggctcagcgctggcactcagtgggcgcgcaacgtatgtttgccgaattgaaaggctgggacaccgagcggcgcagggcagagggtcggagggcacaggcggggtaggagatggcccagaccgggtgagggcagaagcctcactcacgggggaagaaggcactcgaggtcgctctgaggaccgctgggctgggatagaccacccatcccccgccggggagacccgggtagtaaagaacaagacagaatgggacaggcaggacggtttggaccccacctacaagcgcctccaccaccccagcctccgatccttgtcacgctctgctggggaaaccgaggcagccgatgctgagaatagccaaaaagttaaaagcggggtcagcgacgaagctggggcagcaaccagaattcctgcgtgggttttttggattcctccgcccacgcggggccagtttgcgggtaaatgcaccaccgcgccccgcaccacagctcagaccctttcctctcgctgcagtttgtcagatccccccacctcccactctgcaccagtttatagaacaacaatttggggaaaacaatccgggcggagtgacggccccgtaattgtgacaaagtgagtgcgggcggctggagagagcgctaggccgggagcgctgcagggcgaggcggaggcaggggcgcctccccccgccctgccgccccctcgttcttattccggtcacctcccatccctctccttgactcttcaattcctcttctcccggccccttgcgccttccttcgcttgttcctccatcgctcttccctttcctcccggtaacagctcttctcccgctcccccgaccccgtcgcccctcccccggtgcgctttttcctcgctcacttctcccctctcctctgccctccactc

SEQ ID NO: 468714 - DNA, 660 bp, Homo sapiens; identical to SEQ ID NO: 334522
  chr12:51785160-51785820
  hyper
  melanoma vs. upper_gi,pancreas_gallbladder,lung,ovary, breast,lymphoid_neoplasm,head_and_neck,uterine,colorectal, multiple_myeloma,cervical,prostate,anorectal,non_cancer, bladder_and_urothelial,myeloid_neoplasm,thyroid

SEQ ID NO: 468715 - DNA, 122 bp, Homo sapiens; identical to SEQ ID NO: 455663
  chr12:54088960-54089082
  hyper
  melanoma vs. uterine,myeloid_neoplasm,non_cancer,thyroid, renal,multiple_myeloma,ovary,upper_gi

SEQ ID NO: 468716 - DNA, 15 bp, Homo sapiens
  chr12:54089645-54089660
  hyper
  melanoma vs. uterine,myeloid_neoplasm,non_cancer,thyroid, renal,multiple_myeloma,ovary,upper_gi
agcgagtttgggaac

SEQ ID NO: 468717 - DNA, 321 bp, Homo sapiens
  chr12:54389321-54389642
  hyper
  melanoma vs. upper_gi,cervical
acaaaagatcaggtaacaaggcgctcagggccactggggctccgggcagggcagggagcggctctagctctggggcggctccccctccagccactcccaggctggaaaaccagaccgcgttgggggagccggaaatagccccgcttgctgcggagcgtcagggcgggggcgccggcgggaatgcaggcccggcaggccgtggctttgagagagccacgttcacaggccctggggatttcactcctgctgggcctcgggacctgactcctggtgtgtagggatcccagatacccaccttgggtgggggcaggacgcgggttt

SEQ ID NO: 468718 - DNA, 34 bp, Homo sapiens
  chr12:58026315-58026349
  hyper
  melanoma vs. sarcoma,renal,anorectal,lung, multiple_myeloma,ovary,prostate,non_cancer,myeloid_neoplasm, uterine,thyroid
agcatcacctgggccggggtgggctgcggagggc

SEQ ID NO: 468719 - DNA, 300 bp, Homo sapiens; identical to SEQ ID NO: 347238
  chr12:58026315-58026615
  hyper
  melanoma vs. sarcoma,anorectal,lung,prostate,ovary,renal, thyroid,non_cancer,uterine,myeloid_neoplasm

SEQ ID NO: 468720 - DNA, 55 bp, Homo sapiens
  chr12:59989999-59990054
  hyper
  melanoma vs. liver_bileduct
cgccagagaccagataaagtaagtacagctggggagggaggggagaggaggagga

SEQ ID NO: 468721 - DNA, 405 bp, Homo sapiens; identical to SEQ ID NO: 373079
  chr12:59990544-59990949
  hyper
  melanoma vs. liver_bileduct

SEQ ID NO: 468722 - DNA, 265 bp, Homo sapiens
  chr12:93966037-93966302
  hyper
  melanoma vs. sarcoma,anorectal,bladder_and_urothelial
cgggctgcgccaggtgtgagaccggaatgccaatttggggaatctctcctgttctttcctttttaattttttctacttgtccttgacaagggcctattcccactggatctgcaggtgactatttgctcttcctaggtcgccagtctttgatttcagctagtgaccctgggcgggaagacaccctgttcaccctcctcctgacctccgccccccacctcttcagccaactttatcttggatctctgctctctttatcttttctcta

SEQ ID NO: 468723 - DNA, 66 bp, Homo sapiens; identical to SEQ ID NO: 351396
  chr12:93967274-93967340
  hyper
  melanoma vs. sarcoma

SEQ ID NO: 468724 - DNA, 74 bp, Homo sapiens
  chr12:96184964-96185038
  hyper
  melanoma vs. cervical,uterine,ovary,upper_gi,non_cancer
cgcgaaacaggctagcgcctacttcccacatcccccagcgaaacaagccctccctcctcctccagccaccccct

SEQ ID NO: 468725 - DNA, 222 bp, Homo sapiens; identical to SEQ ID NO: 360178
  chr12:96185121-96185343
  hyper
  melanoma vs. cervical,uterine,ovary,upper_gi,non_cancer

SEQ ID NO: 468726 - DNA, 374 bp, Homo sapiens
  chr12:104322593-104322967
  hyper
  melanoma vs. lymphoid_neoplasm
cgcacactaaatacgggaagttgtaaaagactgtgacagactgtcactaaaaaacttgtcttcaggaattcggacgattatctgaaaagatattcaaagttcaattttgttggaggaagcaataaggaagtggggtgtctatgtcagagacgggcgcgggtatgcgagggggtaacgtatagagtaggttaaagagacgtagaaaatatttccaaaggcacaagtttagcatgagggacttccctcacaggaaagacacctggtgttttatatgtccttctgagcacagacagggtatttctatgaagttacaaagctgcaatcccgttctcatgtgcagcaccacaggttttgctttcaaatatctgcaggtg

SEQ ID NO: 468727 - DNA, 226 bp, Homo sapiens; identical to SEQ ID NO: 373141
  chr12:104323141-104323367
  hyper
  melanoma vs. lymphoid_neoplasm

SEQ ID NO: 468728 - DNA, 508 bp, Homo sapiens; identical to SEQ ID NO: 454154
  chr12:112204412-112204920
  hyper
  melanoma vs. sarcoma,head_and_neck,liver_bileduct, pancreas_gallbladder,colorectal,uterine,upper_gi,cervical,ovary, lung,anorectal,renal,prostate,thyroid,non_cancer, multiple_myeloma

SEQ ID NO: 468729 - DNA, 186 bp, Homo sapiens; identical to SEQ ID NO: 345433
  chr12:112204992-112205178
  hyper
  melanoma vs. sarcoma,head_and_neck,liver_bileduct, pancreas_gallbladder,colorectal,uterine,upper_gi,cervical,ovary, lung,anorectal,renal,prostate,thyroid,non_cancer, multiple_myeloma

SEQ ID NO: 468730 - DNA, 9 bp, Homo sapiens
  chr12:116946078-116946087
  hyper
  melanoma vs. multiple_myeloma,uterine,non_cancer, myeloid_neoplasm,ovary
cgccaagct

SEQ ID NO: 468731 - DNA, 58 bp, Homo sapiens; identical to SEQ ID NO: 345435
  chr12:116946548-116946606
  hyper
  melanoma vs. multiple_myeloma,uterine,non_cancer, myeloid_neoplasm,ovary

SEQ ID NO: 468732 - DNA, 161 bp, Homo sapiens; identical to SEQ ID NO: 360215
  chr12:117316504-117316665
  hyper
  melanoma vs. anorectal

SEQ ID NO: 468733 - DNA, 19 bp, Homo sapiens
  chr12:117320096-117320115
  hyper
  melanoma vs. ovary,prostate,anorectal,renal, bladder_and_urothelial,uterine,sarcoma,non_cancer,thyroid
tgcacctccagactggagc

SEQ ID NO: 468734 - DNA, 551 bp, Homo sapiens; identical to SEQ ID NO: 334686
  chr12:123258823-123259374
  hyper
  melanoma vs. breast,lung,colorectal,head_and_neck, bladder_and_urothelial,upper_gi,multiple_myeloma, pancreas_gallbladder,anorectal

SEQ ID NO: 468735 - DNA, 90 bp, Homo sapiens; identical to SEQ ID NO: 334687
  chr12:123321244-123321334
  hyper
  melanoma vs. liver_bileduct

SEQ ID NO: 468736 - DNA, 133 bp, Homo sapiens; identical to SEQ ID NO: 334694
  chr12:125477548-125477681
  hyper
  melanoma vs. liver_bileduct,lymphoid_neoplasm,upper_gi, head_and_neck,lung,breast,pancreas_gallbladder

SEQ ID NO: 468737 - DNA, 262 bp, Homo sapiens
  chr13:20702234-20702496
  hyper
  melanoma vs. colorectal,pancreas_gallbladder,breast,lung, upper_gi,renal,myeloid_neoplasm,thyroid,multiple_myeloma, uterine,liver_bileduct,head_and_neck,prostate,ovary,cervical, non_cancer
cggggtggccaggccttgtttagagtagctccagcgtttgaatcgcgcaggcacaagaaggccgtctcctcaccgcgggccagcggggccggccagggcccgggcggagggggagcccgggttccgcggtcgggttgtggggccggcgctgacctcaccgcatgggcccctgcggccgccgtggcttctcacgcggcctgactttggactcgagtgcaggctcttagctgaatctctgtgtagacagggtgggtgggactcc

SEQ ID NO: 468738 - DNA, 254 bp, Homo sapiens
  chr13:20702531-20702785
  hyper
  melanoma vs. colorectal,pancreas_gallbladder,breast,lung, upper_gi,renal,myeloid_neoplasm,thyroid,multiple_myeloma, uterine,liver_bileduct,head_and_neck,prostate,ovary,cervical, non_cancer
cgcaggcctgtcagcggggcgcttcccgtcgattccaggagcgcccgcgtctctgctcagcgccacgagtccaagcgtgggggaggacgagactttcaaggcggggggtgacagtgccatccagcccagaatacccacccccagtggcgggctgccgtgcccaggccctgatccctgcccctgcaaacatcactttctatcgcccacggggctctgcagatgtggccaggctaagggtccagagttagggagat

SEQ ID NO: 468739 - DNA, 208 bp, Homo sapiens; identical to SEQ ID NO: 351445
  chr13:20702913-20703121
  hyper
  melanoma vs. colorectal,pancreas_gallbladder,breast,lung, upper_gi,renal,myeloid_neoplasm,thyroid,multiple_myeloma, uterine,liver_bileduct,head_and_neck,prostate,ovary,cervical, non_cancer

SEQ ID NO: 468740 - DNA, 675 bp, Homo sapiens
  chr13:20767087-20767762
  hyper
  melanoma vs. prostate,ovary,anorectal,breast, pancreas_gallbladder
cgccgtggcgccttttaaccgcaccccacaccccgcctcttccctcggagactgggaaagttacggagggggcggcgccgcgggcggagcgcgcccggcctctgggtcctcagagcttcccgggtccgcgaacccccgaccgcccccgaaagccccgaaccccccaagtccccttcgaggtcccgatctcctagttcctttgagcccccatgagttccccaagtgcccccagcgccctgagtctcccccggttaccccgagcgccgcctcccccagccccttggcggcccgggtgaagcgggggcggctgagagtcgggaccccccaggaagcggcgccccagaccccggctccggcgctgtgccgtgggcggggttcagggatggctgtggtcgttgtcctctgtactccgcatagtgcgagaggacttggcatttatgagcgcttctttaattttttattgttagagaaacaggcattcctccaaggactgaagatctgttcgagtcgcggaggctgcgcgggcccgcgaggctctcgcagggggacctaggctgggtggcggggcagtgccctctggaatgggggttaacggtggccgaggagggggcgccgctggtgccggcgaagtccccgcttctttctcccctcaaaatctcaccaatccgaacgaac

SEQ ID NO: 468741 - DNA, 81 bp, Homo sapiens; identical to SEQ ID NO: 351448
  chr13:20767827-20767908
  hyper
  melanoma vs. prostate,ovary,anorectal,breast, pancreas_gallbladder

SEQ ID NO: 468742 - DNA, 23 bp, Homo sapiens
  chr13:24041016-24041039
  hyper
  melanoma vs. anorectal,lung
cccgaacagcctgatgacttcac

SEQ ID NO: 468743 - DNA, 178 bp, Homo sapiens
  chr13:33000891-33001069
  hyper
  melanoma vs. lymphoid_neoplasm,multiple_myeloma, anorectal
cgtgccagacaatgtgcttggcagggtaagacatggctcctaccttcaagaaacttacagaaggataagaaaaaccatgtgcaaaaaagtaagcacagtcacgtaggtataaacaggaagccaaggagcccagaagaggggcatatactggcggggtgggatagctgcccggtcttaa

SEQ ID NO: 468744 - DNA, 204 bp, Homo sapiens; identical to SEQ ID NO: 351462
  chr13:33001228-33001432
  hyper
  melanoma vs. lymphoid_neoplasm,multiple_myeloma, anorectal

SEQ ID NO: 468745 - DNA, 15 bp, Homo sapiens
  chr13:39261396-39261411
  hyper
  melanoma vs. liver_bileduct
ttcccggcggtgtct

SEQ ID NO: 468746 - DNA, 244 bp, Homo sapiens
  chr13:39261446-39261690
  hyper
  melanoma vs. liver_bileduct
tcaggctgacctgtccaagcccgaacaccgggaccatgcactcagccgggactcccgggttatcctcgcgccggacaggcaactccaccagctttcaaccaggaccgccaccgccgccccggctgctgctgctgctgctgcttctcctgtcactggtaagccgcgtcccggcacagcccgctgccttcggcagggcgttgctgtcccctggtctcgcgggggctgcaggggtccctgctgagga

SEQ ID NO: 468747 - DNA, 480 bp, Homo sapiens
  chr13:42032017-42032497
  hyper
  melanoma vs. bladder_and_urothelial,thyroid,breast, cervical,lung,non_cancer,prostate,uterine,head_and_neck,ovary, multiple_myeloma,pancreas_gallbladder,anorectal,colorectal, lymphoid_neoplasm,sarcoma,upper_gi
cggtcttcccgcgcgggcggctgcagcctcctttccggcccgggctggcccccatgtcccaccttccctccaccaccagctccgcgcgcgcccggggttggggggagcggcggggacaggtaaccggcagcgcctggggaggaatctggccgcgccaagtcgctgggtgaccctgggcctggcgaaggctcagttttcttgtctgtaaaacggacttggtaatagaacgcacttcgggggtggtggagaagattacaaggtaacagcgactgcgtggctgtcacttggcagaggcgccaagtgtcagttatcttcgggaaccgtggcggcccctcctggccctgggaggtggtcccgctgcccccctgacttccgtgcactgagcccctggccctgcccgcagccccggccctggactcggcggccgcggaggacctgtcggacgcgctgtgcgagtttgacgcggtgctggccgacttc

SEQ ID NO: 468748 - DNA, 109 bp, Homo sapiens; identical to SEQ ID NO: 347265
  chr13:42032649-42032758
  hyper
  melanoma vs. bladder_and_urothelial,thyroid,breast, cervical,lung,non_cancer,prostate,uterine,head_and_neck,ovary, multiple_myeloma,pancreas_gallbladder,anorectal,colorectal, lymphoid_neoplasm,sarcoma,upper_gi

SEQ ID NO: 468749 - DNA, 139 bp, Homo sapiens; identical to SEQ ID NO: 334767
  chr13:50265737-50265876
  hyper
  melanoma vs. liver_bileduct,lung,upper_gi, lymphoid_neoplasm

SEQ ID NO: 468750 - DNA, 148 bp, Homo sapiens; identical to SEQ ID NO: 454164
  chr13:95201113-95201261
  hyper
  melanoma vs. lymphoid_neoplasm,ovary,renal,uterine, prostate,anorectal,thyroid,myeloid_neoplasm,colorectal,lung, non_cancer,pancreas_gallbladder,cervical,upper_gi, multiple_myeloma,head_and_neck,sarcoma,liver_bileduct,breast

SEQ ID NO: 468751 - DNA, 288 bp, Homo sapiens; identical to SEQ ID NO: 454165
  chr13:95201339-95201627
  hyper
  melanoma vs. lymphoid_neoplasm,ovary,renal,uterine, prostate,anorectal,thyroid,myeloid_neoplasm,colorectal,lung, non_cancer,pancreas_gallbladder,cervical,upper_gi, multiple_myeloma,head_and_neck,sarcoma,liver_bileduct,breast

SEQ ID NO: 468752 - DNA, 230 bp, Homo sapiens; identical to SEQ ID NO: 454166
  chr13:95201662-95201892
  hyper
  melanoma vs. lymphoid_neoplasm,ovary,renal,uterine, prostate,anorectal,thyroid,myeloid_neoplasm,colorectal,lung, non_cancer,pancreas_gallbladder,cervical,upper_gi, multiple_myeloma,head_and_neck,sarcoma,liver_bileduct,breast

SEQ ID NO: 468753 - DNA, 8 bp, Homo sapiens
  chr13:95201912-95201920
  hyper
  melanoma vs. lymphoid_neoplasm,ovary,renal,uterine, prostate,anorectal,thyroid,myeloid_neoplasm,colorectal,lung, non_cancer,pancreas_gallbladder,cervical,upper_gi, multiple_myeloma,head_and_neck,sarcoma,liver_bileduct,breast
ccgggatc

SEQ ID NO: 468754 - DNA, 302 bp, Homo sapiens
  chr13:95202013-95202315
  hyper
  melanoma vs. uterine,prostate,myeloid_neoplasm,thyroid, cervical,colorectal,renal,pancreas_gallbladder,non_cancer, upper_gi,multiple_myeloma,lymphoid_neoplasm,anorectal,ovary, head_and_neck,liver_bileduct,lung,sarcoma,breast
cgctttgcgtccaactggcttgcttgtcttttcctggtgatcatgtacagcatttcttccttgtcctgttaaacggtgtcgtcggaattcttccacctccctccttctacgctgccactgggcgctgcacacgcgccttactttcttagattgctctcggcgcgcgcagcccgcacggtccaggagctgggtccaggcccccgatggcggctcctcgggatgctggttccgtcctcccagggccggtccccgcgagatccgaagcagcggggtcgcctcggggagctcctgcccaggcctgg

SEQ ID NO: 468755 - DNA, 267 bp, Homo sapiens; identical to SEQ ID NO: 345450
  chr13:95202344-95202611
  hyper
  melanoma vs. uterine,prostate,myeloid_neoplasm,thyroid, cervical,colorectal,renal,pancreas_gallbladder,non_cancer, upper_gi,multiple_myeloma,lymphoid_neoplasm,anorectal,ovary, head_and_neck,liver_bileduct,lung,sarcoma,breast

SEQ ID NO: 468756 - DNA, 586 bp, Homo sapiens; identical to SEQ ID NO: 334893
  chr14:50469917-50470503
  hyper
  melanoma vs. pancreas_gallbladder,upper_gi,breast,lung, bladder_and_urothelial,prostate

SEQ ID NO: 468757 - DNA, 435 bp, Homo sapiens
  chr14:51027134-51027569
  hyper
  melanoma vs. pancreas_gallbladder
gacgggccgtagccgagccgctccctgtttgggcggaggaaccatggccgagcggtacccgcgtcaccgaatcgcgctgtcggggtgagggctgcagcttcgcgcaggccgggcctccagctccttcttccccacccccctcccgcctcctcccagcatttggacagcacccaccaggcgcctccggggacttgtgggttccgccttagcgatcggttgggaggaaggctatgggggtgggcagggggctgttgttactcggccccagaggggcgaggggtcggggatctagagcaggccaagccccaacccccctccccgggagccgccaactcgctggctctgcagggcgcgggctcccggcggcgggcggcgggcggcgcgctggaacaatgaggcggagcgcgccgggtcccggacggacggtagcagacc

SEQ ID NO: 468758 - DNA, 8 bp, Homo sapiens
  chr14:59931109-59931117
  hyper
  melanoma vs. prostate,anorectal,multiple_myeloma,thyroid
cgctgaag

SEQ ID NO: 468759 - DNA, 16 bp, Homo sapiens
  chr14:59932273-59932289
  hyper
  melanoma vs. prostate,uterine,ovary,liver_bileduct, pancreas_gallbladder,thyroid,non_cancer,multiple_myeloma
ggccagataaagtgcc

SEQ ID NO: 468760 - DNA, 62 bp, Homo sapiens; identical to SEQ ID NO: 455696
  chr14:60794412-60794474
  hyper
  melanoma vs. bladder_and_urothelial,uterine, multiple_myeloma,non_cancer,ovary,upper_gi,cervical, lymphoid_neoplasm,myeloid_neoplasm,colorectal,head_and_neck, pancreas_gallbladder,thyroid,prostate

SEQ ID NO: 468761 - DNA, 133 bp, Homo sapiens; identical to SEQ ID NO: 460719
  chr14:61116736-61116869
  hyper
  melanoma vs. upper_gi

SEQ ID NO: 468762 - DNA, 186 bp, Homo sapiens; identical to SEQ ID NO: 351573
  chr14:61117028-61117214
  hyper
  melanoma vs. upper_gi

SEQ ID NO: 468763 - DNA, 355 bp, Homo sapiens
  chr14:61123186-61123541
  hyper
  melanoma vs. prostate,cervical,breast
cggtgcatacccaagccgtgggatctgtttttgcattctcacacgagcatattgctcgggttctaaaggatccagattttcgcagacagaagctcgaccgcctctgttcccaaaagggccgagcggcgtttgtctgaatcaccagtcctctgagcagtgggaaaagagatactgggtagagggtgctgggaaggtgcccactcatccatgcccctctgcgcgtctcgcccactcgcttaggcttggactttgcaacaaggtttccaacaccgctgcagtgcttgacaaagccctcctggaagccagcagggtgaggctgccagcaagcaggcgggctgcgagggacgcttttagg

SEQ ID NO: 468764 - DNA, 460 bp, Homo sapiens
  chr14:61123681-61124141
  hyper
  melanoma vs. prostate,cervical,breast
gcgcgcgcagccaagtatccgcgcgcggacgccggggaggcttcaccgcccggtgtgctggcggccccgcccgctggctcgcagagcggggtctcgcagagctgggcctcacccgtcgccccgccgcctgcaccagaaactccctccccgggctgtgcgggagctcttgggcgccgcgtctgcgccggggccgactccgcccaggcttgtagccagaggtcgcgctatctcgccgggctggcccggcgctctctggggttgttccctcgggcggtgcatggggcccacaggcgtcggggcttgagggaagaggggccggggcctgaagggcggggaccacaacgaggcgcggggaggtcagtggagcggagagccggcgcaggccggcggcggcgcggccggaggagaaagagggcgctgtcttcctggcaaaggagttttcgcctggccggcaggaacc

SEQ ID NO: 468765 - DNA, 315 bp, Homo sapiens
  chr14:61188627-61188942
  hyper
  melanoma vs. prostate,ovary,head_and_neck,breast,lung, anorectal,uterine,non_cancer,renal,pancreas_gallbladder, bladder_and_urothelial,multiple_myeloma,upper_gi, myeloid_neoplasm,cervical,thyroid,colorectal,sarcoma
tttggttaccgcgagggccggatagggcaccaagcctccctcccagccttgggcgaggaacgccggagcccgagccgtcggacccccacaggggcccagaagcggcaagggcgggctgagaccggctctggaatgcgctggtgatcaccttcacctggcgcaggcgggctggatccccggctcccagtttgcttccccgagaagaaccttcgagctgcttttggattctttctctcctatccccgcggggctggagacaccaggtctttaggcgaccttctccttactttgtttcgtccaacaaaacacacagac

SEQ ID NO: 468766 - DNA, 655 bp, Homo sapiens; identical to SEQ ID NO: 345460
  chr14:61188627-61189282
  hyper
  melanoma vs. head_and_neck,ovary,breast,prostate, anorectal,lung,thyroid,renal,pancreas_gallbladder,uterine, myeloid_neoplasm,bladder_and_urothelial,non_cancer, multiple_myeloma,sarcoma,cervical,upper_gi,colorectal

SEQ ID NO: 468767 - DNA, 92 bp, Homo sapiens; identical to SEQ ID NO: 347308
  chr14:65016816-65016908
  hyper
  melanoma vs. upper_gi,cervical,colorectal, bladder_and_urothelial,pancreas_gallbladder,uterine,ovary

SEQ ID NO: 468768 - DNA, 493 bp, Homo sapiens; identical to SEQ ID NO: 334971
  chr14:75517730-75518223
  hyper
  melanoma vs. bladder_and_urothelial,upper_gi,breast, liver_bileduct,lung,renal,lymphoid_neoplasm,multiple_myeloma

SEQ ID NO: 468769 - DNA, 40 bp, Homo sapiens; identical to SEQ ID NO: 454180
  chr14:90849401-90849441
  hyper
  melanoma vs. sarcoma,anorectal,pancreas_gallbladder, liver_bileduct

SEQ ID NO: 468770 - DNA, 383 bp, Homo sapiens; identical to SEQ ID NO: 454181
  chr14:90849476-90849859
  hyper
  melanoma vs. sarcoma,anorectal,pancreas_gallbladder, liver_bileduct

SEQ ID NO: 468771 - DNA, 54 bp, Homo sapiens; identical to SEQ ID NO: 454182
  chr14:90849897-90849951
  hyper
  melanoma vs. sarcoma,anorectal,pancreas_gallbladder, liver_bileduct

SEQ ID NO: 468772 - DNA, 137 bp, Homo sapiens; identical to SEQ ID NO: 454183
  chr14:90849722-90849859
  hyper
  melanoma vs. anorectal,myeloid_neoplasm,sarcoma,thyroid, pancreas_gallbladder,non_cancer,colorectal,upper_gi

SEQ ID NO: 468773 - DNA, 54 bp, Homo sapiens; identical to SEQ ID NO: 454182
  chr14:90849897-90849951
  hyper
  melanoma vs. anorectal,myeloid_neoplasm,sarcoma,thyroid, pancreas_gallbladder,non_cancer,colorectal,upper_gi

SEQ ID NO: 468774 - DNA, 67 bp, Homo sapiens; identical to SEQ ID NO: 351606
  chr14:90850476-90850543
  hyper
  melanoma vs. anorectal,myeloid_neoplasm,sarcoma,thyroid, pancreas_gallbladder,non_cancer,colorectal,upper_gi

SEQ ID NO: 468775 - DNA, 119 bp, Homo sapiens
  chr14:91883379-91883498
  hyper
  melanoma vs. upper_gi,lymphoid_neoplasm,lung,sarcoma, breast,head_and_neck,bladder_and_urothelial,colorectal,ovary, uterine,cervical,prostate,renal,pancreas_gallbladder,anorectal
cgagacaggaggaaaaacttcctcgccacttttctcccgcgttccagagcggaagaaataaaaataaaaaggacttttcaataaatgtctcacgtctcaaatccattgtaaatcagtgc

SEQ ID NO: 468776 - DNA, 405 bp, Homo sapiens; identical to SEQ ID NO: 351609
  chr14:91883530-91883935
  hyper
  melanoma vs. upper_gi,lymphoid_neoplasm,lung,sarcoma, breast,head_and_neck,bladder_and_urothelial,colorectal,ovary, uterine,cervical,prostate,renal,pancreas_gallbladder,anorectal

SEQ ID NO: 468777 - DNA, 63 bp, Homo sapiens
  chr14:103394621-103394684
  hyper
  melanoma vs. myeloid_neoplasm,cervical, bladder_and_urothelial,lung,colorectal
cgaggaccccgggcctgagctcgcccgggctccttccgtgcacagggtctcggcttctcgtcc

SEQ ID NO: 468778 - DNA, 465 bp, Homo sapiens
  chr14:105330476-105330941
  hyper
  melanoma vs. lung
cgccatactcaagggcgcctcttgactccctctgaactcgcaatcccgccccagggtccggcacaagggctctgctggggctgagatccgtgaaggcagatgcggagaggcgccgctggattgcgagcaggcccaggtgcggggccaggtgggcgttgtcgcagccgggaacgcccagccgctccagctgcccacaggacaaagcccagggttccccggccgggcgcacgccttccacattctccctcacctccacgccttcgctcactgcgttccccaacacctggaatgcagcaatgcccttcgggcacgctgccccgcccccacgttgatcccgtcccctagcttggctccagggacaccggatacgcctattgtagcacccggcaaggagcgagcagtccgcgggaacttacccaggaaccccgagcgcctccgtagttcccaaccccacccccacccctc

SEQ ID NO: 468779 - DNA, 455 bp, Homo sapiens; identical to SEQ ID NO: 351636
  chr14:105330980-105331435
  hyper
  melanoma vs. lung

SEQ ID NO: 468780 - DNA, 19 bp, Homo sapiens
  chr14:105433911-105433930
  hyper
  melanoma vs. head_and_neck,anorectal,cervical, multiple_myeloma,pancreas_gallbladder,prostate
cgcgggacagtccccagcc

SEQ ID NO: 468781 - DNA, 27 bp, Homo sapiens
  chr15:28339737-28339764
  hyper
  melanoma vs. renal,prostate,uterine,cervical, myeloid_neoplasm,colorectal,bladder_and_urothelial,non_cancer, lung,multiple_myeloma,ovary
cggtggaaccttccagtcctcacactc

SEQ ID NO: 468782 - DNA, 276 bp, Homo sapiens
  chr15:28340034-28340310
  hyper
  melanoma vs. renal,prostate,uterine,cervical, myeloid_neoplasm,colorectal,bladder_and_urothelial,non_cancer, lung,multiple_myeloma,ovary
caggaccgacagaggccagggcgcggcgccgggcgtggtcctgacacctgccctgccgggaaggggacggcgttccacgcctgggcccttctccactgcgtacaggagcctgggtcacctgctcggcccaagaaaaggctccaggcctgcgggtgtgaatgagcagcagccaagagagcggtgctgccggcgctcaagctaggccgggtcaccgcctcctgcccaggtccaggcagccccggcctttcccgctggtactggcacgcccgtggccgc

SEQ ID NO: 468783 - DNA, 7 bp, Homo sapiens
  chr15:28340577-28340584
  hyper
  melanoma vs. renal,prostate,uterine,cervical, myeloid_neoplasm,colorectal,bladder_and_urothelial,non_cancer, lung,multiple_myeloma,ovary
tgtggcc

SEQ ID NO: 468784 - DNA, 133 bp, Homo sapiens; identical to SEQ ID NO: 351659
  chr15:37403336-37403469
  hyper
  melanoma vs. pancreas_gallbladder

SEQ ID NO: 468785 - DNA, 111 bp, Homo sapiens; identical to SEQ ID NO: 335080
  chr15:38857279-38857390
  hyper
  melanoma vs. lymphoid_neoplasm,lung, bladder_and_urothelial,anorectal

SEQ ID NO: 468786 - DNA, 417 bp, Homo sapiens
  chr15:41136701-41137118
  hyper
  melanoma vs. head_and_neck,breast,lung,upper_gi, colorectal,cervical,bladder_and_urothelial,pancreas_gallbladder, prostate
cggaacccagaggcccgcgctctgaaggtgacccccctggggaggaaggcgatggcccctgcgaggacgatggcccgcgcccgcctcgccccggccggcatccctgccgtcgccttgtggcttctgtgcacgctcggcctccagggcacccaggccgggccaccgcccgcgccccctgggctgcccgcgggagccgactgcctgaacagctttaccgccggggtgcctggcttcgtgctggacaccaacgcctcggtcagcaacggagctaccttcctggagtcccccaccgtgcgccggggctgggactgcgtgcgcgcctgctgcaccacccagaactgcaacttggcgctagtggagctgcagcccgaccgcggggaggacgccatcgccgcctgcttcctcatcaactgcctc

SEQ ID NO: 468787 - DNA, 44 bp, Homo sapiens; identical to SEQ ID NO: 203840
  chr15:41137147-41137191
  hyper
  melanoma vs. head_and_neck,breast,lung,upper_gi, colorectal,cervical,bladder_and_urothelial,pancreas_gallbladder, prostate

SEQ ID NO: 468788 - DNA, 385 bp, Homo sapiens; identical to SEQ ID NO: 460730
  chr15:41786420-41786805
  hyper
  melanoma vs. anorectal,myeloid_neoplasm,upper_gi,thyroid

SEQ ID NO: 468789 - DNA, 527 bp, Homo sapiens
  chr15:41804115-41804642
  hyper
  melanoma vs. anorectal,pancreas_gallbladder,lung, non_cancer,thyroid,upper_gi,uterine
cggctcgagactccccgaggcagacgagctggctctccgggctaccctgcgggcagcgggggagggaatcggcggggcccgggagcctcccctcgctgtgctggtgacccggcaccgaggaaagcacgctcccccggcccccaggcagccctcgcccccggcgccggcgccgccccatccccactggctgcgctcactccgggacaggcgtcctctccctgctgccccaccaggatgtacagcgactccccgagaccgagggagaagattgctgagacgaagacgccatgcgcccgcgacaggtggttcttggcgcctttgccgcccgcggctccgtaggctgagatcctgcggggaacggacggtgagtccccggccttcggtgctcaggccggccgctccgggcagaagttggcgacagaggaggctccagaattattttttatctgagggacttggaggctgcaatcgactctgacgggatgggaagggtaggtttgcacaccgaaaaatcagatattacactt

SEQ ID NO: 468790 - DNA, 135 bp, Homo sapiens; identical to SEQ ID NO: 345469
  chr15:41953174-41953309
  hyper
  melanoma vs. cervical,ovary,prostate,non_cancer,thyroid, lymphoid_neoplasm,lung,uterine,head_and_neck,breast

SEQ ID NO: 468791 - DNA, 447 bp, Homo sapiens; identical to SEQ ID NO: 335091
  chr15:42873450-42873897
  hyper
  melanoma vs. lung,pancreas_gallbladder

SEQ ID NO: 468792 - DNA, 171 bp, Homo sapiens; identical to SEQ ID NO: 335095
  chr15:43809685-43809856
  hyper
  melanoma vs. lung,pancreas_gallbladder

SEQ ID NO: 468793 - DNA, 350 bp, Homo sapiens; identical to SEQ ID NO: 335110
  chr15:50474768-50475118
  hyper
  melanoma vs. lung,breast,colorectal, bladder_and_urothelial,prostate,anorectal,upper_gi,uterine, pancreas_gallbladder,head_and_neck

SEQ ID NO: 468794 - DNA, 815 bp, Homo sapiens; identical to SEQ ID NO: 360642
  chr15:52587420-52588235
  hyper
  melanoma vs. liver_bileduct

SEQ ID NO: 468795 - DNA, 228 bp, Homo sapiens; identical to SEQ ID NO: 457565
  chr15:53078992-53079220
  hyper
  melanoma vs. liver_bileduct

SEQ ID NO: 468796 - DNA, 108 bp, Homo sapiens; identical to SEQ ID NO: 464225
  chr15:53080082-53080190
  hyper
  melanoma vs. liver_bileduct

SEQ ID NO: 468797 - DNA, 49 bp, Homo sapiens
  chr15:53095580-53095629
  hyper
  melanoma vs. multiple_myeloma,ovary,uterine
cgtaaaagacgagaaaaacatcccgggtgctctgcataaaccacacgca

SEQ ID NO: 468798 - DNA, 1 bp, Homo sapiens
  chr15:59729552-59729553
  hyper
  melanoma vs. sarcoma,ovary,bladder_and_urothelial, cervical,multiple_myeloma,uterine,renal,upper_gi,non_cancer, colorectal
c

SEQ ID NO: 468799 - DNA, 102 bp, Homo sapiens; identical to SEQ ID NO: 462476
  chr15:59729555-59729657
  hyper
  melanoma vs. sarcoma,ovary,bladder_and_urothelial, cervical,multiple_myeloma,uterine,renal,upper_gi,non_cancer, colorectal

SEQ ID NO: 468800 - DNA, 91 bp, Homo sapiens; identical to SEQ ID NO: 347343
  chr15:59729815-59729906
  hyper
  melanoma vs. sarcoma,ovary,bladder_and_urothelial, cervical,multiple_myeloma,uterine,renal,upper_gi,non_cancer, colorectal

SEQ ID NO: 468801 - DNA, 97 bp, Homo sapiens; identical to SEQ ID NO: 351690
  chr15:62359006-62359103
  hyper
  melanoma vs. colorectal,uterine,lung,head_and_neck, upper_gi,breast,cervical,pancreas_gallbladder,ovary, bladder_and_urothelial

SEQ ID NO: 468802 - DNA, 380 bp, Homo sapiens
  chr15:62359105-62359485
  hyper
  melanoma vs. colorectal,uterine,lung,head_and_neck, upper_gi,breast,cervical,pancreas_gallbladder,ovary, bladder_and_urothelial
ccctctgctcggcccactggcaagcgctcccagcggcaggtataaaagctcaggctggcagtccttgaacactggtgctgaaccccgccgcgcgcgctttgaatttcccagccgctaagcgcctctcctggtcggtgtcccaggcagaaaggtgcagagacccatctgacgcaggactccaggtattttaggagggacccatcggcttgcttaattccctgggggattcgtctgaggctctttgcctctgcaaggggagaaccagccacagtttcccggaaggaataacaattactttaattctagctgaggactagactgctatggtccaaagagtcaggaaacgattgcaaggcaatcgttggcacagagaacagagc

SEQ ID NO: 468803 - DNA, 115 bp, Homo sapiens
  chr15:62359741-62359856
  hyper
  melanoma vs. uterine,lung,colorectal,head_and_neck, anorectal,pancreas_gallbladder,breast,ovary,upper_gi,cervical, myeloid_neoplasm,prostate,non_cancer,sarcoma,renal
cgggactcgctctgacgatccttgtgcctttgtgcactgcaggtagacaagctccagcagagagtggccagatgtggtgcctggagcgactccgcttgggtcctgagtgccttcg

SEQ ID NO: 468804 - DNA, 72 bp, Homo sapiens; identical to SEQ ID NO: 452902
  chr15:63795400-63795472
  hyper
  melanoma vs. liver_bileduct,upper_gi,colorectal,renal, breast

SEQ ID NO: 468805 - DNA, 351 bp, Homo sapiens; identical to SEQ ID NO: 452903
  chr15:63795501-63795852
  hyper
  melanoma vs. liver_bileduct,upper_gi,colorectal,renal, breast

SEQ ID NO: 468806 - DNA, 338 bp, Homo sapiens; identical to SEQ ID NO: 347348
  chr15:63795894-63796232
  hyper
  melanoma vs. liver_bileduct,upper_gi,colorectal,renal, breast

SEQ ID NO: 468807 - DNA, 137 bp, Homo sapiens; identical to SEQ ID NO: 351701
  chr15:64443636-64443773
  hyper
  melanoma vs. lymphoid_neoplasm,lung,liver_bileduct, breast,pancreas_gallbladder,sarcoma,upper_gi, bladder_and_urothelial,colorectal,renal,uterine,cervical, head_and_neck,ovary,anorectal,prostate

SEQ ID NO: 468808 - DNA, 287 bp, Homo sapiens; identical to SEQ ID NO: 335155
  chr15:68347714-68348001
  hyper
  melanoma vs. lymphoid_neoplasm

SEQ ID NO: 468809 - DNA, 234 bp, Homo sapiens; identical to SEQ ID NO: 335158
  chr15:69109452-69109686
  hyper
  melanoma vs. liver_bileduct,upper_gi,breast

SEQ ID NO: 468810 - DNA, 21 bp, Homo sapiens
  chr15:69136422-69136443
  hyper
  melanoma vs. bladder_and_urothelial,ovary
agctcgctggggcgcctcagc

SEQ ID NO: 468811 - DNA, 139 bp, Homo sapiens
  chr15:75470758-75470897
  hyper
  melanoma vs. sarcoma,bladder_and_urothelial,anorectal
cgtgtggctcggccactgcgccaggtcttggaacatctaaggcagaaacaggaccaacacccgcaagcctccaacagcccctggggctccgtccagccgttggggtggaggggttggggggaggtgcaggggcgggcac

SEQ ID NO: 468812 - DNA, 191 bp, Homo sapiens; identical to SEQ ID NO: 335181
  chr15:75976190-75976381
  hyper
  melanoma vs. lymphoid_neoplasm

SEQ ID NO: 468813 - DNA, 68 bp, Homo sapiens; identical to SEQ ID NO: 464241
  chr15:76638250-76638318
  hyper
  melanoma vs. upper_gi,ovary,colorectal

SEQ ID NO: 468814 - DNA, 86 bp, Homo sapiens; identical to SEQ ID NO: 351727
  chr15:76639126-76639212
  hyper
  melanoma vs. upper_gi,ovary,colorectal

SEQ ID NO: 468815 - DNA, 395 bp, Homo sapiens
  chr15:81072326-81072721
  hyper
  melanoma vs. head_and_neck
cgccgaggagggagtaccacaagggtcaggtctcggtgtcctgccgactgggagccagctcacgccgagctctagcgggcgtgcgcctagcaacaggtctgcgccctgctgctcctgcctcagcacgctcttcctcccagtttccctcgcctcccagtgcctccgggacagcgctaggcacccagcgacgcgctggcgcggggccgagctgaggcaattgcaatgttagatgaacccggggggctctgctgatgtttagactgagactccaaacgtggcatcgctggaagaaggtctggtggtccctggcaaaggacgtcggctccaagaaaggtcgcgttaggttgtgaggaaaggcagagagtcctggcagaacgctggccaggtctccagct

SEQ ID NO: 468816 - DNA, 372 bp, Homo sapiens
  chr15:81072789-81073161
  hyper
  melanoma vs. head_and_neck
gaggagcgctgtgcgccctgggtcctcagccgcagacactctctgcgacagccgctgttccccaagggtcggacgctacggcagtcccaggagttccgccagctgccgggtttgaggtcctgagtccttctccaagcagccaacgctacccacaggtgagagctccctttaaaaactaatcttctgatgtgtgagccagtgcctggctgcagccccataccagggacggtgagccggggagcgcgtctctccatccctgcggtctggaaagtgatccagggcgcgcccgagggcggggagccggcggctctgcgtgcccaggcgcgacgccaccatggacagctcccagccacttcctccactcggggtctg

SEQ ID NO: 468817 - DNA, 494 bp, Homo sapiens
  chr15:89437837-89438331
  hyper
  melanoma vs. head_and_neck,bladder_and_urothelial, anorectal,cervical
cgtcgagggagagaagccagggcccctctcaatcgctgccccctactccagggagcacaggcactcccgcgggtcagcgctggacaccaaggtcccaacaggtttacaggctgcctgtggcctgtggctgccaacgagctggtggcaggactgggtccaagtgccgtgctgtttccatactggctgcgcacaagcctacgtttctccctgagggtcgccatctcccacccagggctctgccctccaccctccctacccttctggcctcgctgtccctggggcaagaaccccggtgagcgaggtctggaacccataggcatcagttgcctttgccccaggcgcccagagccggccagctgcggtccagaggcgcaggtccgccagccgcctcgcaggttgccctcagcccctcccaggactcccggggcccccggagcatccaacagatacccaggggcagggcctggggcgccgcggacggcactggaggcagc

SEQ ID NO: 468818 - DNA, 128 bp, Homo sapiens
  chr15:89438421-89438549
  hyper
  melanoma vs. head_and_neck,bladder_and_urothelial, anorectal,cervical
ccgctcgggctctgctccctcacggtgggcacgagggtccggcgcccgcatccccgcgccgctccctccccacttgtgccccgggcgcccctcgcccgcgatcacagcccatctcagcccgggcctcc

SEQ ID NO: 468819 - DNA, 17 bp, Homo sapiens
  chr15:93198374-93198391
  hyper
  melanoma vs. breast,sarcoma,bladder_and_urothelial, pancreas_gallbladder,prostate,lung,colorectal,upper_gi,cervical, renal,head_and_neck,non_cancer
cgagcacaccccggccc

SEQ ID NO: 468820 - DNA, 200 bp, Homo sapiens; identical to SEQ ID NO: 347361
  chr15:93199039-93199239
  hyper
  melanoma vs. breast,sarcoma,bladder_and_urothelial, pancreas_gallbladder,prostate,lung,colorectal,upper_gi,cervical, renal,head_and_neck,non_cancer

SEQ ID NO: 468821 - DNA, 518 bp, Homo sapiens; identical to SEQ ID NO: 455718
  chr15:101459489-101460007
  hyper
  melanoma vs. lymphoid_neoplasm

SEQ ID NO: 468822 - DNA, 50 bp, Homo sapiens; identical to SEQ ID NO: 351759
  chr15:101460335-101460385
  hyper
  melanoma vs. lymphoid_neoplasm

SEQ ID NO: 468823 - DNA, 62 bp, Homo sapiens; identical to SEQ ID NO: 466532
  chr15:102028780-102028842
  hyper
  melanoma vs. liver_bileduct,upper_gi,anorectal,lung, breast

SEQ ID NO: 468824 - DNA, 503 bp, Homo sapiens; identical to SEQ ID NO: 466533
  chr15:102028992-102029495
  hyper
  melanoma vs. liver_bileduct,upper_gi,anorectal,lung, breast

SEQ ID NO: 468825 - DNA, 150 bp, Homo sapiens; identical to SEQ ID NO: 360773
  chr16:2245386-2245536
  hyper
  melanoma vs. lung,upper_gi

SEQ ID NO: 468826 - DNA, 49 bp, Homo sapiens; identical to SEQ ID NO: 452915
  chr16:4363872-4363921
  hyper
  melanoma vs. liver_bileduct,colorectal, pancreas_gallbladder,upper_gi,multiple_myeloma,renal,uterine, prostate

SEQ ID NO: 468827 - DNA, 158 bp, Homo sapiens; identical to SEQ ID NO: 345488
  chr16:4364080-4364238
  hyper
  melanoma vs. liver_bileduct,colorectal, pancreas_gallbladder,upper_gi,multiple_myeloma,renal,uterine, prostate

SEQ ID NO: 468828 - DNA, 890 bp, Homo sapiens; identical to SEQ ID NO: 345489
  chr16:4986642-4987532
  hyper
  melanoma vs. liver_bileduct,lung

SEQ ID NO: 468829 - DNA, 63 bp, Homo sapiens; identical to SEQ ID NO: 360811
  chr16:31228313-31228376
  hyper
  melanoma vs. thyroid,myeloid_neoplasm

SEQ ID NO: 468830 - DNA, 93 bp, Homo sapiens
  chr16:55404823-55404916
  hyper
  melanoma vs. prostate,anorectal,myeloid_neoplasm
cgcagcctcacctacgggaagatctacatcccctcctccagggctctaccgagggagaaccaaggtagaaaagcatgcctttccggctgctgc

SEQ ID NO: 468831 - DNA, 17 bp, Homo sapiens
  chr16:55405244-55405261
  hyper
  melanoma vs. prostate,anorectal,myeloid_neoplasm
ggggaacaaagcccggc

SEQ ID NO: 468832 - DNA, 86 bp, Homo sapiens; identical to SEQ ID NO: 459452
  chr16:56228284-56228370
  hyper
  melanoma vs. sarcoma

SEQ ID NO: 468833 - DNA, 57 bp, Homo sapiens; identical to SEQ ID NO: 351808
  chr16:56228591-56228648
  hyper
  melanoma vs. sarcoma

SEQ ID NO: 468834 - DNA, 573 bp, Homo sapiens; identical to SEQ ID NO: 335343
  chr16:56390323-56390896
  hyper
  melanoma vs. lymphoid_neoplasm,liver_bileduct,upper_gi, bladder_and_urothelial,multiple_myeloma,pancreas_gallbladder, renal,breast,head_and_neck,lung,colorectal,ovary,prostate, uterine

SEQ ID NO: 468835 - DNA, 29 bp, Homo sapiens
  chr16:56677568-56677597
  hyper
  melanoma vs. colorectal,upper_gi,renal
ccgcctcctaccggcccgcctgttttttc

SEQ ID NO: 468836 - DNA, 66 bp, Homo sapiens
  chr16:68269820-68269886
  hyper
  melanoma vs. liver_bileduct,lung,pancreas_gallbladder, breast
cgtcccagcgcacccgccgtagccccgaagaggacgaccagtgatccgggccaggggcaggggtcc

SEQ ID NO: 468837 - DNA, 113 bp, Homo sapiens
  chr16:68269896-68270009
  hyper
  melanoma vs. liver_bileduct,lung,pancreas_gallbladder, breast
cggccgcggggtcagggcccgggggagggggcggcggcggcggcggagtcatggccgcagaggaagggggctctcggccagacacgcggaccgacgaggcgcacgcacgcacc

SEQ ID NO: 468838 - DNA, 106 bp, Homo sapiens
  chr16:68270022-68270128
  hyper
  melanoma vs. liver_bileduct,lung,pancreas_gallbladder, breast
cgcggatcagcttgggcgggacaccgtgtatcgggggcggcacctgcggcccggctggctcagtgggcgctgccaagacccgcccgtggcgccccgcggggcgggg

SEQ ID NO: 468839 - DNA, 125 bp, Homo sapiens; identical to SEQ ID NO: 347388
  chr16:68270157-68270282
  hyper
  melanoma vs. liver_bileduct,lung,pancreas_gallbladder, breast

SEQ ID NO: 468840 - DNA, 50 bp, Homo sapiens; identical to SEQ ID NO: 351831
  chr16:73100590-73100640
  hyper
  melanoma vs. anorectal,multiple_myeloma,colorectal, head_and_neck,non_cancer

SEQ ID NO: 468841 - DNA, 94 bp, Homo sapiens; identical to SEQ ID NO: 464267
  chr16:89992765-89992859
  hyper
  melanoma vs. prostate,head_and_neck,anorectal,colorectal, renal,thyroid,uterine,non_cancer,breast,upper_gi, myeloid_neoplasm,sarcoma,pancreas_gallbladder,cervical

SEQ ID NO: 468842 - DNA, 5 bp, Homo sapiens
  chr16:89993019-89993024
  hyper
  melanoma vs. prostate,head_and_neck,anorectal,colorectal, renal,thyroid,uterine,non_cancer,breast,upper_gi, myeloid_neoplasm,sarcoma,pancreas_gallbladder,cervical
cgccc

SEQ ID NO: 468843 - DNA, 409 bp, Homo sapiens; identical to SEQ ID NO: 335445
  chr17:6939640-6940049
  hyper
  melanoma vs. liver_bileduct,lung,pancreas_gallbladder, colorectal,breast,head_and_neck,cervical,anorectal, multiple_myeloma,renal

SEQ ID NO: 468844 - DNA, 564 bp, Homo sapiens
  chr17:7165743-7166307
  hyper
  melanoma vs. upper_gi,pancreas_gallbladder,lung,breast, cervical,head_and_neck,colorectal,uterine,anorectal,renal, liver_bileduct,prostate,bladder_and_urothelial,thyroid,ovary, multiple_myeloma,non_cancer
cgaggctgcggtgcgcagcagaggtggctcggaggtgagccagcaggtgcgggcggacaggtggggcgcacctgagtatatgtagggcgtcgggggcgcggcccgcgcgccccgggagcgcgggagggggaggcgggaccggaggggcggccgaggatgacctgacgtcaccgaagggacactcacctgaaccggaagtcgtggcccccacccctccttgcccaggtgaggaggaagaaacctgagcaccagggtcacgccccttcgcttgcccggttttgaccgccgctggggaggaggcggtggctccccaggagtcccaagctccgagtcagcccctccggactggatttccctcgaacaccgggaagccccttcctttcttcccaacaggtgcgcctgggacgctgcggggcgcccctgacaagcctcggcgccgccctttccccgccgggttctgtccaaagtgctctctcctcggccctgctttcgcccccacccgctgctctccttttttttcctgtctcctaccctggtcgatcccaccttcgggggccctggctc

SEQ ID NO: 468845 - DNA, 355 bp, Homo sapiens; identical to SEQ ID NO: 351876
  chr17:7166376-7166731
  hyper
  melanoma vs. upper_gi,pancreas_gallbladder,lung,breast, cervical,head_and_neck,colorectal,uterine,anorectal,renal, liver_bileduct,prostate,bladder_and_urothelial,thyroid,ovary, multiple_myeloma,non_cancer

SEQ ID NO: 468846 - DNA, 70 bp, Homo sapiens; identical to SEQ ID NO: 335447
  chr17:7198346-7198416
  hyper
  melanoma vs. breast

SEQ ID NO: 468847 - DNA, 362 bp, Homo sapiens; identical to SEQ ID NO: 452932
  chr17:16290077-16290439
  hyper
  melanoma vs. liver_bileduct

SEQ ID NO: 468848 - DNA, 95 bp, Homo sapiens
  chr17:17399572-17399667
  hyper
  melanoma vs. sarcoma
cggggtgagcggctggagggctctgctcgggctgggcgcggctcgggcttggggctccggctccgctcgggctgggctcgggctaggctgggctc

SEQ ID NO: 468849 - DNA, 960 bp, Homo sapiens; identical to SEQ ID NO: 454229
  chr17:17685627-17686587
  hyper
  melanoma vs. pancreas_gallbladder,breast,ovary,uterine, head_and_neck,lung,multiple_myeloma,cervical,prostate,anorectal

SEQ ID NO: 468850 - DNA, 911 bp, Homo sapiens; identical to SEQ ID NO: 454230
  chr17:17686099-17687010
  hyper
  melanoma vs. ovary,pancreas_gallbladder,uterine,breast, multiple_myeloma,head_and_neck,cervical,prostate,anorectal

SEQ ID NO: 468851 - DNA, 14 bp, Homo sapiens
  chr17:17687055-17687069
  hyper
  melanoma vs. ovary,pancreas_gallbladder,uterine,breast, multiple_myeloma,head_and_neck,cervical,prostate,anorectal
cccccctccacctc

SEQ ID NO: 468852 - DNA, 413 bp, Homo sapiens; identical to SEQ ID NO: 454232
  chr17:17686597-17687010
  hyper
  melanoma vs. ovary,head_and_neck,pancreas_gallbladder, uterine,cervical,breast,multiple_myeloma,anorectal

SEQ ID NO: 468853 - DNA, 367 bp, Homo sapiens; identical to SEQ ID NO: 345511
  chr17:17687055-17687422
  hyper
  melanoma vs. ovary,head_and_neck,pancreas_gallbladder, uterine,cervical,breast,multiple_myeloma,anorectal

SEQ ID NO: 468854 - DNA, 4 bp, Homo sapiens
  chr17:20755763-20755767
  hyper
  melanoma vs. sarcoma
cgat

SEQ ID NO: 468855 - DNA, 106 bp, Homo sapiens; identical to SEQ ID NO: 374073
  chr17:20756146-20756252
  hyper
  melanoma vs. sarcoma

SEQ ID NO: 468856 - DNA, 57 bp, Homo sapiens; identical to SEQ ID NO: 455756
  chr17:27893139-27893196
  hyper
  melanoma vs. head_and_neck,renal,lung, bladder_and_urothelial

SEQ ID NO: 468857 - DNA, 387 bp, Homo sapiens; identical to SEQ ID NO: 360990
  chr17:27893344-27893731
  hyper
  melanoma vs. head_and_neck,renal,lung, bladder_and_urothelial

SEQ ID NO: 468858 - DNA, 4 bp, Homo sapiens
  chr17:29335853-29335857
  hyper
  melanoma vs. cervical,pancreas_gallbladder,anorectal, prostate,lung,upper_gi,bladder_and_urothelial,colorectal, multiple_myeloma,renal,non_cancer,thyroid
cgcc

SEQ ID NO: 468859 - DNA, 122 bp, Homo sapiens; identical to SEQ ID NO: 351920
  chr17:35078956-35079078
  hyper
  melanoma vs. multiple_myeloma

SEQ ID NO: 468860 - DNA, 160 bp, Homo sapiens
  chr17:36829818-36829978
  hyper
  melanoma vs. cervical,breast,ovary,uterine,non_cancer, anorectal,thyroid,lung
cgtggtggggagcgtcggtgcagggcggcggggctgcgcggtgcgcggagggggcgccggcagccggcgtttcttggcggctccccgagccggccctttcgcaggcggccgctctggcccccggcgcaaactcggagtgtccaaggcgaagcccttcgcg

SEQ ID NO: 468861 - DNA, 303 bp, Homo sapiens; identical to SEQ ID NO: 351928
  chr17:36830051-36830354
  hyper
  melanoma vs. cervical,breast,ovary,uterine,non_cancer, anorectal,thyroid,lung

SEQ ID NO: 468862 - DNA, 297 bp, Homo sapiens; identical to SEQ ID NO: 335537
  chr17:38020387-38020684
  hyper
  melanoma vs. lymphoid_neoplasm,bladder_and_urothelial, prostate,colorectal,cervical,uterine,pancreas_gallbladder

SEQ ID NO: 468863 - DNA, 85 bp, Homo sapiens; identical to SEQ ID NO: 457604
  chr17:40558083-40558168
  hyper
  melanoma vs. lymphoid_neoplasm

SEQ ID NO: 468864 - DNA, 47 bp, Homo sapiens; identical to SEQ ID NO: 345518
  chr17:40558226-40558273
  hyper
  melanoma vs. lymphoid_neoplasm

SEQ ID NO: 468865 - DNA, 198 bp, Homo sapiens; identical to SEQ ID NO: 455777
  chr17:42988798-42988996
  hyper
  melanoma vs. colorectal

SEQ ID NO: 468866 - DNA, 89 bp, Homo sapiens; identical to SEQ ID NO: 345522
  chr17:42989016-42989105
  hyper
  melanoma vs. colorectal

SEQ ID NO: 468867 - DNA, 39 bp, Homo sapiens
  chr17:43298587-43298626
  hyper
  melanoma vs. lymphoid_neoplasm,multiple_myeloma, bladder_and_urothelial,prostate,uterine,breast,ovary,non_cancer, myeloid_neoplasm,thyroid,lung
cgtccgcgccccccaccctgtttaggagttcctgtttgg

SEQ ID NO: 468868 - DNA, 230 bp, Homo sapiens; identical to SEQ ID NO: 347439
  chr17:43298666-43298896
  hyper
  melanoma vs. lymphoid_neoplasm,multiple_myeloma, bladder_and_urothelial,prostate,uterine,breast,ovary,non_cancer, myeloid_neoplasm,thyroid,lung

SEQ ID NO: 468869 - DNA, 39 bp, Homo sapiens; identical to SEQ ID NO: 466619
  chr17:45500788-45500827
  hyper
  melanoma vs. liver_bileduct,sarcoma, bladder_and_urothelial,breast,prostate,cervical, pancreas_gallbladder,anorectal

SEQ ID NO: 468870 - DNA, 380 bp, Homo sapiens; identical to SEQ ID NO: 466620
  chr17:45500865-45501245
  hyper
  melanoma vs. liver_bileduct,sarcoma, bladder_and_urothelial,breast,prostate,cervical, pancreas_gallbladder,anorectal

SEQ ID NO: 468871 - DNA, 619 bp, Homo sapiens; identical to SEQ ID NO: 374170
  chr17:45928211-45928830
  hyper
  melanoma vs. lung

SEQ ID NO: 468872 - DNA, 29 bp, Homo sapiens
  chr17:46089217-46089246
  hyper
  melanoma vs. bladder_and_urothelial,prostate,anorectal, colorectal,non_cancer,myeloid_neoplasm,multiple_myeloma,thyroid, ovary,pancreas_gallbladder,lymphoid_neoplasm,uterine,upper_gi
cgtttcctgggccattcctctccaggcag

SEQ ID NO: 468873 - DNA, 299 bp, Homo sapiens
  chr17:46089283-46089582
  hyper
  melanoma vs. bladder_and_urothelial,prostate,anorectal, colorectal,non_cancer,myeloid_neoplasm,multiple_myeloma,thyroid, ovary,pancreas_gallbladder,lymphoid_neoplasm,uterine,upper_gi
tccagcggtcccctctcttccatcccgccatctctctgaggggcttgcgtctccctgatgcgctctggtgtctgtctgagccatccatcaaggatggcaggctgggggaaacatgaaaaagagcctatttggctattaacatcccctcccgctttgttgtctctctcctccccagtcccctaccagcccctcacccaacccctcccttttccccttttgcaggagacaaaaccagactgacaagctgaagactcaaacattaatcaaactgcgctccggaacaacctttccctcgcatt

SEQ ID NO: 468874 - DNA, 7 bp, Homo sapiens
  chr17:46507738-46507745
  hyper
  melanoma vs. uterine,cervical,multiple_myeloma, colorectal,bladder_and_urothelial,anorectal,upper_gi,renal, non_cancer
gggtgcc

SEQ ID NO: 468875 - DNA, 111 bp, Homo sapiens; identical to SEQ ID NO: 361098
  chr17:53343657-53343768
  hyper
  melanoma vs. bladder_and_urothelial,anorectal, head_and_neck,thyroid

SEQ ID NO: 468876 - DNA, 298 bp, Homo sapiens
  chr17:54911482-54911780
  hyper
  melanoma vs. cervical,bladder_and_urothelial,anorectal, multiple_myeloma,myeloid_neoplasm,ovary,colorectal, head_and_neck,breast,upper_gi,non_cancer,uterine,prostate, pancreas_gallbladder,sarcoma,lymphoid_neoplasm,renal,thyroid
cggatcggcgtgcgtgcggctggagccttaagcgtttcccccgcccggcttcatccctgctggcggcccagcgtcgttctcctcctgcgcgaggcggccaaggcctgctggcccggagccgcgcctccacccgcgcgaggtagggcttcgaggaccggcgcggcgcaggtctccggaggcctcccgagaggggctagggtcgccgggccgcgcgtgggagcgggtggggcccgggaggagacggcgccccggaggggagtgcgaggcctgggccgacggttacgggcgccgaccggcg

SEQ ID NO: 468877 - DNA, 515 bp, Homo sapiens; identical to SEQ ID NO: 345534
  chr17:54911874-54912389
  hyper
  melanoma vs. cervical,bladder_and_urothelial,anorectal, multiple_myeloma,myeloid_neoplasm,ovary,colorectal, head_and_neck,breast,upper_gi,non_cancer,uterine,prostate, pancreas_gallbladder,sarcoma,lymphoid_neoplasm,renal,thyroid

SEQ ID NO: 468878 - DNA, 80 bp, Homo sapiens; identical to SEQ ID NO: 455791
  chr17:58498618-58498698
  hyper
  melanoma vs. anorectal,lymphoid_neoplasm

SEQ ID NO: 468879 - DNA, 27 bp, Homo sapiens
  chr17:59467400-59467427
  hyper
  melanoma vs. lymphoid_neoplasm,cervical,upper_gi,uterine, renal,colorectal
cggcccgatcctaaggaagcccctgct

SEQ ID NO: 468880 - DNA, 39 bp, Homo sapiens; identical to SEQ ID NO: 374222
  chr17:59475144-59475183
  hyper
  melanoma vs. myeloid_neoplasm

SEQ ID NO: 468881 - DNA, 18 bp, Homo sapiens
  chr17:59489112-59489130
  hyper
  melanoma vs. uterine
ttcctcctccactccccc

SEQ ID NO: 468882 - DNA, 310 bp, Homo sapiens; identical to SEQ ID NO: 361110
  chr17:59489181-59489491
  hyper
  melanoma vs. uterine

SEQ ID NO: 468883 - DNA, 41 bp, Homo sapiens
  chr17:60885408-60885449
  hyper
  melanoma vs. pancreas_gallbladder,colorectal,uterine, bladder_and_urothelial,upper_gi,cervical,lung,myeloid_neoplasm, thyroid,breast,ovary,renal
cggagcggcgggggcgagggggccgttacctgtgggtctgc

SEQ ID NO: 468884 - DNA, 308 bp, Homo sapiens; identical to SEQ ID NO: 347460
  chr17:60885548-60885856
  hyper
  melanoma vs. pancreas_gallbladder,colorectal,uterine, bladder_and_urothelial,upper_gi,cervical,lung,myeloid_neoplasm, thyroid,breast,ovary,renal

SEQ ID NO: 468885 - DNA, 30 bp, Homo sapiens
  chr17:74865491-74865521
  hyper
  melanoma vs. ovary,multiple_myeloma,non_cancer,uterine
cgcgccccttcccagcccctcagggtcctt

SEQ ID NO: 468886 - DNA, 1 bp, Homo sapiens
  chr17:74866320-74866321
  hyper
  melanoma vs. ovary,multiple_myeloma,non_cancer,uterine
c

SEQ ID NO: 468887 - DNA, 336 bp, Homo sapiens; identical to SEQ ID NO: 374285
  chr17:77773692-77774028
  hyper
  melanoma vs. cervical

SEQ ID NO: 468888 - DNA, 125 bp, Homo sapiens
  chr17:77778310-77778435
  hyper
  melanoma vs. head_and_neck
cgatcggtttccccgcccttctgtaggaaatcaaattcagggaacatggtaccgtatttacccgcacaacttcctcccttgacattttgcactctcgaagttggggcagaagtaattatgcaaac

SEQ ID NO: 468889 - DNA, 258 bp, Homo sapiens; identical to SEQ ID NO: 466653
  chr17:77814493-77814751
  hyper
  melanoma vs. sarcoma

SEQ ID NO: 468890 - DNA, 258 bp, Homo sapiens; identical to SEQ ID NO: 466653
  chr17:77814493-77814751
  hyper
  melanoma vs. anorectal,uterine,myeloid_neoplasm,cervical, breast,renal,ovary,non_cancer,prostate,head_and_neck,sarcoma, thyroid,colorectal

SEQ ID NO: 468891 - DNA, 222 bp, Homo sapiens; identical to SEQ ID NO: 466654
  chr17:77814929-77815151
  hyper
  melanoma vs. anorectal,uterine,myeloid_neoplasm,cervical, breast,renal,ovary,non_cancer,prostate,head_and_neck,sarcoma, thyroid,colorectal

SEQ ID NO: 468892 - DNA, 222 bp, Homo sapiens; identical to SEQ ID NO: 466654
  chr17:77814929-77815151
  hyper
  melanoma vs. anorectal,myeloid_neoplasm,ovary,uterine, non_cancer,breast,renal,prostate,cervical,thyroid,head_and_neck

SEQ ID NO: 468893 - DNA, 51 bp, Homo sapiens
  chr17:77815935-77815986
  hyper
  melanoma vs. anorectal,ovary,thyroid,myeloid_neoplasm, uterine,breast,non_cancer,prostate,cervical,multiple_myeloma, head_and_neck,renal,upper_gi,pancreas_gallbladder,colorectal
agaccacccctgccagccggtgtggggaggagctcaggtccgcgggagagc

SEQ ID NO: 468894 - DNA, 187 bp, Homo sapiens; identical to SEQ ID NO: 54699
  chr17:77816033-77816220
  hyper
  melanoma vs. anorectal,ovary,thyroid,myeloid_neoplasm, uterine,breast,non_cancer,prostate,cervical,multiple_myeloma, head_and_neck,renal,upper_gi,pancreas_gallbladder,colorectal

SEQ ID NO: 468895 - DNA, 397 bp, Homo sapiens; identical to SEQ ID NO: 335708
  chr17:77817078-77817475
  hyper
  melanoma vs. breast

SEQ ID NO: 468896 - DNA, 221 bp, Homo sapiens; identical to SEQ ID NO: 455803
  chr17:80186335-80186556
  hyper
  melanoma vs. bladder_and_urothelial,colorectal,anorectal, multiple_myeloma,upper_gi

SEQ ID NO: 468897 - DNA, 517 bp, Homo sapiens; identical to SEQ ID NO: 347473
  chr17:80186618-80187135
  hyper
  melanoma vs. bladder_and_urothelial,colorectal,anorectal, multiple_myeloma,upper_gi

SEQ ID NO: 468898 - DNA, 155 bp, Homo sapiens
  chr18:19748134-19748289
  hyper
  melanoma vs. liver_bileduct
cgaaaatagaaacaaaacaaaaaaccagagcctaaacgctttctaggagaccgaccttcagaaaatcatttacttggatttacctgggcggggggtagggggtggggtcggggtaaagtataaaaattcattctcacaaaaacaacgcctcttgt

SEQ ID NO: 468899 - DNA, 71 bp, Homo sapiens; identical to SEQ ID NO: 374356
  chr18:19748376-19748447
  hyper
  melanoma vs. liver_bileduct

SEQ ID NO: 468900 - DNA, 213 bp, Homo sapiens; identical to SEQ ID NO: 466702
  chr18:21269740-21269953
  hyper
  melanoma vs. renal,cervical

SEQ ID NO: 468901 - DNA, 174 bp, Homo sapiens; identical to SEQ ID NO: 204924
  chr18:21270135-21270309
  hyper
  melanoma vs. renal,cervical

SEQ ID NO: 468902 - DNA, 122 bp, Homo sapiens; identical to SEQ ID NO: 462589
  chr18:24130266-24130388
  hyper
  melanoma vs. anorectal,cervical,thyroid

SEQ ID NO: 468903 - DNA, 169 bp, Homo sapiens; identical to SEQ ID NO: 374376
  chr18:24235701-24235870
  hyper
  melanoma vs. liver_bileduct

SEQ ID NO: 468904 - DNA, 235 bp, Homo sapiens
  chr18:55470607-55470842
  hyper
  melanoma vs. liver_bileduct,breast,colorectal,renal, upper_gi,bladder_and_urothelial
cgggctcggccttctcccctccctttttccctccctagggcggagaggggctggactgcaagccccggggcggcccgaggcggcccaggtccagctcctgccccacgccctccgtgcgtcctggagtcaggtgggcacccctttcagtcttccgagcccagcctacgagcccttgcctcgcccagcctgagacccagttgctgcggctgctcttagctccccgggggccgcactc

SEQ ID NO: 468905 - DNA, 27 bp, Homo sapiens
  chr18:55470898-55470925
  hyper
  melanoma vs. liver_bileduct,breast,colorectal,renal, upper_gi,bladder_and_urothelial
cgtcaccccgggtcgaggactgagcca

SEQ ID NO: 468906 - DNA, 246 bp, Homo sapiens; identical to SEQ ID NO: 361298
  chr18:55470954-55471200
  hyper
  melanoma vs. liver_bileduct,breast,colorectal,renal, upper_gi,bladder_and_urothelial

SEQ ID NO: 468907 - DNA, 649 bp, Homo sapiens; identical to SEQ ID NO: 361304
  chr18:59560572-59561221
  hyper
  melanoma vs. sarcoma

SEQ ID NO: 468908 - DNA, 304 bp, Homo sapiens
  chr18:77156459-77156763
  hyper
  melanoma vs. head_and_neck,lymphoid_neoplasm
cgaggtcggccgggtctgtgcgcccagggaggggcgcggcgcggaccgggaacggcgtcccccagctcccagcagcccggttccgagcgcgccttctgccaataggtgtctcctctgccccagcgctgagggcgcgaggcgaggccgccgcgggtcccgccgaggaagcggctcgcaggccggcgatttggggacgggcgaggctgggccgtcaggaccacagagggcacgtgggagggaggaagggaggcttccttgggagtgaaggatgccccgtgtcttcctgagcgaggcagagccaccc

SEQ ID NO: 468909 - DNA, 51 bp, Homo sapiens; identical to SEQ ID NO: 361319
  chr18:77156828-77156879
  hyper
  melanoma vs. head_and_neck,lymphoid_neoplasm

SEQ ID NO: 468910 - DNA, 150 bp, Homo sapiens; identical to SEQ ID NO: 335923
  chr19:6768009-6768159
  hyper
  melanoma vs. lymphoid_neoplasm,upper_gi

SEQ ID NO: 468911 - DNA, 177 bp, Homo sapiens; identical to SEQ ID NO: 335952
  chr19:11199850-11200027
  hyper
  melanoma vs. liver_bileduct

SEQ ID NO: 468912 - DNA, 109 bp, Homo sapiens; identical to SEQ ID NO: 361455
  chr19:12912808-12912917
  hyper
  melanoma vs. lung,breast,bladder_and_urothelial,ovary, head_and_neck,upper_gi

SEQ ID NO: 468913 - DNA, 661 bp, Homo sapiens; identical to SEQ ID NO: 352233
  chr19:16772102-16772763
  hyper
  melanoma vs. sarcoma,uterine,pancreas_gallbladder, bladder_and_urothelial,cervical,renal,upper_gi,lung,breast, prostate,head_and_neck,ovary,multiple_myeloma

SEQ ID NO: 468914 - DNA, 133 bp, Homo sapiens; identical to SEQ ID NO: 455836
  chr19:17958343-17958476
  hyper
  melanoma vs. lymphoid_neoplasm

SEQ ID NO: 468915 - DNA, 51 bp, Homo sapiens; identical to SEQ ID NO: 462626
  chr19:19738572-19738623
  hyper
  melanoma vs. upper_gi

SEQ ID NO: 468916 - DNA, 505 bp, Homo sapiens; identical to SEQ ID NO: 462627
  chr19:19738668-19739173
  hyper
  melanoma vs. upper_gi

SEQ ID NO: 468917 - DNA, 122 bp, Homo sapiens
  chr19:35581628-35581750
  hyper
  melanoma vs. breast,prostate,pancreas_gallbladder, cervical,multiple_myeloma
cgctgtcccaaccacttaatttattttaacttgcttaaccctcaaagtcagtttgaggtcagtactcttttcggagagatgggtacggagtcctggagaggttaagcaccacgacagagccg

SEQ ID NO: 468918 - DNA, 149 bp, Homo sapiens; identical to SEQ ID NO: 293861
  chr19:35581779-35581928
  hyper
  melanoma vs. breast,prostate,pancreas_gallbladder, cervical,multiple_myeloma

SEQ ID NO: 468919 - DNA, 390 bp, Homo sapiens; identical to SEQ ID NO: 462642
  chr19:38754883-38755273
  hyper
  melanoma vs. upper_gi,breast,head_and_neck,lung, colorectal,prostate,anorectal,renal,pancreas_gallbladder, cervical,myeloid_neoplasm,thyroid,non_cancer,ovary,uterine

SEQ ID NO: 468920 - DNA, 175 bp, Homo sapiens; identical to SEQ ID NO: 347598
  chr19:38755344-38755519
  hyper
  melanoma vs. upper_gi,breast,head_and_neck,lung, colorectal,prostate,anorectal,renal,pancreas_gallbladder, cervical,myeloid_neoplasm,thyroid,non_cancer,ovary,uterine

SEQ ID NO: 468921 - DNA, 669 bp, Homo sapiens
  chr19:39574122-39574791
  hyper
  melanoma vs. breast,lung
cgactggaaatccgggcccccccagttcttccctgcttctctttttgtggcagccgctcctcacgttcaaacagattgcaaaggtttacaggggagaaccctaacttgttccctagacgtcagtttctggagttcctgcattaatacgattaaaaagaacagctgattcttatccagcccttactctgggccgggccctgttatcggcatgaaatttcatgcagcaactcgtttactcctcacaacagcccacggggtatatacgagcatcacctcctttttacaggtgaaaaaacccaaggtccagcgaggttgaataactcacctaggtcgcacagctcagaaagcccactgcaattccgggattctggttttgttttgaggttgccccgggcttctgaggaggggtcagtgggctcagcatggaaaggaaggaagccggaaggctggaggaagatgcagcgaggctggaaaggttggggatcccccggtcctgcacacctgggtacctggggatcgggcagggccaggataggggccggtgtccgtgccctggggctccccagctgatgagtgggcgcctgagggacgagcgcagggttacctgcctgggctctcacctggtggccggctcagaggtggcgcgccggagacgtatcataaccttcc

SEQ ID NO: 468922 - DNA, 45 bp, Homo sapiens; identical to SEQ ID NO: 361588
  chr19:39575044-39575089
  hyper
  melanoma vs. breast,lung

SEQ ID NO: 468923 - DNA, 187 bp, Homo sapiens
  chr19:39989541-39989728
  hyper
  melanoma vs. sarcoma,prostate,ovary,myeloid_neoplasm, non_cancer,uterine
cggggccattctctcagatataaggcttggaagccagcagctgcgactcccgagacccccccaccagaaggccatggtctccccacggatgtccgggctcctctcccagactgtgatcctagcgctcattttcctcccccaggtcagagccaggtgggaggtggcgtggaaagggatgaatgcggag

SEQ ID NO: 468924 - DNA, 23 bp, Homo sapiens
  chr19:39990142-39990165
  hyper
  melanoma vs. sarcoma,prostate,ovary,myeloid_neoplasm, non_cancer,uterine
gctggaggcctaaccctgccagc

SEQ ID NO: 468925 - DNA, 109 bp, Homo sapiens; identical to SEQ ID NO: 466826
  chr19:44302742-44302851
  hyper
  melanoma vs. head_and_neck,sarcoma

SEQ ID NO: 468926 - DNA, 33 bp, Homo sapiens; identical to SEQ ID NO: 361613
  chr19:44303168-44303201
  hyper
  melanoma vs. head_and_neck,sarcoma

SEQ ID NO: 468927 - DNA, 555 bp, Homo sapiens; identical to SEQ ID NO: 336165
  chr19:45579321-45579876
  hyper
  melanoma vs. upper_gi,lymphoid_neoplasm,lung,breast, pancreas_gallbladder,bladder_and_urothelial,head_and_neck, colorectal,multiple_myeloma

SEQ ID NO: 468928 - DNA, 201 bp, Homo sapiens; identical to SEQ ID NO: 454296
  chr19:45656461-45656662
  hyper
  melanoma vs. anorectal

SEQ ID NO: 468929 - DNA, 62 bp, Homo sapiens; identical to SEQ ID NO: 336169
  chr19:45907705-45907767
  hyper
  melanoma vs. lung,head_and_neck,liver_bileduct,upper_gi, breast

SEQ ID NO: 468930 - DNA, 173 bp, Homo sapiens; identical to SEQ ID NO: 455847
  chr19:46180187-46180360
  hyper
  melanoma vs. uterine,cervical,multiple_myeloma,upper_gi, ovary,myeloid_neoplasm,anorectal,thyroid,pancreas_gallbladder, colorectal,lung,bladder_and_urothelial,head_and_neck

SEQ ID NO: 468931 - DNA, 79 bp, Homo sapiens; identical to SEQ ID NO: 352338
  chr19:46180559-46180638
  hyper
  melanoma vs. uterine,cervical,multiple_myeloma,upper_gi, ovary,myeloid_neoplasm,anorectal,thyroid,pancreas_gallbladder, colorectal,lung,bladder_and_urothelial,head_and_neck

SEQ ID NO: 468932 - DNA, 480 bp, Homo sapiens; identical to SEQ ID NO: 336204
  chr19:49199703-49200183
  hyper
  melanoma vs. head_and_neck

SEQ ID NO: 468933 - DNA, 18 bp, Homo sapiens
  chr19:49242357-49242375
  hyper
  melanoma vs. ovary
cgcgcaggtgctccgccc

SEQ ID NO: 468934 - DNA, 142 bp, Homo sapiens; identical to SEQ ID NO: 459532
  chr19:49242393-49242535
  hyper
  melanoma vs. ovary

SEQ ID NO: 468935 - DNA, 36 bp, Homo sapiens; identical to SEQ ID NO: 459533
  chr19:49242773-49242809
  hyper
  melanoma vs. ovary

SEQ ID NO: 468936 - DNA, 19 bp, Homo sapiens
  chr19:49242911-49242930
  hyper
  melanoma vs. ovary
cgccggggaacagagtcgc

SEQ ID NO: 468937 - DNA, 619 bp, Homo sapiens
  chr19:49255778-49256397
  hyper
  melanoma vs. cervical,head_and_neck
cgcttttcgtggccggagcgcaccctccgcaaaggcaggccacatccggccgcccctggaacgccaggcgtccggctatccggcccggcagccctcccctccgcgcagcctgtccggactggcagcgagggcttggggaggagaggaaggagagggcgcggccgggagtctcgcagcgtccgccctcccgggccgggcggatggctggaaggtggagccccgcccgtcacttggcgccgagccccagcgccaggggctaaggcgatggcccctgggcccaccgctccccagatcggggatgcaggggaccgcgccctgcccctccgccccgtcattgacctgcgcgaaggcttcacccagggcaggctacctggcttctgagcagccgcagcatcattgcgtggaccaggagacggagcgcccagttgcaatgctggagccgggaggtccaatccgccgccctctctcttccggtgccagggcttagagtcggcccccgacacctgggtgcttcgagcctggccacgccccagcggctgggcagggcccccgcacctggtcccggcgagtggagcgatcgtccgccctctgccgcgtcctcctgggggatggagaacct

SEQ ID NO: 468938 - DNA, 15 bp, Homo sapiens
  chr19:49256438-49256453
  hyper
  melanoma vs. cervical,head_and_neck
tgcaggtgctcccgc

SEQ ID NO: 468939 - DNA, 378 bp, Homo sapiens; identical to SEQ ID NO: 336220
  chr19:50708476-50708854
  hyper
  melanoma vs. liver_bileduct,pancreas_gallbladder, head_and_neck,breast,lung,bladder_and_urothelial,upper_gi,renal, multiple_myeloma,colorectal,cervical,anorectal,prostate,ovary, uterine

SEQ ID NO: 468940 - DNA, 538 bp, Homo sapiens; identical to SEQ ID NO: 352438
  chr19:59049765-59050303
  hyper
  melanoma vs. head_and_neck

SEQ ID NO: 468941 - DNA, 271 bp, Homo sapiens; identical to SEQ ID NO: 466865
  chr2:7005163-7005434
  hyper
  melanoma vs. liver_bileduct,upper_gi,cervical,lung,ovary, uterine,pancreas_gallbladder,anorectal

SEQ ID NO: 468942 - DNA, 460 bp, Homo sapiens; identical to SEQ ID NO: 466866
  chr2:7005469-7005929
  hyper
  melanoma vs. liver_bileduct,upper_gi,cervical,lung,ovary, uterine,pancreas_gallbladder,anorectal

SEQ ID NO: 468943 - DNA, 728 bp, Homo sapiens; identical to SEQ ID NO: 349448
  chr2:7005469-7006197
  hyper
  melanoma vs. liver_bileduct

SEQ ID NO: 468944 - DNA, 178 bp, Homo sapiens; identical to SEQ ID NO: 345000
  chr2:10588876-10589054
  hyper
  melanoma vs. liver_bileduct,sarcoma,pancreas_gallbladder, lymphoid_neoplasm,colorectal,renal,anorectal,thyroid, myeloid_neoplasm,upper_gi,cervical,non_cancer,ovary,uterine, prostate,bladder_and_urothelial,multiple_myeloma

SEQ ID NO: 468945 - DNA, 117 bp, Homo sapiens; identical to SEQ ID NO: 455869
  chr2:10589056-10589173
  hyper
  melanoma vs. liver_bileduct,sarcoma,pancreas_gallbladder, lymphoid_neoplasm,colorectal,renal,anorectal,thyroid, myeloid_neoplasm,upper_gi,cervical,non_cancer,ovary,uterine, prostate,bladder_and_urothelial,multiple_myeloma

SEQ ID NO: 468946 - DNA, 197 bp, Homo sapiens; identical to SEQ ID NO: 345002
  chr2:10589298-10589495
  hyper
  melanoma vs. liver_bileduct,sarcoma,pancreas_gallbladder, lymphoid_neoplasm,colorectal,renal,anorectal,thyroid, myeloid_neoplasm,upper_gi,cervical,non_cancer,ovary,uterine, prostate,bladder_and_urothelial,multiple_myeloma

SEQ ID NO: 468947 - DNA, 250 bp, Homo sapiens
  chr2:23609647-23609897
  hyper
  melanoma vs. sarcoma,prostate,renal,anorectal,ovary
cgcggggctgggagccggggtaggtcggaggtggctcttagggcaggtcgcctctgcgttgcctggggaaggcggggacgcgctgcctgcctgcggccagccgtctcggaggagggggtggcggccacgcgcgagtctcggatgcctgggtccacccgctgagaagccagttgtcgtccctgggctgtggaaccaagcggcagacgcggtccgttggcgggccctcgcgcgggcccccagagatgctgat

SEQ ID NO: 468948 - DNA, 206 bp, Homo sapiens; identical to SEQ ID NO: 349471
  chr2:23610070-23610276
  hyper
  melanoma vs. sarcoma,prostate,renal,anorectal,ovary

SEQ ID NO: 468949 - DNA, 105 bp, Homo sapiens; identical to SEQ ID NO: 198157
  chr2:31457427-31457532
  hyper
  melanoma vs. sarcoma,breast

SEQ ID NO: 468950 - DNA, 135 bp, Homo sapiens; identical to SEQ ID NO: 357153
  chr2:38303709-38303844
  hyper
  melanoma vs. breast,renal,liver_bileduct

SEQ ID NO: 468951 - DNA, 64 bp, Homo sapiens; identical to SEQ ID NO: 454317
  chr2:43019535-43019599
  hyper
  melanoma vs. sarcoma,cervical,anorectal, lymphoid_neoplasm,non_cancer,myeloid_neoplasm,thyroid, liver_bileduct

SEQ ID NO: 468952 - DNA, 70 bp, Homo sapiens; identical to SEQ ID NO: 346432
  chr2:43020503-43020573
  hyper
  melanoma vs. sarcoma,anorectal,liver_bileduct,thyroid, cervical,non_cancer,myeloid_neoplasm,pancreas_gallbladder, lymphoid_neoplasm

SEQ ID NO: 468953 - DNA, 1 bp, Homo sapiens
  chr2:54784837-54784838
  hyper
  melanoma vs. liver_bileduct,breast,head_and_neck,uterine, anorectal,pancreas_gallbladder,colorectal,upper_gi,lung, myeloid_neoplasm,thyroid,renal,bladder_and_urothelial,prostate, cervical,non_cancer,ovary,multiple_myeloma
c

SEQ ID NO: 468954 - DNA, 448 bp, Homo sapiens; identical to SEQ ID NO: 198207
  chr2:54784958-54785406
  hyper
  melanoma vs. liver_bileduct,breast,head_and_neck,uterine, anorectal,pancreas_gallbladder,colorectal,upper_gi,lung, myeloid_neoplasm,thyroid,renal,bladder_and_urothelial,prostate, cervical,non_cancer,ovary,multiple_myeloma

SEQ ID NO: 468955 - DNA, 321 bp, Homo sapiens
  chr2:54785408-54785729
  hyper
  melanoma vs. liver_bileduct,breast,head_and_neck,uterine, anorectal,pancreas_gallbladder,colorectal,upper_gi,lung, myeloid_neoplasm,thyroid,renal,bladder_and_urothelial,prostate, cervical,non_cancer,ovary,multiple_myeloma
ggtatagcctgcatttctaatacaatgctgttatgctaatcaggtgacatcaccgcccagcacacggcgagtggctcctgataaaattacaaaccggcggccgccgcgggcagctgggaggaggtgtgcgcgctgcgcccgcgagctcccgggctcggcaaccgtggcatgcttaggattggccatatttaaaagttctgaagtagaacctgcgcctcctctctgcttctccctcctcctcagtaatttatttcgagcttccaggcaagggccacggaagaagggaaagcaagaaattagatgcctgtgtggtaactcctc

SEQ ID NO: 468956 - DNA, 118 bp, Homo sapiens
  chr2:54785288-54785406
  hyper
  melanoma vs. head_and_neck,liver_bileduct,breast, upper_gi,lung,colorectal,anorectal,pancreas_gallbladder, prostate,myeloid_neoplasm,cervical,thyroid,uterine,ovary,renal, non_cancer,bladder_and_urothelial,multiple_myeloma
cgcggcgagtccagggcccggccgggggtcggcggctgccgggcggctggggcgaccgcggaccgtgcgggaccggtagggggtcgcgggccggctaggctcccccgcgcccctcctc

SEQ ID NO: 468957 - DNA, 715 bp, Homo sapiens
  chr2:54785408-54786123
  hyper
  melanoma vs. head_and_neck,liver_bileduct,breast, upper_gi,lung,colorectal,anorectal,pancreas_gallbladder, prostate,myeloid_neoplasm,cervical,thyroid,uterine,ovary,renal, non_cancer,bladder_and_urothelial,multiple_myeloma
ggtatagcctgcatttctaatacaatgctgttatgctaatcaggtgacatcaccgcccagcacacggcgagtggctcctgataaaattacaaaccggcggccgccgcgggcagctgggaggaggtgtgcgcgctgcgcccgcgagctcccgggctcggcaaccgtggcatgcttaggattggccatatttaaaagttctgaagtagaacctgcgcctcctctctgcttctccctcctcctcagtaatttatttcgagcttccaggcaagggccacggaagaagggaaagcaagaaattagatgcctgtgtggtaactcctcgcggagctaaggtggactctcttgcagccaacttcccatcagatcaccctgctggacttgcagaccggaatggggctcgcctaaggagccgagcgctgcggaggctgctgcgtgttggatgggagtgggagggggctggagcgagatttccagggcgcagtcctccggggcgttacgccgggcataatggaattgcagaggacgtctagtatctccgggccgctgtcgccggcgtacacggggcaggtgccttacaactacaaccagctggaaggcagattcaagcagctgcaaggtaagccccctcccaaaggccgggcctgtcctgggtgccaacgggggttcttggaggctttatttgtgaccctaatgaagacgggcggcttcacagctc

SEQ ID NO: 468958 - DNA, 546 bp, Homo sapiens; identical to SEQ ID NO: 331299
  chr2:55509233-55509779
  hyper
  melanoma vs. pancreas_gallbladder,sarcoma,upper_gi

SEQ ID NO: 468959 - DNA, 18 bp, Homo sapiens
  chr2:69533498-69533516
  hyper
  melanoma vs. pancreas_gallbladder
cgtgccagcttcctgaat

SEQ ID NO: 468960 - DNA, 74 bp, Homo sapiens; identical to SEQ ID NO: 357195
  chr2:69533984-69534058
  hyper
  melanoma vs. pancreas_gallbladder

SEQ ID NO: 468961 - DNA, 127 bp, Homo sapiens
  chr2:71680558-71680685
  hyper
  melanoma vs. lung
cgtcctaccccgggcggtcgggttgagttctggagagactgctccaatccccgaggcggaaggaggcaaccgatttggcgcagcactcagccagggggtagaagctcaggggaggagccgagccttt

SEQ ID NO: 468962 - DNA, 236 bp, Homo sapiens; identical to SEQ ID NO: 453103
  chr2:74781700-74781936
  hyper
  melanoma vs. lymphoid_neoplasm,colorectal, myeloid_neoplasm,thyroid,uterine,multiple_myeloma,non_cancer, renal,upper_gi,pancreas_gallbladder,ovary,sarcoma

SEQ ID NO: 468963 - DNA, 123 bp, Homo sapiens; identical to SEQ ID NO: 453104
  chr2:74782349-74782472
  hyper
  melanoma vs. lymphoid_neoplasm,colorectal, myeloid_neoplasm,thyroid,uterine,multiple_myeloma,non_cancer, renal,upper_gi,pancreas_gallbladder,ovary,sarcoma

SEQ ID NO: 468964 - DNA, 48 bp, Homo sapiens; identical to SEQ ID NO: 453105
  chr2:75147056-75147104
  hyper
  melanoma vs. lymphoid_neoplasm,ovary,prostate,breast, myeloid_neoplasm,bladder_and_urothelial,lung,thyroid, multiple_myeloma,sarcoma,colorectal,pancreas_gallbladder, uterine,non_cancer,upper_gi

SEQ ID NO: 468965 - DNA, 73 bp, Homo sapiens
  chr2:87034584-87034657
  hyper
  melanoma vs. head_and_neck,ovary,colorectal,breast
cggtgcttccccacgctgctgtgcaatggataggagctatgtgaagctggcgtatgggtggggtttgcaggct

SEQ ID NO: 468966 - DNA, 622 bp, Homo sapiens; identical to SEQ ID NO: 357234
  chr2:87034689-87035311
  hyper
  melanoma vs. head_and_neck,ovary,colorectal,breast

SEQ ID NO: 468967 - DNA, 895 bp, Homo sapiens; identical to SEQ ID NO: 331365
  chr2:88315911-88316806
  hyper
  melanoma vs. lymphoid_neoplasm,renal,head_and_neck, liver_bileduct,lung,ovary,breast,non_cancer,multiple_myeloma, pancreas_gallbladder,colorectal,uterine,anorectal, bladder_and_urothelial,cervical,myeloid_neoplasm,thyroid,
  CONT. FROM ABOVE: upper_gi,prostate

SEQ ID NO: 468968 - DNA, 265 bp, Homo sapiens; identical to SEQ ID NO: 454328
  chr2:111874622-111874887
  hyper
  melanoma vs. head_and_neck,sarcoma,breast

SEQ ID NO: 468969 - DNA, 205 bp, Homo sapiens; identical to SEQ ID NO: 453111
  chr2:111874987-111875192
  hyper
  melanoma vs. head_and_neck,sarcoma,breast

SEQ ID NO: 468970 - DNA, 71 bp, Homo sapiens
  chr2:112656507-112656578
  hyper
  melanoma vs. sarcoma,uterine,prostate,lung, multiple_myeloma
cggtgccagaggagggggcgtaggcgaacctaccgtccactgaccgcggcgcctcaagcgtcccgagggca

SEQ ID NO: 468971 - DNA, 33 bp, Homo sapiens
  chr2:112657092-112657125
  hyper
  melanoma vs. sarcoma,uterine,prostate,lung, multiple_myeloma
ggcttttttttttttaatttgagaccgagtctc

SEQ ID NO: 468972 - DNA, 147 bp, Homo sapiens
  chr2:134325872-134326019
  hyper
  melanoma vs. upper_gi,cervical,colorectal, bladder_and_urothelial,anorectal,prostate,head_and_neck, pancreas_gallbladder,renal,non_cancer
cgcggttggttatcctctgtttatttttgaagcattcaaaggccacgctaacagaacagactcggttttcctgaacatccacagcggctgggaagtcctgccgtgaatgcggagcaagtttgcggagacttgctccctgggctgcgg

SEQ ID NO: 468973 - DNA, 7 bp, Homo sapiens
  chr2:134326048-134326055
  hyper
  melanoma vs. upper_gi,cervical,colorectal, bladder_and_urothelial,anorectal,prostate,head_and_neck, pancreas_gallbladder,renal,non_cancer
aagctcc

SEQ ID NO: 468974 - DNA, 544 bp, Homo sapiens; identical to SEQ ID NO: 357323
  chr2:149634146-149634690
  hyper
  melanoma vs. prostate,breast

SEQ ID NO: 468975 - DNA, 148 bp, Homo sapiens
  chr2:152954365-152954513
  hyper
  melanoma vs. sarcoma,bladder_and_urothelial, multiple_myeloma,uterine,head_and_neck,breast,cervical,thyroid, pancreas_gallbladder,prostate,non_cancer,anorectal
cggagcttgacgatctctcccaagatccagacagataagagtattcaaattaggacaaaacagaagaaaccactaaatctcaactcgaatcaaaccaggtccccggccccgaggggtctggttactctaggtcgagttatacgaatta

SEQ ID NO: 468976 - DNA, 1 bp, Homo sapiens
  chr2:152955220-152955221
  hyper
  melanoma vs. sarcoma,bladder_and_urothelial, multiple_myeloma,uterine,head_and_neck,breast,cervical,thyroid, pancreas_gallbladder,prostate,non_cancer,anorectal
c

SEQ ID NO: 468977 - DNA, 594 bp, Homo sapiens
  chr2:153192142-153192736
  hyper
  melanoma vs. lung,sarcoma,colorectal,renal,upper_gi, cervical,multiple_myeloma,bladder_and_urothelial
cgcagcagaccgatttcagggcgcacaacgtgcctttgaagctgccgatgccagagccaggtgaactggaggagcgatttgccatcgtgctggtaagtgcgcggcggcggtcgggcgcggggacccggggccccgggccgggcggcgcagctgacccccgcccctccccttcaccccgtgccgggagcgagcctccattcccgagggggaggctcccgctttcccctttgtggccccccagcactcctcttcacccccctggcagtcccccgcgctcagtctctcggggtcccgggatggggatgggggctcagggccggctgcccaaccagcctcgaacccattgtctggctggagaggcacctcacggcgcgtgtgcccgggaggtgcggcgtgggcgtgaagagaaggtggcgcgggctgggaggaggaggtggcgagccgcttaggctttttttttaaaaaaaacaaaacaaaacaaaacaaaacaaaacaccctgagcccctgcggaccatccctcgggcggccagcccgggacctgcgaagtccccggcagatggggcgcatgtggccggccgcgggcgccgcgccgg

SEQ ID NO: 468978 - DNA, 80 bp, Homo sapiens; identical to SEQ ID NO: 357333
  chr2:153192765-153192845
  hyper
  melanoma vs. lung,sarcoma,colorectal,renal,upper_gi, cervical,multiple_myeloma,bladder_and_urothelial

SEQ ID NO: 468979 - DNA, 9 bp, Homo sapiens
  chr2:160760627-160760636
  hyper
  melanoma vs. lymphoid_neoplasm,anorectal,upper_gi, cervical
cgggaatcg

SEQ ID NO: 468980 - DNA, 98 bp, Homo sapiens
  chr2:162094194-162094292
  hyper
  melanoma vs. sarcoma,ovary,cervical,lung
cgggagggcccccccggtgcagctttccccggaggctgaggctgctgccagcggggacatctgctttcttacactccagcctggctcaccccgccccc

SEQ ID NO: 468981 - DNA, 259 bp, Homo sapiens
  chr2:162094357-162094616
  hyper
  melanoma vs. sarcoma,ovary,cervical,lung
ggggtggatagaagcttagaagattttcttcccactccccccacgtcccctcctttcgtcacatcttttaaccttcaaggtaaagacttaaggaaacaataagcgtgtccgctggctcgcaggcccgccggggttctcgggcgcggggccttgcccctctccatcctccctgagtccttccccgagtcgggccgtgcttcggcggttcggctgggcgcaggggccggccgggcgcgcccagcctgtggcgcctcctctc

SEQ ID NO: 468982 - DNA, 626 bp, Homo sapiens
  chr2:162271677-162272303
  hyper
  melanoma vs. breast,upper_gi,prostate,colorectal
cgtacacacacacacacgttttcagtagcgattactgtgttgacaccacttccactctgtctccccagatcagcgcttctgacgagcccatttgcacggggactcggccctctcttttcctggcgaggcttttgaacctgtcgccaagccagtacctcagagagaaggaaatgcagagggacgagaaggatgcatggcgcctgcccccagttagatgttcttcagataatctgcaaccaagtgcgctgataaaatatttaataaagagccggtaaacatcactgcaaatacattaaggcatttcagcccgacagcttatgattatttcaaaacttaaaaaggagatcatagattgtcactgtttctgtactcaaccaagaaaccgaaccttcctgaggtgggtggattggtgggtgagttgctgcttttcgccccctctcctccccccttctgcttgtcgctgtggctctcagcagcagggatttatttatttatgtttgcagtttaaaaggtgggggtgggggcgccgaggacatgtaggatctgctcacaaagcaccagctcaggtgttgtgtgcttttgtattagctggaaaagacagactctggaacttttacagggcgaga

SEQ ID NO: 468983 - DNA, 91 bp, Homo sapiens; identical to SEQ ID NO: 357345
  chr2:162272334-162272425
  hyper
  melanoma vs. breast,upper_gi,prostate,colorectal

SEQ ID NO: 468984 - DNA, 95 bp, Homo sapiens; identical to SEQ ID NO: 457879
  chr2:162930102-162930197
  hyper
  melanoma vs. renal,colorectal,uterine,thyroid,sarcoma, prostate,multiple_myeloma,non_cancer,pancreas_gallbladder

SEQ ID NO: 468985 - DNA, 263 bp, Homo sapiens; identical to SEQ ID NO: 457880
  chr2:162930659-162930922
  hyper
  melanoma vs. renal,colorectal,uterine,thyroid,sarcoma, prostate,multiple_myeloma,non_cancer,pancreas_gallbladder

SEQ ID NO: 468986 - DNA, 138 bp, Homo sapiens
  chr2:166649931-166650069
  hyper
  melanoma vs. prostate,upper_gi,bladder_and_urothelial, pancreas_gallbladder,ovary,lung,head_and_neck,multiple_myeloma, breast,anorectal,cervical,myeloid_neoplasm,thyroid,renal, colorectal,non_cancer,uterine
cgaaacagagagagaggggtgtccgcgtcccggccacagagccctttccaaaccactcggaaaccatttaaatggctcggcggccgcggtttgcagcctagaactgtttggggtccccggctaggaaagttgcctggc

SEQ ID NO: 468987 - DNA, 38 bp, Homo sapiens
  chr2:166650106-166650144
  hyper
  melanoma vs. prostate,upper_gi,bladder_and_urothelial, pancreas_gallbladder,ovary,lung,head_and_neck,multiple_myeloma, breast,anorectal,cervical,myeloid_neoplasm,thyroid,renal, colorectal,non_cancer,uterine
ggcagagaggctggaggagacaggcaacctgctagccg

SEQ ID NO: 468988 - DNA, 313 bp, Homo sapiens
  chr2:166650508-166650821
  hyper
  melanoma vs. prostate,upper_gi,bladder_and_urothelial, pancreas_gallbladder,ovary,lung,head_and_neck,multiple_myeloma, breast,anorectal,cervical,myeloid_neoplasm,thyroid,renal, colorectal,non_cancer,uterine
cctgccgccggcttacctggcgggtgggcagggcagggtggcgggaagcggcggccgggcaggcgctggacgtgggctaggcgccaggtgcaggtggcggcggctgcgactccggttgctgtcgccacagttgcggctcagtagagctcctcctccgccgccgcctcctgccttcccgctgggcctcccgcgttgcctggagaggcagaaccgaggctcggcttccacttggagtctcccaggtgagctccagcctgcgacgtcggcaggggcgaggccccacttccgcgcctgcgcgccagcctcccgcccc

SEQ ID NO: 468989 - DNA, 723 bp, Homo sapiens; identical to SEQ ID NO: 345049
  chr2:166650508-166651231
  hyper
  melanoma vs. colorectal,prostate,non_cancer,uterine,lung, bladder_and_urothelial,pancreas_gallbladder,head_and_neck, multiple_myeloma,breast,anorectal,cervical,myeloid_neoplasm, thyroid,ovary,upper_gi,renal,lymphoid_neoplasm,sarcoma

SEQ ID NO: 468990 - DNA, 128 bp, Homo sapiens; identical to SEQ ID NO: 464434
  chr2:172947590-172947718
  hyper
  melanoma vs. cervical,thyroid,myeloid_neoplasm

SEQ ID NO: 468991 - DNA, 170 bp, Homo sapiens
  chr2:172951779-172951949
  hyper
  melanoma vs. ovary,myeloid_neoplasm
cgagctgcctgccgtccggccctctgtccctggacaatctgattagggcgcaggaaggatttccccagacgatttgtttgggaactcagaggtcacacgtgcctaaacaactggaacaatagactccgggcttaatccctcctttgcctttaaattgtgtgactaatcac

SEQ ID NO: 468992 - DNA, 86 bp, Homo sapiens; identical to SEQ ID NO: 453138
  chr2:173099596-173099682
  hyper
  melanoma vs. colorectal,sarcoma,pancreas_gallbladder, thyroid,myeloid_neoplasm,non_cancer,renal,ovary,uterine, prostate,upper_gi,multiple_myeloma

SEQ ID NO: 468993 - DNA, 165 bp, Homo sapiens
  chr2:173600371-173600536
  hyper
  melanoma vs. anorectal
cggccaccggggtcgccacccccagtgtcccccagcagcgggaccgcggggtccccaccccggggcggaatccccacccacgggcgccgcagtgcagcggcgggcgggcgggcgactcggccctccccgcacccgcgtcccgccccccgggtcccctccctctcc

SEQ ID NO: 468994 - DNA, 26 bp, Homo sapiens
  chr2:173601390-173601416
  hyper
  melanoma vs. bladder_and_urothelial,ovary,anorectal, prostate,head_and_neck,lung,breast,myeloid_neoplasm,uterine, cervical
aaaccataaagcatgtaactcccgac

SEQ ID NO: 468995 - DNA, 42 bp, Homo sapiens; identical to SEQ ID NO: 454338
  chr2:175190730-175190772
  hyper
  melanoma vs. myeloid_neoplasm,anorectal,non_cancer

SEQ ID NO: 468996 - DNA, 67 bp, Homo sapiens; identical to SEQ ID NO: 357408
  chr2:183732106-183732173
  hyper
  melanoma vs. myeloid_neoplasm,thyroid,non_cancer

SEQ ID NO: 468997 - DNA, 579 bp, Homo sapiens
  chr2:190445496-190446075
  hyper
  melanoma vs. liver_bileduct,breast, bladder_and_urothelial,upper_gi,pancreas_gallbladder,colorectal, ovary,prostate,myeloid_neoplasm,renal,uterine
cgccgccgccgccgccgccgtgggccgggcccagctcttataccgagtcgggggcggagctccctgcgacctccgactggggccgccccgtccccttcagggccgcccgggcgtccccgcggcgcgagacgagctcccgtcaaccttgcgcgccgggccgtccccgcgcccttgcccggaggagtcgcccaccccgggcgcaagcgtccaaccggccgcagacaccctgcgcggcttgcggggaccttcgcctcgacgcgttccactccccgggttttcctgctctccgggaagccgcgagggcaacctcggggggcggccgtggggctgggaaaaggaggaaggcgcgtggagccggcggggcggcgtagggagattctgcgcgaaactaagcgtcaggtgctggaagaaagcgctgcgcaccggctaccccgcagttcagggaaagggcggccgccggacggtcgcagtgcaaagctccagcgcgagcttggtgggtggggattccttttttaacgaaaataatttttaatacaggtatctaaataaatataattcatgccacagaggccgctttcc

SEQ ID NO: 468998 - DNA, 279 bp, Homo sapiens; identical to SEQ ID NO: 349654
  chr2:190446109-190446388
  hyper
  melanoma vs. liver_bileduct,breast, bladder_and_urothelial,upper_gi,pancreas_gallbladder,colorectal, ovary,prostate,myeloid_neoplasm,renal,uterine

SEQ ID NO: 468999 - DNA, 288 bp, Homo sapiens
  chr2:192015084-192015372
  hyper
  melanoma vs. multiple_myeloma
cgttgcttctgaaaactcagtgcctgtctgtcctttttgcgtgcatttcctagaagatcccactaaaggggcattttgtcccaccgtctgtgagctggtggtgccgctttggctctgtggcctgtagcttgcaaaaggagatgacctgccctaaaatgtcactcgcgcccatcaaagccacagtcaccggctgccgtagctgcaagcttttttctgaaatccaggtacgctaatctaaagtcagacatcacagctctagagaagctggctaagaaagtgaagaggggc

SEQ ID NO: 469000 - DNA, 251 bp, Homo sapiens; identical to SEQ ID NO: 198622
  chr2:192015426-192015677
  hyper
  melanoma vs. multiple_myeloma

SEQ ID NO: 469001 - DNA, 239 bp, Homo sapiens
  chr2:192015679-192015918
  hyper
  melanoma vs. multiple_myeloma
tctctcagcacaggtcccaggcagtgctcaagtccaaagtcagaagcgcccctcacagtccctaggagaaagccgctgacgccatcatcagtaggggatttgcatttctcctcccacttgaggctttcctgtgcgtcagtgttcgagtctctgggactttacttgggtcagttcccacccactctattctagaaatgctaacacgcagaaactgccaggctggagccccttcaccgggc

SEQ ID NO: 469002 - DNA, 897 bp, Homo sapiens; identical to SEQ ID NO: 331573
  chr2:200320451-200321348
  hyper
  melanoma vs. liver_bileduct,cervical, bladder_and_urothelial,colorectal

SEQ ID NO: 469003 - DNA, 43 bp, Homo sapiens
  chr2:202897429-202897472
  hyper
  melanoma vs. upper_gi,head_and_neck,sarcoma,breast
cgagaacaaaagaacgtttgccaatcagaaaacgctacccgag

SEQ ID NO: 469004 - DNA, 580 bp, Homo sapiens; identical to SEQ ID NO: 357437
  chr2:202897603-202898183
  hyper
  melanoma vs. upper_gi,head_and_neck,sarcoma,breast

SEQ ID NO: 469005 - DNA, 58 bp, Homo sapiens
  chr2:207307406-207307464
  hyper
  melanoma vs. sarcoma
cgtggttgacaaacaacggatttcccaagatagctgccacacacttggtttctaatct

SEQ ID NO: 469006 - DNA, 161 bp, Homo sapiens
  chr2:217556802-217556963
  hyper
  melanoma vs. sarcoma,head_and_neck,breast,lung,ovary, prostate,pancreas_gallbladder,renal,multiple_myeloma,uterine, liver_bileduct,anorectal
cgcccagtggttgtccggctaaaacgccctttccaggagcgcccactcccatcccatctgttcgggaagaagatgtcggcaccagcagcggtggagcgccgccaacccgcaacagcagccggccgggcacctgccttcggcggggtggagtcggagaggag

SEQ ID NO: 469007 - DNA, 240 bp, Homo sapiens
  chr2:217557011-217557251
  hyper
  melanoma vs. sarcoma,head_and_neck,breast,lung,ovary, prostate,pancreas_gallbladder,renal,multiple_myeloma,uterine, liver_bileduct,anorectal
gcactcagaaggtgggggttgagcaaggggcggcagggaattctacaggggatcttgcttgggactgaagtgtcgtgtgtgtgtgtgtgtgtgtgtgtgtgtgtgtgtgtgtgtgatgcgccctccgtgctcgcctagcaattgcgcgcgcgtgcgctctgcgtgtacacccttcacactagccacatcacactacacgcttggtaaataataagtggagccaggatgcggctgagtgac

SEQ ID NO: 469008 - DNA, 454 bp, Homo sapiens; identical to SEQ ID NO: 349675
  chr2:217557321-217557775
  hyper
  melanoma vs. sarcoma,head_and_neck,breast,lung,ovary, prostate,pancreas_gallbladder,renal,multiple_myeloma,uterine, liver_bileduct,anorectal

SEQ ID NO: 469009 - DNA, 86 bp, Homo sapiens; identical to SEQ ID NO: 331598
  chr2:217558012-217558098
  hyper
  melanoma vs. head_and_neck,liver_bileduct,sarcoma,breast, lung

SEQ ID NO: 469010 - DNA, 33 bp, Homo sapiens
  chr2:217558872-217558905
  hyper
  melanoma vs. breast,ovary,anorectal,prostate, head_and_neck,bladder_and_urothelial,uterine,myeloid_neoplasm, sarcoma,renal
cgaataagagctcagaatcagtattcggacaga

SEQ ID NO: 469011 - DNA, 21 bp, Homo sapiens
  chr2:217559556-217559577
  hyper
  melanoma vs. breast,ovary,anorectal,prostate, head_and_neck,bladder_and_urothelial,uterine,myeloid_neoplasm, sarcoma,renal
aaaggggccaagagggccccc

SEQ ID NO: 469012 - DNA, 411 bp, Homo sapiens
  chr2:217559556-217559967
  hyper
  melanoma vs. head_and_neck,breast,anorectal,prostate, uterine,sarcoma
aaaggggccaagagggcccccggagatttttttgtttttgtttttgttttaaaatttctggcaggtagagcaggtgccctcccccagacacttgcaaaaatgtagagagaggtggagggctggggtgcctgcgagcaggtcccagttgcaagaattaaagccttgcaacaggttgggggaagcagggcagcgccaggtgcacgcagtgagcggaggccggagaaaccctcaagcctgagcgggtcagaattataggggaaaaaaagccacaaaattgttcacccccaagcaaccaccgaaataatgagatcggatgcagtggagatggcgttgggggtgggagagaaaaatggatttatctttaaaatttttgcttaaaatctaaaatacaccccgctttctaaccctcag

SEQ ID NO: 469013 - DNA, 528 bp, Homo sapiens; identical to SEQ ID NO: 349683
  chr2:219866613-219867141
  hyper
  melanoma vs. breast,lung,colorectal,anorectal,upper_gi, pancreas_gallbladder,prostate,bladder_and_urothelial, head_and_neck,uterine

SEQ ID NO: 469014 - DNA, 913 bp, Homo sapiens
  chr2:219866670-219867583
  hyper
  melanoma vs. liver_bileduct,lung
cgtccccagcccacgccttggagcttgtcccggagcccgggctccgtgtgctcttatactgcctgttcagtccccgcccccagacacacacactcacacctgtccaggcgcccgtttgctcggggcaaatattgactcatggaggcggagcgctcccccctcccccgcccgggctctgagaccggagcttctccgaggccttggtggcgggggcggaggggagggtgctggggaccctgggcgcctctggaacaacaccagatgtcacttttccacccacctgcctctgggagggaggagccgagaagcagaggacagaagctcccgggcgggggttaggaggaaccgagaggtgggtatccatcctcgtctgaggactgattcacagtgggagtcgcttagcagggtctgtggcccgaaatccagtggtgacctcgacccgccccagcctagttcctggccctccgcggcgtgcctcagttcttcctccccagcctcttgggcactcggagctcggcaaatgctaaggggctggccctgggggtgctaagcctccgagcaggcgcggcgcggaaaggtgaggggtggccgccctgcccagtggacacctgcttcgctggccaggcctggcactcagttactgtgcaccaaggtgcgctggggcaaaggccagccaggccccgtccggagcgccctccactggccagacccggtccagcggccggcagctagcggccaggtctcagtccagctgcagtgtgggcggagaggtgcatcctcccgggccctaagttcccgccgcgcctctgcagtccgcccgggctgctccctgccatccttccctctcagagctcgcgcgcgcgttccccctcgtcggggaaataaagtcaaggtagatacagaaaaaagacta

SEQ ID NO: 469015 - DNA, 370 bp, Homo sapiens
  chr2:219922768-219923138
  hyper
  melanoma vs. sarcoma,upper_gi,bladder_and_urothelial, colorectal,prostate,lung,liver_bileduct,multiple_myeloma, cervical,pancreas_gallbladder,uterine,renal,non_cancer,ovary, myeloid_neoplasm,thyroid,breast,lymphoid_neoplasm,head_and_neck
cgcccggtccctctgtgcctccaaggcaggagggccagccagcggccgggagggaggagtggcagcagagccgactgcctgcggccggcctgcgaggcgtgcaaggcccgaggtgcccagtaggtgtcaccgcagcctcagggctgaggcctggggacgacaggctctggaggcgcggcaggtgcagagcgtctcggtagcttcagggggtgtgttggaggggaatcgccggcctgcctggatccctcgagcaccaccgaggattcccgccgggaccctcttataatcttaaaccggcccacaaccccgccagagatgacagggccagggaaccagaaaccggcggattagcgccagggccgcccaatgg

SEQ ID NO: 469016 - DNA, 221 bp, Homo sapiens
  chr2:219924173-219924394
  hyper
  melanoma vs. sarcoma,bladder_and_urothelial,ovary, colorectal
cgtccccaccaccaagcccaggaatcccctaagctcagtcccagagcccgaaggccccaataacccacccttccaccgcagtagcacccctcagctctccggacagacacgtgggctcgctgggcaggttccttttcccacctccgcctcccgattcaactcttcctcgctgttcttaaccccagacccagccgggacgctgctcctggaaggggcagccc

SEQ ID NO: 469017 - DNA, 129 bp, Homo sapiens
  chr2:219924438-219924567
  hyper
  melanoma vs. sarcoma,bladder_and_urothelial,ovary, colorectal
cgcacccagagattctttgcctcaggggtgccgaaaagtttcaaaatgaaaggggcacagctgtgcagaaggttaggccgggagggactgcgtgggtcctggaggcgcaggaggcagccgggtagaggt

SEQ ID NO: 469018 - DNA, 525 bp, Homo sapiens; identical to SEQ ID NO: 369941
  chr2:219924596-219925121
  hyper
  melanoma vs. sarcoma,bladder_and_urothelial,ovary, colorectal

SEQ ID NO: 469019 - DNA, 305 bp, Homo sapiens; identical to SEQ ID NO: 464459
  chr2:223166850-223167155
  hyper
  melanoma vs. myeloid_neoplasm,thyroid,renal,prostate, non_cancer,multiple_myeloma

SEQ ID NO: 469020 - DNA, 61 bp, Homo sapiens; identical to SEQ ID NO: 457900
  chr2:223170211-223170272
  hyper
  melanoma vs. myeloid_neoplasm

SEQ ID NO: 469021 - DNA, 285 bp, Homo sapiens
  chr2:223171556-223171841
  hyper
  melanoma vs. myeloid_neoplasm,ovary
cagtcttgtccgctgaaggcaggttaccctgggctttcaagggaaaacgccttggggcggggtgtcctgtgcgaccacctctctcagcaaagcagggtttgacctcttggcctgaccttgctccctagtcccaccctatactagtaggtcctaacctttctgcgctttgagcctggaccatcgtcccttcaagagattctactggataaaaaaaaattataaaagctggatcaagcttggcgtcggaggtctggccctcagctggttcccaccctaaaggactgg

SEQ ID NO: 469022 - DNA, 285 bp, Homo sapiens; identical to SEQ ID NO: 469021
  chr2:223171556-223171841
  hyper
  melanoma vs. ovary,thyroid,head_and_neck

SEQ ID NO: 469023 - DNA, 95 bp, Homo sapiens
  chr2:223185036-223185131
  hyper
  melanoma vs. bladder_and_urothelial,upper_gi,cervical, pancreas_gallbladder,colorectal,ovary
cggccttctcaacgcagctttcccagcagcttaggatatcggtttttgttggacttgaaattgggagttgagggcggcctggaggcgctcgggaa

SEQ ID NO: 469024 - DNA, 2 bp, Homo sapiens
  chr2:223185455-223185457
  hyper
  melanoma vs. bladder_and_urothelial,upper_gi,cervical, pancreas_gallbladder,colorectal,ovary
cc

SEQ ID NO: 469025 - DNA, 920 bp, Homo sapiens
  chr2:223288948-223289868
  hyper
  melanoma vs. head_and_neck,lung,upper_gi,breast, colorectal,pancreas_gallbladder
cgctcccattagtgttacgtctgccgggggaagaaggtggggtggggggttgggggcgccgggagaagagaggcgcagttcggagatcggcactcctccgtccagttacaggcggtcctgcccccgtggccgcccggggccgcccaagccctccgggacggagagaaagggggacgcgttgcgcaaggtggaggcagacacctgggcgggcgctaggacccgggcggcgcacctgttggctgggcccggggccccgcccgcccggcctccgcccggagtgcgggatcggcgggggcgaggcgggagtggcggtgccagcggagggcaccggcccggcgtggcagcggcggcggagcgcggccccgggcacaccatggccgagctgctgcggagcctgcaggattcccagctcgtcgcccgcttccagcgccgctgcgggctcttccccgctccggatgaaggcccccgggagaacggcgcggaccccacggagcgcgcggcgcgggtccccggggtcgagcatctccccgcagccaacggcaagggcggcgaggctccggccaacgggctgcgcagagccgcggcgccggaggtaaccatgggcaggtgttcgccgggtacggggagggggcggctgcggacgtgcgggtccctgcgactccgccacgcggggccggccgggccgagagggcgccgtccccggcagtgacccggctcccgccgctgcgagcggacggggaggcctggccttccagtaaccaggatgccaccctccaacgctgccaggggcaaccgggtctattgagatatccccagacgctttcaatgcagtccatttagagacttcccactttcaaaagtagttaaattcacgtagatgccagcaaatatgtaagagttacgtaatggaacggaggagc

SEQ ID NO: 469026 - DNA, 913 bp, Homo sapiens; identical to SEQ ID NO: 349692
  chr2:223289375-223290288
  hyper
  melanoma vs. head_and_neck,upper_gi,ovary,lung, pancreas_gallbladder,renal,colorectal,breast, bladder_and_urothelial,anorectal,uterine

SEQ ID NO: 469027 - DNA, 163 bp, Homo sapiens; identical to SEQ ID NO: 331637
  chr2:224702626-224702789
  hyper
  melanoma vs. liver_bileduct

SEQ ID NO: 469028 - DNA, 157 bp, Homo sapiens; identical to SEQ ID NO: 464463
  chr2:231902837-231902994
  hyper
  melanoma vs. liver_bileduct

SEQ ID NO: 469029 - DNA, 218 bp, Homo sapiens
  chr2:232790830-232791048
  hyper
  melanoma vs. anorectal,prostate,head_and_neck, myeloid_neoplasm,thyroid,ovary,bladder_and_urothelial,uterine, non_cancer,breast
cgcctctcccaggctcggcgtccccacgacagcacccaccttcggcggcgccccgggcttggcttcggagggccggagggagagcagcgtgagcagcagggcgcaggccagcagctgggagagatgcatggtgccgctggggtcgaggggcgcacacgggcggcagcgagggcgcgcaggtcggcgggcagaccagcagggggatgcggagcaggctg

SEQ ID NO: 469030 - DNA, 391 bp, Homo sapiens
  chr2:232791140-232791531
  hyper
  melanoma vs. anorectal,prostate,head_and_neck, myeloid_neoplasm,thyroid,ovary,bladder_and_urothelial,uterine, non_cancer,breast
acctgccgctgatgtcatcctcccgcccaccgggccgcccgggccaatgacaccacgcacgcggccgcgccgagggccgggagggggccgcgggggctcccctcccttatcccaccccggagggatcccgcggctcggcgggctcgctccaggctgcacttggagctgcagagctgagcgcacaggggaactccatttgcagcgagcgcgcgccctggcctgccgagcatcggtgcgcctggtgccctgtgcacccactaggtcctcatcgcactcactctacctggaagggatacgtagccctctttgcaggtgcaaagacaggctcagaggaatgaagtcacttgcccaaagtcatacaggcataaagttggcgctgcccgaaatccac

SEQ ID NO: 469031 - DNA, 213 bp, Homo sapiens; identical to SEQ ID NO: 459608
  chr2:232791318-232791531
  hyper
  melanoma vs. prostate,myeloid_neoplasm,non_cancer, multiple_myeloma,bladder_and_urothelial,ovary,uterine,thyroid, anorectal

SEQ ID NO: 469032 - DNA, 221 bp, Homo sapiens; identical to SEQ ID NO: 455915
  chr2:233740556-233740777
  hyper
  melanoma vs. ovary,bladder_and_urothelial,lung,anorectal, head_and_neck,prostate,upper_gi,cervical,colorectal,sarcoma, liver_bileduct,myeloid_neoplasm,pancreas_gallbladder,thyroid, uterine

SEQ ID NO: 469033 - DNA, 168 bp, Homo sapiens; identical to SEQ ID NO: 357500
  chr2:233741586-233741754
  hyper
  melanoma vs. sarcoma,lung,head_and_neck, bladder_and_urothelial,upper_gi,anorectal,ovary,colorectal

SEQ ID NO: 469034 - DNA, 375 bp, Homo sapiens; identical to SEQ ID NO: 467061
  chr2:237087637-237088012
  hyper

SEQ ID NO: 469035 - DNA, 223 bp, Homo sapiens; identical to SEQ ID NO: 345074
  chr2:237088239-237088462
  hyper

SEQ ID NO: 469036 - DNA, 127 bp, Homo sapiens; identical to SEQ ID NO: 460980
  chr20:9048369-9048496
  hyper
  melanoma vs. breast

SEQ ID NO: 469037 - DNA, 632 bp, Homo sapiens; identical to SEQ ID NO: 460981
  chr20:9048532-9049164
  hyper
  melanoma vs. breast

SEQ ID NO: 469038 - DNA, 35 bp, Homo sapiens; identical to SEQ ID NO: 460982
  chr20:9049238-9049273
  hyper
  melanoma vs. breast

SEQ ID NO: 469039 - DNA, 148 bp, Homo sapiens; identical to SEQ ID NO: 336377
  chr20:20343543-20343691
  hyper
  melanoma vs. prostate,ovary

SEQ ID NO: 469040 - DNA, 79 bp, Homo sapiens; identical to SEQ ID NO: 345625
  chr20:20350750-20350829
  hyper
  melanoma vs. prostate,uterine,non_cancer,breast, head_and_neck,anorectal

SEQ ID NO: 469041 - DNA, 206 bp, Homo sapiens; identical to SEQ ID NO: 453161
  chr20:21080357-21080563
  hyper
  melanoma vs. non_cancer,thyroid,colorectal, lymphoid_neoplasm,multiple_myeloma,myeloid_neoplasm,upper_gi, prostate

SEQ ID NO: 469042 - DNA, 913 bp, Homo sapiens
  chr20:30192854-30193767
  hyper
  melanoma vs. lung,cervical,liver_bileduct,renal, colorectal,anorectal,pancreas_gallbladder,uterine,upper_gi, multiple_myeloma,head_and_neck,non_cancer,prostate, bladder_and_urothelial,myeloid_neoplasm,thyroid,breast
cggccctcgcctctacccgctgccctgcccggtgccctgccaccgacccacccttgctgttctgaaacccgggtcgtctttccacactgcgagcaggcactagacgagcaggaggctggacctaggagcgcgggtcacgcccccatgccgcccattggctgcttttgaacgttctgagcccgcccctccgggggccgtggcgtgtttataaaagacaagctgtggctccgcactctcattccacgttcttaactgttccattttccgtatctgcttcgggcttccacctcatttttttcgctttgcccattctgtttcagccagtcgccaagaatcatgaaagtcgccagtggcagcaccgccaccgccgccgcgggccccagctgcgcgctgaaggccggcaagacagcgagcggtgcgggcgaggtggtgcgctgtctgtctgagcagagcgtggccatctcgcgctgcgccgggggcgccggggcgcgcctgcctgccctgctggacgagcagcaggtaaacgtgctgctctacgacatgaacggctgttactcacgcctcaaggagctggtgcccaccctgccccagaaccgcaaggtgagcaaggtggagattctccagcacgtcatcgactacatcagggaccttcagttggagctgaactcggaatccgaagttggaacccccgggggccgagggctgccggtccgggctccgctcagcaccctcaacggcgagatcagcgccctgacggccgaggtgagatccagatccgaccactagatcatccttataccgacggggaaacggaggccagagagggcgtgggcgcttgcaccacttccgtcccatccttgcgggtacctggctatgcgggggtgcctaaggagcctggaaaaagcgctccccc

SEQ ID NO: 469043 - DNA, 585 bp, Homo sapiens; identical to SEQ ID NO: 455929
  chr20:30193272-30193857
  hyper
  melanoma vs. lung,liver_bileduct,renal,cervical,uterine, multiple_myeloma,thyroid,non_cancer,upper_gi,colorectal, pancreas_gallbladder,bladder_and_urothelial,myeloid_neoplasm, anorectal,prostate

SEQ ID NO: 469044 - DNA, 189 bp, Homo sapiens; identical to SEQ ID NO: 345629
  chr20:30193992-30194181
  hyper
  melanoma vs. lung,liver_bileduct,renal,cervical,uterine, multiple_myeloma,thyroid,non_cancer,upper_gi,colorectal, pancreas_gallbladder,bladder_and_urothelial,myeloid_neoplasm, anorectal,prostate

SEQ ID NO: 469045 - DNA, 110 bp, Homo sapiens
  chr20:32899337-32899447
  hyper
  melanoma vs. liver_bileduct,colorectal, pancreas_gallbladder,lung
cggagagggggcggagggcgcacaagcctgccctttggccgcggggctttagcctgccctagcttcagcatccccgctcgcctcccggcggtcctgcgtctcactctgga

SEQ ID NO: 469046 - DNA, 339 bp, Homo sapiens; identical to SEQ ID NO: 294726
  chr20:32899515-32899854
  hyper
  melanoma vs. liver_bileduct,colorectal, pancreas_gallbladder,lung

SEQ ID NO: 469047 - DNA, 390 bp, Homo sapiens; identical to SEQ ID NO: 455936
  chr20:37433723-37434113
  hyper
  melanoma vs. ovary,multiple_myeloma

SEQ ID NO: 469048 - DNA, 27 bp, Homo sapiens
  chr20:37434086-37434113
  hyper
  melanoma vs. multiple_myeloma,ovary,prostate,uterine, lymphoid_neoplasm,non_cancer,myeloid_neoplasm, bladder_and_urothelial,thyroid
cggggtgggggttaggaaaactatttt

SEQ ID NO: 469049 - DNA, 71 bp, Homo sapiens; identical to SEQ ID NO: 345637
  chr20:44453063-44453134
  hyper
  melanoma vs. prostate

SEQ ID NO: 469050 - DNA, 139 bp, Homo sapiens; identical to SEQ ID NO: 361897
  chr20:48789173-48789312
  hyper
  melanoma vs. liver_bileduct

SEQ ID NO: 469051 - DNA, 952 bp, Homo sapiens; identical to SEQ ID NO: 336473
  chr20:50158723-50159675
  hyper
  melanoma vs. upper_gi,lung,uterine,prostate, lymphoid_neoplasm,breast,renal,bladder_and_urothelial,ovary, pancreas_gallbladder,myeloid_neoplasm,liver_bileduct, multiple_myeloma,cervical,colorectal,non_cancer,head_and_neck,
  CONT. FROM ABOVE: anorectal

SEQ ID NO: 469052 - DNA, 172 bp, Homo sapiens
  chr20:52789230-52789402
  hyper
  melanoma vs. sarcoma,renal,anorectal,ovary
cgcaggtgctgggtgcacagcacggcttttccgtggaccgactctaatctgtacaagagctcagggttgcgatggcacgggagaggggctttggtatccgccctacgtaagaagcttccaaccccagggaactctaactccgcctcttcacaatttccaggcgccgtcaggc

SEQ ID NO: 469053 - DNA, 20 bp, Homo sapiens
  chr20:55203829-55203849
  hyper
  melanoma vs. anorectal
gggaactgggcgtctctggc

SEQ ID NO: 469054 - DNA, 276 bp, Homo sapiens; identical to SEQ ID NO: 467122
  chr20:55203829-55204105
  hyper
  melanoma vs. anorectal

SEQ ID NO: 469055 - DNA, 103 bp, Homo sapiens; identical to SEQ ID NO: 294893
  chr20:55588994-55589097
  hyper
  melanoma vs. prostate,cervical,anorectal,ovary, colorectal,head_and_neck,breast,upper_gi

SEQ ID NO: 469056 - DNA, 285 bp, Homo sapiens
  chr20:55839319-55839604
  hyper
  melanoma vs. anorectal,prostate,ovary,multiple_myeloma, upper_gi
cgccccaggtgcccagcgtggggcttcagtatcattatttccatgttgacacagcgcccgtgggcgtgagtttgctgtcttgacttggttcgggttttcgcagcaagttacacaagtagaatgaaagcggctcaggaaacagcgctatcggggtgtgttatctcggaaaccaaatatttgatcatcagtcccgcagcgcgctggcgctgccggggggttagtttgagcaagtctggagaatgtgcgcgcacatatggagggggagctccccggccctcgctgcag

SEQ ID NO: 469057 - DNA, 23 bp, Homo sapiens
  chr20:55839779-55839802
  hyper
  melanoma vs. anorectal,prostate,ovary,multiple_myeloma, upper_gi
aatacttaaaatagaagactagc

SEQ ID NO: 469058 - DNA, 535 bp, Homo sapiens; identical to SEQ ID NO: 352516
  chr20:55964187-55964722
  hyper
  melanoma vs. colorectal,head_and_neck, bladder_and_urothelial,liver_bileduct,anorectal,renal, pancreas_gallbladder,lymphoid_neoplasm,uterine,lung,upper_gi

SEQ ID NO: 469059 - DNA, 1 bp, Homo sapiens
  chr20:57224597-57224598
  hyper
  melanoma vs. myeloid_neoplasm,thyroid,non_cancer, multiple_myeloma
c

SEQ ID NO: 469060 - DNA, 113 bp, Homo sapiens; identical to SEQ ID NO: 345643
  chr20:57225466-57225579
  hyper
  melanoma vs. myeloid_neoplasm,thyroid,non_cancer, multiple_myeloma

SEQ ID NO: 469061 - DNA, 16 bp, Homo sapiens
  chr21:26934818-26934834
  hyper
  melanoma vs. sarcoma,lymphoid_neoplasm,cervical, anorectal,head_and_neck
ggaaggaggggtgttc

SEQ ID NO: 469062 - DNA, 32 bp, Homo sapiens; identical to SEQ ID NO: 361969
  chr21:34401548-34401580
  hyper
  melanoma vs. multiple_myeloma,sarcoma,thyroid,prostate

SEQ ID NO: 469063 - DNA, 1 bp, Homo sapiens
  chr21:34481844-34481845
  hyper
  melanoma vs. sarcoma
c

SEQ ID NO: 469064 - DNA, 61 bp, Homo sapiens
  chr21:42688559-42688620
  hyper
  melanoma vs. cervical,anorectal,myeloid_neoplasm, head_and_neck,thyroid,pancreas_gallbladder,multiple_myeloma, bladder_and_urothelial,non_cancer,lung,prostate,upper_gi
cgccagcgacctcagagctcccgggcacagcccggggcacagccccgcgcacctgccccgc

SEQ ID NO: 469065 - DNA, 405 bp, Homo sapiens; identical to SEQ ID NO: 361997
  chr21:42879240-42879645
  hyper
  melanoma vs. breast,prostate,upper_gi,myeloid_neoplasm, thyroid

SEQ ID NO: 469066 - DNA, 820 bp, Homo sapiens; identical to SEQ ID NO: 467145
  chr21:42879240-42880060
  hyper
  melanoma vs. liver_bileduct

SEQ ID NO: 469067 - DNA, 41 bp, Homo sapiens; identical to SEQ ID NO: 467146
  chr21:42880104-42880145
  hyper
  melanoma vs. liver_bileduct

SEQ ID NO: 469068 - DNA, 286 bp, Homo sapiens
  chr21:43188170-43188456
  hyper
  melanoma vs. renal,liver_bileduct,upper_gi,colorectal, pancreas_gallbladder,uterine,prostate,myeloid_neoplasm, bladder_and_urothelial,thyroid,non_cancer
cgcaacggtgagtgaaggcttatttttggccacaggagattaataatgaagacaggagggcggagctaaaggagagggtattttaacgacattaactgtgtttttgtgttagtaactcggaaagagagaggctgccccaagtcagcgcattgaaagccgcagacctagtgtctccaggctcccccttccaaacgggcgcggaccttctttcatagcctgtagcggggagccgcgtctccccactgcctccccactcccatccggccgctctttggagggaactcac

SEQ ID NO: 469069 - DNA, 603 bp, Homo sapiens; identical to SEQ ID NO: 336575
  chr21:43188777-43189380
  hyper
  melanoma vs. liver_bileduct,upper_gi,renal, pancreas_gallbladder,prostate,colorectal,breast,uterine,ovary, multiple_myeloma,anorectal,lung,non_cancer,myeloid_neoplasm, thyroid,bladder_and_urothelial,cervical

SEQ ID NO: 469070 - DNA, 35 bp, Homo sapiens
  chr21:46351619-46351654
  hyper
  melanoma vs. sarcoma
cgcccagccggggcgatcctttggtcggacagtga

SEQ ID NO: 469071 - DNA, 323 bp, Homo sapiens; identical to SEQ ID NO: 352573
  chr21:46352279-46352602
  hyper
  melanoma vs. sarcoma

SEQ ID NO: 469072 - DNA, 730 bp, Homo sapiens; identical to SEQ ID NO: 352590
  chr22:25959837-25960567
  hyper
  melanoma vs. lymphoid_neoplasm,bladder_and_urothelial, colorectal

SEQ ID NO: 469073 - DNA, 253 bp, Homo sapiens; identical to SEQ ID NO: 336622
  chr22:28200773-28201026
  hyper
  melanoma vs. liver_bileduct

SEQ ID NO: 469074 - DNA, 124 bp, Homo sapiens; identical to SEQ ID NO: 453179
  chr22:28838056-28838180
  hyper
  melanoma vs. sarcoma,uterine

SEQ ID NO: 469075 - DNA, 61 bp, Homo sapiens; identical to SEQ ID NO: 453180
  chr22:28838449-28838510
  hyper
  melanoma vs. sarcoma,uterine

SEQ ID NO: 469076 - DNA, 244 bp, Homo sapiens; identical to SEQ ID NO: 453181
  chr22:28838551-28838795
  hyper
  melanoma vs. sarcoma,uterine

SEQ ID NO: 469077 - DNA, 125 bp, Homo sapiens; identical to SEQ ID NO: 453182
  chr22:28838844-28838969
  hyper
  melanoma vs. sarcoma,uterine

SEQ ID NO: 469078 - DNA, 307 bp, Homo sapiens; identical to SEQ ID NO: 455957
  chr22:29467406-29467713
  hyper
  melanoma vs. head_and_neck,sarcoma,pancreas_gallbladder, upper_gi,bladder_and_urothelial,colorectal,ovary,anorectal, cervical,lung,multiple_myeloma

SEQ ID NO: 469079 - DNA, 149 bp, Homo sapiens; identical to SEQ ID NO: 352604
  chr22:29467742-29467891
  hyper
  melanoma vs. head_and_neck,sarcoma,pancreas_gallbladder, upper_gi,bladder_and_urothelial,colorectal,ovary,anorectal, cervical,lung,multiple_myeloma

SEQ ID NO: 469080 - DNA, 770 bp, Homo sapiens; identical to SEQ ID NO: 336630
  chr22:31090200-31090970
  hyper
  melanoma vs. liver_bileduct,lung

SEQ ID NO: 469081 - DNA, 172 bp, Homo sapiens
  chr22:36847902-36848074
  hyper
  melanoma vs. renal,upper_gi,breast
cgtcgtaagcctttgttccccaacagggggaagtgaaccagcacacaaggcccttccgtcctgcggagctcactgccttcctcagctcctggcccgcacttccgaccacacactggggacacaccctcgggggggccccaccccagcagctgcccatgttcacacctcttca

SEQ ID NO: 469082 - DNA, 123 bp, Homo sapiens; identical to SEQ ID NO: 362064
  chr22:38966046-38966169
  hyper
  melanoma vs. lymphoid_neoplasm

SEQ ID NO: 469083 - DNA, 14 bp, Homo sapiens
  chr22:42354024-42354038
  hyper
  melanoma vs. lymphoid_neoplasm,multiple_myeloma
gcctgggccctccc

SEQ ID NO: 469084 - DNA, 210 bp, Homo sapiens; identical to SEQ ID NO: 462793
  chr22:43115852-43116062
  hyper
  melanoma vs. renal,ovary,uterine,cervical,prostate, head_and_neck,lung,anorectal,sarcoma,thyroid

SEQ ID NO: 469085 - DNA, 107 bp, Homo sapiens; identical to SEQ ID NO: 352619
  chr22:43116269-43116376
  hyper
  melanoma vs. renal,ovary,uterine,cervical,prostate, head_and_neck,lung,anorectal,sarcoma,thyroid

SEQ ID NO: 469086 - DNA, 445 bp, Homo sapiens; identical to SEQ ID NO: 467184
  chr22:45148213-45148658
  hyper
  melanoma vs. lung

SEQ ID NO: 469087 - DNA, 155 bp, Homo sapiens; identical to SEQ ID NO: 352633
  chr22:45148870-45149025
  hyper
  melanoma vs. lung

SEQ ID NO: 469088 - DNA, 167 bp, Homo sapiens
  chr22:50982557-50982724
  hyper
  melanoma vs. sarcoma,pancreas_gallbladder,breast,renal, anorectal,multiple_myeloma,bladder_and_urothelial,uterine, cervical,lung,thyroid,non_cancer,colorectal,ovary, lymphoid_neoplasm,head_and_neck,prostate,upper_gi
cggcctcccacctcgaggcgatccgacacctcggcccaggtcgcacttttttgcccgttttgatcccatcctccaactgcggccacagccggaaatgtagagaaattcgcgctcctggggccggcggggctggcgctggctcacccgctccccgggccctcccagtc

SEQ ID NO: 469089 - DNA, 3 bp, Homo sapiens
  chr22:50982902-50982905
  hyper
  melanoma vs. sarcoma,pancreas_gallbladder,breast,renal, anorectal,multiple_myeloma,bladder_and_urothelial,uterine, cervical,lung,thyroid,non_cancer,colorectal,ovary, lymphoid_neoplasm,head_and_neck,prostate,upper_gi
cgc

SEQ ID NO: 469090 - DNA, 4 bp, Homo sapiens
  chr3:9904708-9904712
  hyper
  melanoma vs. bladder_and_urothelial,anorectal,colorectal, non_cancer,upper_gi,prostate,cervical,pancreas_gallbladder, renal,head_and_neck,thyroid
ggcc

SEQ ID NO: 469091 - DNA, 428 bp, Homo sapiens; identical to SEQ ID NO: 467190
  chr3:12329055-12329483
  hyper
  melanoma vs. bladder_and_urothelial

SEQ ID NO: 469092 - DNA, 20 bp, Homo sapiens
  chr3:12329463-12329483
  hyper
  melanoma vs. upper_gi,renal,bladder_and_urothelial,lung, liver_bileduct,colorectal,ovary,myeloid_neoplasm,anorectal, pancreas_gallbladder
cgcttgggtcggcctcgagg

SEQ ID NO: 469093 - DNA, 206 bp, Homo sapiens; identical to SEQ ID NO: 467192
  chr3:12330025-12330231
  hyper
  melanoma vs. upper_gi,renal,bladder_and_urothelial,lung, liver_bileduct,colorectal,ovary,myeloid_neoplasm,anorectal, pancreas_gallbladder

SEQ ID NO: 469094 - DNA, 80 bp, Homo sapiens; identical to SEQ ID NO: 349733
  chr3:12330283-12330363
  hyper
  melanoma vs. upper_gi,renal,bladder_and_urothelial,lung, liver_bileduct,colorectal,ovary,myeloid_neoplasm,anorectal, pancreas_gallbladder

SEQ ID NO: 469095 - DNA, 902 bp, Homo sapiens
  chr3:13460995-13461897
  hyper
  melanoma vs. liver_bileduct
cgccggcctgcctcgtctcacttcgcctctgtaaagcggcccctgggcttccctccaaaactcctttcctccagggtctccgttcctccccgcgacgctaggcgctgcgcttcgtttcacagactcacttcccacgccagggcgagggcggtcacagacaaacccgagctggggtcccagactcaagggaagtgcggcccagctgccccggcgccccctcccgggtcaggccggctcgggcccggccggcttgggccctgcggtcccagacgccgctccccaggccacccctcctcccgcacaacccagaacacgcgggtcacggccgccaggctgcgcccgctctgctcgcgcctcagcggcgcggaggcccggacggcgccatgacatgagcagtggtggcgacccacgcgcacccgccgctccgagtgctgcagcctagcgcccagcgagagcgcgccgcgcacctgccggctctgccggcctcccggcgcccgcccagcctctcagcgcgaaggcccagcccggcccacggcgcccgcccggcccggccgcgcgcctcaccagcggtagcagccctccgaggcctccagcgtgaagttaacgcgcgtggcccgcgtgaagggcagcagcactttggggatgttgagcttggccgcagcggcggaggggcccgccgccaacagcaccgacagcgtcagcagcagcagcccccggccccgcgccgccatcctcgccgcgcgtcacctcccgcgaccctgcgcccggccgcccgcgccgccccgttgccctccgctcccgcccgcgcgcgcgccaggccagcaggtgatgagcgcgggggcggggcgagggccgtcggcggccgccgcttcctgggcctgagcgcgggaactctgggggcc

SEQ ID NO: 469096 - DNA, 896 bp, Homo sapiens; identical to SEQ ID NO: 349736
  chr3:13461404-13462300
  hyper
  melanoma vs. lymphoid_neoplasm

SEQ ID NO: 469097 - DNA, 370 bp, Homo sapiens; identical to SEQ ID NO: 455964
  chr3:16553609-16553979
  hyper
  melanoma vs. lymphoid_neoplasm,multiple_myeloma,sarcoma, renal,myeloid_neoplasm,non_cancer,thyroid

SEQ ID NO: 469098 - DNA, 78 bp, Homo sapiens; identical to SEQ ID NO: 345081
  chr3:16555426-16555504
  hyper
  melanoma vs. lymphoid_neoplasm

SEQ ID NO: 469099 - DNA, 108 bp, Homo sapiens; identical to SEQ ID NO: 454364
  chr3:16925425-16925533
  hyper
  melanoma vs. myeloid_neoplasm,thyroid,lymphoid_neoplasm, pancreas_gallbladder

SEQ ID NO: 469100 - DNA, 74 bp, Homo sapiens; identical to SEQ ID NO: 454365
  chr3:16925583-16925657
  hyper
  melanoma vs. myeloid_neoplasm,thyroid,lymphoid_neoplasm, pancreas_gallbladder

SEQ ID NO: 469101 - DNA, 231 bp, Homo sapiens; identical to SEQ ID NO: 454366
  chr3:16925705-16925936
  hyper
  melanoma vs. myeloid_neoplasm,thyroid,lymphoid_neoplasm, pancreas_gallbladder

SEQ ID NO: 469102 - DNA, 256 bp, Homo sapiens; identical to SEQ ID NO: 454367
  chr3:16925965-16926221
  hyper
  melanoma vs. myeloid_neoplasm,thyroid,lymphoid_neoplasm, pancreas_gallbladder

SEQ ID NO: 469103 - DNA, 93 bp, Homo sapiens; identical to SEQ ID NO: 357563
  chr3:16926261-16926354
  hyper
  melanoma vs. myeloid_neoplasm,thyroid,lymphoid_neoplasm, pancreas_gallbladder

SEQ ID NO: 469104 - DNA, 989 bp, Homo sapiens; identical to SEQ ID NO: 331712
  chr3:24536360-24537349
  hyper
  melanoma vs. liver_bileduct,pancreas_gallbladder,breast, cervical,lung,prostate,anorectal,uterine

SEQ ID NO: 469105 - DNA, 222 bp, Homo sapiens; identical to SEQ ID NO: 459681
  chr3:25469458-25469680
  hyper
  melanoma vs. sarcoma,pancreas_gallbladder

SEQ ID NO: 469106 - DNA, 130 bp, Homo sapiens; identical to SEQ ID NO: 345083
  chr3:25469874-25470004
  hyper
  melanoma vs. sarcoma,pancreas_gallbladder

SEQ ID NO: 469107 - DNA, 413 bp, Homo sapiens; identical to SEQ ID NO: 370061
  chr3:27754928-27755341
  hyper

SEQ ID NO: 469108 - DNA, 275 bp, Homo sapiens; identical to SEQ ID NO: 280981
  chr3:27765542-27765817
  hyper
  melanoma vs. thyroid

SEQ ID NO: 469109 - DNA, 168 bp, Homo sapiens; identical to SEQ ID NO: 357574
  chr3:32279558-32279726
  hyper
  melanoma vs. lung,breast,liver_bileduct

SEQ ID NO: 469110 - DNA, 11 bp, Homo sapiens
  chr3:37493509-37493520
  hyper
  melanoma vs. sarcoma
cgcagggctca

SEQ ID NO: 469111 - DNA, 1 bp, Homo sapiens
  chr3:37494424-37494425
  hyper
  melanoma vs. sarcoma
c

SEQ ID NO: 469112 - DNA, 18 bp, Homo sapiens
  chr3:39851218-39851236
  hyper
  melanoma vs. uterine,myeloid_neoplasm,thyroid,colorectal
cgagcccccgcggtgctg

SEQ ID NO: 469113 - DNA, 217 bp, Homo sapiens; identical to SEQ ID NO: 357589
  chr3:40547367-40547584
  hyper
  melanoma vs. liver_bileduct,pancreas_gallbladder,breast, sarcoma

SEQ ID NO: 469114 - DNA, 132 bp, Homo sapiens
  chr3:43935666-43935798
  hyper
  melanoma vs. ovary,uterine,bladder_and_urothelial, non_cancer,thyroid
cgtccggaaattgaagctaataagagcactgacttccctgggcggcggttgaaggctacctgtgtggatctgggcacagcgaagagcggagccttaacagggtgagcacgccggttgcgcgctctccagagc

SEQ ID NO: 469115 - DNA, 196 bp, Homo sapiens; identical to SEQ ID NO: 453202
  chr3:44038922-44039118
  hyper
  melanoma vs. thyroid,non_cancer,renal,myeloid_neoplasm, sarcoma,prostate,breast,ovary,lung,multiple_myeloma, bladder_and_urothelial

SEQ ID NO: 469116 - DNA, 427 bp, Homo sapiens
  chr3:44038922-44039349
  hyper
  melanoma vs. sarcoma,ovary,multiple_myeloma,breast, non_cancer,prostate,myeloid_neoplasm,uterine, bladder_and_urothelial,thyroid,cervical,lung,renal
tattacaaaggtcgtttgttgttgttgtttttttaaaacaccaagtaaccccccccccccccccccacggacttatactttgtttatgagatttctccaaccttggtggtttggagaaatgaggtgggggaggggaggaccaagggcagcaagacgtccactacgaaaataagatacttactaatttaatagggccgttcctttttacataagatgctcccccaccccccaccaatttacaataggtaaactttgagcttcctcaaagtttcgctatctagcgtttatgcccgaagctttacgaataaactccctttccaggtaaacctgcccaacccttgtcctatgcccagcgaagcccaggtacgatgggtcaaggacccctggcttccacattgtctgagtcacgttccagttggaaaggcca

SEQ ID NO: 469117 - DNA, 156 bp, Homo sapiens
  chr3:44039193-44039349
  hyper
  melanoma vs. sarcoma,ovary,bladder_and_urothelial, multiple_myeloma,prostate
cgctatctagcgtttatgcccgaagctttacgaataaactccctttccaggtaaacctgcccaacccttgtcctatgcccagcgaagcccaggtacgatgggtcaaggacccctggcttccacattgtctgagtcacgttccagttggaaaggcca

SEQ ID NO: 469118 - DNA, 42 bp, Homo sapiens; identical to SEQ ID NO: 464518
  chr3:44063232-44063274
  hyper
  melanoma vs. ovary

SEQ ID NO: 469119 - DNA, 366 bp, Homo sapiens; identical to SEQ ID NO: 467212
  chr3:45186931-45187297
  hyper
  melanoma vs. head_and_neck,lung,colorectal, pancreas_gallbladder,prostate,breast,bladder_and_urothelial, upper_gi

SEQ ID NO: 469120 - DNA, 9 bp, Homo sapiens
  chr3:45188139-45188148
  hyper
  melanoma vs. lung
gcgaaggtc

SEQ ID NO: 469121 - DNA, 485 bp, Homo sapiens; identical to SEQ ID NO: 357601
  chr3:49027062-49027547
  hyper
  melanoma vs. lung,bladder_and_urothelial, pancreas_gallbladder,upper_gi,breast

SEQ ID NO: 469122 - DNA, 395 bp, Homo sapiens; identical to SEQ ID NO: 346561
  chr3:49027805-49028200
  hyper
  melanoma vs. renal,upper_gi,prostate,cervical, bladder_and_urothelial,lymphoid_neoplasm,colorectal,uterine, lung,thyroid,myeloid_neoplasm,non_cancer,breast, pancreas_gallbladder,head_and_neck,multiple_myeloma,ovary,
  CONT. FROM ABOVE: anorectal

SEQ ID NO: 469123 - DNA, 94 bp, Homo sapiens; identical to SEQ ID NO: 357607
  chr3:50243562-50243656
  hyper
  melanoma vs. liver_bileduct

SEQ ID NO: 469124 - DNA, 25 bp, Homo sapiens
  chr3:50604957-50604982
  hyper
  melanoma vs. lymphoid_neoplasm
cggggcggggggaacccccaagccc

SEQ ID NO: 469125 - DNA, 572 bp, Homo sapiens; identical to SEQ ID NO: 357616
  chr3:53527829-53528401
  hyper
  melanoma vs. liver_bileduct

SEQ ID NO: 469126 - DNA, 29 bp, Homo sapiens
  chr3:53879638-53879667
  hyper
  melanoma vs. liver_bileduct,renal,upper_gi, pancreas_gallbladder,breast,colorectal,cervical, multiple_myeloma,ovary,anorectal,uterine,prostate,sarcoma,lung, myeloid_neoplasm,thyroid,non_cancer,head_and_neck,
  CONT. FROM ABOVE: bladder_and_urothelial
cgaattacgggggcgtgggtggaggctcg

SEQ ID NO: 469127 - DNA, 247 bp, Homo sapiens; identical to SEQ ID NO: 198957
  chr3:53879786-53880033
  hyper
  melanoma vs. liver_bileduct,renal,upper_gi, pancreas_gallbladder,breast,colorectal,cervical, multiple_myeloma,ovary,anorectal,uterine,prostate,sarcoma,lung, myeloid_neoplasm,thyroid,non_cancer,head_and_neck,
  CONT. FROM ABOVE: bladder_and_urothelial

SEQ ID NO: 469128 - DNA, 625 bp, Homo sapiens; identical to SEQ ID NO: 357624
  chr3:57994555-57995180
  hyper
  melanoma vs. liver_bileduct,breast,head_and_neck, upper_gi,lung

SEQ ID NO: 469129 - DNA, 783 bp, Homo sapiens; identical to SEQ ID NO: 454373
  chr3:66550318-66551101
  hyper
  melanoma vs. sarcoma,breast,upper_gi

SEQ ID NO: 469130 - DNA, 222 bp, Homo sapiens
  chr3:69434926-69435148
  hyper
  melanoma vs. breast,renal,pancreas_gallbladder,cervical, prostate,anorectal
cgagtgcccggcatcctgctggggccctcgggtgccgcgcgctccagctcacctggtacacgtcctgcagcccgcaccacgtccgcagcacctggtggcaagcccgcagcctctccgtgtaccatctccgcagcgtggacacggtcaagttccatacgaagcggctgccgctgaacagcaggtcctccacgccacacatgaacaccgaagccatgcctcctc

SEQ ID NO: 469131 - DNA, 838 bp, Homo sapiens
  chr3:71113110-71113948
  hyper
  melanoma vs. upper_gi,pancreas_gallbladder,colorectal, bladder_and_urothelial,prostate,uterine
cgtttccactgaccgtccttcatgcagttctgacagttgagttagctacattcagagccggttcagctgggagtaccccgtggcaattcctcagtctgctgcacgtccaaacccaaaccccgctcactacttaattaaccagccaagtaatgcaacagaggcttagaatccccaacctgccagagtgttccattcgctcgctcgcctgctccggtgtggggctctgtgcctctccctccccctttactgtgtgtgaactcgtcgaatttgaacagctaagctgaaaatagcctagacagatatagaaacaaactatcagaagcaaagaaacatccacatgggttacactgagatggaaggctccttgtatatttcacacgctctgaaagtgacagaaatcacaccccagatacgtcccccgaacggagtgatggcgagggcttcaccaaagtggctgcgtgaaggccagaccggcagaaaatgaatcgcaaacgaaaaagagagagagagaaacacacaagcaggacttcctccaactctcaactacaccccacccatgaacatttaaaaaaagagagcgagagtgtgagccaaagagcaaggggggtgggggggtatctctctccaggacccacaggcctgcagctcctttttcttgcccctccactccctccccgcctccacttccagagcgcaactcctacccaacttggtaaacagcgaggatgaggatgattttttaaaagactcaacttcagaaccctcgggctctcctgccttccccagcgaggcccccaggaagcgggcgccgcggagccgggggaaggagagcgaaacc

SEQ ID NO: 469132 - DNA, 957 bp, Homo sapiens
  chr3:71113488-71114445
  hyper
  melanoma vs. upper_gi,head_and_neck,sarcoma, bladder_and_urothelial,lung,breast,pancreas_gallbladder,ovary, liver_bileduct,colorectal,cervical,uterine,renal,anorectal, prostate,non_cancer,myeloid_neoplasm,thyroid
cgctctgaaagtgacagaaatcacaccccagatacgtcccccgaacggagtgatggcgagggcttcaccaaagtggctgcgtgaaggccagaccggcagaaaatgaatcgcaaacgaaaaagagagagagagaaacacacaagcaggacttcctccaactctcaactacaccccacccatgaacatttaaaaaaagagagcgagagtgtgagccaaagagcaaggggggtgggggggtatctctctccaggacccacaggcctgcagctcctttttcttgcccctccactccctccccgcctccacttccagagcgcaactcctacccaacttggtaaacagcgaggatgaggatgattttttaaaagactcaacttcagaaccctcgggctctcctgccttccccagcgaggcccccaggaagcgggcgccgcggagccgggggaaggagagcgaaaccggcaaagatcaatcagaaggaccaacctgacactctccatgtagccgccaggcgcgcggagccgggctcggggcgcccgcgcgggccgggcgtggggtccggcggcctcggcgtgcaggcggactgcacgcgcgcaggggcgctccggctcgcgggctgacaagacgcgccgcgccgcgcccacccgccccgccctgctccaccaatcacaacccgcctctaaacaccccgcgccgcgccgcgccgcgccgcgccccacacaatgggctccgcggcccgcgccccgcgcccgcgcgccccggccccctccgcgcggcaggtgaaatcacgctcgggtgccaccctgcttttgtctggagagcaactccacttaatagctgttaacccggtgacccgcctccggctgacgtctgggtcggccgggctcggcgcgcaccgctccctctggccggggctctgcggggccggggctgccggcggggcggcgtgtttgtttc

SEQ ID NO: 469133 - DNA, 827 bp, Homo sapiens; identical to SEQ ID NO: 345093
  chr3:71113993-71114820
  hyper
  melanoma vs. ovary,upper_gi,bladder_and_urothelial, uterine,anorectal,myeloid_neoplasm,lung,breast,non_cancer, thyroid,pancreas_gallbladder,prostate,renal,colorectal,cervical, head_and_neck,liver_bileduct,sarcoma

SEQ ID NO: 469134 - DNA, 913 bp, Homo sapiens; identical to SEQ ID NO: 345094
  chr3:71630573-71631486
  hyper
  melanoma vs. sarcoma,head_and_neck,upper_gi,renal, pancreas_gallbladder,prostate,uterine,ovary,breast,cervical, anorectal,non_cancer,myeloid_neoplasm,thyroid,colorectal, liver_bileduct,lung,bladder_and_urothelial

SEQ ID NO: 469135 - DNA, 912 bp, Homo sapiens
  chr3:71630988-71631900
  hyper
  melanoma vs. liver_bileduct,sarcoma,ovary,head_and_neck, upper_gi,breast,renal,anorectal,prostate,lung
cgtggagggaagagaggatgcggctcagggaatccctgcaaggatccagagaccgggaaatcggcccgagccaaagtctcagcaccttccccaggatctcacaaagttgcaacaacaaaaaggaggggggaggaatagggagaagggggtgggatggggatacgatcacgggcgcaaggtttggagttacaactgtttatttagtccttattctcacagggggcgggagctgcgcgggaatggggggctgcaggcagcgatttcgaagcaaacacatgggaggggggcatgcgactttgtttccgggagcggagctccccagagcccgtgtgtgtcactgccagtctcccgggaccaaggcggagctcacaacaggtggggaggggggctcgtcgagggccaaaaagaagaaggaatctaagtttccgagcgcgacgttgtctgaaaaggagggaggcgggaggcgggggcgagggaaggcggaggcagcaaatgaccgcgaccccgcggcaactggcaaactcctcggctcccggcgccgccgccaccgccgtggtccccactcgaagcgcacgccgcctcggctcgctggctccagggagtcgtctcggcgggacaggaatagagcgcagggagctcgggaggaaggctgcgcgcaagcgagggacggagagccatcggccgccaggacagggccggagggacgaggcgacacgcgcgcgacgcaggacaaatcggagcttgggaaatctccccgtcccccaagcttcagaggggggtaaaatcagaaaatgtgtgtgatggtgggagagagatccgggcgcggcgactcctcgcagcgcatccggctcccgcacccacccgtggatctggccacggctgttgcggactcgtctcgggaaagcggaggcc

SEQ ID NO: 469136 - DNA, 102 bp, Homo sapiens; identical to SEQ ID NO: 455975
  chr3:99594790-99594892
  hyper
  melanoma vs. sarcoma,myeloid_neoplasm,upper_gi,thyroid, colorectal,bladder_and_urothelial

SEQ ID NO: 469137 - DNA, 567 bp, Homo sapiens
  chr3:105087465-105088032
  hyper
  melanoma vs. liver_bileduct,head_and_neck,lung, lymphoid_neoplasm,prostate,pancreas_gallbladder,breast, bladder_and_urothelial,renal,colorectal,uterine,ovary,upper_gi, anorectal,cervical,non_cancer,multiple_myeloma
cggcaagctcaggtcacagaagaggtttgaaagcctctgaatctctcccaggaactggcggggagaggggtttgggggccagagcctgaggaagagattacaagtgtttgcgagctgctgctgctgctgccgttgctgtgtgtgtgggcgggaggagtgccctctccagatctctttattaaagttacatttctgggtgaggtaatgagctcacctgatgtttctgaggctgagggaaaaaaaaggcgtctgcgttctctgacaaatctcgggctctggggcggggactgtgaaaccatagttcaaccggatttaaagcaggtgtcctagtgtaacaacgctggggaggtaggtggaaaggcgagacccccttgggcctggcacagtgtggatttcactttttcgagattccactgtccgatggaggaaaggacactttggagccagggaatgagccaagaagggaggacaagggtgatgtcggtttgtaacatgcaaacgtccacacgcccacagttggttttccgattaaccccctcgagacttggagaatgtaatctcaccctc

SEQ ID NO: 469138 - DNA, 163 bp, Homo sapiens
  chr3:105088087-105088250
  hyper
  melanoma vs. liver_bileduct,head_and_neck,lung, lymphoid_neoplasm,prostate,pancreas_gallbladder,breast, bladder_and_urothelial,renal,colorectal,uterine,ovary,upper_gi, anorectal,cervical,non_cancer,multiple_myeloma
cgggccacgtcgcaggataggtttttctacacatttaactgctaaaagggggaaagttccgctttcagacctccttcacggtggttcttttggcgccacaggctcgtgtgtccagggggcaccgagctgcgcgctttcggcgagcggctagccccggctcacc

SEQ ID NO: 469139 - DNA, 260 bp, Homo sapiens
  chr3:105087772-105088032
  hyper
  melanoma vs. liver_bileduct,head_and_neck, lymphoid_neoplasm,lung,bladder_and_urothelial, pancreas_gallbladder,breast,prostate,ovary,colorectal,anorectal, upper_gi,renal,cervical,uterine,non_cancer,multiple_myeloma,
  CONT. FROM ABOVE: myeloid_neoplasm,thyroid
cggatttaaagcaggtgtcctagtgtaacaacgctggggaggtaggtggaaaggcgagacccccttgggcctggcacagtgtggatttcactttttcgagattccactgtccgatggaggaaaggacactttggagccagggaatgagccaagaagggaggacaagggtgatgtcggtttgtaacatgcaaacgtccacacgcccacagttggttttccgattaaccccctcgagacttggagaatgtaatctcaccctc

SEQ ID NO: 469140 - DNA, 459 bp, Homo sapiens; identical to SEQ ID NO: 346577
  chr3:105088087-105088546
  hyper
  melanoma vs. liver_bileduct,head_and_neck, lymphoid_neoplasm,lung,bladder_and_urothelial, pancreas_gallbladder,breast,prostate,ovary,colorectal,anorectal, upper_gi,renal,cervical,uterine,non_cancer,multiple_myeloma,
  CONT. FROM ABOVE: myeloid_neoplasm,thyroid

SEQ ID NO: 469141 - DNA, 832 bp, Homo sapiens; identical to SEQ ID NO: 345097
  chr3:113251180-113252012
  hyper
  melanoma vs. multiple_myeloma,cervical,breast,anorectal, uterine,prostate,myeloid_neoplasm,thyroid,upper_gi,non_cancer, lung,colorectal,lymphoid_neoplasm,ovary,pancreas_gallbladder, bladder_and_urothelial,head_and_neck

SEQ ID NO: 469142 - DNA, 824 bp, Homo sapiens
  chr3:113251532-113252356
  hyper
  melanoma vs. cervical,breast,anorectal,uterine, multiple_myeloma,upper_gi,non_cancer,lung,myeloid_neoplasm, thyroid
cggtctaaattctggctgggtaagtggggggattctcggcgatgagaaacgggggacttagaagccggaggaaaatcagcagccccacatctccacttctccagtccgccctactctccacccgtgacctccagtggagaccccaggcggcagcatcagtatttgatcggcccttcgtcagcacgctgccagccctggccggctgggttcgccaggcatcacccgctcggctctgaagcggacgcctggccctgcaccgggctttggaaggaccctctctgcgctcgccccctccccagggtggctccgctttcgagcccgggcgcggtgcccaccatgcgcggctgcctgcggctcgcgctgctctgcgcgctgccctggctcctgctggcggcgtcgcccgggcacccggcgaaatcccccaggcagcccccggcaccgcgccgcgaccccttcgacgctgccaggggcgccgatttcgatcatgtctacagcggggtggtgaacctcagcaccgagaacatctactctttcaactacaccagccagcccgaccaggtaagacactcgctcccctcgctcgactcctagaacttgccagatctcagagccccgtcgctgctttggagtcccctgggaattgaccttgggagacttcggggaccaggggactttctttccctttctcctccgaagcaatcgctgccctgccctagctgcctcaacacgcctcggggacaactctgcttcgcctcgcgcctctcctggcctggtcaagggcattgctgggctttgcagaggcaccagttccccgcaccgtctgc

SEQ ID NO: 469143 - DNA, 123 bp, Homo sapiens; identical to SEQ ID NO: 455978
  chr3:127794271-127794394
  hyper
  melanoma vs. anorectal,sarcoma

SEQ ID NO: 469144 - DNA, 132 bp, Homo sapiens; identical to SEQ ID NO: 455979
  chr3:127794860-127794992
  hyper
  melanoma vs. anorectal,sarcoma

SEQ ID NO: 469145 - DNA, 289 bp, Homo sapiens; identical to SEQ ID NO: 455980
  chr3:127794860-127795149
  hyper
  melanoma vs. anorectal

SEQ ID NO: 469146 - DNA, 44 bp, Homo sapiens; identical to SEQ ID NO: 345102
  chr3:127795229-127795273
  hyper
  melanoma vs. anorectal

SEQ ID NO: 469147 - DNA, 49 bp, Homo sapiens; identical to SEQ ID NO: 453213
  chr3:129694299-129694348
  hyper
  melanoma vs. multiple_myeloma,myeloid_neoplasm,sarcoma, renal,non_cancer,thyroid

SEQ ID NO: 469148 - DNA, 49 bp, Homo sapiens; identical to SEQ ID NO: 453213
  chr3:129694299-129694348
  hyper
  melanoma vs. sarcoma

SEQ ID NO: 469149 - DNA, 21 bp, Homo sapiens
  chr3:134032175-134032196
  hyper
  melanoma vs. liver_bileduct
cgggctgggagcggagtgggg

SEQ ID NO: 469150 - DNA, 1 bp, Homo sapiens
  chr3:136537591-136537592
  hyper
  melanoma vs. ovary
c

SEQ ID NO: 469151 - DNA, 306 bp, Homo sapiens; identical to SEQ ID NO: 357696
  chr3:136538179-136538485
  hyper
  melanoma vs. ovary

SEQ ID NO: 469152 - DNA, 380 bp, Homo sapiens
  chr3:147086665-147087045
  hyper
  melanoma vs. renal,prostate,multiple_myeloma
cggtagcatgctctcttgtcaagaccgattgtgttttaggcaaacatttgcgcaaacataaaggcaaaggtcaaggactgttcagtcccagtatgtgctaattcacctagcgaaccaatggggcaaaagttgcattttatatgctcgcccccgccagacccaaagcaggagtcgctcctgctaatgaacaaaatcgcctctgatcagctcccttgtcaatttctcttcggctctctgatccatttctctgggcttcctcagaaatacaactggtaaagacgtgtttgccaacatctggatcagctccgcccaatttctggggcagcacatgtttattccacgtttctggtagcagaaagctaataataataaataaaatc

SEQ ID NO: 469153 - DNA, 123 bp, Homo sapiens
  chr3:156533976-156534099
  hyper
  melanoma vs. renal
cgacggctgtggttactcaaactgatctcatcgcaggtcgtcacgacacgcgcttcccctcgcctgcacgcggcgtggcgtgagaggggccctggcagccggcgcgcccacccctgatccttc

SEQ ID NO: 469154 - DNA, 142 bp, Homo sapiens; identical to SEQ ID NO: 345109
  chr3:156534539-156534681
  hyper
  melanoma vs. renal

SEQ ID NO: 469155 - DNA, 24 bp, Homo sapiens
  chr3:157217126-157217150
  hyper
cgcaaaacgtggcacatttcaggg

SEQ ID NO: 469156 - DNA, 523 bp, Homo sapiens; identical to SEQ ID NO: 345110
  chr3:157217201-157217724
  hyper

SEQ ID NO: 469157 - DNA, 259 bp, Homo sapiens
  chr3:157815399-157815658
  hyper
  melanoma vs. bladder_and_urothelial,prostate,colorectal, myeloid_neoplasm,thyroid,lymphoid_neoplasm,pancreas_gallbladder, non_cancer,multiple_myeloma,breast,renal,anorectal,upper_gi, uterine,ovary
cgtttgtctttcgatttttttgtttgctcattttttcattgttaacaagatttttttttctatgcaagagtccatcgttgcagctttgcggtgagccaaactccgcggttccagcactcccctgtccagtctctctccagactcccccaaacccgctcctacaaaacccaattctaggccctcgagtaggaaaacgggcaggagccacggagcctgcgtgcctcgtgagatccctggtcctgcgtggagtctggctttc

SEQ ID NO: 469158 - DNA, 68 bp, Homo sapiens
  chr3:157815822-157815890
  hyper
  melanoma vs. bladder_and_urothelial,prostate,colorectal, myeloid_neoplasm,thyroid,lymphoid_neoplasm,pancreas_gallbladder, non_cancer,multiple_myeloma,breast,renal,anorectal,upper_gi, uterine,ovary
cccagggctgcggcgtgctttttggctttcagtctgagatcggcgatgctggagttcttgctggtggt

SEQ ID NO: 469159 - DNA, 266 bp, Homo sapiens
  chr3:157815923-157816189
  hyper
  melanoma vs. bladder_and_urothelial,prostate,colorectal, myeloid_neoplasm,thyroid,lymphoid_neoplasm,pancreas_gallbladder, non_cancer,multiple_myeloma,breast,renal,anorectal,upper_gi, uterine,ovary
ggcggaagccgaatccgcggccagcgtggcgagcggcagtccgaagggcggtgctgggaacatcatgtagggcgcgtgcgcggccaggtgcggatgcaggtggtggtgcgcgtgcgccacagcgctgtccagctgcagctgcgcctgaacctgaaaggacaagggcgtcacgttgcaatgactatcctagggtgacaacagaatagaaacagagcattaacggcgtccagcttggccagagagagagttgggttgtgtttgggcac

SEQ ID NO: 469160 - DNA, 68 bp, Homo sapiens; identical to SEQ ID NO: 469158
  chr3:157815822-157815890
  hyper
  melanoma vs. bladder_and_urothelial,prostate,colorectal, myeloid_neoplasm,thyroid,lymphoid_neoplasm,pancreas_gallbladder, multiple_myeloma,non_cancer,breast,ovary,renal,anorectal, upper_gi,uterine

SEQ ID NO: 469161 - DNA, 568 bp, Homo sapiens; identical to SEQ ID NO: 345113
  chr3:157815923-157816491
  hyper
  melanoma vs. bladder_and_urothelial,prostate,colorectal, myeloid_neoplasm,thyroid,lymphoid_neoplasm,pancreas_gallbladder, multiple_myeloma,non_cancer,breast,ovary,renal,anorectal, upper_gi,uterine

SEQ ID NO: 469162 - DNA, 140 bp, Homo sapiens; identical to SEQ ID NO: 349857
  chr3:157825408-157825548
  hyper
  melanoma vs. myeloid_neoplasm,thyroid

SEQ ID NO: 469163 - DNA, 80 bp, Homo sapiens; identical to SEQ ID NO: 455991
  chr3:159480852-159480932
  hyper
  melanoma vs. lung,sarcoma,renal,ovary,thyroid, bladder_and_urothelial,cervical,myeloid_neoplasm,uterine, non_cancer,multiple_myeloma,anorectal,colorectal,head_and_neck, pancreas_gallbladder,breast

SEQ ID NO: 469164 - DNA, 660 bp, Homo sapiens; identical to SEQ ID NO: 345115
  chr3:159480975-159481635
  hyper
  melanoma vs. lung,sarcoma,renal,ovary,thyroid, bladder_and_urothelial,cervical,myeloid_neoplasm,uterine, non_cancer,multiple_myeloma,anorectal,colorectal,head_and_neck, pancreas_gallbladder,breast

SEQ ID NO: 469165 - DNA, 777 bp, Homo sapiens
  chr3:159481141-159481918
  hyper
  melanoma vs. lung,renal,ovary,sarcoma,uterine,anorectal, liver_bileduct,colorectal,cervical,head_and_neck, bladder_and_urothelial,breast,non_cancer,thyroid, myeloid_neoplasm,pancreas_gallbladder,multiple_myeloma
cgccaggctcgtgctttgggatgccgggtggcttcggcggggtaacgagtcacgcagagacggcttgaggcaagccaagaaaatacgggtgtcggcgtgaaaatacaccactcttcccagcgcgccgcccttgctaactggctggacctgcgcccctaacgcccagtgcccccttcttttgggcctatcttggcccctccaaccccatcccagcctgcctcctgctccagcctgccgccgcgaaaaccgggactgcggactgcgccgcgcccggcagcctctgggcatgctcggtggcgggaccggctccaccgccaggagggcgcgtcctccctcccctagggcggtgacggcgcctgcagcgacttgccgccgcgccccggccaggcacaccttttggggaggcgggggaccaccctgcccggcgtgggccgagagcgccccccaccccgagccttccggcgggtgggaggaggggccggccagggagacgcggaggcgggagtgagacctccgactgccagcggttccttacaaagtaaagctcagctcgcgcgcggacccgggctcccagccgcgggcggggaaggggcggggcggggcggggccgggccgggccgggccggggcggggggtggtctcagcgcctagagcgagatgcgaaattagtagccgcccacccccttctcagttcccgcccccagggaattataatttcctgggaaagtgtctggttctcggagaatccttggggcggggtaaaggggcgcgcctggc

SEQ ID NO: 469166 - DNA, 434 bp, Homo sapiens; identical to SEQ ID NO: 357768
  chr3:182880277-182880711
  hyper
  melanoma vs. pancreas_gallbladder,lung,upper_gi, bladder_and_urothelial,ovary

SEQ ID NO: 469167 - DNA, 50 bp, Homo sapiens
  chr3:182896562-182896612
  hyper
  melanoma vs. head_and_neck,bladder_and_urothelial,breast, colorectal,cervical,ovary,anorectal,uterine
cgaagcaatcttggcactaacacgaacaccccatgaacgctcgcagggat

SEQ ID NO: 469168 - DNA, 7 bp, Homo sapiens
  chr3:182897470-182897477
  hyper
  melanoma vs. head_and_neck,bladder_and_urothelial,breast, colorectal,cervical,ovary,anorectal,uterine
ggcccgc

SEQ ID NO: 469169 - DNA, 253 bp, Homo sapiens; identical to SEQ ID NO: 357777
  chr3:184322331-184322584
  hyper
  melanoma vs. ovary

SEQ ID NO: 469170 - DNA, 112 bp, Homo sapiens; identical to SEQ ID NO: 455996
  chr3:193775965-193776077
  hyper
  melanoma vs. head_and_neck,cervical,multiple_myeloma, bladder_and_urothelial,pancreas_gallbladder,anorectal,upper_gi, sarcoma,non_cancer,thyroid

SEQ ID NO: 469171 - DNA, 147 bp, Homo sapiens; identical to SEQ ID NO: 459701
  chr3:194407289-194407436
  hyper
  melanoma vs. sarcoma,anorectal,thyroid,multiple_myeloma, non_cancer,uterine,prostate,renal

SEQ ID NO: 469172 - DNA, 154 bp, Homo sapiens; identical to SEQ ID NO: 459702
  chr3:194407836-194407990
  hyper
  melanoma vs. sarcoma,anorectal,thyroid,multiple_myeloma, non_cancer,uterine,prostate,renal

SEQ ID NO: 469173 - DNA, 3 bp, Homo sapiens
  chr3:194407996-194407999
  hyper
  melanoma vs. sarcoma,anorectal,thyroid,multiple_myeloma, non_cancer,uterine,prostate,renal
cgg

SEQ ID NO: 469174 - DNA, 102 bp, Homo sapiens; identical to SEQ ID NO: 459704
  chr3:194408028-194408130
  hyper
  melanoma vs. sarcoma,anorectal,thyroid,multiple_myeloma, non_cancer,uterine,prostate,renal

SEQ ID NO: 469175 - DNA, 154 bp, Homo sapiens; identical to SEQ ID NO: 459702
  chr3:194407836-194407990
  hyper
  melanoma vs. thyroid,non_cancer,sarcoma

SEQ ID NO: 469176 - DNA, 3 bp, Homo sapiens
  chr3:194407996-194407999
  hyper
  melanoma vs. thyroid,non_cancer,sarcoma
cgg

SEQ ID NO: 469177 - DNA, 102 bp, Homo sapiens; identical to SEQ ID NO: 459704
  chr3:194408028-194408130
  hyper
  melanoma vs. thyroid,non_cancer,sarcoma

SEQ ID NO: 469178 - DNA, 643 bp, Homo sapiens; identical to SEQ ID NO: 331998
  chr3:197025639-197026282
  hyper
  melanoma vs. head_and_neck,upper_gi,lung,renal, pancreas_gallbladder,prostate,colorectal,breast, bladder_and_urothelial,lymphoid_neoplasm,ovary,uterine,cervical, multiple_myeloma,anorectal,non_cancer,myeloid_neoplasm,thyroid

SEQ ID NO: 469179 - DNA, 186 bp, Homo sapiens
  chr4:4854484-4854670
  hyper
cgtgttctaggacggcagggatgaatcactataggctggctctctctagctcagcccggcctgctgcggcctggggccactgctcctgggtcctcaggactgcctgggggaaggtagtgcattgtgcagcgcgcggtccagaagtgaaaagggaggcgcggagataagctgccggcggaagttccc

SEQ ID NO: 469180 - DNA, 2 bp, Homo sapiens
  chr4:4855717-4855719
  hyper
ac

SEQ ID NO: 469181 - DNA, 57 bp, Homo sapiens; identical to SEQ ID NO: 454399
  chr4:15780742-15780799
  hyper
  melanoma vs. multiple_myeloma,uterine,non_cancer, lymphoid_neoplasm,myeloid_neoplasm

SEQ ID NO: 469182 - DNA, 353 bp, Homo sapiens; identical to SEQ ID NO: 349919
  chr4:15780742-15781095
  hyper
  melanoma vs. sarcoma,multiple_myeloma,uterine,non_cancer, ovary,myeloid_neoplasm

SEQ ID NO: 469183 - DNA, 609 bp, Homo sapiens; identical to SEQ ID NO: 332064
  chr4:25863681-25864290
  hyper
  melanoma vs. lung,bladder_and_urothelial,ovary, multiple_myeloma,liver_bileduct,upper_gi,breast,cervical, sarcoma,uterine,anorectal,prostate,pancreas_gallbladder, myeloid_neoplasm,head_and_neck,thyroid,renal,colorectal,
  CONT. FROM ABOVE: non_cancer,lymphoid_neoplasm

SEQ ID NO: 469184 - DNA, 650 bp, Homo sapiens; identical to SEQ ID NO: 370427
  chr4:41363167-41363817
  hyper
  melanoma vs. liver_bileduct

SEQ ID NO: 469185 - DNA, 768 bp, Homo sapiens
  chr4:42657902-42658670
  hyper
  melanoma vs. lymphoid_neoplasm,prostate,colorectal, upper_gi,breast,ovary,lung,renal,anorectal,multiple_myeloma, uterine
cgatgatggcaagatagatttctgaaaaacatgttattccaccctctgcaggattcaagtacaggtttatgggagaggacaaacaaaccttgggatatttacagtcttggctttgacgcgagcaaaatcaaataatatttacagagtgcctgccacatggcaggcaggatgttgagggctcctcggagacgatgaagagtctgggccctcggaaagcttacttgcttctaccccggagcatctgttgctcagtgttgacaaccatggccattcaagagctggccccaggtggagcaaagaaaacagcttccacctggctgaaaagtcagctcagctggccgaagtgagggtttcgggcaaaagggaaacacaaaaacgaaacctcagacgcgagccggtgggactccgctgcaggaggcagaattgcagaagctgtaatgcagggaacccactcggcacccgaccccgatgaaggctccccgcgcttcgagagccaagggactacggatcaaaggatcctgcagccggggaaaagcaaactcgcttcgctgggagctcagatagggggttgcaaaacggtgggcgccggaggcaggggcggcgggctggggatctgctgagtggaaatcgaactggtggggagggaggtgggcagggcgagtgagctcagtgactgggacctaatggtcacactgcggtgcaaagcacgcctcggggctcccgcggagaacacccattcgagggtactggagcctggaaagggtctgc

SEQ ID NO: 469186 - DNA, 728 bp, Homo sapiens
  chr4:42658241-42658969
  hyper
  melanoma vs. lymphoid_neoplasm,colorectal,ovary,prostate, breast,multiple_myeloma,lung,renal,upper_gi,uterine,anorectal
cgaagtgagggtttcgggcaaaagggaaacacaaaaacgaaacctcagacgcgagccggtgggactccgctgcaggaggcagaattgcagaagctgtaatgcagggaacccactcggcacccgaccccgatgaaggctccccgcgcttcgagagccaagggactacggatcaaaggatcctgcagccggggaaaagcaaactcgcttcgctgggagctcagatagggggttgcaaaacggtgggcgccggaggcaggggcggcgggctggggatctgctgagtggaaatcgaactggtggggagggaggtgggcagggcgagtgagctcagtgactgggacctaatggtcacactgcggtgcaaagcacgcctcggggctcccgcggagaacacccattcgagggtactggagcctggaaagggtctgcgagtacactgggggcagcgcggggggaagggtcccctaggggccgggcgcgacagtcggactgccgccggggaagaggtaggatgcggtctcttccaggataaacacacacgctcacacacacactcgcttcccgaccccgggctagccccgagcctcggcggccccttaccttcggcgcgcgagcggatctccgacacggtcctccgcatggtgggcatcgcggcggcggctgcaggtgggtcctcagcccggactctgcacctgtcacggcgtggtacacgcgggagacccggctgc

SEQ ID NO: 469187 - DNA, 94 bp, Homo sapiens
  chr4:47839530-47839624
  hyper
  melanoma vs. sarcoma,anorectal,lung,pancreas_gallbladder
aagtccactagatgcttggagggcaccgtgcggaggagggactctgcaggaaaggtggcatcacccccggcatggagaccggggtctccggatc

SEQ ID NO: 469188 - DNA, 375 bp, Homo sapiens; identical to SEQ ID NO: 357874
  chr4:47839675-47840050
  hyper
  melanoma vs. sarcoma,anorectal,lung,pancreas_gallbladder

SEQ ID NO: 469189 - DNA, 6 bp, Homo sapiens
  chr4:57521376-57521382
  hyper
  melanoma vs. sarcoma
cgggga

SEQ ID NO: 469190 - DNA, 133 bp, Homo sapiens; identical to SEQ ID NO: 199452
  chr4:76555905-76556038
  hyper

SEQ ID NO: 469191 - DNA, 448 bp, Homo sapiens; identical to SEQ ID NO: 332121
  chr4:77610260-77610708
  hyper
  melanoma vs. head_and_neck,lung,breast,liver_bileduct, upper_gi,prostate,colorectal,renal,cervical, pancreas_gallbladder,uterine,ovary,sarcoma,anorectal, bladder_and_urothelial,thyroid,myeloid_neoplasm,non_cancer

SEQ ID NO: 469192 - DNA, 48 bp, Homo sapiens
  chr4:84030839-84030887
  hyper
  melanoma vs. sarcoma,ovary,head_and_neck
cgggcttcaggaggcggggagtgggtgggtgggcttcttaccttctct

SEQ ID NO: 469193 - DNA, 229 bp, Homo sapiens; identical to SEQ ID NO: 282286
  chr4:84030916-84031145
  hyper
  melanoma vs. sarcoma,ovary,head_and_neck

SEQ ID NO: 469194 - DNA, 215 bp, Homo sapiens; identical to SEQ ID NO: 346647
  chr4:84457821-84458036
  hyper
  melanoma vs. liver_bileduct

SEQ ID NO: 469195 - DNA, 28 bp, Homo sapiens
  chr4:106067046-106067074
  hyper
  melanoma vs. lymphoid_neoplasm,cervical,anorectal,lung, bladder_and_urothelial,breast,non_cancer,myeloid_neoplasm, thyroid,renal
cggggcggggagaaacagaactcggtca

SEQ ID NO: 469196 - DNA, 269 bp, Homo sapiens; identical to SEQ ID NO: 349958
  chr4:106067220-106067489
  hyper
  melanoma vs. lymphoid_neoplasm,cervical,anorectal,lung, bladder_and_urothelial,breast,non_cancer,myeloid_neoplasm, thyroid,renal

SEQ ID NO: 469197 - DNA, 153 bp, Homo sapiens; identical to SEQ ID NO: 357952
  chr4:119809913-119810066
  hyper
  melanoma vs. sarcoma

SEQ ID NO: 469198 - DNA, 761 bp, Homo sapiens; identical to SEQ ID NO: 346652
  chr4:124317751-124318512
  hyper
  melanoma vs. lung,liver_bileduct,head_and_neck,upper_gi

SEQ ID NO: 469199 - DNA, 942 bp, Homo sapiens
  chr4:124318042-124318984
  hyper
  melanoma vs. liver_bileduct
cgctgttaaatgtgcctgaaaagcaatttgcaatctttgcattaggtaagtaccgtttccttccgtagacattttaggaaagataaggtgagaaatgttgacttttgcaaggaactgaacatttatttatttgaacttgctttccagctaaggttactggttgcatttcaaaacaccggtagcattcccactgctaaaactaatgctcttaaagtaaatgctaccgctaaaagaaaaagcagggtccctttcacctttccttaaccgaacagtagacgtttaaagtctgaaacgatcgaatttgtgaaacacagagccgttaatgcctttatgcgaagaggggctagcactcggtgtgtggaccaaatgcgtgtttgtttaggcattgttggcgaccgaatcccgagtgaagcattggtttaaaacctgaatttcccgtctctgtgtattgattcctaacgcgcagaggcgttgcttgaacgttgtttgaactcctaggcattccagggggcaaaagcacctcggcaaaaacgtgcaggactgcatgttactttggttcgcggctgacacgccgactgtgcgccggcctgtcaatcaccgggagcagcaacagggagcacatggcaacgggctgcgggcgagctggccagcggcccgcccggggtcccagcccttcgaagaaagggacattcacgagcttctatctctaattctctgtcgcaggcatttcggccgtggaaccccaggctcggaggactgggtgtgagcgctgcccgggagaggctgacctgccgggaccggagtgcccggggacgctgtgcccccacttgcccaacgtgcggaatcggctaagcgcgtcggcctgcgcggggcacaagggacgacgcccgcctttctctctccgagaaggatccccaaacctcactctcttcactcctcccc

SEQ ID NO: 469200 - DNA, 766 bp, Homo sapiens
  chr4:124318522-124319288
  hyper
  melanoma vs. liver_bileduct
cgttgtttgaactcctaggcattccagggggcaaaagcacctcggcaaaaacgtgcaggactgcatgttactttggttcgcggctgacacgccgactgtgcgccggcctgtcaatcaccgggagcagcaacagggagcacatggcaacgggctgcgggcgagctggccagcggcccgcccggggtcccagcccttcgaagaaagggacattcacgagcttctatctctaattctctgtcgcaggcatttcggccgtggaaccccaggctcggaggactgggtgtgagcgctgcccgggagaggctgacctgccgggaccggagtgcccggggacgctgtgcccccacttgcccaacgtgcggaatcggctaagcgcgtcggcctgcgcggggcacaagggacgacgcccgcctttctctctccgagaaggatccccaaacctcactctcttcactcctccccgctaaaaaaaaaaaaaaaaagaaaagggtaaaaaaatccccctccccctcccggccgcggcagcctctgcctggcaggcgcgtgctccgaggtttcgccggggtactgcgcggctccgtgacccacccgccgacggcggttcgggccccgacccgggcgctgcggagtctcgaacgcccgtgacgtggatttttcgctcgtcaggaagccgccatcccttccttcgttccttgcgaggagcgactagaacccgagttctctgagcacaccgtgccgtcagctggcccgtcacgcactcgactcc

SEQ ID NO: 469201 - DNA, 137 bp, Homo sapiens
  chr4:140970253-140970390
  hyper
cgcatctgctgctctgtgattgcacaagagaagctaccactccttttcttcacaaagaaaaaaaaatggcatttatcgcaagtacagcaaggcatattaggattcacctcccccattctttcttccctcttcctcct

SEQ ID NO: 469202 - DNA, 212 bp, Homo sapiens; identical to SEQ ID NO: 349979
  chr4:140970419-140970631
  hyper

SEQ ID NO: 469203 - DNA, 824 bp, Homo sapiens; identical to SEQ ID NO: 332200
  chr4:142557243-142558067
  hyper
  melanoma vs. liver_bileduct

SEQ ID NO: 469204 - DNA, 332 bp, Homo sapiens; identical to SEQ ID NO: 357975
  chr4:143768278-143768610
  hyper
  melanoma vs. lung

SEQ ID NO: 469205 - DNA, 177 bp, Homo sapiens; identical to SEQ ID NO: 332215
  chr4:153856957-153857134
  hyper
  melanoma vs. head_and_neck,lung,breast, pancreas_gallbladder

SEQ ID NO: 469206 - DNA, 46 bp, Homo sapiens; identical to SEQ ID NO: 459716
  chr4:154143770-154143816
  hyper
  melanoma vs. liver_bileduct,renal,sarcoma,ovary, head_and_neck,multiple_myeloma,thyroid,cervical,non_cancer, anorectal,breast,bladder_and_urothelial,lymphoid_neoplasm, myeloid_neoplasm

SEQ ID NO: 469207 - DNA, 214 bp, Homo sapiens; identical to SEQ ID NO: 459717
  chr4:154144184-154144398
  hyper
  melanoma vs. liver_bileduct,renal,sarcoma,ovary, head_and_neck,multiple_myeloma,thyroid,cervical,non_cancer, anorectal,breast,bladder_and_urothelial,lymphoid_neoplasm, myeloid_neoplasm

SEQ ID NO: 469208 - DNA, 201 bp, Homo sapiens
  chr4:156587883-156588084
  hyper
  melanoma vs. lung,ovary,breast
cgattgggcggctgcagagaccaggactcagttcccctgccctagtctgagcctagtgggtgggactcagctcagagtcagttttccagaagcaggtttcagtgcagagttttcctacacttttcctgcgctagagcagcgagcagcctggaacagacccaggcggaggacacctgtgggggagggagcgcctggaggagc

SEQ ID NO: 469209 - DNA, 145 bp, Homo sapiens
  chr4:156588167-156588312
  hyper
  melanoma vs. lung,ovary,breast
gaggaggcgggcagaggtctgaaaaaatcgaatgccttatggaaaggaactgcaagggttcctttggggtgatcaaagagggagacacagacacagagagacaaaggcaaggaggactgtctgggagccacgcgggcgatacagt

SEQ ID NO: 469210 - DNA, 56 bp, Homo sapiens
  chr4:156588401-156588457
  hyper
  melanoma vs. lung,ovary,breast
tgcactcgcgcggggaccgacaggtgccactgcagggtcccctctcccgctcactg

SEQ ID NO: 469211 - DNA, 268 bp, Homo sapiens; identical to SEQ ID NO: 332264
  chr4:183839058-183839326
  hyper
  melanoma vs. liver_bileduct,lymphoid_neoplasm,lung, pancreas_gallbladder,breast,colorectal,bladder_and_urothelial, sarcoma,prostate,uterine,multiple_myeloma,cervical,upper_gi, ovary,anorectal,head_and_neck,renal,non_cancer,thyroid,
  CONT. FROM ABOVE: myeloid_neoplasm

SEQ ID NO: 469212 - DNA, 52 bp, Homo sapiens; identical to SEQ ID NO: 358038
  chr4:186050065-186050117
  hyper
  melanoma vs. breast

SEQ ID NO: 469213 - DNA, 194 bp, Homo sapiens; identical to SEQ ID NO: 456009
  chr4:187026475-187026669
  hyper
  melanoma vs. lung,ovary

SEQ ID NO: 469214 - DNA, 829 bp, Homo sapiens; identical to SEQ ID NO: 346671
  chr5:472600-473429
  hyper
  melanoma vs. liver_bileduct,lymphoid_neoplasm

SEQ ID NO: 469215 - DNA, 966 bp, Homo sapiens
  chr5:472934-473900
  hyper
  melanoma vs. lymphoid_neoplasm,liver_bileduct,sarcoma, breast,lung,head_and_neck,bladder_and_urothelial
cgggcgcggggctcggttgggggggcccggaaccttgggctggtttcacgcaaatccgtttggggcgagcctcggtttcccggcagcggtgggaaagggcgcgagcggccagccatggcgcgcggacccttcccgccggcggcgtcacagcggcgtctcctcctgctccagcgcgtgcggcggtgcgtggcacgagggcggcagcgacgccagcttcagcagcgcggggcggcggcgcgcgcgaggccgctggaacgagcgccggctgtgcacgcggcgcgccgccgccgaacgcgcgtgcgcactcggcagccctcggcgctccggccccgcccccggcgcaggccccgcccccggctcgccctcgggcggctctgcgggcgcaggcgcggcactctcggagttctgcgcaggcgctggcgtgggcgaggcggggctcggggctcgcggtcgctgtagccgcgcggggatctggggtttctctgggacagcggcggcggcggtgggcggaccgtggcgcggggacgagcggccggttagcggcgtgtcggagccggtgtcacctgcgggagaggaaggcgtgagcggcgcgcggagcccgggcgctggggcgggaggggcgtccccgggggcctcagctgtccccgagcccggcggctctcgcctcccctcccgcggcgcaccccaggctcggcgtccgctggggcctcctcccaggacccgggttcgcggggcagaggcggaagcagcaacagcgaagccccagcccggccccgccacgtccccccgccgggggtcccgggacagcggcctcctcggcgcaggaaggtcccgccccaggccctgcagcgcgggaggtcaaggtccccaaggggacctgcttcctccatctcaaaccgccctggcgtcccccgggtgcctcccaggcccccagagggagctcagaaagcccagaccccacggccc

SEQ ID NO: 469216 - DNA, 829 bp, Homo sapiens
  chr5:473431-474260
  hyper
  melanoma vs. liver_bileduct
cggcggtgggcggaccgtggcgcggggacgagcggccggttagcggcgtgtcggagccggtgtcacctgcgggagaggaaggcgtgagcggcgcgcggagcccgggcgctggggcgggaggggcgtccccgggggcctcagctgtccccgagcccggcggctctcgcctcccctcccgcggcgcaccccaggctcggcgtccgctggggcctcctcccaggacccgggttcgcggggcagaggcggaagcagcaacagcgaagccccagcccggccccgccacgtccccccgccgggggtcccgggacagcggcctcctcggcgcaggaaggtcccgccccaggccctgcagcgcgggaggtcaaggtccccaaggggacctgcttcctccatctcaaaccgccctggcgtcccccgggtgcctcccaggcccccagagggagctcagaaagcccagaccccacggcccgcccctctccctgctctgagctggaggcagagtccgggtctgcggggccggccctccctgtatccctgtgagagggtcggggacccggggcgtctgtctggcttcccccagccctgctctcagctccctgggagcgcaggatttggactcgcggactagctttcggagccacctaaaggaaatctcaggcggccctagtgccctcagctccgtgggagcagcagagacgccagagtatctctgtccgggctcctgagggaggtgcggccagcagggcgctagaggaggaagaggggctgctggagagagagagcgcgccaggttcaggtccagggaggagagagagcgagcgcgcgaggc

SEQ ID NO: 469217 - DNA, 901 bp, Homo sapiens; identical to SEQ ID NO: 332288
  chr5:1800443-1801344
  hyper
  melanoma vs. lymphoid_neoplasm,upper_gi, pancreas_gallbladder

SEQ ID NO: 469218 - DNA, 171 bp, Homo sapiens; identical to SEQ ID NO: 456015
  chr5:10564301-10564472
  hyper
  melanoma vs. lymphoid_neoplasm

SEQ ID NO: 469219 - DNA, 747 bp, Homo sapiens; identical to SEQ ID NO: 350058
  chr5:36744888-36745635
  hyper
  melanoma vs. liver_bileduct,head_and_neck,lung, pancreas_gallbladder,breast,bladder_and_urothelial,ovary, upper_gi,colorectal,prostate,uterine,multiple_myeloma

SEQ ID NO: 469220 - DNA, 22 bp, Homo sapiens
  chr5:40680513-40680535
  hyper
  melanoma vs. lymphoid_neoplasm,multiple_myeloma, myeloid_neoplasm,anorectal,non_cancer,bladder_and_urothelial, thyroid,cervical,colorectal,upper_gi,sarcoma, pancreas_gallbladder
cgggtccaggacatctgagggc

SEQ ID NO: 469221 - DNA, 337 bp, Homo sapiens; identical to SEQ ID NO: 456017
  chr5:40680627-40680964
  hyper
  melanoma vs. lymphoid_neoplasm,multiple_myeloma, myeloid_neoplasm,anorectal,non_cancer,bladder_and_urothelial, thyroid,cervical,colorectal,upper_gi,sarcoma, pancreas_gallbladder

SEQ ID NO: 469222 - DNA, 89 bp, Homo sapiens; identical to SEQ ID NO: 456018
  chr5:40680875-40680964
  hyper
  melanoma vs. lymphoid_neoplasm,myeloid_neoplasm, multiple_myeloma,cervical,non_cancer,anorectal,thyroid,upper_gi, pancreas_gallbladder,colorectal,bladder_and_urothelial

SEQ ID NO: 469223 - DNA, 99 bp, Homo sapiens; identical to SEQ ID NO: 453281
  chr5:42950747-42950846
  hyper
  melanoma vs. sarcoma

SEQ ID NO: 469224 - DNA, 3 bp, Homo sapiens
  chr5:42993305-42993308
  hyper
  melanoma vs. lymphoid_neoplasm,multiple_myeloma, myeloid_neoplasm,thyroid,non_cancer
cgc

SEQ ID NO: 469225 - DNA, 319 bp, Homo sapiens
  chr5:52778284-52778603
  hyper
  melanoma vs. bladder_and_urothelial,lymphoid_neoplasm
cgtcgcatcctgtttttgtcaggttctttaatctgctcttcgagtctctgcaggttatgaaatgggacgaataaaagtaaacagtctagtaaaagtcaatgcaagctgcacgtgttgtgtctgggtcactggtaactgacattgatatggctggggcgccctgtcttctccctctctccctccctccctctcgcccacctcccatctctgtgatcagggcttccccctccactgccttctttttccacccctccacccctttcgatttatttcctacttttctcccgcgtctctctcacttcccctcctccacgctcac

SEQ ID NO: 469226 - DNA, 135 bp, Homo sapiens; identical to SEQ ID NO: 358109
  chr5:52778741-52778876
  hyper
  melanoma vs. bladder_and_urothelial,lymphoid_neoplasm

SEQ ID NO: 469227 - DNA, 210 bp, Homo sapiens; identical to SEQ ID NO: 461096
  chr5:54526958-54527168
  hyper
  melanoma vs. cervical,myeloid_neoplasm,colorectal,breast, non_cancer

SEQ ID NO: 469228 - DNA, 1 bp, Homo sapiens
  chr5:54527844-54527845
  hyper
  melanoma vs. cervical,myeloid_neoplasm,colorectal,breast, non_cancer
c

SEQ ID NO: 469229 - DNA, 308 bp, Homo sapiens; identical to SEQ ID NO: 332365
  chr5:56110226-56110534
  hyper
  melanoma vs. liver_bileduct,upper_gi,breast,lung, pancreas_gallbladder,prostate,cervical,lymphoid_neoplasm,ovary, multiple_myeloma,renal,head_and_neck,bladder_and_urothelial, uterine,colorectal,anorectal,myeloid_neoplasm,non_cancer,
  CONT. FROM ABOVE: thyroid

SEQ ID NO: 469230 - DNA, 211 bp, Homo sapiens
  chr5:58335353-58335564
  hyper
  melanoma vs. sarcoma,pancreas_gallbladder
ttctcaactcctcgggcggcaggcgcagcgcggctccaacgccgcagctttccgggaacactccccctcacgcccctctcggccctcggcgctgcctggctcctcctcaacccccttacgaaaagattccgaattgcaaaagcctgtccctgtccgtgccacccgccgcgtccttcccctcgagctctgccccgggggccccgccacctcg

SEQ ID NO: 469231 - DNA, 73 bp, Homo sapiens; identical to SEQ ID NO: 345171
  chr5:58335881-58335954
  hyper
  melanoma vs. sarcoma,pancreas_gallbladder

SEQ ID NO: 469232 - DNA, 161 bp, Homo sapiens
  chr5:60921444-60921605
  hyper
  melanoma vs. lung,sarcoma,liver_bileduct
cgttctctgagatgtcgctgctattactgtctcaaatttccttttaaattttgctgtttgagtaaattagtgctggcctttcctgagctccgcagctccgaggtggcccgactgccgggcctccaccccttttccccggtcccgggtcggtttctccgggc

SEQ ID NO: 469233 - DNA, 49 bp, Homo sapiens; identical to SEQ ID NO: 358123
  chr5:60921662-60921711
  hyper
  melanoma vs. lung,sarcoma,liver_bileduct

SEQ ID NO: 469234 - DNA, 29 bp, Homo sapiens
  chr5:65220759-65220788
  hyper
  melanoma vs. liver_bileduct,renal,pancreas_gallbladder, ovary,breast,cervical,lung,uterine,multiple_myeloma, bladder_and_urothelial,prostate,myeloid_neoplasm,non_cancer, anorectal,sarcoma,upper_gi
cgcaataaacgcgaaccctgccaggctga

SEQ ID NO: 469235 - DNA, 348 bp, Homo sapiens; identical to SEQ ID NO: 346698
  chr5:65220847-65221195
  hyper
  melanoma vs. liver_bileduct,renal,pancreas_gallbladder, ovary,breast,cervical,lung,uterine,multiple_myeloma, bladder_and_urothelial,prostate,myeloid_neoplasm,non_cancer, anorectal,sarcoma,upper_gi

SEQ ID NO: 469236 - DNA, 89 bp, Homo sapiens; identical to SEQ ID NO: 358154
  chr5:76939813-76939902
  hyper
  melanoma vs. cervical,anorectal,bladder_and_urothelial, non_cancer,uterine,multiple_myeloma,ovary,myeloid_neoplasm

SEQ ID NO: 469237 - DNA, 10 bp, Homo sapiens
  chr5:77140518-77140528
  hyper
  melanoma vs. multiple_myeloma
cgcaactttg

SEQ ID NO: 469238 - DNA, 192 bp, Homo sapiens; identical to SEQ ID NO: 453297
  chr5:77148195-77148387
  hyper
  melanoma vs. sarcoma

SEQ ID NO: 469239 - DNA, 38 bp, Homo sapiens; identical to SEQ ID NO: 456033
  chr5:77268330-77268368
  hyper
  melanoma vs. myeloid_neoplasm,thyroid,ovary

SEQ ID NO: 469240 - DNA, 15 bp, Homo sapiens
  chr5:77269447-77269462
  hyper
  melanoma vs. myeloid_neoplasm,thyroid,non_cancer, multiple_myeloma
ttccccgcggggctc

SEQ ID NO: 469241 - DNA, 342 bp, Homo sapiens; identical to SEQ ID NO: 370772
  chr5:77591388-77591730
  hyper
  melanoma vs. liver_bileduct

SEQ ID NO: 469242 - DNA, 50 bp, Homo sapiens; identical to SEQ ID NO: 464606
  chr5:87962917-87962967
  hyper
  melanoma vs. lymphoid_neoplasm,thyroid,prostate, colorectal,upper_gi

SEQ ID NO: 469243 - DNA, 389 bp, Homo sapiens; identical to SEQ ID NO: 464607
  chr5:87963002-87963391
  hyper
  melanoma vs. lymphoid_neoplasm,thyroid,prostate, colorectal,upper_gi

SEQ ID NO: 469244 - DNA, 287 bp, Homo sapiens; identical to SEQ ID NO: 453312
  chr5:89854237-89854524
  hyper
  melanoma vs. sarcoma

SEQ ID NO: 469245 - DNA, 10 bp, Homo sapiens
  chr5:89854969-89854979
  hyper
  melanoma vs. sarcoma
ccccctaccc

SEQ ID NO: 469246 - DNA, 738 bp, Homo sapiens; identical to SEQ ID NO: 332448
  chr5:110847638-110848376
  hyper
  melanoma vs. colorectal,pancreas_gallbladder

SEQ ID NO: 469247 - DNA, 58 bp, Homo sapiens; identical to SEQ ID NO: 453320
  chr5:114515671-114515729
  hyper
  melanoma vs. prostate

SEQ ID NO: 469248 - DNA, 68 bp, Homo sapiens; identical to SEQ ID NO: 454414
  chr5:114515769-114515837
  hyper
  melanoma vs. prostate

SEQ ID NO: 469249 - DNA, 58 bp, Homo sapiens; identical to SEQ ID NO: 453320
  chr5:114515671-114515729
  hyper
  melanoma vs. prostate,myeloid_neoplasm,thyroid, non_cancer,ovary

SEQ ID NO: 469250 - DNA, 132 bp, Homo sapiens; identical to SEQ ID NO: 453321
  chr5:114515769-114515901
  hyper
  melanoma vs. prostate,myeloid_neoplasm,thyroid, non_cancer,ovary

SEQ ID NO: 469251 - DNA, 44 bp, Homo sapiens; identical to SEQ ID NO: 346728
  chr5:114516274-114516318
  hyper
  melanoma vs. prostate,myeloid_neoplasm,thyroid, non_cancer,ovary

SEQ ID NO: 469252 - DNA, 218 bp, Homo sapiens; identical to SEQ ID NO: 454420
  chr5:132082800-132083018
  hyper
  melanoma vs. colorectal

SEQ ID NO: 469253 - DNA, 219 bp, Homo sapiens; identical to SEQ ID NO: 350172
  chr5:134527185-134527404
  hyper
  melanoma vs. liver_bileduct,lung,renal,breast,colorectal, ovary,prostate,cervical

SEQ ID NO: 469254 - DNA, 335 bp, Homo sapiens; identical to SEQ ID NO: 350178
  chr5:139135589-139135924
  hyper
  melanoma vs. prostate,colorectal,ovary, pancreas_gallbladder,upper_gi,cervical,breast,uterine, head_and_neck,bladder_and_urothelial,multiple_myeloma,lung, anorectal,non_cancer,thyroid

SEQ ID NO: 469255 - DNA, 38 bp, Homo sapiens
  chr5:139525386-139525424
  hyper
cgtctctccccatgccttcaaaggcggcctgccttccc

SEQ ID NO: 469256 - DNA, 135 bp, Homo sapiens
  chr5:139525814-139525949
  hyper
ccaggggttcacccagctcccctccctcccctccgctgccctcctggcagctccagctctgctctcgcggctttccaggttttggggtgggtgattgagtaggccgcacctgggacactgtgactggaggacgcc

SEQ ID NO: 469257 - DNA, 193 bp, Homo sapiens
  chr5:140011830-140012023
  hyper
  melanoma vs. anorectal,pancreas_gallbladder,breast, uterine,bladder_and_urothelial,myeloid_neoplasm,thyroid,sarcoma, cervical,non_cancer,prostate,renal,head_and_neck,ovary,upper_gi, lung
cgccgccagtgcggcgcacacgcctgtgggcgtctccattcctgtgttgcgcagcgctagattctggatggccgggaacttgtggggacagagagccgccatcagtccgcgttcgcccagtccaggattgtcagacaggtctaggctggtaagggccgggaaggcgcgaacctgttcgcaggaaaaggcaggc

SEQ ID NO: 469258 - DNA, 27 bp, Homo sapiens
  chr5:140012125-140012152
  hyper
  melanoma vs. anorectal,pancreas_gallbladder,breast, uterine,bladder_and_urothelial,myeloid_neoplasm,thyroid,sarcoma, cervical,non_cancer,prostate,renal,head_and_neck,ovary,upper_gi, lung
cgcaagctggaaagtgcaagtcctgtg

SEQ ID NO: 469259 - DNA, 111 bp, Homo sapiens; identical to SEQ ID NO: 350182
  chr5:140012520-140012631
  hyper
  melanoma vs. anorectal,pancreas_gallbladder,breast, uterine,bladder_and_urothelial,myeloid_neoplasm,thyroid,sarcoma, cervical,non_cancer,prostate,renal,head_and_neck,ovary,upper_gi, lung

SEQ ID NO: 469260 - DNA, 102 bp, Homo sapiens
  chr5:149682691-149682793
  hyper
  melanoma vs. bladder_and_urothelial,uterine
agcctctctgagtgccagccctggaaggaaagcccatcatttcctagtccaaccgggtcattctacagatggagaaactgaggcccggagatgagcctcaac

SEQ ID NO: 469261 - DNA, 1 bp, Homo sapiens
  chr5:149682867-149682868
  hyper
  melanoma vs. bladder_and_urothelial,uterine
c

SEQ ID NO: 469262 - DNA, 434 bp, Homo sapiens; identical to SEQ ID NO: 332544
  chr5:150004280-150004714
  hyper
  melanoma vs. liver_bileduct,upper_gi, bladder_and_urothelial,prostate,breast,cervical,uterine, head_and_neck,pancreas_gallbladder,colorectal,lung,renal, anorectal,ovary,non_cancer,thyroid,lymphoid_neoplasm,
  CONT. FROM ABOVE: multiple_myeloma,sarcoma

SEQ ID NO: 469263 - DNA, 495 bp, Homo sapiens
  chr5:150603058-150603553
  hyper
  melanoma vs. sarcoma
cgagtctgtggaacactcttcgagcagccctgagattatcagcctttaacccccggggggaggaagccgaaggcccagagaggtcaagtcacttgtccatggccacacagcgaacagccccagaccgaaagcagagggcacctgccacagacacacgacatctccccacccgaggcagcgggaatcagctgcctttccctggcccgggtgccgtgtttgtaaactcggctgcttggtgcggctcgggccggggtaaagggcgcctcccagcagagcctccctcgtctctgagctggcctctccaggttctccgtccggtatcccgggccgaccagagagagcccggggcgccgagtcctctgcggcggagcgattccgcactcccctctcctctgaaagcaaacttctccgccggcgccctttacctttttcgggggtttgcagctgctcagcctgctgtgtctgcagcccatcctcctccgggggctcccggac

SEQ ID NO: 469264 - DNA, 163 bp, Homo sapiens; identical to SEQ ID NO: 358285
  chr5:150603589-150603752
  hyper
  melanoma vs. sarcoma

SEQ ID NO: 469265 - DNA, 66 bp, Homo sapiens; identical to SEQ ID NO: 358340
  chr5:179244342-179244408
  hyper
  melanoma vs. thyroid,myeloid_neoplasm,non_cancer

SEQ ID NO: 469266 - DNA, 394 bp, Homo sapiens
  chr6:710660-711054
  hyper
  melanoma vs. lymphoid_neoplasm,bladder_and_urothelial, multiple_myeloma,cervical,anorectal,head_and_neck,colorectal, uterine,myeloid_neoplasm,thyroid,non_cancer,renal,ovary, upper_gi,sarcoma,breast
cgtgctgacggggactggcttttcttcttcttcttgtagtttgaaatggaaacgctgcactgctgagaaaataccacggaaatagaacccactgcattccaggaaaataaataagcaaggccacccaaattttcaatgagtgctcctgcagaatgcaggaaatggcaggagatccgtccgaggcaccccaggccgggtcgtgggtagagagcagggacgagggctgggaggggacgcaggcacagggtgagggtggcccgtctccagggagaactgcgcgctcacaggcggggccggcttcccgcatcagcccggccgggctgcaggttctgagcgagggggcggccgtgcctcactctgggcgggacgcggcctggtgcagggacgctcactt

SEQ ID NO: 469267 - DNA, 141 bp, Homo sapiens; identical to SEQ ID NO: 346769
  chr6:711310-711451
  hyper
  melanoma vs. lymphoid_neoplasm,bladder_and_urothelial, multiple_myeloma,cervical,anorectal,head_and_neck,colorectal, uterine,myeloid_neoplasm,thyroid,non_cancer,renal,ovary, upper_gi,sarcoma,breast

SEQ ID NO: 469268 - DNA, 274 bp, Homo sapiens; identical to SEQ ID NO: 350244
  chr6:1311068-1311342
  hyper
  melanoma vs. liver_bileduct,colorectal,head_and_neck, renal,upper_gi,cervical,breast,anorectal,lung,myeloid_neoplasm, ovary,uterine,prostate,pancreas_gallbladder

SEQ ID NO: 469269 - DNA, 428 bp, Homo sapiens; identical to SEQ ID NO: 467523
  chr6:1311344-1311772
  hyper
  melanoma vs. liver_bileduct,colorectal,head_and_neck, renal,upper_gi,cervical,breast,anorectal,lung,myeloid_neoplasm, ovary,uterine,prostate,pancreas_gallbladder

SEQ ID NO: 469270 - DNA, 377 bp, Homo sapiens; identical to SEQ ID NO: 467524
  chr6:1311395-1311772
  hyper
  melanoma vs. upper_gi,renal,colorectal,liver_bileduct, myeloid_neoplasm,lung,breast,bladder_and_urothelial,uterine, prostate,ovary,pancreas_gallbladder

SEQ ID NO: 469271 - DNA, 3 bp, Homo sapiens
  chr6:1311998-1312001
  hyper
  melanoma vs. upper_gi,renal,colorectal,liver_bileduct, myeloid_neoplasm,lung,breast,bladder_and_urothelial,uterine, prostate,ovary,pancreas_gallbladder
cac

SEQ ID NO: 469272 - DNA, 224 bp, Homo sapiens; identical to SEQ ID NO: 467526
  chr6:1312096-1312320
  hyper
  melanoma vs. upper_gi,renal,colorectal,liver_bileduct, myeloid_neoplasm,lung,breast,bladder_and_urothelial,uterine, prostate,ovary,pancreas_gallbladder

SEQ ID NO: 469273 - DNA, 15 bp, Homo sapiens
  chr6:1312342-1312357
  hyper
  melanoma vs. upper_gi,renal,colorectal,liver_bileduct, myeloid_neoplasm,lung,breast,bladder_and_urothelial,uterine, prostate,ovary,pancreas_gallbladder
cgcggcaggccagcg

SEQ ID NO: 469274 - DNA, 3 bp, Homo sapiens
  chr6:1311998-1312001
  hyper
  melanoma vs. upper_gi
cac

SEQ ID NO: 469275 - DNA, 224 bp, Homo sapiens; identical to SEQ ID NO: 467526
  chr6:1312096-1312320
  hyper
  melanoma vs. upper_gi

SEQ ID NO: 469276 - DNA, 15 bp, Homo sapiens
  chr6:1312342-1312357
  hyper
  melanoma vs. upper_gi
cgcggcaggccagcg

SEQ ID NO: 469277 - DNA, 47 bp, Homo sapiens; identical to SEQ ID NO: 467531
  chr6:1312708-1312755
  hyper
  melanoma vs. upper_gi

SEQ ID NO: 469278 - DNA, 109 bp, Homo sapiens; identical to SEQ ID NO: 467532
  chr6:1312784-1312893
  hyper
  melanoma vs. upper_gi

SEQ ID NO: 469279 - DNA, 18 bp, Homo sapiens
  chr6:2903030-2903048
  hyper
  melanoma vs. pancreas_gallbladder,multiple_myeloma, colorectal,uterine
cgtgagccactgcgcccg

SEQ ID NO: 469280 - DNA, 156 bp, Homo sapiens; identical to SEQ ID NO: 200240
  chr6:2903557-2903713
  hyper
  melanoma vs. pancreas_gallbladder,multiple_myeloma, colorectal,uterine

SEQ ID NO: 469281 - DNA, 12 bp, Homo sapiens
  chr6:3229296-3229308
  hyper
  melanoma vs. ovary,cervical,upper_gi
cgtgcgtttgag

SEQ ID NO: 469282 - DNA, 559 bp, Homo sapiens; identical to SEQ ID NO: 358374
  chr6:3229632-3230191
  hyper
  melanoma vs. ovary,cervical,upper_gi

SEQ ID NO: 469283 - DNA, 95 bp, Homo sapiens; identical to SEQ ID NO: 200248
  chr6:4775543-4775638
  hyper
  melanoma vs. myeloid_neoplasm,ovary,uterine, head_and_neck,non_cancer,lung,thyroid,renal,multiple_myeloma, upper_gi,prostate,pancreas_gallbladder

SEQ ID NO: 469284 - DNA, 305 bp, Homo sapiens; identical to SEQ ID NO: 458177
  chr6:4775640-4775945
  hyper
  melanoma vs. myeloid_neoplasm,ovary,uterine, head_and_neck,non_cancer,lung,thyroid,renal,multiple_myeloma, upper_gi,prostate,pancreas_gallbladder

SEQ ID NO: 469285 - DNA, 95 bp, Homo sapiens; identical to SEQ ID NO: 200248
  chr6:4775543-4775638
  hyper
  melanoma vs. multiple_myeloma,pancreas_gallbladder,lung, ovary,head_and_neck,uterine,myeloid_neoplasm,thyroid,breast

SEQ ID NO: 469286 - DNA, 358 bp, Homo sapiens
  chr6:4775640-4775998
  hyper
  melanoma vs. multiple_myeloma,pancreas_gallbladder,lung, ovary,head_and_neck,uterine,myeloid_neoplasm,thyroid,breast
gggccagccctcgctgttctgagcgagggcctgtcgtgtagtccacaccgttccgcgaaaggaaccaccattgacagcctcgttcgattagaacccggacctccctggaatccagactcggtcccttcccagctgcgcttcggaggaggcggacgctccgagaggaacccagaggcctggcgtggggggagctgcgggcagagcggaggcagccgcgccctcgcgccgccctccgccgcgcccggctcccgccccccggatcccacccccggcctgccgcggagccagcgtgccagccggagctcgccgggccaccccgcggggcgcgcggcccgggctccgggtcttggcggcggcc

SEQ ID NO: 469287 - DNA, 76 bp, Homo sapiens; identical to SEQ ID NO: 358382
  chr6:4776187-4776263
  hyper
  melanoma vs. multiple_myeloma,pancreas_gallbladder,lung, ovary,head_and_neck,uterine,myeloid_neoplasm,thyroid,breast

SEQ ID NO: 469288 - DNA, 230 bp, Homo sapiens; identical to SEQ ID NO: 456063
  chr6:5084683-5084913
  hyper
  melanoma vs. sarcoma

SEQ ID NO: 469289 - DNA, 665 bp, Homo sapiens; identical to SEQ ID NO: 346775
  chr6:5084942-5085607
  hyper
  melanoma vs. sarcoma

SEQ ID NO: 469290 - DNA, 564 bp, Homo sapiens
  chr6:7542700-7543264
  hyper
  melanoma vs. lung,breast
cgtaatcaaagtaaaagaggaaaggagcggggccccggtcctgtctggtggccgagtggtgctcggggctccgcagtctctaccggctcacccccaatccccagtaaccccgagaccacgactgcaacgactcctggactcctcggccacccaaggacgtttgtatcaaggctgcgcgtcccggcggcgcggggtcctgtcccgaggaggcgcttcggcttcccctgtccgggaaacgaaacttccccgccggggcggctgccgggcccgggtctcgaagttcggccgggacgtgcctgttaccttcggtcgtccgcgccgcagcccccgcgggcgagcgcacctggggccctgcctctgagccttttgtttcctcctttttaaaaacaccggatgaaagaccccagtgtgccttggatcgcagagcgccggccgcatgtctgctttgatccagaatgtgtgggcaggggagtgggggggtgggagaggacgacgctgggggcccgccctggcctaggcgccccgggaagaccccccggtgagagggtcagcttctccggatcc

SEQ ID NO: 469291 - DNA, 107 bp, Homo sapiens; identical to SEQ ID NO: 371040
  chr6:7543350-7543457
  hyper
  melanoma vs. lung,breast

SEQ ID NO: 469292 - DNA, 2 bp, Homo sapiens
  chr6:10417835-10417837
  hyper
  melanoma vs. breast
cg

SEQ ID NO: 469293 - DNA, 227 bp, Homo sapiens; identical to SEQ ID NO: 345207
  chr6:10417842-10418069
  hyper
  melanoma vs. breast

SEQ ID NO: 469294 - DNA, 138 bp, Homo sapiens; identical to SEQ ID NO: 461191
  chr6:10418940-10419078
  hyper
  melanoma vs. breast,anorectal,cervical,myeloid_neoplasm, thyroid,non_cancer,sarcoma,renal

SEQ ID NO: 469295 - DNA, 94 bp, Homo sapiens; identical to SEQ ID NO: 350278
  chr6:10420268-10420362
  hyper
  melanoma vs. breast,thyroid,myeloid_neoplasm, bladder_and_urothelial,prostate,non_cancer,cervical,renal

SEQ ID NO: 469296 - DNA, 24 bp, Homo sapiens
  chr6:10420695-10420719
  hyper
  melanoma vs. breast
cgctgcttctaattagaggggagc

SEQ ID NO: 469297 - DNA, 447 bp, Homo sapiens; identical to SEQ ID NO: 467550
  chr6:17101827-17102274
  hyper
  melanoma vs. breast

SEQ ID NO: 469298 - DNA, 192 bp, Homo sapiens; identical to SEQ ID NO: 358412
  chr6:17102346-17102538
  hyper
  melanoma vs. breast

SEQ ID NO: 469299 - DNA, 432 bp, Homo sapiens; identical to SEQ ID NO: 467562
  chr6:21665191-21665623
  hyper
  melanoma vs. cervical,ovary,anorectal,multiple_myeloma, renal,head_and_neck,uterine,breast,bladder_and_urothelial, non_cancer,lung

SEQ ID NO: 469300 - DNA, 80 bp, Homo sapiens
  chr6:21665543-21665623
  hyper
  melanoma vs. ovary,anorectal,multiple_myeloma,cervical, uterine,renal,head_and_neck,bladder_and_urothelial,breast, non_cancer,lung,colorectal
cgaagttgggatcagggtcgaggggtgggggaccatgtggatggggtcccaattctggaggttgagaatgactggaaggg

SEQ ID NO: 469301 - DNA, 269 bp, Homo sapiens
  chr6:21666189-21666458
  hyper
  melanoma vs. ovary,anorectal,multiple_myeloma,cervical, uterine,renal,head_and_neck,bladder_and_urothelial,breast, non_cancer,lung,colorectal
gggtgaatccgagaggaggaaggaggatgaagagcctagcctgcgccccacctctgattgtgtaagcgcctttatctagggttgaccccctaccctttgcattttgtctcttgggatgacgaaaaatggacagaaactcgacgcccaagtgaatgtttcacattgattggcagggaaagtgcaaacaaagaggtgcatctccgggaaacaatgattttggagatcccctgcccaccaccccagacttgtgcgcggtgcggagggggcca

SEQ ID NO: 469302 - DNA, 269 bp, Homo sapiens; identical to SEQ ID NO: 469301
  chr6:21666189-21666458
  hyper
  melanoma vs. ovary,bladder_and_urothelial,head_and_neck, multiple_myeloma,anorectal,non_cancer,renal,lung,sarcoma, thyroid,colorectal,breast,uterine,liver_bileduct,cervical, upper_gi,prostate,pancreas_gallbladder

SEQ ID NO: 469303 - DNA, 351 bp, Homo sapiens; identical to SEQ ID NO: 200313
  chr6:21666588-21666939
  hyper
  melanoma vs. ovary,bladder_and_urothelial,head_and_neck, multiple_myeloma,anorectal,non_cancer,renal,lung,sarcoma, thyroid,colorectal,breast,uterine,liver_bileduct,cervical, upper_gi,prostate,pancreas_gallbladder

SEQ ID NO: 469304 - DNA, 172 bp, Homo sapiens
  chr6:26215876-26216048
  hyper
  melanoma vs. prostate
cgtattcacatgttcctgcagtctctagcccgagagtttaagctatcctaccacctcagcctaccgagtaaatgatagtacagacgcaagccgtcacacctggttagcttcatttttttgcagagacgagttctatgttgcccaggcaaatctgttaactcctgagctgaag

SEQ ID NO: 469305 - DNA, 11 bp, Homo sapiens
  chr6:26216380-26216391
  hyper
  melanoma vs. cervical
cggaaaaatta

SEQ ID NO: 469306 - DNA, 6 bp, Homo sapiens
  chr6:26216805-26216811
  hyper
  melanoma vs. uterine,upper_gi,lymphoid_neoplasm, head_and_neck,cervical,prostate,non_cancer,thyroid, myeloid_neoplasm,colorectal
cgcctt

SEQ ID NO: 469307 - DNA, 224 bp, Homo sapiens; identical to SEQ ID NO: 453355
  chr6:26216853-26217077
  hyper
  melanoma vs. uterine,upper_gi,lymphoid_neoplasm, head_and_neck,cervical,prostate,non_cancer,thyroid, myeloid_neoplasm,colorectal

SEQ ID NO: 469308 - DNA, 210 bp, Homo sapiens; identical to SEQ ID NO: 453356
  chr6:26217156-26217366
  hyper
  melanoma vs. uterine,upper_gi,lymphoid_neoplasm, head_and_neck,cervical,prostate,non_cancer,thyroid, myeloid_neoplasm,colorectal

SEQ ID NO: 469309 - DNA, 210 bp, Homo sapiens; identical to SEQ ID NO: 453356
  chr6:26217156-26217366
  hyper
  melanoma vs. cervical,uterine,head_and_neck,prostate, colorectal,upper_gi,lymphoid_neoplasm,non_cancer,liver_bileduct

SEQ ID NO: 469310 - DNA, 312 bp, Homo sapiens; identical to SEQ ID NO: 345216
  chr6:26217578-26217890
  hyper
  melanoma vs. cervical,uterine,head_and_neck,prostate, colorectal,upper_gi,lymphoid_neoplasm,non_cancer,liver_bileduct

SEQ ID NO: 469311 - DNA, 115 bp, Homo sapiens; identical to SEQ ID NO: 456068
  chr6:26233864-26233979
  hyper
  melanoma vs. sarcoma,lymphoid_neoplasm,cervical, multiple_myeloma

SEQ ID NO: 469312 - DNA, 130 bp, Homo sapiens; identical to SEQ ID NO: 454440
  chr6:26271217-26271347
  hyper
  melanoma vs. anorectal,thyroid,myeloid_neoplasm, non_cancer,lymphoid_neoplasm

SEQ ID NO: 469313 - DNA, 327 bp, Homo sapiens; identical to SEQ ID NO: 454441
  chr6:26272105-26272432
  hyper
  melanoma vs. anorectal,thyroid,myeloid_neoplasm, non_cancer

SEQ ID NO: 469314 - DNA, 71 bp, Homo sapiens; identical to SEQ ID NO: 453362
  chr6:26331633-26331704
  hyper
  melanoma vs. uterine,non_cancer,myeloid_neoplasm,thyroid, lymphoid_neoplasm,colorectal,breast,upper_gi, bladder_and_urothelial,multiple_myeloma,prostate,renal

SEQ ID NO: 469315 - DNA, 324 bp, Homo sapiens; identical to SEQ ID NO: 453363
  chr6:26331811-26332135
  hyper
  melanoma vs. uterine,non_cancer,myeloid_neoplasm,thyroid, lymphoid_neoplasm,colorectal,breast,upper_gi, bladder_and_urothelial,multiple_myeloma,prostate,renal

SEQ ID NO: 469316 - DNA, 243 bp, Homo sapiens; identical to SEQ ID NO: 345222
  chr6:26332283-26332526
  hyper
  melanoma vs. uterine,non_cancer,myeloid_neoplasm,thyroid, lymphoid_neoplasm,colorectal,breast,upper_gi, bladder_and_urothelial,multiple_myeloma,prostate,renal

SEQ ID NO: 469317 - DNA, 139 bp, Homo sapiens; identical to SEQ ID NO: 350326
  chr6:27125333-27125472
  hyper
  melanoma vs. lung,cervical,pancreas_gallbladder,breast, head_and_neck,upper_gi,colorectal

SEQ ID NO: 469318 - DNA, 83 bp, Homo sapiens
  chr6:27125474-27125557
  hyper
  melanoma vs. lung,cervical,pancreas_gallbladder,breast, head_and_neck,upper_gi,colorectal
gatgccagattccatgccaagcccccgaagattctgactagtttggcaaaaaatgggatctggcaggtccacttcaaagcagc

SEQ ID NO: 469319 - DNA, 217 bp, Homo sapiens; identical to SEQ ID NO: 332718
  chr6:27125812-27126029
  hyper
  melanoma vs. lung

SEQ ID NO: 469320 - DNA, 361 bp, Homo sapiens
  chr6:27218591-27218952
  hyper
  melanoma vs. lung
cgactcctccgggtgggctggggggagggaactcggactccagggccccagtctcagataataggaataccctcccaccacgcccctaccttcctcccgcgcccaaagaattttgcacaagctgtcctcacaagagcccgagattacacagcgagtaagtgacacagaggcagaaagatatgcgattccaacccctcagcccgcaggctgacggcgtctcctcccttagttcccccatctcattttcgcgtcggtcgcctcctccgccccggtgcgggccgtgctggatttctccgagtataatgacgtaaggatggcgggcagcaggtgcgggacggggaggggtcccagcgggcggagt

SEQ ID NO: 469321 - DNA, 447 bp, Homo sapiens; identical to SEQ ID NO: 358461
  chr6:27218980-27219427
  hyper
  melanoma vs. lung

SEQ ID NO: 469322 - DNA, 488 bp, Homo sapiens
  chr6:27840617-27841105
  hyper
  melanoma vs. anorectal,sarcoma
ttgggcgttgcggaccacagtgtcatagttacacagccctcgcattggtagcggtaaagtaatcgatacaagataaatgagaccggctgtttcattatgacttttgcaaaaaccagagaggcgttatagatttggccgtgtatcagagaagccggcacttttaaccactaagtaatgctgaaaggggcaccgaacctcaaacttcagcgactgcttatgtggaatcgctaatttgccaaaactgccatacgtttaagtgttcttaagaaattaactatctttagtctacagctctttcacagacttcatgggtggccctgagaagggcctttgaggaaccgtgtaagtaagtaaaacactcagccgccaaagccatacagggtgcggccctggcgcttgagcgcgtaaaccacgtccatggctgtgactgtcttgcgtttggcgtgctccgtgtaggtaactgcatcgcggattacattctccaaaaa

SEQ ID NO: 469323 - DNA, 139 bp, Homo sapiens; identical to SEQ ID NO: 358482
  chr6:27841257-27841396
  hyper
  melanoma vs. anorectal,sarcoma

SEQ ID NO: 469324 - DNA, 2 bp, Homo sapiens
  chr6:27858278-27858280
  hyper
  melanoma vs. lymphoid_neoplasm
cg

SEQ ID NO: 469325 - DNA, 51 bp, Homo sapiens; identical to SEQ ID NO: 454452
  chr6:27858740-27858791
  hyper
  melanoma vs. lymphoid_neoplasm

SEQ ID NO: 469326 - DNA, 31 bp, Homo sapiens
  chr6:34433449-34433480
  hyper
cgcaccaagggacgccgaggctcgggagagg

SEQ ID NO: 469327 - DNA, 464 bp, Homo sapiens
  chr6:36098070-36098534
  hyper
  melanoma vs. head_and_neck,lung,lymphoid_neoplasm, bladder_and_urothelial,pancreas_gallbladder,ovary,upper_gi, breast,colorectal,uterine,multiple_myeloma,prostate,cervical, non_cancer,anorectal,renal,liver_bileduct,thyroid,
  CONT. FROM ABOVE: myeloid_neoplasm,sarcoma
cggggtcccgctgggcagccccgaccccgtgcctgggccgcacctgccgcagtggctccgtcgggccgggcggaagcgcgggagcgcagggctggacaggcccgggcgtggcggccccggcgcacctgggcgagccggcaggtgggagcgtagcagcccggggcccccgccctcgcgcgggggaggagcgggcggcgcggggcgggcgcagcgggggtcggggcgctgggagcccgttgggccgcgaacgcagccgccacgctggggccgccgagatcgggtgcccgggatgagcctcatccggaaaaagggcttctacaagcaggacgtcaacaagacagcctgggagctgcccaagacctacgtgtccccgacgcacgtcggcagcggggcctatggctccgtgtggtgagacccctgggccgctggggggcggggggcgggcgccaggctctcccctttcc

SEQ ID NO: 469328 - DNA, 578 bp, Homo sapiens
  chr6:36354750-36355328
  hyper
  melanoma vs. liver_bileduct
cgccagccacggagctgctgaggatcagactcctgggtttcagcatggaggccagggaagggtctgataatgggtatgggtcctggcgagaggggagtggagaaaggccttggagtgggacggggcgccagctctgggggcagtctcgaggcacctagaaaaccggcgagtggggagaggctgctaaagaggggctccctgcgagaatgcgttcaccagctgtgaggacctggctggcgcacgaacttccaaagacctcacatctggttggtgtaggggcgaccagtggtaagggggctgcggaaagggcccgcaggggctgtgcgtgatgccttcagagctgtgtatgacaccgagagagtcaggggcggtgacccgcgtctggaggtggaaggggaagtgagtgagggatggatgtgaggtttaggaatgtgttggaaagagagattcccgccaggtaaaaggtctgataaaataggtttggaaatctaggtggtgaggaaaggatgcgggagcaggtggctctgcgtgcgcgctgcgtgttcagccgccaggctcttacctgcattacaggtgga

SEQ ID NO: 469329 - DNA, 150 bp, Homo sapiens
  chr6:36355357-36355507
  hyper
  melanoma vs. liver_bileduct
agcgctcccctggctgtggctgctggggccctaggcccgcgccccgcagtcctcctccgccaaacccctaacctggctccgagaactggaaggtcgcgtgggaggaaatctctttcgagaagcgccaaggcgtgtgcgcccgggtcctcc

SEQ ID NO: 469330 - DNA, 299 bp, Homo sapiens
  chr6:36355029-36355328
  hyper
  melanoma vs. liver_bileduct,colorectal
cgaccagtggtaagggggctgcggaaagggcccgcaggggctgtgcgtgatgccttcagagctgtgtatgacaccgagagagtcaggggcggtgacccgcgtctggaggtggaaggggaagtgagtgagggatggatgtgaggtttaggaatgtgttggaaagagagattcccgccaggtaaaaggtctgataaaataggtttggaaatctaggtggtgaggaaaggatgcgggagcaggtggctctgcgtgcgcgctgcgtgttcagccgccaggctcttacctgcattacaggtgga

SEQ ID NO: 469331 - DNA, 407 bp, Homo sapiens; identical to SEQ ID NO: 350350
  chr6:36355357-36355764
  hyper
  melanoma vs. liver_bileduct,colorectal

SEQ ID NO: 469332 - DNA, 81 bp, Homo sapiens
  chr6:36807979-36808060
  hyper
  melanoma vs. cervical
cgcgcgcatcttcatttgcgcccgccccctctcaccacccctatctcccatcaggggtctccatcctgggggagggggagg

SEQ ID NO: 469333 - DNA, 2 bp, Homo sapiens
  chr6:36808554-36808556
  hyper
  melanoma vs. cervical
gc

SEQ ID NO: 469334 - DNA, 370 bp, Homo sapiens
  chr6:37666475-37666845
  hyper
  melanoma vs. bladder_and_urothelial,ovary,lung,breast, prostate,upper_gi,cervical,multiple_myeloma,head_and_neck, pancreas_gallbladder,anorectal,non_cancer,uterine,thyroid,renal, lymphoid_neoplasm,colorectal
cgcgcgagacgggccgcggctgtgggtctgcaaggctgtctgcccggctcgagaggcccccgcccctttccaggcgtctggtgctggggccgggccggagcagctggcggagaggtcgcgctgagagctcctgcccttgccgcggcccacaggttgccaacaggtttgctcgcacgacccctccgccagagcttccctaagtcaccccacattttcctcggctagccactcttcccatcttgcctcccctcgggacctcaggcgcccccaagcgccccgggggcacacctccttccggctgccgaacccgagccccgctccagcggcgggagtccggcactcgggtctcagccgcctcgaaggggccctc

SEQ ID NO: 469335 - DNA, 218 bp, Homo sapiens; identical to SEQ ID NO: 345233
  chr6:37666866-37667084
  hyper
  melanoma vs. bladder_and_urothelial,ovary,lung,breast, prostate,upper_gi,cervical,multiple_myeloma,head_and_neck, pancreas_gallbladder,anorectal,non_cancer,uterine,thyroid,renal, lymphoid_neoplasm,colorectal

SEQ ID NO: 469336 - DNA, 309 bp, Homo sapiens
  chr6:42109904-42110213
  hyper
  melanoma vs. lung,head_and_neck,breast,upper_gi, pancreas_gallbladder,colorectal,bladder_and_urothelial,ovary, prostate,cervical
cggcggctgctctcggccagtccgcaggttccaacgtgtccctcccctccgcgcctccaggagacagcaccgccggccctgccccagcgccctccgtccccgccccagcgccctccgtccccggagtactcaccgaagcccccggtcccctcctccggggcctcctgggtgaagatccagggcggattggtggcgtagagggaggtgctgggggtcgtggtgtgcttcttcccgaagagtttgctgaaggtgccctgcaccgtctgcttctttttcatgctgccgcagcccgcgcgggcgccagggaag

SEQ ID NO: 469337 - DNA, 324 bp, Homo sapiens; identical to SEQ ID NO: 350358
  chr6:42110273-42110597
  hyper
  melanoma vs. lung,head_and_neck,breast,upper_gi, pancreas_gallbladder,colorectal,bladder_and_urothelial,ovary, prostate,cervical

SEQ ID NO: 469338 - DNA, 254 bp, Homo sapiens
  chr6:45387325-45387579
  hyper
  melanoma vs. myeloid_neoplasm,liver_bileduct,renal, prostate,cervical,bladder_and_urothelial,breast,uterine, upper_gi,head_and_neck
cgaaagcctggcttcccttcccggatcggccgcctgtgggactcgagagacctgtgcacgcaggggacgcggcggtgcccggggttagagctctcccctgtgaccgaaaagataattaaaaatcgcacgcgcaggagccagctcagctcctggctgcgcttccagttggtccggtctggctaaatgggttctcgcaccctggcggcgcccgggctgggaggccagtaggccgggcgcgaagagtaggttgggga

SEQ ID NO: 469339 - DNA, 262 bp, Homo sapiens
  chr6:45388098-45388360
  hyper
  melanoma vs. myeloid_neoplasm,cervical,uterine,anorectal, renal,breast,prostate,multiple_myeloma,bladder_and_urothelial, non_cancer,upper_gi,colorectal,thyroid
tgggagcaaagctctaaaaccagacagggagggtcgtggcaggtcgctacgagggtgagggaggcgtttgcactgagcaataaaaacacccagtaatgggtatgtgaattgctttaaataagatgggagggcgtgagagatgacccaaccatctttcttccttgatgcttcgagggggaggcattctaattcttcatttattttataaaatcacttgttactgtgtcagctactccactaggaatctttgaaactttggcaa

SEQ ID NO: 469340 - DNA, 186 bp, Homo sapiens; identical to SEQ ID NO: 350371
  chr6:45388397-45388583
  hyper
  melanoma vs. myeloid_neoplasm,cervical,uterine,anorectal, renal,breast,prostate,multiple_myeloma,bladder_and_urothelial, non_cancer,upper_gi,colorectal,thyroid

SEQ ID NO: 469341 - DNA, 262 bp, Homo sapiens; identical to SEQ ID NO: 469339
  chr6:45388098-45388360
  hyper
  melanoma vs. cervical

SEQ ID NO: 469342 - DNA, 320 bp, Homo sapiens
  chr6:45388397-45388717
  hyper
  melanoma vs. cervical
gaaggctttaaagagtttggtaataagcaagaaacgtagtagtacacaacgccgagggtaaaacggccctgtgcccccttcttggggtgtaatagcctcaagcggatttcccggcttctgcgggcgcagcacattgttttatttgttttgaaggctcagagtttgaggctggtcgtagacacccacgtgctctgactctcatcagcgtaatgatcgacttagccagagtcgtgtctatataaaccacaaaaacctaatcattagaaatcccagcctccaaaaaccacattttaggtaaaaagtgccgctttttttccgcg

SEQ ID NO: 469343 - DNA, 18 bp, Homo sapiens
  chr6:45388775-45388793
  hyper
  melanoma vs. cervical
cactaggaaataaataca

SEQ ID NO: 469344 - DNA, 11 bp, Homo sapiens
  chr6:45388847-45388858
  hyper
  melanoma vs. cervical
tccccgtgagc

SEQ ID NO: 469345 - DNA, 373 bp, Homo sapiens; identical to SEQ ID NO: 453380
  chr6:46097250-46097623
  hyper
  melanoma vs. lymphoid_neoplasm,renal,ovary,prostate, uterine,pancreas_gallbladder,breast,colorectal,thyroid, liver_bileduct,non_cancer,lung

SEQ ID NO: 469346 - DNA, 521 bp, Homo sapiens; identical to SEQ ID NO: 345237
  chr6:46097694-46098215
  hyper
  melanoma vs. lymphoid_neoplasm,renal,ovary,prostate, uterine,pancreas_gallbladder,breast,colorectal,thyroid, liver_bileduct,non_cancer,lung

SEQ ID NO: 469347 - DNA, 249 bp, Homo sapiens; identical to SEQ ID NO: 456079
  chr6:56818408-56818657
  hyper
  melanoma vs. renal,thyroid,anorectal,non_cancer

SEQ ID NO: 469348 - DNA, 164 bp, Homo sapiens; identical to SEQ ID NO: 456082
  chr6:73329621-73329785
  hyper
  melanoma vs. lymphoid_neoplasm,multiple_myeloma

SEQ ID NO: 469349 - DNA, 82 bp, Homo sapiens; identical to SEQ ID NO: 346833
  chr6:73330126-73330208
  hyper
  melanoma vs. lymphoid_neoplasm,multiple_myeloma

SEQ ID NO: 469350 - DNA, 43 bp, Homo sapiens
  chr6:87861506-87861549
  hyper
  melanoma vs. sarcoma
cgaaatcaggcagcagtgcccgcgccacggcctctgcaggaca

SEQ ID NO: 469351 - DNA, 102 bp, Homo sapiens
  chr6:99276279-99276381
  hyper
  melanoma vs. bladder_and_urothelial
cgaactgagctccgtgcctattcattattctctccctctgacctagggcgttaatatgatcaggcctatgactcggccgtgttctgttttcctattttgcat

SEQ ID NO: 469352 - DNA, 275 bp, Homo sapiens
  chr6:99276430-99276705
  hyper
  melanoma vs. bladder_and_urothelial
aagacaagaggagccaggaggtctccctgctccaatctgcctaaggcttcctcttcctgcctcctcttccggccaacgtctgcccctatgttcccaggacccaaattctggaaacctgtctttaaaaatacaatcatctctaactttatgatgtccaaaagctgtctagaatgacagattcgaaactctgagacctagcagaagattttggcccacagttattacgactgtggttaactgctctccagaaaagcatctctcccgcccgtgcacca

SEQ ID NO: 469353 - DNA, 234 bp, Homo sapiens; identical to SEQ ID NO: 350433
  chr6:99276781-99277015
  hyper
  melanoma vs. bladder_and_urothelial

SEQ ID NO: 469354 - DNA, 169 bp, Homo sapiens
  chr6:100036494-100036663
  hyper
  melanoma vs. sarcoma,breast
cgactacactgcgcttcctttggagagagacactggagaactaaaaccgacccaagcgctaagcgatctgcctaatagagggaacgccagctgagaccagcgcaaggcgggcgctgggtggcgtgcgcgactgcaaagtctggcatgcccaggttctgctccttgggct

SEQ ID NO: 469355 - DNA, 228 bp, Homo sapiens
  chr6:100036732-100036960
  hyper
  melanoma vs. sarcoma,breast
ccctgaggatgcgccccaggcgttctgccctggctcccagccgcctcccggtgctccggggttcggcctcacacacctgtcgaccgcgtcggcccagctgcggcccaagcctgtgggactccggggagcgaggcgccccctgctccaggctgggaaccagaaatgcagcagggcctcaaaaagaaacaaaattctttccctcggggttgctgctgccgcacaacctta

SEQ ID NO: 469356 - DNA, 353 bp, Homo sapiens; identical to SEQ ID NO: 462978
  chr6:106533693-106534046
  hyper
  melanoma vs. head_and_neck,bladder_and_urothelial, colorectal,lymphoid_neoplasm,upper_gi,cervical,prostate,lung, uterine,renal,breast,multiple_myeloma,anorectal,ovary, pancreas_gallbladder

SEQ ID NO: 469357 - DNA, 388 bp, Homo sapiens; identical to SEQ ID NO: 346843
  chr6:106534075-106534463
  hyper
  melanoma vs. head_and_neck,bladder_and_urothelial, colorectal,lymphoid_neoplasm,upper_gi,cervical,prostate,lung, uterine,renal,breast,multiple_myeloma,anorectal,ovary, pancreas_gallbladder

SEQ ID NO: 469358 - DNA, 105 bp, Homo sapiens; identical to SEQ ID NO: 454463
  chr6:106958136-106958241
  hyper
  melanoma vs. breast,cervical,prostate

SEQ ID NO: 469359 - DNA, 404 bp, Homo sapiens; identical to SEQ ID NO: 345246
  chr6:106958337-106958741
  hyper
  melanoma vs. breast,cervical,prostate

SEQ ID NO: 469360 - DNA, 334 bp, Homo sapiens; identical to SEQ ID NO: 454465
  chr6:106959606-106959940
  hyper
  melanoma vs. pancreas_gallbladder,cervical, liver_bileduct,lymphoid_neoplasm,anorectal,head_and_neck, sarcoma,prostate,myeloid_neoplasm,non_cancer,renal,colorectal

SEQ ID NO: 469361 - DNA, 263 bp, Homo sapiens; identical to SEQ ID NO: 454466
  chr6:106960046-106960309
  hyper
  melanoma vs. pancreas_gallbladder,cervical, liver_bileduct,lymphoid_neoplasm,anorectal,head_and_neck, sarcoma,prostate,myeloid_neoplasm,non_cancer,renal,colorectal

SEQ ID NO: 469362 - DNA, 62 bp, Homo sapiens; identical to SEQ ID NO: 454467
  chr6:106959878-106959940
  hyper
  melanoma vs. lymphoid_neoplasm,cervical,anorectal, myeloid_neoplasm,prostate,non_cancer,thyroid, pancreas_gallbladder,renal,head_and_neck,colorectal,upper_gi, sarcoma,liver_bileduct

SEQ ID NO: 469363 - DNA, 263 bp, Homo sapiens; identical to SEQ ID NO: 454466
  chr6:106960046-106960309
  hyper
  melanoma vs. lymphoid_neoplasm,cervical,anorectal, myeloid_neoplasm,prostate,non_cancer,thyroid, pancreas_gallbladder,renal,head_and_neck,colorectal,upper_gi, sarcoma,liver_bileduct

SEQ ID NO: 469364 - DNA, 155 bp, Homo sapiens; identical to SEQ ID NO: 345249
  chr6:106961023-106961178
  hyper
  melanoma vs. lymphoid_neoplasm,myeloid_neoplasm,thyroid, prostate,renal,head_and_neck,non_cancer,pancreas_gallbladder, colorectal,cervical

SEQ ID NO: 469365 - DNA, 163 bp, Homo sapiens; identical to SEQ ID NO: 332893
  chr6:108455187-108455350
  hyper
  melanoma vs. liver_bileduct

SEQ ID NO: 469366 - DNA, 198 bp, Homo sapiens; identical to SEQ ID NO: 453394
  chr6:108478324-108478522
  hyper
  melanoma vs. cervical,ovary,prostate

SEQ ID NO: 469367 - DNA, 256 bp, Homo sapiens; identical to SEQ ID NO: 453395
  chr6:108478551-108478807
  hyper
  melanoma vs. cervical,ovary,prostate

SEQ ID NO: 469368 - DNA, 45 bp, Homo sapiens; identical to SEQ ID NO: 464733
  chr6:108484828-108484873
  hyper
  melanoma vs. thyroid,non_cancer,bladder_and_urothelial

SEQ ID NO: 469369 - DNA, 160 bp, Homo sapiens
  chr6:108496966-108497126
  hyper
  melanoma vs. pancreas_gallbladder
gagagagagccccttcctctgcggcgcaggaagccggagggagcgtccaacctgttgaacttgtgtattgacaagttgtcaagctcggcaggccgaagattgccctgaattaatttgtttgtttaaactgttggtggtaattgtcacatctcccctgcct

SEQ ID NO: 469370 - DNA, 737 bp, Homo sapiens; identical to SEQ ID NO: 332905
  chr6:114176491-114177228
  hyper
  melanoma vs. lymphoid_neoplasm,cervical

SEQ ID NO: 469371 - DNA, 72 bp, Homo sapiens; identical to SEQ ID NO: 332906
  chr6:116691827-116691899
  hyper
  melanoma vs. sarcoma,head_and_neck,cervical, lymphoid_neoplasm,bladder_and_urothelial,renal,anorectal, uterine,multiple_myeloma,pancreas_gallbladder,lung

SEQ ID NO: 469372 - DNA, 312 bp, Homo sapiens
  chr6:127442338-127442650
  hyper
  melanoma vs. bladder_and_urothelial
gggcccctgattctgaaggaagacacaggaaagaaagcttgtagtccttttgtgcccacctcccccagcgaggaccacggcgcaggaagctttccccgggcgctgcctcagggagctgtgggatgatgcacctctaggttgggccgagaggagtcaaaaggcaaactgcttttcgacctgccttaatcatctcaaggccaagtcaaaggagacctctgtttgtgttgaggggatgaaagaaggaatagtggaactgggttgcaattccaatttttctgtgggagtgggactgggagacagcacccacagcga

SEQ ID NO: 469373 - DNA, 37 bp, Homo sapiens; identical to SEQ ID NO: 371318
  chr6:127442699-127442736
  hyper
  melanoma vs. bladder_and_urothelial

SEQ ID NO: 469374 - DNA, 3 bp, Homo sapiens
  chr6:134638705-134638708
  hyper
  melanoma vs. sarcoma,head_and_neck,ovary,thyroid,uterine, non_cancer,prostate,bladder_and_urothelial,multiple_myeloma, lymphoid_neoplasm
cgg

SEQ ID NO: 469375 - DNA, 160 bp, Homo sapiens; identical to SEQ ID NO: 346856
  chr6:134639003-134639163
  hyper
  melanoma vs. sarcoma,head_and_neck,ovary,thyroid,uterine, non_cancer,prostate,bladder_and_urothelial,multiple_myeloma, lymphoid_neoplasm

SEQ ID NO: 469376 - DNA, 330 bp, Homo sapiens; identical to SEQ ID NO: 345251
  chr6:137112609-137112939
  hyper
  melanoma vs. lung,head_and_neck,pancreas_gallbladder, upper_gi,bladder_and_urothelial,ovary,breast,prostate,sarcoma, renal,cervical,uterine,colorectal,lymphoid_neoplasm, multiple_myeloma,anorectal,non_cancer,myeloid_neoplasm,thyroid

SEQ ID NO: 469377 - DNA, 60 bp, Homo sapiens
  chr6:137112941-137113001
  hyper
  melanoma vs. lung,head_and_neck,pancreas_gallbladder, upper_gi,bladder_and_urothelial,ovary,breast,prostate,sarcoma, renal,cervical,uterine,colorectal,lymphoid_neoplasm, multiple_myeloma,anorectal,non_cancer,myeloid_neoplasm,thyroid
ctcccgcaagctctgcagggcctcgctctcggccaccaccagttgcccttggctcgcttc

SEQ ID NO: 469378 - DNA, 259 bp, Homo sapiens; identical to SEQ ID NO: 332933
  chr6:137365631-137365890
  hyper
  melanoma vs. upper_gi,lung,breast,uterine,colorectal, head_and_neck,ovary,anorectal,pancreas_gallbladder

SEQ ID NO: 469379 - DNA, 499 bp, Homo sapiens; identical to SEQ ID NO: 332940
  chr6:138428812-138429311
  hyper
  melanoma vs. lung

SEQ ID NO: 469380 - DNA, 256 bp, Homo sapiens; identical to SEQ ID NO: 358661
  chr6:139694249-139694505
  hyper
  melanoma vs. liver_bileduct

SEQ ID NO: 469381 - DNA, 292 bp, Homo sapiens
  chr6:150246875-150247167
  hyper
  melanoma vs. bladder_and_urothelial
aagacccggaaggactcgccggtcgcggcaagggacaggcggttcctgagacaggaggagccaggaaatgcggggcctggtggggtgaggagcacggggttcctccttcatcctcgcggggactttgccaccggctcagtgtggaggcctcaccgtcccgcccggatccgtggggctccgacagtgtggcccctgcgaggaccccccccatcctcctcgccctggggctgctgcgggagggcgcccgggcagcactaggtcctgagtgtccagggtccggcaggggcttccc

SEQ ID NO: 469382 - DNA, 8 bp, Homo sapiens
  chr6:150247248-150247256
  hyper
  melanoma vs. bladder_and_urothelial
cgtgaggc

SEQ ID NO: 469383 - DNA, 87 bp, Homo sapiens
  chr6:150284581-150284668
  hyper
  melanoma vs. colorectal,anorectal,bladder_and_urothelial, myeloid_neoplasm,prostate,thyroid,non_cancer,breast,lung, head_and_neck,uterine,ovary
gctttctttcttttctttttttttttttccagaagtcataaagggatatagaatatactcaaagaccacctcatgcttttagtggag

SEQ ID NO: 469384 - DNA, 437 bp, Homo sapiens
  chr7:5458503-5458940
  hyper
  melanoma vs. breast,pancreas_gallbladder,upper_gi, colorectal,anorectal,prostate,ovary,uterine,cervical
cgggcttggctctgggcgttggcctggggtccgaggtctccttgcggctactcgaagtgggggagggggacagccagaaccagcaccggcccccacctttccctcccgggtgagcacggggttcaagggggcggcagctgtcctcctgctgtttcctccccgacctcagcctcggcgtgcagaagtcaggcagctcccagcgagcgcagaaggtgcgcagaggcagggctccgaggctacctcccgctgggcttccgaggctggtggcttggccttccctccacctcagcctcaccatccagcaaatgggcattaggccgtctgactgctgcgtcagattaggcgcggccctggcactgtgcatgcatgcatgagtagtagcttgttttcaccgcttcgcattagggcactttgccttgccaggccggagccagatc

SEQ ID NO: 469385 - DNA, 591 bp, Homo sapiens
  chr7:5466599-5467190
  hyper
  melanoma vs. liver_bileduct,pancreas_gallbladder
cgccctccccagtatggcgggccacattgaaatgtaaaaaccaggcctgggcgctgtggccatagggcacaggccataggccaccaggtccagccgccatcttccgcgccccacccccattccatcccctccccctccccaccccctcatacttttgtttacccagcgggataggtggccaaaaactgtggacgcaattgagtgaaagtgcgtgtgtgtgtgtgtgtgtgtgtgtgtgcgcgcgcgcgcgcgcgtgtctgtgtgtgtgtgtgtttgactgggtagaaaatcggctgggggctgggggggtcttccttgtagccctaagccgcagctgcgggagaagctgccctggctagccgaggcccggcccagcgtgcttctccgcggccagcctgggccaccggagccgaggccttccctgtgttcctaggccgctggctccggcctccgctccctggacgcctcccgactgacaaaattctccgtctttgttttaaaaccaaaggacaggccaaccttgagcccggccgtcacccctgtcgcgcttttgttggcgcaggctcggccccctacaccgggctggtgcag

SEQ ID NO: 469386 - DNA, 129 bp, Homo sapiens
  chr7:5467061-5467190
  hyper
  melanoma vs. head_and_neck,liver_bileduct,breast, pancreas_gallbladder,lung,colorectal,prostate,upper_gi, bladder_and_urothelial,anorectal,cervical,ovary
cgcctcccgactgacaaaattctccgtctttgttttaaaaccaaaggacaggccaaccttgagcccggccgtcacccctgtcgcgcttttgttggcgcaggctcggccccctacaccgggctggtgcag

SEQ ID NO: 469387 - DNA, 107 bp, Homo sapiens; identical to SEQ ID NO: 350509
  chr7:5467905-5468012
  hyper
  melanoma vs. head_and_neck,liver_bileduct,breast, pancreas_gallbladder,lung,colorectal,prostate,upper_gi, bladder_and_urothelial,anorectal,cervical,ovary

SEQ ID NO: 469388 - DNA, 147 bp, Homo sapiens; identical to SEQ ID NO: 358767
  chr7:20836997-20837144
  hyper
  melanoma vs. sarcoma

SEQ ID NO: 469389 - DNA, 141 bp, Homo sapiens; identical to SEQ ID NO: 456108
  chr7:22893437-22893578
  hyper
  melanoma vs. lymphoid_neoplasm,liver_bileduct,lung, prostate,uterine,multiple_myeloma,cervical,renal,head_and_neck, bladder_and_urothelial,anorectal,non_cancer,sarcoma,ovary, thyroid,colorectal,myeloid_neoplasm,pancreas_gallbladder,
  CONT. FROM ABOVE: upper_gi

SEQ ID NO: 469390 - DNA, 700 bp, Homo sapiens; identical to SEQ ID NO: 456109
  chr7:22893607-22894307
  hyper
  melanoma vs. lymphoid_neoplasm,liver_bileduct,lung, prostate,uterine,multiple_myeloma,cervical,renal,head_and_neck, bladder_and_urothelial,anorectal,non_cancer,sarcoma,ovary, thyroid,colorectal,myeloid_neoplasm,pancreas_gallbladder,
  CONT. FROM ABOVE: upper_gi

SEQ ID NO: 469391 - DNA, 867 bp, Homo sapiens; identical to SEQ ID NO: 456110
  chr7:22893828-22894695
  hyper
  melanoma vs. lymphoid_neoplasm,lung,prostate, bladder_and_urothelial,liver_bileduct,anorectal,head_and_neck, multiple_myeloma,uterine,thyroid,renal,myeloid_neoplasm, non_cancer,colorectal,ovary,cervical,pancreas_gallbladder,
  CONT. FROM ABOVE: sarcoma

SEQ ID NO: 469392 - DNA, 523 bp, Homo sapiens; identical to SEQ ID NO: 456115
  chr7:23507580-23508103
  hyper
  melanoma vs. lymphoid_neoplasm,multiple_myeloma,uterine

SEQ ID NO: 469393 - DNA, 122 bp, Homo sapiens; identical to SEQ ID NO: 454478
  chr7:23507981-23508103
  hyper
  melanoma vs. lymphoid_neoplasm,myeloid_neoplasm,thyroid, non_cancer,uterine

SEQ ID NO: 469394 - DNA, 229 bp, Homo sapiens; identical to SEQ ID NO: 454480
  chr7:23513246-23513475
  hyper
  melanoma vs. anorectal

SEQ ID NO: 469395 - DNA, 221 bp, Homo sapiens; identical to SEQ ID NO: 333064
  chr7:23570157-23570378
  hyper
  melanoma vs. lymphoid_neoplasm,liver_bileduct,renal, head_and_neck,lung,breast,pancreas_gallbladder,upper_gi, colorectal,cervical,bladder_and_urothelial,anorectal,prostate, uterine,multiple_myeloma

SEQ ID NO: 469396 - DNA, 285 bp, Homo sapiens; identical to SEQ ID NO: 333065
  chr7:23570662-23570947
  hyper
  melanoma vs. lymphoid_neoplasm,liver_bileduct,lung, upper_gi,breast,pancreas_gallbladder

SEQ ID NO: 469397 - DNA, 99 bp, Homo sapiens
  chr7:25989912-25990011
  hyper
  melanoma vs. sarcoma
cgaaccctcacctccctcggtagttatttaaacttttgccagcagctaactcactctaacttgtggcaactttttaccttcccatctggaaagctgggg

SEQ ID NO: 469398 - DNA, 585 bp, Homo sapiens; identical to SEQ ID NO: 371493
  chr7:25990228-25990813
  hyper
  melanoma vs. sarcoma

SEQ ID NO: 469399 - DNA, 225 bp, Homo sapiens; identical to SEQ ID NO: 456125
  chr7:26192423-26192648
  hyper
  melanoma vs. upper_gi,colorectal

SEQ ID NO: 469400 - DNA, 20 bp, Homo sapiens
  chr7:26192666-26192686
  hyper
  melanoma vs. upper_gi,colorectal
cgctggcggatgtgcgagcg

SEQ ID NO: 469401 - DNA, 112 bp, Homo sapiens; identical to SEQ ID NO: 456127
  chr7:26192748-26192860
  hyper
  melanoma vs. upper_gi,colorectal

SEQ ID NO: 469402 - DNA, 29 bp, Homo sapiens
  chr7:26415746-26415775
  hyper
  melanoma vs. sarcoma,ovary,lymphoid_neoplasm,uterine, myeloid_neoplasm,thyroid,colorectal,non_cancer,multiple_myeloma, prostate,renal
cggtggcgctcccgcggctgcaccctcgg

SEQ ID NO: 469403 - DNA, 3 bp, Homo sapiens
  chr7:26416555-26416558
  hyper
  melanoma vs. sarcoma,ovary,lymphoid_neoplasm,uterine, myeloid_neoplasm,thyroid,colorectal,non_cancer,multiple_myeloma, prostate,renal
ccc

SEQ ID NO: 469404 - DNA, 3 bp, Homo sapiens
  chr7:27191273-27191276
  hyper
  melanoma vs. sarcoma
aac

SEQ ID NO: 469405 - DNA, 22 bp, Homo sapiens
  chr7:27206083-27206105
  hyper
  melanoma vs. prostate
gtccccggccctcgaccccacg

SEQ ID NO: 469406 - DNA, 5 bp, Homo sapiens
  chr7:27219316-27219321
  hyper
  melanoma vs. multiple_myeloma,colorectal,upper_gi,renal, bladder_and_urothelial,prostate,non_cancer,myeloid_neoplasm, thyroid,pancreas_gallbladder,uterine,ovary
cgacg

SEQ ID NO: 469407 - DNA, 59 bp, Homo sapiens; identical to SEQ ID NO: 350549
  chr7:27233098-27233157
  hyper
  melanoma vs. anorectal

SEQ ID NO: 469408 - DNA, 225 bp, Homo sapiens
  chr7:27238917-27239142
  hyper
  melanoma vs. colorectal,bladder_and_urothelial,prostate
cccccgaggcccggcaccactggcatatccaggtagccaggcatgggctgatggtggtggtaaggcccggctgcgtagccctggtggtagaaggcgaactccttagcgcgggagctgaactcctcggcagctgggccggcggtatccatgtacttgtccgcgaaggcggcggcggcggcggccgaggcgggctgcgcgcacgacttgatggcgttggggtgcggg

SEQ ID NO: 469409 - DNA, 263 bp, Homo sapiens; identical to SEQ ID NO: 358806
  chr7:27250231-27250494
  hyper
  melanoma vs. colorectal,renal,upper_gi, pancreas_gallbladder

SEQ ID NO: 469410 - DNA, 293 bp, Homo sapiens
  chr7:29602717-29603010
  hyper
  melanoma vs. sarcoma,colorectal,breast,prostate,ovary, anorectal,upper_gi,uterine,head_and_neck,cervical, pancreas_gallbladder,myeloid_neoplasm,thyroid,lung,renal, bladder_and_urothelial,non_cancer,multiple_myeloma
cggttcacttcctgcagtggctcagggctggatttacactgccctcgttgggtggctgtccatggacttccaggcctgaaagaaggaaattcacatcctcactgagtcgtgttaagagtctcagactggcaggttgtggtggttaagaccgtagaagctagagtcaggccccctgggttccaaccctgctctgccacgtaccagacaggcaaacctgagcaaccattttcccgtgctagggtttcctcgcctgtcgagtgagaataataataataacaatacctacctcctag

SEQ ID NO: 469411 - DNA, 66 bp, Homo sapiens; identical to SEQ ID NO: 350563
  chr7:29604726-29604792
  hyper
  melanoma vs. upper_gi,anorectal,breast,sarcoma, colorectal,renal,pancreas_gallbladder,ovary,prostate,uterine, myeloid_neoplasm,bladder_and_urothelial

SEQ ID NO: 469412 - DNA, 63 bp, Homo sapiens; identical to SEQ ID NO: 464772
  chr7:42267546-42267609
  hyper
  melanoma vs. multiple_myeloma,non_cancer

SEQ ID NO: 469413 - DNA, 139 bp, Homo sapiens; identical to SEQ ID NO: 350569
  chr7:42267822-42267961
  hyper
  melanoma vs. multiple_myeloma,non_cancer

SEQ ID NO: 469414 - DNA, 52 bp, Homo sapiens; identical to SEQ ID NO: 453417
  chr7:42927739-42927791
  hyper
  melanoma vs. renal,pancreas_gallbladder

SEQ ID NO: 469415 - DNA, 412 bp, Homo sapiens; identical to SEQ ID NO: 346903
  chr7:42928175-42928587
  hyper
  melanoma vs. renal,pancreas_gallbladder

SEQ ID NO: 469416 - DNA, 363 bp, Homo sapiens; identical to SEQ ID NO: 467655
  chr7:51383392-51383755
  hyper
  melanoma vs. liver_bileduct

SEQ ID NO: 469417 - DNA, 428 bp, Homo sapiens; identical to SEQ ID NO: 467656
  chr7:51383790-51384218
  hyper
  melanoma vs. liver_bileduct

SEQ ID NO: 469418 - DNA, 145 bp, Homo sapiens; identical to SEQ ID NO: 467664
  chr7:55087803-55087948
  hyper
  melanoma vs. head_and_neck

SEQ ID NO: 469419 - DNA, 78 bp, Homo sapiens; identical to SEQ ID NO: 358854
  chr7:55087982-55088060
  hyper
  melanoma vs. head_and_neck

SEQ ID NO: 469420 - DNA, 392 bp, Homo sapiens; identical to SEQ ID NO: 371567
  chr7:55640395-55640787
  hyper
  melanoma vs. pancreas_gallbladder,liver_bileduct,sarcoma

SEQ ID NO: 469421 - DNA, 470 bp, Homo sapiens
  chr7:65509043-65509513
  hyper
  melanoma vs. cervical,multiple_myeloma,anorectal, colorectal
gagagaaggagggggcacattgaaaggcagccggacacggaggtgctcggccccgcaccccagacacaggttgtggaggttcggaggggcttgagtcccgttcgtccctgtccctatcccggggccctcccggacagggccagccagccccctgccctcacttccgtacgagggtcgcccagtccccacggctctcggctctcagaggtccaactgttaggctcctcgcgtaccaaaagggacgcgtccagactagagtctggacttccatgaggtccagactcgtcgcctctggctgccagcagacaaggaacttcacactctacagctctccccaccgtcgccaacagcgccaaagtgccagctccgcacgccaaggtgcaagccaggagcgccgcgcttcatgccgggagcttggcggactcggaacctcgcgccgcaggttctcctttctcgggggtgggggtgtt

SEQ ID NO: 469422 - DNA, 51 bp, Homo sapiens; identical to SEQ ID NO: 358861
  chr7:65509542-65509593
  hyper
  melanoma vs. cervical,multiple_myeloma,anorectal, colorectal

SEQ ID NO: 469423 - DNA, 80 bp, Homo sapiens
  chr7:83277846-83277926
  hyper
  melanoma vs. bladder_and_urothelial,breast,uterine,renal, liver_bileduct,prostate,upper_gi,multiple_myeloma
cgcggatgccatgctgccgtgttcaccgtccaagccctcgctcctcactttaaggagggtctgagttttacttaggactt

SEQ ID NO: 469424 - DNA, 259 bp, Homo sapiens
  chr7:83277959-83278218
  hyper
  melanoma vs. bladder_and_urothelial,breast,uterine,renal, liver_bileduct,prostate,upper_gi,multiple_myeloma
gaaatcgaacgcgttgtcatcagaaagcacagttccgaagtgccatttgtcaggctgtatttggctatgtaaaacctttctttcctcgggacagttgtttataagccgggagcaagaggacattccaaagagtgagtcttcagagccatgtcctgtctagagcgctcttcagcaactacgccggtagattcaggaagaagctgtatttttcagtcacttgggcaaagctgttcattcagaaaaaaaaaaaaaaaagaga

SEQ ID NO: 469425 - DNA, 3 bp, Homo sapiens
  chr7:83278270-83278273
  hyper
  melanoma vs. bladder_and_urothelial,breast,uterine,renal, liver_bileduct,prostate,upper_gi,multiple_myeloma
ttc

SEQ ID NO: 469426 - DNA, 107 bp, Homo sapiens; identical to SEQ ID NO: 467674
  chr7:87936014-87936121
  hyper
  melanoma vs. bladder_and_urothelial,multiple_myeloma, colorectal,prostate,uterine

SEQ ID NO: 469427 - DNA, 19 bp, Homo sapiens
  chr7:87936206-87936225
  hyper
  melanoma vs. bladder_and_urothelial,multiple_myeloma, colorectal,prostate,uterine
gctgtggcttgtggctctc

SEQ ID NO: 469428 - DNA, 187 bp, Homo sapiens; identical to SEQ ID NO: 467676
  chr7:87936227-87936414
  hyper
  melanoma vs. bladder_and_urothelial,multiple_myeloma, colorectal,prostate,uterine

SEQ ID NO: 469429 - DNA, 101 bp, Homo sapiens; identical to SEQ ID NO: 358900
  chr7:95226207-95226308
  hyper
  melanoma vs. liver_bileduct

SEQ ID NO: 469430 - DNA, 154 bp, Homo sapiens; identical to SEQ ID NO: 333194
  chr7:99680237-99680391
  hyper
  melanoma vs. lymphoid_neoplasm,renal

SEQ ID NO: 469431 - DNA, 20 bp, Homo sapiens
  chr7:100823770-100823790
  hyper
  melanoma vs. ovary
actgaggatggtggtgtctc

SEQ ID NO: 469432 - DNA, 152 bp, Homo sapiens
  chr7:100845050-100845202
  hyper
  melanoma vs. bladder_and_urothelial,anorectal
cggacaggcgaggccaggcggtggggcgcgcctccgtgaggaccaggtgtctgtcggcggggacaccatagcgcgcctggtgctcctcgaagagctgcgtgagtcgccccacgtagcgcgcttgcagcgtgtccacctgggccggactgggc

SEQ ID NO: 469433 - DNA, 46 bp, Homo sapiens
  chr7:100845248-100845294
  hyper
  melanoma vs. bladder_and_urothelial,anorectal
cgggaggcgatctgggctgggatccccggttctcctcctcttttcc

SEQ ID NO: 469434 - DNA, 487 bp, Homo sapiens; identical to SEQ ID NO: 350630
  chr7:101460542-101461029
  hyper
  melanoma vs. liver_bileduct

SEQ ID NO: 469435 - DNA, 685 bp, Homo sapiens
  chr7:107641955-107642640
  hyper
  melanoma vs. renal
cgggaggaggcgctagcagagcctcgaaccccgctctcagccctcacctgcaagtggctgacgatacagtagggttcgggcttgtgcagcccgcacgtcgaggtcaccgaaagcttctgtgctcggccgatgagaaggtcgcccgtggcgggatagcagctgccttctgcgcagccgtagctgaactcgggttcctgagcgcgcactcgggctctgcacagggctgcgggaaggacaggcaacagagttggggggacacaagcagggagtggagcccgaaaaaaacgaacaagcgggggcgggggagtgggtgcggagagaggacagtccattcggaagaaagcaaaatgcacagaaaagacaatggagagatgagcgcaggagaggctgggaaggcagggactccgaaaggagaaggacacggaaagaaacccacacacgtcatcaggtctgtccagcagcgagagcctccctcccgggaaacccaccgacgctcgcgcccaccctgatcagccccggggagcagctcccccaacaaagggtggatgtgtagaccctccacttcgacgtgtccggagcccggcgcagggaggctgacccccaaagggccacacacccacgcacgtgaacccgcgtgcacgcggcagcccgcgcatcctcggtgtgagtgtgcgcgtggagatct

SEQ ID NO: 469436 - DNA, 12 bp, Homo sapiens
  chr7:107642728-107642740
  hyper
  melanoma vs. renal
acgccgctttcc

SEQ ID NO: 469437 - DNA, 95 bp, Homo sapiens
  chr7:128509984-128510079
  hyper
  melanoma vs. pancreas_gallbladder
cgaggagcccctgctgcccggatacctcggcgcgcagggtcgctggcatctcggctccggctccgcgacctgggagccgccgccgggccgggggc

SEQ ID NO: 469438 - DNA, 2 bp, Homo sapiens
  chr7:128510198-128510200
  hyper
  melanoma vs. pancreas_gallbladder
cc

SEQ ID NO: 469439 - DNA, 397 bp, Homo sapiens; identical to SEQ ID NO: 371695
  chr7:129418755-129419152
  hyper
  melanoma vs. breast

SEQ ID NO: 469440 - DNA, 236 bp, Homo sapiens
  chr7:129913007-129913243
  hyper
  melanoma vs. sarcoma
cgtgctcaaggtacacggtgcagggacggttcttcctctcgatgtttctagaatctccctcctcccaggctagccggcagtcccagcttgtgctacagagaggctcctttttattactttttttttcttttcctcctaaccggtccttgctggttttgagtatccactcccccacccccgcccccttctttttctttctctctgttcctgagcaagctgacgcaggtctgcaggag

SEQ ID NO: 469441 - DNA, 174 bp, Homo sapiens; identical to SEQ ID NO: 371700
  chr7:129913272-129913446
  hyper
  melanoma vs. sarcoma

SEQ ID NO: 469442 - DNA, 198 bp, Homo sapiens; identical to SEQ ID NO: 463040
  chr7:139929854-139930052
  hyper
  melanoma vs. cervical,colorectal

SEQ ID NO: 469443 - DNA, 362 bp, Homo sapiens; identical to SEQ ID NO: 345285
  chr7:139930346-139930708
  hyper
  melanoma vs. cervical,colorectal

SEQ ID NO: 469444 - DNA, 209 bp, Homo sapiens; identical to SEQ ID NO: 333277
  chr7:140103670-140103879
  hyper
  melanoma vs. liver_bileduct,pancreas_gallbladder, prostate,breast,head_and_neck

SEQ ID NO: 469445 - DNA, 140 bp, Homo sapiens; identical to SEQ ID NO: 201208
  chr7:140774419-140774559
  hyper
  melanoma vs. renal

SEQ ID NO: 469446 - DNA, 169 bp, Homo sapiens
  chr7:140774561-140774730
  hyper
  melanoma vs. renal
ctccttcccaggccacaggctatcaggtctctgggttccaggcggtccggttatccaggcctggctgagcctcggggccaggacttgcctcccaatagctgttaatgaagcttggtgcaggcttaactctctcccctgcctctcctttcgcgcgtctctgtcgggattc

SEQ ID NO: 469447 - DNA, 45 bp, Homo sapiens; identical to SEQ ID NO: 371745
  chr7:155244370-155244415
  hyper
  melanoma vs. sarcoma,thyroid

SEQ ID NO: 469448 - DNA, 83 bp, Homo sapiens; identical to SEQ ID NO: 461282
  chr7:155257774-155257857
  hyper
  melanoma vs. thyroid,non_cancer

SEQ ID NO: 469449 - DNA, 767 bp, Homo sapiens; identical to SEQ ID NO: 346965
  chr8:18870226-18870993
  hyper
  melanoma vs. liver_bileduct,renal,lung,uterine, colorectal,bladder_and_urothelial,anorectal,prostate,ovary, cervical,head_and_neck,pancreas_gallbladder,breast,thyroid, myeloid_neoplasm,multiple_myeloma,non_cancer,upper_gi

SEQ ID NO: 469450 - DNA, 751 bp, Homo sapiens
  chr8:18870545-18871296
  hyper
  melanoma vs. lung,liver_bileduct,ovary
cgccagaacggaaagctgaaaacggcggataaagttaaatgcatgtaaaacagaatgacttaaacatctgtaaaagctcctgggaattgcaccgaataatcttcccttgtccgtttgctcgctcaattcaagtttgtttagtttagtctttttttctttctttctgacagaaacgtgatagtccctaaatacaagctgaccgggcaaagaaagatcggcatacgaggtcctctttcatgttgccttcttttgatagcttttctccaaagtctgaggttttcaaagccgaggtatgaactaaaacccctaaaccttaacaccacaaagttgaccctgctgggctcctaaaaaacacaaagcaagcaagcgcgaagagaaaaatcgcaccctgcacctatccagacagcacaaacccaggtggccccgggatcctgggggacagagcggcgacaaagcaacacaaaccccacgtcgaacagcggcgccgcgtgcgcaccccgcgcccgcgccccggccccggagctcaccgctgcgctccttccttccatcttccatcgccagcccggccgcgcgccgaaaccgccgccgggcgctccggggccgcagcctcagggcgcgagtgccggcggccagcgccgcgtgctctttgttgagctcccgggactgccgagaggcggcggcccgcgcgcaccctggcggaggctggcgaggctgcgagcccgcggcagccgcccgcccggcccccagtaac

SEQ ID NO: 469451 - DNA, 382 bp, Homo sapiens; identical to SEQ ID NO: 371816
  chr8:18871577-18871959
  hyper
  melanoma vs. renal

SEQ ID NO: 469452 - DNA, 998 bp, Homo sapiens; identical to SEQ ID NO: 333381
  chr8:19171057-19172055
  hyper
  melanoma vs. liver_bileduct,lung

SEQ ID NO: 469453 - DNA, 518 bp, Homo sapiens; identical to SEQ ID NO: 285702
  chr8:21882027-21882545
  hyper
  melanoma vs. pancreas_gallbladder,bladder_and_urothelial

SEQ ID NO: 469454 - DNA, 51 bp, Homo sapiens; identical to SEQ ID NO: 359065
  chr8:22722458-22722509
  hyper

SEQ ID NO: 469455 - DNA, 20 bp, Homo sapiens
  chr8:23020932-23020952
  hyper
  melanoma vs. cervical,colorectal,renal,non_cancer, anorectal,liver_bileduct,pancreas_gallbladder,upper_gi, myeloid_neoplasm,multiple_myeloma,uterine,prostate
cgaacgaacgaacgaacgaa

SEQ ID NO: 469456 - DNA, 25 bp, Homo sapiens
  chr8:23021107-23021132
  hyper
  melanoma vs. cervical,colorectal,renal,non_cancer, anorectal,liver_bileduct,pancreas_gallbladder,upper_gi, myeloid_neoplasm,multiple_myeloma,uterine,prostate
cggcccggtcgctcctgcccagccc

SEQ ID NO: 469457 - DNA, 127 bp, Homo sapiens; identical to SEQ ID NO: 345299
  chr8:23021590-23021717
  hyper
  melanoma vs. cervical,colorectal,renal,non_cancer, anorectal,liver_bileduct,pancreas_gallbladder,upper_gi, myeloid_neoplasm,multiple_myeloma,uterine,prostate

SEQ ID NO: 469458 - DNA, 90 bp, Homo sapiens
  chr8:23082568-23082658
  hyper
  melanoma vs. liver_bileduct,lung,lymphoid_neoplasm, upper_gi
cgccatcctgccaggtcaatccaagaagcagcgtgcttggctatgacaagacagaacttcgcattcggagttcagggcacccctgacccc

SEQ ID NO: 469459 - DNA, 169 bp, Homo sapiens; identical to SEQ ID NO: 359069
  chr8:23082729-23082898
  hyper
  melanoma vs. liver_bileduct,lung,lymphoid_neoplasm, upper_gi

SEQ ID NO: 469460 - DNA, 25 bp, Homo sapiens
  chr8:38323132-38323157
  hyper
cggcaaagacggccggcaatagcag

SEQ ID NO: 469461 - DNA, 173 bp, Homo sapiens; identical to SEQ ID NO: 456160
  chr8:56791852-56792025
  hyper
  melanoma vs. lymphoid_neoplasm,upper_gi,colorectal, pancreas_gallbladder,bladder_and_urothelial,cervical

SEQ ID NO: 469462 - DNA, 731 bp, Homo sapiens; identical to SEQ ID NO: 456161
  chr8:56792065-56792796
  hyper
  melanoma vs. lymphoid_neoplasm,upper_gi,colorectal, pancreas_gallbladder,bladder_and_urothelial,cervical

SEQ ID NO: 469463 - DNA, 935 bp, Homo sapiens; identical to SEQ ID NO: 350750
  chr8:56792306-56793241
  hyper
  melanoma vs. liver_bileduct,lung,upper_gi

SEQ ID NO: 469464 - DNA, 103 bp, Homo sapiens; identical to SEQ ID NO: 456164
  chr8:60030067-60030170
  hyper
  melanoma vs. non_cancer,myeloid_neoplasm,thyroid, multiple_myeloma,uterine,colorectal,ovary,renal

SEQ ID NO: 469465 - DNA, 239 bp, Homo sapiens; identical to SEQ ID NO: 453448
  chr8:60030908-60031147
  hyper
  melanoma vs. non_cancer,thyroid,myeloid_neoplasm,renal

SEQ ID NO: 469466 - DNA, 120 bp, Homo sapiens; identical to SEQ ID NO: 463057
  chr8:61822259-61822379
  hyper
  melanoma vs. ovary,colorectal

SEQ ID NO: 469467 - DNA, 144 bp, Homo sapiens; identical to SEQ ID NO: 201426
  chr8:61822883-61823027
  hyper
  melanoma vs. ovary,colorectal

SEQ ID NO: 469468 - DNA, 27 bp, Homo sapiens
  chr8:70405194-70405221
  hyper
  melanoma vs. sarcoma,bladder_and_urothelial,cervical, renal
aggccttcccggctgccggcgctcctc

SEQ ID NO: 469469 - DNA, 5 bp, Homo sapiens
  chr8:80695898-80695903
  hyper
  melanoma vs. colorectal,liver_bileduct,breast,renal, pancreas_gallbladder,myeloid_neoplasm,thyroid,uterine,prostate, lymphoid_neoplasm,non_cancer,ovary,multiple_myeloma,upper_gi, bladder_and_urothelial
cgccc

SEQ ID NO: 469470 - DNA, 113 bp, Homo sapiens; identical to SEQ ID NO: 453473
  chr8:80695946-80696059
  hyper
  melanoma vs. colorectal,liver_bileduct,breast,renal, pancreas_gallbladder,myeloid_neoplasm,thyroid,uterine,prostate, lymphoid_neoplasm,non_cancer,ovary,multiple_myeloma,upper_gi, bladder_and_urothelial

SEQ ID NO: 469471 - DNA, 133 bp, Homo sapiens; identical to SEQ ID NO: 453474
  chr8:80696101-80696234
  hyper
  melanoma vs. colorectal,liver_bileduct,breast,renal, pancreas_gallbladder,myeloid_neoplasm,thyroid,uterine,prostate, lymphoid_neoplasm,non_cancer,ovary,multiple_myeloma,upper_gi, bladder_and_urothelial

SEQ ID NO: 469472 - DNA, 307 bp, Homo sapiens; identical to SEQ ID NO: 350774
  chr8:80696263-80696570
  hyper
  melanoma vs. colorectal,liver_bileduct,breast,renal, pancreas_gallbladder,myeloid_neoplasm,thyroid,uterine,prostate, lymphoid_neoplasm,non_cancer,ovary,multiple_myeloma,upper_gi, bladder_and_urothelial

SEQ ID NO: 469473 - DNA, 209 bp, Homo sapiens; identical to SEQ ID NO: 459875
  chr8:80803900-80804109
  hyper
  melanoma vs. multiple_myeloma,pancreas_gallbladder, sarcoma,breast

SEQ ID NO: 469474 - DNA, 261 bp, Homo sapiens; identical to SEQ ID NO: 333507
  chr8:95003763-95004024
  hyper
  melanoma vs. lung,pancreas_gallbladder

SEQ ID NO: 469475 - DNA, 13 bp, Homo sapiens
  chr8:95651257-95651270
  hyper
  melanoma vs. lung,bladder_and_urothelial,head_and_neck, pancreas_gallbladder,breast,prostate,anorectal,upper_gi, colorectal,renal,cervical,uterine,ovary,non_cancer,thyroid
cgcacggggttcc

SEQ ID NO: 469476 - DNA, 4 bp, Homo sapiens
  chr8:95651324-95651328
  hyper
  melanoma vs. lung,bladder_and_urothelial,head_and_neck, pancreas_gallbladder,breast,prostate,anorectal,upper_gi, colorectal,renal,cervical,uterine,ovary,non_cancer,thyroid
cgcg

SEQ ID NO: 469477 - DNA, 29 bp, Homo sapiens
  chr8:95651510-95651539
  hyper
  melanoma vs. lung,bladder_and_urothelial,head_and_neck, pancreas_gallbladder,breast,prostate,anorectal,upper_gi, colorectal,renal,cervical,uterine,ovary,non_cancer,thyroid
gcgaggctactgcagtaagccagccggaa

SEQ ID NO: 469478 - DNA, 72 bp, Homo sapiens; identical to SEQ ID NO: 467772
  chr8:95651655-95651727
  hyper
  melanoma vs. lung,bladder_and_urothelial,head_and_neck, pancreas_gallbladder,breast,prostate,anorectal,upper_gi, colorectal,renal,cervical,uterine,ovary,non_cancer,thyroid

SEQ ID NO: 469479 - DNA, 176 bp, Homo sapiens; identical to SEQ ID NO: 346996
  chr8:95651845-95652021
  hyper
  melanoma vs. lung,bladder_and_urothelial,head_and_neck, pancreas_gallbladder,breast,prostate,anorectal,upper_gi, colorectal,renal,cervical,uterine,ovary,non_cancer,thyroid

SEQ ID NO: 469480 - DNA, 224 bp, Homo sapiens
  chr8:95652591-95652815
  hyper
  melanoma vs. lung,upper_gi,head_and_neck,sarcoma,breast, colorectal,ovary,bladder_and_urothelial,cervical,prostate
cggcccggagaagggggggctcgcaggatttctcctgctgtttgcactgaaagttgtgttggctcaggagctgcttttccggggatctgcagttgcccccgccacctcctggctgcggttggcaggtccctccctcagcagttcgtcctccgcctgcgccgcgccctgggcagctccgcgccccgggcctcacctctggcctcctttcgcctccctgcacctgg

SEQ ID NO: 469481 - DNA, 378 bp, Homo sapiens; identical to SEQ ID NO: 467775
  chr8:95652863-95653241
  hyper
  melanoma vs. lung,upper_gi,head_and_neck,sarcoma,breast, colorectal,ovary,bladder_and_urothelial,cervical,prostate

SEQ ID NO: 469482 - DNA, 68 bp, Homo sapiens; identical to SEQ ID NO: 467774
  chr8:95652747-95652815
  hyper
  melanoma vs. upper_gi,lung,sarcoma,pancreas_gallbladder, breast,cervical,bladder_and_urothelial,ovary

SEQ ID NO: 469483 - DNA, 378 bp, Homo sapiens; identical to SEQ ID NO: 467775
  chr8:95652863-95653241
  hyper
  melanoma vs. upper_gi,lung,sarcoma,pancreas_gallbladder, breast,cervical,bladder_and_urothelial,ovary

SEQ ID NO: 469484 - DNA, 53 bp, Homo sapiens; identical to SEQ ID NO: 467776
  chr8:95653290-95653343
  hyper
  melanoma vs. upper_gi,lung,sarcoma,pancreas_gallbladder, breast,cervical,bladder_and_urothelial,ovary

SEQ ID NO: 469485 - DNA, 109 bp, Homo sapiens; identical to SEQ ID NO: 359170
  chr8:95653451-95653560
  hyper
  melanoma vs. upper_gi,lung,sarcoma,pancreas_gallbladder, breast,cervical,bladder_and_urothelial,ovary

SEQ ID NO: 469486 - DNA, 45 bp, Homo sapiens; identical to SEQ ID NO: 371952
  chr8:99077294-99077339
  hyper
  melanoma vs. ovary

SEQ ID NO: 469487 - DNA, 245 bp, Homo sapiens
  chr8:101661596-101661841
  hyper
  melanoma vs. ovary,cervical,bladder_and_urothelial
cgtccctggtgagccgagggataagtgagcattgccaccggccccctccctgcccaccctgaccccagccctgggcgcaccacgtagcggccccccagcgcgtcggaccgctgctgggacaccgggatacagaaatgcatcttcatggctgagcggtgtcttgggagtagcgctgggaacccgacctgcggcggcgggcggtgcgcggctctgaactcggcagcggtggacgcagcgcggcctgc

SEQ ID NO: 469488 - DNA, 2 bp, Homo sapiens
  chr8:101661919-101661921
  hyper
  melanoma vs. ovary,cervical,bladder_and_urothelial
cc

SEQ ID NO: 469489 - DNA, 62 bp, Homo sapiens; identical to SEQ ID NO: 350800
  chr8:101661991-101662053
  hyper
  melanoma vs. ovary,cervical,bladder_and_urothelial

SEQ ID NO: 469490 - DNA, 49 bp, Homo sapiens
  chr8:102092936-102092985
  hyper
  melanoma vs. lung,head_and_neck,ovary,upper_gi, bladder_and_urothelial,colorectal,anorectal, pancreas_gallbladder,uterine,renal,breast
cgggaggcttccctgcccgcctcggcctcgcttacaccgcaggtgctgt

SEQ ID NO: 469491 - DNA, 141 bp, Homo sapiens; identical to SEQ ID NO: 350804
  chr8:102093137-102093278
  hyper
  melanoma vs. lung,head_and_neck,ovary,upper_gi, bladder_and_urothelial,colorectal,anorectal, pancreas_gallbladder,uterine,renal,breast

SEQ ID NO: 469492 - DNA, 284 bp, Homo sapiens; identical to SEQ ID NO: 333553
  chr8:110552612-110552896
  hyper
  melanoma vs. lymphoid_neoplasm,liver_bileduct

SEQ ID NO: 469493 - DNA, 125 bp, Homo sapiens; identical to SEQ ID NO: 461312
  chr8:121136702-121136827
  hyper
  melanoma vs. sarcoma

SEQ ID NO: 469494 - DNA, 107 bp, Homo sapiens; identical to SEQ ID NO: 456182
  chr8:142427489-142427596
  hyper
  melanoma vs. anorectal,multiple_myeloma,colorectal, myeloid_neoplasm,non_cancer,thyroid

SEQ ID NO: 469495 - DNA, 328 bp, Homo sapiens; identical to SEQ ID NO: 456183
  chr8:142427700-142428028
  hyper
  melanoma vs. anorectal,multiple_myeloma,colorectal, myeloid_neoplasm,non_cancer,thyroid

SEQ ID NO: 469496 - DNA, 77 bp, Homo sapiens; identical to SEQ ID NO: 345318
  chr8:145698674-145698751
  hyper
  melanoma vs. anorectal,cervical,head_and_neck,thyroid, ovary,non_cancer,uterine,multiple_myeloma,renal

SEQ ID NO: 469497 - DNA, 316 bp, Homo sapiens; identical to SEQ ID NO: 453489
  chr9:6644554-6644870
  hyper
  melanoma vs. renal,ovary,myeloid_neoplasm,thyroid, uterine,non_cancer

SEQ ID NO: 469498 - DNA, 114 bp, Homo sapiens; identical to SEQ ID NO: 453490
  chr9:6644756-6644870
  hyper
  melanoma vs. renal,ovary

SEQ ID NO: 469499 - DNA, 338 bp, Homo sapiens
  chr9:34380737-34381075
  hyper
  melanoma vs. bladder_and_urothelial,renal,cervical, colorectal,multiple_myeloma,ovary,upper_gi,anorectal,uterine, pancreas_gallbladder,thyroid,non_cancer,head_and_neck
cgagggcgggacacggcagggcctcgagagcgtgcagcgcggggctagagcaggctgggggcctgcacggaagctggccgggctggaagggggcggggttctggggcggggcttgtgtggggtggagcccggctgaggcgggcggagccctgcgaaccttacagtcggttgctcccggcaccaaggccgcaggcggcggtcggtgcagggcgccccgctggcgtagtagtccatcccgcgcagacagtagtggcggcccgagcaagcactttcgtaaccatggaagggcaggcggccgggcagcgggtccacgcacccgcatcggggcgtgatccgcg

SEQ ID NO: 469500 - DNA, 63 bp, Homo sapiens; identical to SEQ ID NO: 456188
  chr9:37034135-37034198
  hyper
  melanoma vs. lymphoid_neoplasm,thyroid,non_cancer, prostate,uterine,ovary

SEQ ID NO: 469501 - DNA, 64 bp, Homo sapiens; identical to SEQ ID NO: 333690
  chr9:82188495-82188559
  hyper
  melanoma vs. colorectal,cervical,prostate,head_and_neck, lung,bladder_and_urothelial,anorectal

SEQ ID NO: 469502 - DNA, 114 bp, Homo sapiens
  chr9:87285083-87285197
  hyper
  melanoma vs. sarcoma
cgaagagagagtgggcacactggtggctccagcggcgtcagtgccatcgcggggcaagttgattcctgggccggagctgggcactcatccatccacagtctccgggctggggtc

SEQ ID NO: 469503 - DNA, 8 bp, Homo sapiens
  chr9:87285272-87285280
  hyper
  melanoma vs. sarcoma
cgtgtctg

SEQ ID NO: 469504 - DNA, 545 bp, Homo sapiens; identical to SEQ ID NO: 461329
  chr9:93955385-93955930
  hyper
  melanoma vs. lymphoid_neoplasm,pancreas_gallbladder, cervical

SEQ ID NO: 469505 - DNA, 82 bp, Homo sapiens; identical to SEQ ID NO: 461330
  chr9:93956177-93956259
  hyper
  melanoma vs. lymphoid_neoplasm,pancreas_gallbladder, cervical

SEQ ID NO: 469506 - DNA, 156 bp, Homo sapiens; identical to SEQ ID NO: 453504
  chr9:93955774-93955930
  hyper
  melanoma vs. pancreas_gallbladder,cervical, lymphoid_neoplasm,colorectal

SEQ ID NO: 469507 - DNA, 268 bp, Homo sapiens; identical to SEQ ID NO: 453505
  chr9:93956177-93956445
  hyper
  melanoma vs. pancreas_gallbladder,cervical, lymphoid_neoplasm,colorectal

SEQ ID NO: 469508 - DNA, 178 bp, Homo sapiens; identical to SEQ ID NO: 350911
  chr9:99637706-99637884
  hyper
  melanoma vs. lung,head_and_neck,pancreas_gallbladder, breast,liver_bileduct,renal

SEQ ID NO: 469509 - DNA, 316 bp, Homo sapiens; identical to SEQ ID NO: 333725
  chr9:99638097-99638413
  hyper
  melanoma vs. lung,renal,liver_bileduct,breast,upper_gi, prostate,ovary,head_and_neck,colorectal,pancreas_gallbladder, cervical

SEQ ID NO: 469510 - DNA, 99 bp, Homo sapiens; identical to SEQ ID NO: 333730
  chr9:100263437-100263536
  hyper
  melanoma vs. pancreas_gallbladder,lung,liver_bileduct, upper_gi,ovary,head_and_neck,breast,colorectal,cervical, bladder_and_urothelial,anorectal,prostate,uterine, lymphoid_neoplasm

SEQ ID NO: 469511 - DNA, 111 bp, Homo sapiens
  chr9:100264589-100264700
  hyper
  melanoma vs. anorectal,multiple_myeloma, pancreas_gallbladder,colorectal
cgtggatcccaggttcgcgctgagagtgtttggggcaggtgaagtttcccaaactgggagagacaaggtttaaagcaccacgacacgcgctacgcggccaagtggagctgg

SEQ ID NO: 469512 - DNA, 108 bp, Homo sapiens; identical to SEQ ID NO: 359371
  chr9:100264871-100264979
  hyper
  melanoma vs. anorectal,multiple_myeloma, pancreas_gallbladder,colorectal

SEQ ID NO: 469513 - DNA, 395 bp, Homo sapiens; identical to SEQ ID NO: 333758
  chr9:116111663-116112058
  hyper
  melanoma vs. lung

SEQ ID NO: 469514 - DNA, 168 bp, Homo sapiens; identical to SEQ ID NO: 333766
  chr9:124062292-124062460
  hyper
  melanoma vs. head_and_neck,sarcoma,colorectal,cervical

SEQ ID NO: 469515 - DNA, 43 bp, Homo sapiens
  chr9:130689378-130689421
  hyper
  melanoma vs. thyroid,cervical,non_cancer,anorectal,lung, ovary,upper_gi,bladder_and_urothelial,head_and_neck, pancreas_gallbladder,multiple_myeloma,uterine
cgggccgcgagtttcggctgggatgggggcccaaacctgctta

SEQ ID NO: 469516 - DNA, 419 bp, Homo sapiens
  chr9:130689749-130690168
  hyper
  melanoma vs. thyroid,cervical,non_cancer,anorectal,lung, ovary,upper_gi,bladder_and_urothelial,head_and_neck, pancreas_gallbladder,multiple_myeloma,uterine
gacccgatcccacccctaaacacagccccagtggtgccccgcccccacgtatggccccacccccatgccctacaaccccaaatccgcccatttgggccccgcccacataccccgccctccccaggtatatgatgacctaggacccgcccccaccgagccccgcccccagccaagtacccagcaaccgcgccagcagcgagtgcgggtgccgctgcaggtgctgcacgtagcggggcaggtgggcgagcagagcctgcacctctcggcgcccctgggtcttcaggaagaagcgctggtcgtggctggggggcaagagaaagaggtcactgcccaggcctggctggagcggctcccacccggcccccttccccgacctgtgcacgtggatctcgctcccaggtctcggcaccgcctctctc

SEQ ID NO: 469517 - DNA, 17 bp, Homo sapiens
  chr9:130690197-130690214
  hyper
  melanoma vs. thyroid,cervical,non_cancer,anorectal,lung, ovary,upper_gi,bladder_and_urothelial,head_and_neck, pancreas_gallbladder,multiple_myeloma,uterine
cgatctgtccaccatcc

SEQ ID NO: 469518 - DNA, 280 bp, Homo sapiens; identical to SEQ ID NO: 333801
  chr9:132145475-132145755
  hyper
  melanoma vs. liver_bileduct,upper_gi,head_and_neck, breast,lung,bladder_and_urothelial,colorectal, pancreas_gallbladder,prostate,cervical,ovary,uterine

SEQ ID NO: 469519 - DNA, 306 bp, Homo sapiens; identical to SEQ ID NO: 459908
  chr9:135286324-135286630
  hyper
  melanoma vs. myeloid_neoplasm,thyroid,non_cancer, multiple_myeloma,prostate,cervical,bladder_and_urothelial

SEQ ID NO: 469520 - DNA, 630 bp, Homo sapiens; identical to SEQ ID NO: 345338
  chr9:135286324-135286954
  hyper
  melanoma vs. multiple_myeloma,pancreas_gallbladder, uterine,colorectal,myeloid_neoplasm,non_cancer,thyroid,prostate, lung,bladder_and_urothelial,upper_gi,renal,cervical,breast, ovary,lymphoid_neoplasm,head_and_neck

SEQ ID NO: 469521 - DNA, 208 bp, Homo sapiens; identical to SEQ ID NO: 454524
  chr9:135645005-135645213
  hyper
  melanoma vs. liver_bileduct

SEQ ID NO: 469522 - DNA, 452 bp, Homo sapiens; identical to SEQ ID NO: 359456
  chr9:135645250-135645702
  hyper
  melanoma vs. liver_bileduct

SEQ ID NO: 469523 - DNA, 520 bp, Homo sapiens; identical to SEQ ID NO: 350968
  chr9:139948370-139948890
  hyper
  melanoma vs. lung,breast,uterine,head_and_neck, colorectal,liver_bileduct,prostate,pancreas_gallbladder, anorectal,upper_gi,renal

SEQ ID NO: 469524 - DNA, 622 bp, Homo sapiens; identical to SEQ ID NO: 336684
  chrX:2815904-2816526
  hyper
  melanoma vs. liver_bileduct,head_and_neck,lung,renal, breast,pancreas_gallbladder,colorectal,bladder_and_urothelial, prostate,multiple_myeloma

SEQ ID NO: 469525 - DNA, 145 bp, Homo sapiens; identical to SEQ ID NO: 458420
  chrX:40017447-40017592
  hyper
  melanoma vs. sarcoma,liver_bileduct,prostate

SEQ ID NO: 469526 - DNA, 32 bp, Homo sapiens; identical to SEQ ID NO: 352674
  chrX:40017968-40018000
  hyper
  melanoma vs. sarcoma,liver_bileduct,prostate

SEQ ID NO: 469527 - DNA, 110 bp, Homo sapiens; identical to SEQ ID NO: 456234
  chr1:1502406-1502516
  hypo
  melanoma vs. liver_bileduct,lymphoid_neoplasm, pancreas_gallbladder,renal,upper_gi,cervical,prostate,anorectal, colorectal,sarcoma,lung

SEQ ID NO: 469528 - DNA, 130 bp, Homo sapiens; identical to SEQ ID NO: 352717
  chr1:1502555-1502685
  hypo
  melanoma vs. liver_bileduct,lymphoid_neoplasm, pancreas_gallbladder,renal,upper_gi,cervical,prostate,anorectal, colorectal,sarcoma,lung

SEQ ID NO: 469529 - DNA, 21 bp, Homo sapiens
  chr1:2461988-2462009
  hypo
  melanoma vs. anorectal,myeloid_neoplasm,non_cancer, sarcoma,head_and_neck,bladder_and_urothelial,colorectal,uterine, pancreas_gallbladder,ovary,thyroid,renal,multiple_myeloma,lung, cervical,upper_gi,breast
ccttttcccaggccgccaaac

SEQ ID NO: 469530 - DNA, 443 bp, Homo sapiens; identical to SEQ ID NO: 344934
  chr1:2461988-2462431
  hypo
  melanoma vs. colorectal,cervical,bladder_and_urothelial, anorectal,myeloid_neoplasm,non_cancer,head_and_neck,ovary, multiple_myeloma,sarcoma,pancreas_gallbladder,uterine,renal, thyroid,lung,upper_gi,breast

SEQ ID NO: 469531 - DNA, 178 bp, Homo sapiens
  chr1:2716559-2716737
  hypo
  melanoma vs. lymphoid_neoplasm
cgggggcagctttcaccctggctctgcaggggccatgccgtcctcctaccttggggttcgctgccggtgggatgggcctcgagggcccggctgcatgctgccaggcagtcctcaaacctgccgctgtggagcagagcttcaggtgacagggtgtcactccgggtgcccctggggtcca

SEQ ID NO: 469532 - DNA, 39 bp, Homo sapiens; identical to SEQ ID NO: 362249
  chr1:2717239-2717278
  hypo
  melanoma vs. lymphoid_neoplasm

SEQ ID NO: 469533 - DNA, 2 bp, Homo sapiens
  chr1:2918722-2918724
  hypo
  melanoma vs. lymphoid_neoplasm
ac

SEQ ID NO: 469534 - DNA, 517 bp, Homo sapiens; identical to SEQ ID NO: 455503
  chr1:12226892-12227409
  hypo
  melanoma vs. anorectal

SEQ ID NO: 469535 - DNA, 207 bp, Homo sapiens; identical to SEQ ID NO: 455504
  chr1:12227438-12227645
  hypo
  melanoma vs. anorectal

SEQ ID NO: 469536 - DNA, 247 bp, Homo sapiens; identical to SEQ ID NO: 455505
  chr1:12227162-12227409
  hypo
  melanoma vs. anorectal,multiple_myeloma,colorectal

SEQ ID NO: 469537 - DNA, 207 bp, Homo sapiens; identical to SEQ ID NO: 455504
  chr1:12227438-12227645
  hypo
  melanoma vs. anorectal,multiple_myeloma,colorectal

SEQ ID NO: 469538 - DNA, 189 bp, Homo sapiens; identical to SEQ ID NO: 336973
  chr1:22023693-22023882
  hypo
  melanoma vs. liver_bileduct,head_and_neck, bladder_and_urothelial,lymphoid_neoplasm,renal,uterine,breast, prostate,ovary,colorectal,cervical,lung,anorectal,thyroid, pancreas_gallbladder,upper_gi

SEQ ID NO: 469539 - DNA, 697 bp, Homo sapiens; identical to SEQ ID NO: 468564
  chr1:39956640-39957337
  hypo
  melanoma vs. sarcoma,cervical

SEQ ID NO: 469540 - DNA, 164 bp, Homo sapiens; identical to SEQ ID NO: 337091
  chr1:55620065-55620229
  hypo
  melanoma vs. liver_bileduct,head_and_neck,lung, pancreas_gallbladder

SEQ ID NO: 469541 - DNA, 289 bp, Homo sapiens; identical to SEQ ID NO: 452731
  chr1:101702081-101702370
  hypo
  melanoma vs. uterine,non_cancer

SEQ ID NO: 469542 - DNA, 289 bp, Homo sapiens; identical to SEQ ID NO: 452731
  chr1:101702081-101702370
  hypo
  melanoma vs. sarcoma

SEQ ID NO: 469543 - DNA, 152 bp, Homo sapiens; identical to SEQ ID NO: 452732
  chr1:101702796-101702948
  hypo
  melanoma vs. sarcoma

SEQ ID NO: 469544 - DNA, 393 bp, Homo sapiens; identical to SEQ ID NO: 452733
  chr1:101702796-101703189
  hypo
  melanoma vs. sarcoma

SEQ ID NO: 469545 - DNA, 68 bp, Homo sapiens; identical to SEQ ID NO: 337162
  chr1:151373761-151373829
  hypo
  melanoma vs. lymphoid_neoplasm,cervical,head_and_neck, lung,prostate,bladder_and_urothelial,anorectal,renal

SEQ ID NO: 469546 - DNA, 271 bp, Homo sapiens; identical to SEQ ID NO: 337163
  chr1:151378250-151378521
  hypo
  melanoma vs. lung,bladder_and_urothelial, lymphoid_neoplasm,upper_gi,breast,head_and_neck,liver_bileduct, cervical

SEQ ID NO: 469547 - DNA, 2 bp, Homo sapiens
  chr1:153651442-153651444
  hypo
  melanoma vs. anorectal,myeloid_neoplasm,thyroid, multiple_myeloma,cervical,non_cancer
cg

SEQ ID NO: 469548 - DNA, 181 bp, Homo sapiens; identical to SEQ ID NO: 454587
  chr1:175372314-175372495
  hypo
  melanoma vs. lymphoid_neoplasm

SEQ ID NO: 469549 - DNA, 145 bp, Homo sapiens; identical to SEQ ID NO: 347841
  chr1:175372572-175372717
  hypo
  melanoma vs. lymphoid_neoplasm

SEQ ID NO: 469550 - DNA, 153 bp, Homo sapiens; identical to SEQ ID NO: 454589
  chr1:175375048-175375201
  hypo
  melanoma vs. lymphoid_neoplasm

SEQ ID NO: 469551 - DNA, 110 bp, Homo sapiens; identical to SEQ ID NO: 331048
  chr1:182361452-182361562
  hypo
  melanoma vs. liver_bileduct,sarcoma,lung,breast,ovary, head_and_neck,colorectal

SEQ ID NO: 469552 - DNA, 494 bp, Homo sapiens; identical to SEQ ID NO: 331083
  chr1:204347108-204347602
  hypo
  melanoma vs. liver_bileduct

SEQ ID NO: 469553 - DNA, 936 bp, Homo sapiens; identical to SEQ ID NO: 331128
  chr1:225614356-225615292
  hypo
  melanoma vs. liver_bileduct

SEQ ID NO: 469554 - DNA, 184 bp, Homo sapiens; identical to SEQ ID NO: 279411
  chr1:235813161-235813345
  hypo
  melanoma vs. anorectal,sarcoma

SEQ ID NO: 469555 - DNA, 191 bp, Homo sapiens; identical to SEQ ID NO: 468631
  chr10:13933246-13933437
  hypo
  melanoma vs. ovary,multiple_myeloma,breast,prostate, uterine,myeloid_neoplasm,thyroid,non_cancer,sarcoma,anorectal, bladder_and_urothelial

SEQ ID NO: 469556 - DNA, 139 bp, Homo sapiens; identical to SEQ ID NO: 340579
  chr10:14979037-14979176
  hypo
  melanoma vs. lymphoid_neoplasm,lung,upper_gi

SEQ ID NO: 469557 - DNA, 791 bp, Homo sapiens; identical to SEQ ID NO: 457329
  chr10:31607954-31608745
  hypo
  melanoma vs. liver_bileduct

SEQ ID NO: 469558 - DNA, 413 bp, Homo sapiens; identical to SEQ ID NO: 468642
  chr10:74079281-74079694
  hypo
  melanoma vs. lymphoid_neoplasm,liver_bileduct,lung, pancreas_gallbladder,head_and_neck,breast

SEQ ID NO: 469559 - DNA, 179 bp, Homo sapiens; identical to SEQ ID NO: 345357
  chr10:74079752-74079931
  hypo
  melanoma vs. lymphoid_neoplasm,liver_bileduct,lung, pancreas_gallbladder,head_and_neck,breast

SEQ ID NO: 469560 - DNA, 79 bp, Homo sapiens; identical to SEQ ID NO: 287325
  chr10:94449318-94449397
  hypo
  melanoma vs. liver_bileduct,cervical, pancreas_gallbladder

SEQ ID NO: 469561 - DNA, 173 bp, Homo sapiens; identical to SEQ ID NO: 334004
  chr10:97051022-97051195
  hypo
  melanoma vs. liver_bileduct

SEQ ID NO: 469562 - DNA, 569 bp, Homo sapiens; identical to SEQ ID NO: 334036
  chr10:102822304-102822873
  hypo
  melanoma vs. cervical,colorectal,breast

SEQ ID NO: 469563 - DNA, 174 bp, Homo sapiens; identical to SEQ ID NO: 340737
  chr10:111987876-111988050
  hypo
  melanoma vs. lymphoid_neoplasm

SEQ ID NO: 469564 - DNA, 43 bp, Homo sapiens; identical to SEQ ID NO: 340757
  chr10:121591491-121591534
  hypo
  melanoma vs. upper_gi,pancreas_gallbladder,sarcoma, head_and_neck,renal,bladder_and_urothelial,lung

SEQ ID NO: 469565 - DNA, 405 bp, Homo sapiens; identical to SEQ ID NO: 340817
  chr10:134116378-134116783
  hypo
  melanoma vs. renal

SEQ ID NO: 469566 - DNA, 163 bp, Homo sapiens
  chr10:134734534-134734697
  hypo
  melanoma vs. lymphoid_neoplasm
cggcagccccttcccgctccaagagtcgccaaccttcccttgcagggcgcgacccaccctgcgtctgcccatctcctcgtctcagacccgagacatgacccagcagctccactcccgaccaccatctccacaggctgcagtctgggtgacacctggttcgtcg

SEQ ID NO: 469567 - DNA, 672 bp, Homo sapiens; identical to SEQ ID NO: 334150
  chr11:705963-706635
  hypo
  melanoma vs. liver_bileduct,renal,head_and_neck

SEQ ID NO: 469568 - DNA, 499 bp, Homo sapiens
  chr11:1103476-1103975
  hypo
  melanoma vs. lymphoid_neoplasm
cgcccacggcatcgtgggaaggtgctctcatccccaggaatgtccgggggtcccgggctcattctcctttccctctagggctccatcacattcatgcccaatggatgctgcaagacctgtgagtacagggcacagcctggggggtaggcagggtgggggcacaagggctggtgccctcagccccgcctggggtggctggaggctggacaacggcctctgggtgggcagtgagggctgggggctgaggccgagcctggggaggggacgcagcgagggagagcctcctcgaagatgtggaggccctgccctaagccgctgcccgctctccccaggcacccctcgcaatgagaccagggtgccctgctccaccgtccccgtcaccacggaggtttcgtacgccggctgcaccaagaccgtcctcatgaatcattgctccgggtcctgcgggacatttgtcatgtgagtcccaggctgggagtgtgcctggagggggtggtgg

SEQ ID NO: 469569 - DNA, 20 bp, Homo sapiens
  chr11:1104214-1104234
  hypo
  melanoma vs. lymphoid_neoplasm
cacctcccgccgggcccggc

SEQ ID NO: 469570 - DNA, 213 bp, Homo sapiens
  chr11:1103762-1103975
  hypo
  melanoma vs. lymphoid_neoplasm,colorectal,breast
cgaagatgtggaggccctgccctaagccgctgcccgctctccccaggcacccctcgcaatgagaccagggtgccctgctccaccgtccccgtcaccacggaggtttcgtacgccggctgcaccaagaccgtcctcatgaatcattgctccgggtcctgcgggacatttgtcatgtgagtcccaggctgggagtgtgcctggagggggtggtgg

SEQ ID NO: 469571 - DNA, 313 bp, Homo sapiens; identical to SEQ ID NO: 365558
  chr11:1104214-1104527
  hypo
  melanoma vs. lymphoid_neoplasm,colorectal,breast

SEQ ID NO: 469572 - DNA, 35 bp, Homo sapiens
  chr11:1975930-1975965
  hypo
  melanoma vs. lymphoid_neoplasm
cgcgcaggaatgaagggcgcacgacatgagaggca

SEQ ID NO: 469573 - DNA, 149 bp, Homo sapiens; identical to SEQ ID NO: 468662
  chr11:7694738-7694887
  hypo
  melanoma vs. anorectal,cervical,head_and_neck,breast

SEQ ID NO: 469574 - DNA, 164 bp, Homo sapiens; identical to SEQ ID NO: 120256
  chr11:7695108-7695272
  hypo
  melanoma vs. anorectal,cervical,head_and_neck,breast

SEQ ID NO: 469575 - DNA, 798 bp, Homo sapiens; identical to SEQ ID NO: 347138
  chr11:17034991-17035789
  hypo
  melanoma vs. breast,liver_bileduct, bladder_and_urothelial,lung,pancreas_gallbladder,upper_gi, colorectal,uterine,renal,ovary,prostate,thyroid,head_and_neck, myeloid_neoplasm,cervical,anorectal,non_cancer

SEQ ID NO: 469576 - DNA, 993 bp, Homo sapiens; identical to SEQ ID NO: 468667
  chr11:17035292-17036285
  hypo
  melanoma vs. breast,upper_gi,lung,uterine,ovary, liver_bileduct,pancreas_gallbladder,bladder_and_urothelial, colorectal,head_and_neck,prostate,anorectal,cervical,renal, thyroid,myeloid_neoplasm

SEQ ID NO: 469577 - DNA, 796 bp, Homo sapiens; identical to SEQ ID NO: 345378
  chr11:17035791-17036587
  hypo
  melanoma vs. breast,ovary,prostate,uterine,lung, pancreas_gallbladder,cervical,upper_gi,bladder_and_urothelial, colorectal,anorectal,renal,head_and_neck,liver_bileduct, non_cancer,myeloid_neoplasm,thyroid,multiple_myeloma

SEQ ID NO: 469578 - DNA, 384 bp, Homo sapiens; identical to SEQ ID NO: 334231
  chr11:32851566-32851950
  hypo
  melanoma vs. liver_bileduct,lung,renal,anorectal, bladder_and_urothelial,breast,colorectal,upper_gi,head_and_neck, myeloid_neoplasm

SEQ ID NO: 469579 - DNA, 93 bp, Homo sapiens; identical to SEQ ID NO: 341062
  chr11:57580261-57580354
  hypo
  melanoma vs. liver_bileduct,lymphoid_neoplasm,lung, head_and_neck,sarcoma,upper_gi,renal,pancreas_gallbladder, bladder_and_urothelial,cervical

SEQ ID NO: 469580 - DNA, 231 bp, Homo sapiens; identical to SEQ ID NO: 468684
  chr11:61062458-61062689
  hypo
  melanoma vs. thyroid,non_cancer,myeloid_neoplasm, multiple_myeloma,uterine,renal

SEQ ID NO: 469581 - DNA, 260 bp, Homo sapiens; identical to SEQ ID NO: 468685
  chr11:61595492-61595752
  hypo
  melanoma vs. sarcoma

SEQ ID NO: 469582 - DNA, 34 bp, Homo sapiens; identical to SEQ ID NO: 359849
  chr11:61596695-61596729
  hypo
  melanoma vs. sarcoma

SEQ ID NO: 469583 - DNA, 81 bp, Homo sapiens; identical to SEQ ID NO: 365807
  chr11:114115648-114115729
  hypo
  melanoma vs. lymphoid_neoplasm

SEQ ID NO: 469584 - DNA, 345 bp, Homo sapiens; identical to SEQ ID NO: 468693
  chr12:1639977-1640322
  hypo
  melanoma vs. head_and_neck,prostate,sarcoma,anorectal, uterine,ovary,cervical,bladder_and_urothelial,breast, myeloid_neoplasm,non_cancer,lung

SEQ ID NO: 469585 - DNA, 273 bp, Homo sapiens; identical to SEQ ID NO: 351285
  chr12:1640476-1640749
  hypo
  melanoma vs. head_and_neck,prostate,sarcoma,anorectal, uterine,ovary,cervical,bladder_and_urothelial,breast, myeloid_neoplasm,non_cancer,lung

SEQ ID NO: 469586 - DNA, 18 bp, Homo sapiens
  chr12:2040494-2040512
  hypo
cgtccatccccgcggagc

SEQ ID NO: 469587 - DNA, 565 bp, Homo sapiens; identical to SEQ ID NO: 334461
  chr12:12502899-12503464
  hypo
  melanoma vs. lung,breast,sarcoma,cervical

SEQ ID NO: 469588 - DNA, 181 bp, Homo sapiens; identical to SEQ ID NO: 351339
  chr12:48299205-48299386
  hypo
  melanoma vs. ovary,pancreas_gallbladder,upper_gi,breast, renal,lung,bladder_and_urothelial,cervical,colorectal, liver_bileduct,thyroid,uterine,non_cancer,prostate, head_and_neck

SEQ ID NO: 469589 - DNA, 32 bp, Homo sapiens; identical to SEQ ID NO: 468700
  chr12:48299388-48299420
  hypo
  melanoma vs. ovary,pancreas_gallbladder,upper_gi,breast, renal,lung,bladder_and_urothelial,cervical,colorectal, liver_bileduct,thyroid,uterine,non_cancer,prostate, head_and_neck

SEQ ID NO: 469590 - DNA, 42 bp, Homo sapiens; identical to SEQ ID NO: 351341
  chr12:48299465-48299507
  hypo
  melanoma vs. ovary,pancreas_gallbladder,upper_gi,breast, renal,lung,bladder_and_urothelial,cervical,colorectal, liver_bileduct,thyroid,uterine,non_cancer,prostate, head_and_neck

SEQ ID NO: 469591 - DNA, 78 bp, Homo sapiens; identical to SEQ ID NO: 468706
  chr12:49487994-49488072
  hypo
  melanoma vs. multiple_myeloma,bladder_and_urothelial, anorectal,breast

SEQ ID NO: 469592 - DNA, 78 bp, Homo sapiens; identical to SEQ ID NO: 122207
  chr12:49488131-49488209
  hypo
  melanoma vs. multiple_myeloma,bladder_and_urothelial, anorectal,breast

SEQ ID NO: 469593 - DNA, 55 bp, Homo sapiens; identical to SEQ ID NO: 468720
  chr12:59989999-59990054
  hypo
  melanoma vs. liver_bileduct

SEQ ID NO: 469594 - DNA, 265 bp, Homo sapiens; identical to SEQ ID NO: 468722
  chr12:93966037-93966302
  hypo
  melanoma vs. sarcoma,anorectal,bladder_and_urothelial

SEQ ID NO: 469595 - DNA, 74 bp, Homo sapiens; identical to SEQ ID NO: 468724
  chr12:96184964-96185038
  hypo
  melanoma vs. cervical,uterine,ovary,upper_gi,non_cancer

SEQ ID NO: 469596 - DNA, 222 bp, Homo sapiens; identical to SEQ ID NO: 360178
  chr12:96185121-96185343
  hypo
  melanoma vs. cervical,uterine,ovary,upper_gi,non_cancer

SEQ ID NO: 469597 - DNA, 226 bp, Homo sapiens; identical to SEQ ID NO: 373141
  chr12:104323141-104323367
  hypo
  melanoma vs. lymphoid_neoplasm

SEQ ID NO: 469598 - DNA, 551 bp, Homo sapiens; identical to SEQ ID NO: 334686
  chr12:123258823-123259374
  hypo
  melanoma vs. breast,lung,colorectal,head_and_neck, bladder_and_urothelial,upper_gi,multiple_myeloma, pancreas_gallbladder,anorectal

SEQ ID NO: 469599 - DNA, 723 bp, Homo sapiens; identical to SEQ ID NO: 354988
  chr12:124850157-124850880
  hypo
  melanoma vs. liver_bileduct,lymphoid_neoplasm, head_and_neck,pancreas_gallbladder,upper_gi,lung,colorectal, ovary

SEQ ID NO: 469600 - DNA, 150 bp, Homo sapiens; identical to SEQ ID NO: 354992
  chr12:125500633-125500783
  hypo
  melanoma vs. sarcoma

SEQ ID NO: 469601 - DNA, 230 bp, Homo sapiens; identical to SEQ ID NO: 463304
  chr12:129189650-129189880
  hypo
  melanoma vs. lymphoid_neoplasm

SEQ ID NO: 469602 - DNA, 206 bp, Homo sapiens; identical to SEQ ID NO: 463305
  chr12:129189909-129190115
  hypo
  melanoma vs. lymphoid_neoplasm

SEQ ID NO: 469603 - DNA, 63 bp, Homo sapiens; identical to SEQ ID NO: 366142
  chr12:129190144-129190207
  hypo
  melanoma vs. lymphoid_neoplasm

SEQ ID NO: 469604 - DNA, 267 bp, Homo sapiens; identical to SEQ ID NO: 341645
  chr12:132241778-132242045
  hypo
  melanoma vs. liver_bileduct

SEQ ID NO: 469605 - DNA, 325 bp, Homo sapiens; identical to SEQ ID NO: 341646
  chr12:132247422-132247747
  hypo
  melanoma vs. liver_bileduct

SEQ ID NO: 469606 - DNA, 311 bp, Homo sapiens; identical to SEQ ID NO: 341649
  chr12:132270193-132270504
  hypo
  melanoma vs. lymphoid_neoplasm,upper_gi,head_and_neck, lung,ovary,pancreas_gallbladder,breast,liver_bileduct,cervical, colorectal,prostate,anorectal,uterine,renal

SEQ ID NO: 469607 - DNA, 40 bp, Homo sapiens; identical to SEQ ID NO: 341698
  chr13:28152529-28152569
  hypo
  melanoma vs. sarcoma,upper_gi,liver_bileduct,renal,lung, lymphoid_neoplasm,breast,ovary,bladder_and_urothelial, head_and_neck,pancreas_gallbladder,prostate,cervical,colorectal, anorectal,uterine,multiple_myeloma,thyroid

SEQ ID NO: 469608 - DNA, 178 bp, Homo sapiens; identical to SEQ ID NO: 468743
  chr13:33000891-33001069
  hypo
  melanoma vs. lymphoid_neoplasm,multiple_myeloma, anorectal

SEQ ID NO: 469609 - DNA, 204 bp, Homo sapiens; identical to SEQ ID NO: 351462
  chr13:33001228-33001432
  hypo
  melanoma vs. lymphoid_neoplasm,multiple_myeloma, anorectal

SEQ ID NO: 469610 - DNA, 480 bp, Homo sapiens; identical to SEQ ID NO: 468747
  chr13:42032017-42032497
  hypo
  melanoma vs. bladder_and_urothelial,thyroid,breast, cervical,lung,non_cancer,prostate,uterine,head_and_neck,ovary, multiple_myeloma,pancreas_gallbladder,anorectal,colorectal, lymphoid_neoplasm,sarcoma,upper_gi

SEQ ID NO: 469611 - DNA, 109 bp, Homo sapiens; identical to SEQ ID NO: 347265
  chr13:42032649-42032758
  hypo
  melanoma vs. bladder_and_urothelial,thyroid,breast, cervical,lung,non_cancer,prostate,uterine,head_and_neck,ovary, multiple_myeloma,pancreas_gallbladder,anorectal,colorectal, lymphoid_neoplasm,sarcoma,upper_gi

SEQ ID NO: 469612 - DNA, 83 bp, Homo sapiens; identical to SEQ ID NO: 341733
  chr13:45953018-45953101
  hypo
  melanoma vs. liver_bileduct

SEQ ID NO: 469613 - DNA, 61 bp, Homo sapiens; identical to SEQ ID NO: 366241
  chr13:73809567-73809628
  hypo
  melanoma vs. lymphoid_neoplasm

SEQ ID NO: 469614 - DNA, 288 bp, Homo sapiens; identical to SEQ ID NO: 454165
  chr13:95201339-95201627
  hypo
  melanoma vs. lymphoid_neoplasm,ovary,renal,uterine, prostate,anorectal,thyroid,myeloid_neoplasm,colorectal,lung, non_cancer,pancreas_gallbladder,cervical,upper_gi, multiple_myeloma,head_and_neck,sarcoma,liver_bileduct,breast

SEQ ID NO: 469615 - DNA, 230 bp, Homo sapiens; identical to SEQ ID NO: 454166
  chr13:95201662-95201892
  hypo
  melanoma vs. lymphoid_neoplasm,ovary,renal,uterine, prostate,anorectal,thyroid,myeloid_neoplasm,colorectal,lung, non_cancer,pancreas_gallbladder,cervical,upper_gi, multiple_myeloma,head_and_neck,sarcoma,liver_bileduct,breast

SEQ ID NO: 469616 - DNA, 16 bp, Homo sapiens
  chr14:59932273-59932289
  hypo
  melanoma vs. prostate,uterine,ovary,liver_bileduct, pancreas_gallbladder,thyroid,non_cancer,multiple_myeloma
ggccagataaagtgcc

SEQ ID NO: 469617 - DNA, 355 bp, Homo sapiens; identical to SEQ ID NO: 468763
  chr14:61123186-61123541
  hypo
  melanoma vs. prostate,cervical,breast

SEQ ID NO: 469618 - DNA, 460 bp, Homo sapiens; identical to SEQ ID NO: 468764
  chr14:61123681-61124141
  hypo
  melanoma vs. prostate,cervical,breast

SEQ ID NO: 469619 - DNA, 67 bp, Homo sapiens; identical to SEQ ID NO: 366426
  chr14:89657793-89657860
  hypo
  melanoma vs. lymphoid_neoplasm

SEQ ID NO: 469620 - DNA, 383 bp, Homo sapiens; identical to SEQ ID NO: 454181
  chr14:90849476-90849859
  hypo
  melanoma vs. sarcoma,anorectal,pancreas_gallbladder, liver_bileduct

SEQ ID NO: 469621 - DNA, 54 bp, Homo sapiens; identical to SEQ ID NO: 454182
  chr14:90849897-90849951
  hypo
  melanoma vs. sarcoma,anorectal,pancreas_gallbladder, liver_bileduct

SEQ ID NO: 469622 - DNA, 137 bp, Homo sapiens; identical to SEQ ID NO: 454183
  chr14:90849722-90849859
  hypo
  melanoma vs. anorectal,myeloid_neoplasm,sarcoma,thyroid, pancreas_gallbladder,non_cancer,colorectal,upper_gi

SEQ ID NO: 469623 - DNA, 54 bp, Homo sapiens; identical to SEQ ID NO: 454182
  chr14:90849897-90849951
  hypo
  melanoma vs. anorectal,myeloid_neoplasm,sarcoma,thyroid, pancreas_gallbladder,non_cancer,colorectal,upper_gi

SEQ ID NO: 469624 - DNA, 119 bp, Homo sapiens; identical to SEQ ID NO: 468775
  chr14:91883379-91883498
  hypo
  melanoma vs. upper_gi,lymphoid_neoplasm,lung,sarcoma, breast,head_and_neck,bladder_and_urothelial,colorectal,ovary, uterine,cervical,prostate,renal,pancreas_gallbladder,anorectal

SEQ ID NO: 469625 - DNA, 405 bp, Homo sapiens; identical to SEQ ID NO: 351609
  chr14:91883530-91883935
  hypo
  melanoma vs. upper_gi,lymphoid_neoplasm,lung,sarcoma, breast,head_and_neck,bladder_and_urothelial,colorectal,ovary, uterine,cervical,prostate,renal,pancreas_gallbladder,anorectal

SEQ ID NO: 469626 - DNA, 131 bp, Homo sapiens; identical to SEQ ID NO: 342044
  chr14:102375780-102375911
  hypo
  melanoma vs. liver_bileduct

SEQ ID NO: 469627 - DNA, 63 bp, Homo sapiens; identical to SEQ ID NO: 468777
  chr14:103394621-103394684
  hypo
  melanoma vs. myeloid_neoplasm,cervical, bladder_and_urothelial,lung,colorectal

SEQ ID NO: 469628 - DNA, 239 bp, Homo sapiens; identical to SEQ ID NO: 342066
  chr14:103433869-103434108
  hypo
  melanoma vs. liver_bileduct,head_and_neck, lymphoid_neoplasm,upper_gi,lung,renal,breast,colorectal

SEQ ID NO: 469629 - DNA, 455 bp, Homo sapiens; identical to SEQ ID NO: 351636
  chr14:105330980-105331435
  hypo
  melanoma vs. lung

SEQ ID NO: 469630 - DNA, 357 bp, Homo sapiens; identical to SEQ ID NO: 342143
  chr15:33445914-33446271
  hypo
  melanoma vs. breast,lymphoid_neoplasm, pancreas_gallbladder

SEQ ID NO: 469631 - DNA, 111 bp, Homo sapiens; identical to SEQ ID NO: 335080
  chr15:38857279-38857390
  hypo
  melanoma vs. lymphoid_neoplasm,lung, bladder_and_urothelial,anorectal

SEQ ID NO: 469632 - DNA, 417 bp, Homo sapiens; identical to SEQ ID NO: 468786
  chr15:41136701-41137118
  hypo
  melanoma vs. head_and_neck,breast,lung,upper_gi, colorectal,cervical,bladder_and_urothelial,pancreas_gallbladder, prostate

SEQ ID NO: 469633 - DNA, 44 bp, Homo sapiens; identical to SEQ ID NO: 203840
  chr15:41137147-41137191
  hypo
  melanoma vs. head_and_neck,breast,lung,upper_gi, colorectal,cervical,bladder_and_urothelial,pancreas_gallbladder, prostate

SEQ ID NO: 469634 - DNA, 234 bp, Homo sapiens; identical to SEQ ID NO: 342173
  chr15:49268662-49268896
  hypo
  melanoma vs. lymphoid_neoplasm,pancreas_gallbladder

SEQ ID NO: 469635 - DNA, 350 bp, Homo sapiens; identical to SEQ ID NO: 335110
  chr15:50474768-50475118
  hypo
  melanoma vs. lung,breast,colorectal, bladder_and_urothelial,prostate,anorectal,upper_gi,uterine, pancreas_gallbladder,head_and_neck

SEQ ID NO: 469636 - DNA, 815 bp, Homo sapiens; identical to SEQ ID NO: 360642
  chr15:52587420-52588235
  hypo
  melanoma vs. liver_bileduct

SEQ ID NO: 469637 - DNA, 94 bp, Homo sapiens; identical to SEQ ID NO: 342187
  chr15:58028020-58028114
  hypo
  melanoma vs. head_and_neck

SEQ ID NO: 469638 - DNA, 351 bp, Homo sapiens; identical to SEQ ID NO: 452903
  chr15:63795501-63795852
  hypo
  melanoma vs. liver_bileduct,upper_gi,colorectal,renal, breast

SEQ ID NO: 469639 - DNA, 338 bp, Homo sapiens; identical to SEQ ID NO: 347348
  chr15:63795894-63796232
  hypo
  melanoma vs. liver_bileduct,upper_gi,colorectal,renal, breast

SEQ ID NO: 469640 - DNA, 390 bp, Homo sapiens; identical to SEQ ID NO: 380850
  chr15:64439389-64439779
  hypo
  melanoma vs. liver_bileduct

SEQ ID NO: 469641 - DNA, 191 bp, Homo sapiens; identical to SEQ ID NO: 335181
  chr15:75976190-75976381
  hypo
  melanoma vs. lymphoid_neoplasm

SEQ ID NO: 469642 - DNA, 351 bp, Homo sapiens; identical to SEQ ID NO: 342291
  chr15:94048797-94049148
  hypo
  melanoma vs. head_and_neck

SEQ ID NO: 469643 - DNA, 518 bp, Homo sapiens; identical to SEQ ID NO: 455718
  chr15:101459489-101460007
  hypo
  melanoma vs. lymphoid_neoplasm

SEQ ID NO: 469644 - DNA, 179 bp, Homo sapiens; identical to SEQ ID NO: 342450
  chr16:3811586-3811765
  hypo
  melanoma vs. lymphoid_neoplasm,liver_bileduct,colorectal, head_and_neck,cervical,renal,pancreas_gallbladder,anorectal, upper_gi

SEQ ID NO: 469645 - DNA, 86 bp, Homo sapiens; identical to SEQ ID NO: 459452
  chr16:56228284-56228370
  hypo
  melanoma vs. sarcoma

SEQ ID NO: 469646 - DNA, 57 bp, Homo sapiens; identical to SEQ ID NO: 351808
  chr16:56228591-56228648
  hypo
  melanoma vs. sarcoma

SEQ ID NO: 469647 - DNA, 101 bp, Homo sapiens; identical to SEQ ID NO: 366928
  chr16:56857042-56857143
  hypo
  melanoma vs. liver_bileduct,head_and_neck,renal,upper_gi, pancreas_gallbladder,colorectal,lymphoid_neoplasm

SEQ ID NO: 469648 - DNA, 66 bp, Homo sapiens; identical to SEQ ID NO: 468836
  chr16:68269820-68269886
  hypo
  melanoma vs. liver_bileduct,lung,pancreas_gallbladder, breast

SEQ ID NO: 469649 - DNA, 113 bp, Homo sapiens; identical to SEQ ID NO: 468837
  chr16:68269896-68270009
  hypo
  melanoma vs. liver_bileduct,lung,pancreas_gallbladder, breast

SEQ ID NO: 469650 - DNA, 106 bp, Homo sapiens; identical to SEQ ID NO: 468838
  chr16:68270022-68270128
  hypo
  melanoma vs. liver_bileduct,lung,pancreas_gallbladder, breast

SEQ ID NO: 469651 - DNA, 125 bp, Homo sapiens; identical to SEQ ID NO: 347388
  chr16:68270157-68270282
  hypo
  melanoma vs. liver_bileduct,lung,pancreas_gallbladder, breast

SEQ ID NO: 469652 - DNA, 411 bp, Homo sapiens; identical to SEQ ID NO: 342626
  chr16:69833676-69834087
  hypo
  melanoma vs. lymphoid_neoplasm,liver_bileduct, head_and_neck,renal

SEQ ID NO: 469653 - DNA, 419 bp, Homo sapiens; identical to SEQ ID NO: 342642
  chr16:74782393-74782812
  hypo
  melanoma vs. lymphoid_neoplasm

SEQ ID NO: 469654 - DNA, 120 bp, Homo sapiens; identical to SEQ ID NO: 366978
  chr16:75469119-75469239
  hypo
  melanoma vs. sarcoma

SEQ ID NO: 469655 - DNA, 368 bp, Homo sapiens; identical to SEQ ID NO: 342662
  chr16:80646305-80646673
  hypo
  melanoma vs. cervical

SEQ ID NO: 469656 - DNA, 453 bp, Homo sapiens; identical to SEQ ID NO: 342736
  chr16:88091522-88091975
  hypo
  melanoma vs. head_and_neck

SEQ ID NO: 469657 - DNA, 188 bp, Homo sapiens; identical to SEQ ID NO: 456598
  chr16:88994153-88994341
  hypo
  melanoma vs. lymphoid_neoplasm

SEQ ID NO: 469658 - DNA, 104 bp, Homo sapiens; identical to SEQ ID NO: 465264
  chr16:89972021-89972125
  hypo
  melanoma vs. liver_bileduct

SEQ ID NO: 469659 - DNA, 441 bp, Homo sapiens; identical to SEQ ID NO: 465265
  chr16:89972235-89972676
  hypo
  melanoma vs. liver_bileduct

SEQ ID NO: 469660 - DNA, 197 bp, Homo sapiens; identical to SEQ ID NO: 465266
  chr16:89972802-89972999
  hypo
  melanoma vs. liver_bileduct

SEQ ID NO: 469661 - DNA, 147 bp, Homo sapiens; identical to SEQ ID NO: 465267
  chr16:89972529-89972676
  hypo
  melanoma vs. liver_bileduct,lymphoid_neoplasm, head_and_neck,colorectal,uterine,breast,prostate,renal

SEQ ID NO: 469662 - DNA, 482 bp, Homo sapiens; identical to SEQ ID NO: 355559
  chr16:89972802-89973284
  hypo
  melanoma vs. liver_bileduct,lymphoid_neoplasm, head_and_neck,colorectal,uterine,breast,prostate,renal

SEQ ID NO: 469663 - DNA, 402 bp, Homo sapiens; identical to SEQ ID NO: 217450
  chr17:1783887-1784289
  hypo
  melanoma vs. liver_bileduct,head_and_neck, lymphoid_neoplasm,bladder_and_urothelial,sarcoma,upper_gi,lung, breast,pancreas_gallbladder,renal,uterine

SEQ ID NO: 469664 - DNA, 109 bp, Homo sapiens; identical to SEQ ID NO: 367125
  chr17:1784817-1784926
  hypo
  melanoma vs. liver_bileduct,lung

SEQ ID NO: 469665 - DNA, 33 bp, Homo sapiens; identical to SEQ ID NO: 342887
  chr17:9719665-9719698
  hypo
  melanoma vs. lymphoid_neoplasm

SEQ ID NO: 469666 - DNA, 95 bp, Homo sapiens; identical to SEQ ID NO: 468848
  chr17:17399572-17399667
  hypo
  melanoma vs. sarcoma

SEQ ID NO: 469667 - DNA, 57 bp, Homo sapiens; identical to SEQ ID NO: 455756
  chr17:27893139-27893196
  hypo
  melanoma vs. head_and_neck,renal,lung, bladder_and_urothelial

SEQ ID NO: 469668 - DNA, 387 bp, Homo sapiens; identical to SEQ ID NO: 360990
  chr17:27893344-27893731
  hypo
  melanoma vs. head_and_neck,renal,lung, bladder_and_urothelial

SEQ ID NO: 469669 - DNA, 39 bp, Homo sapiens; identical to SEQ ID NO: 468867
  chr17:43298587-43298626
  hypo
  melanoma vs. lymphoid_neoplasm,multiple_myeloma, bladder_and_urothelial,prostate,uterine,breast,ovary,non_cancer, myeloid_neoplasm,thyroid,lung

SEQ ID NO: 469670 - DNA, 230 bp, Homo sapiens; identical to SEQ ID NO: 347439
  chr17:43298666-43298896
  hypo
  melanoma vs. lymphoid_neoplasm,multiple_myeloma, bladder_and_urothelial,prostate,uterine,breast,ovary,non_cancer, myeloid_neoplasm,thyroid,lung

SEQ ID NO: 469671 - DNA, 619 bp, Homo sapiens; identical to SEQ ID NO: 374170
  chr17:45928211-45928830
  hypo
  melanoma vs. lung

SEQ ID NO: 469672 - DNA, 299 bp, Homo sapiens; identical to SEQ ID NO: 468873
  chr17:46089283-46089582
  hypo
  melanoma vs. bladder_and_urothelial,prostate,anorectal, colorectal,non_cancer,myeloid_neoplasm,multiple_myeloma,thyroid, ovary,pancreas_gallbladder,lymphoid_neoplasm,uterine,upper_gi

SEQ ID NO: 469673 - DNA, 298 bp, Homo sapiens; identical to SEQ ID NO: 468876
  chr17:54911482-54911780
  hypo
  melanoma vs. cervical,bladder_and_urothelial,anorectal, multiple_myeloma,myeloid_neoplasm,ovary,colorectal, head_and_neck,breast,upper_gi,non_cancer,uterine,prostate, pancreas_gallbladder,sarcoma,lymphoid_neoplasm,renal,thyroid

SEQ ID NO: 469674 - DNA, 515 bp, Homo sapiens; identical to SEQ ID NO: 345534
  chr17:54911874-54912389
  hypo
  melanoma vs. cervical,bladder_and_urothelial,anorectal, multiple_myeloma,myeloid_neoplasm,ovary,colorectal, head_and_neck,breast,upper_gi,non_cancer,uterine,prostate, pancreas_gallbladder,sarcoma,lymphoid_neoplasm,renal,thyroid

SEQ ID NO: 469675 - DNA, 41 bp, Homo sapiens; identical to SEQ ID NO: 468883
  chr17:60885408-60885449
  hypo
  melanoma vs. pancreas_gallbladder,colorectal,uterine, bladder_and_urothelial,upper_gi,cervical,lung,myeloid_neoplasm, thyroid,breast,ovary,renal

SEQ ID NO: 469676 - DNA, 308 bp, Homo sapiens; identical to SEQ ID NO: 347460
  chr17:60885548-60885856
  hypo
  melanoma vs. pancreas_gallbladder,colorectal,uterine, bladder_and_urothelial,upper_gi,cervical,lung,myeloid_neoplasm, thyroid,breast,ovary,renal

SEQ ID NO: 469677 - DNA, 367 bp, Homo sapiens; identical to SEQ ID NO: 343065
  chr17:64716166-64716533
  hypo
  melanoma vs. lymphoid_neoplasm

SEQ ID NO: 469678 - DNA, 162 bp, Homo sapiens; identical to SEQ ID NO: 343135
  chr17:74571597-74571759
  hypo
  melanoma vs. head_and_neck,lung

SEQ ID NO: 469679 - DNA, 47 bp, Homo sapiens; identical to SEQ ID NO: 463451
  chr17:77126804-77126851
  hypo
  melanoma vs. lymphoid_neoplasm

SEQ ID NO: 469680 - DNA, 245 bp, Homo sapiens; identical to SEQ ID NO: 463452
  chr17:77126880-77127125
  hypo
  melanoma vs. lymphoid_neoplasm

SEQ ID NO: 469681 - DNA, 295 bp, Homo sapiens; identical to SEQ ID NO: 367405
  chr17:77127177-77127472
  hypo
  melanoma vs. lymphoid_neoplasm

SEQ ID NO: 469682 - DNA, 125 bp, Homo sapiens; identical to SEQ ID NO: 468888
  chr17:77778310-77778435
  hypo
  melanoma vs. head_and_neck

SEQ ID NO: 469683 - DNA, 369 bp, Homo sapiens; identical to SEQ ID NO: 343186
  chr17:77923306-77923675
  hypo
  melanoma vs. liver_bileduct,pancreas_gallbladder

SEQ ID NO: 469684 - DNA, 221 bp, Homo sapiens; identical to SEQ ID NO: 455803
  chr17:80186335-80186556
  hypo
  melanoma vs. bladder_and_urothelial,colorectal,anorectal, multiple_myeloma,upper_gi

SEQ ID NO: 469685 - DNA, 517 bp, Homo sapiens; identical to SEQ ID NO: 347473
  chr17:80186618-80187135
  hypo
  melanoma vs. bladder_and_urothelial,colorectal,anorectal, multiple_myeloma,upper_gi

SEQ ID NO: 469686 - DNA, 310 bp, Homo sapiens; identical to SEQ ID NO: 367519
  chr18:3360395-3360705
  hypo
  melanoma vs. liver_bileduct,lymphoid_neoplasm

SEQ ID NO: 469687 - DNA, 141 bp, Homo sapiens
  chr18:12375127-12375268
  hypo
  melanoma vs. anorectal
cgaaaaaggacctaccacacggcagcgtggcgtgaccatggcgaagaaattgatttaagactggcaagggagcctcaaggagtaaaaatcatgaatgcaggcactattattccccctccccacccccgctctttttttttt

SEQ ID NO: 469688 - DNA, 61 bp, Homo sapiens
  chr18:12375294-12375355
  hypo
  melanoma vs. anorectal
tggagtacagcaatgcaatcaaaactcactggagcctcaacctcccgcgccaagcaacccg

SEQ ID NO: 469689 - DNA, 704 bp, Homo sapiens; identical to SEQ ID NO: 343448
  chr18:74728317-74729021
  hypo
  melanoma vs. lymphoid_neoplasm,cervical,upper_gi, liver_bileduct,lung,renal,prostate,pancreas_gallbladder,sarcoma, bladder_and_urothelial,head_and_neck,breast,colorectal

SEQ ID NO: 469690 - DNA, 284 bp, Homo sapiens; identical to SEQ ID NO: 343480
  chr18:77126115-77126399
  hypo

SEQ ID NO: 469691 - DNA, 47 bp, Homo sapiens
  chr18:77313826-77313873
  hypo
  melanoma vs. lymphoid_neoplasm
cgggacttcagcagcacgcggagcctgaggctaaatgctgcaaaaca

SEQ ID NO: 469692 - DNA, 78 bp, Homo sapiens; identical to SEQ ID NO: 382146
  chr18:77314021-77314099
  hypo
  melanoma vs. lymphoid_neoplasm

SEQ ID NO: 469693 - DNA, 411 bp, Homo sapiens; identical to SEQ ID NO: 343493
  chr18:77497998-77498409
  hypo
  melanoma vs. liver_bileduct

SEQ ID NO: 469694 - DNA, 53 bp, Homo sapiens; identical to SEQ ID NO: 355910
  chr19:407832-407885
  hypo
  melanoma vs. lymphoid_neoplasm

SEQ ID NO: 469695 - DNA, 219 bp, Homo sapiens
  chr19:3565322-3565541
  hypo
  melanoma vs. lymphoid_neoplasm
cgtgactcagtctttgccaggaccctcctggcctcaggtcctgttcagtatctggtctaccattgccagaaggagcgcattctgtgagtcttgtgatttacgttttaacgttgatgctggtcagtccttgcgctgagagcaaaacggggaggagctgtaacgaagcgcggtgacctcctggcacggcagggcctggaactcggagctttttgttgttgt

SEQ ID NO: 469696 - DNA, 2 bp, Homo sapiens
  chr19:3565570-3565572
  hypo
  melanoma vs. lymphoid_neoplasm
tc

SEQ ID NO: 469697 - DNA, 177 bp, Homo sapiens; identical to SEQ ID NO: 335952
  chr19:11199850-11200027
  hypo
  melanoma vs. liver_bileduct

SEQ ID NO: 469698 - DNA, 25 bp, Homo sapiens
  chr19:14630505-14630530
  hypo
  melanoma vs. lymphoid_neoplasm,renal
cgcagtgagaacctcataaatattc

SEQ ID NO: 469699 - DNA, 118 bp, Homo sapiens; identical to SEQ ID NO: 356065
  chr19:16756119-16756237
  hypo
  melanoma vs. lymphoid_neoplasm,upper_gi,sarcoma,renal, liver_bileduct,lung,colorectal,prostate,uterine,cervical, head_and_neck,anorectal,bladder_and_urothelial

SEQ ID NO: 469700 - DNA, 51 bp, Homo sapiens; identical to SEQ ID NO: 462626
  chr19:19738572-19738623
  hypo
  melanoma vs. upper_gi

SEQ ID NO: 469701 - DNA, 505 bp, Homo sapiens; identical to SEQ ID NO: 462627
  chr19:19738668-19739173
  hypo
  melanoma vs. upper_gi

SEQ ID NO: 469702 - DNA, 390 bp, Homo sapiens; identical to SEQ ID NO: 462642
  chr19:38754883-38755273
  hypo
  melanoma vs. upper_gi,breast,head_and_neck,lung, colorectal,prostate,anorectal,renal,pancreas_gallbladder, cervical,myeloid_neoplasm,thyroid,non_cancer,ovary,uterine

SEQ ID NO: 469703 - DNA, 175 bp, Homo sapiens; identical to SEQ ID NO: 347598
  chr19:38755344-38755519
  hypo
  melanoma vs. upper_gi,breast,head_and_neck,lung, colorectal,prostate,anorectal,renal,pancreas_gallbladder, cervical,myeloid_neoplasm,thyroid,non_cancer,ovary,uterine

SEQ ID NO: 469704 - DNA, 669 bp, Homo sapiens; identical to SEQ ID NO: 468921
  chr19:39574122-39574791
  hypo
  melanoma vs. breast,lung

SEQ ID NO: 469705 - DNA, 45 bp, Homo sapiens; identical to SEQ ID NO: 361588
  chr19:39575044-39575089
  hypo
  melanoma vs. breast,lung

SEQ ID NO: 469706 - DNA, 363 bp, Homo sapiens; identical to SEQ ID NO: 344027
  chr19:47501985-47502348
  hypo
  melanoma vs. lymphoid_neoplasm

SEQ ID NO: 469707 - DNA, 18 bp, Homo sapiens
  chr19:49242357-49242375
  hypo
  melanoma vs. ovary
cgcgcaggtgctccgccc

SEQ ID NO: 469708 - DNA, 142 bp, Homo sapiens; identical to SEQ ID NO: 459532
  chr19:49242393-49242535
  hypo
  melanoma vs. ovary

SEQ ID NO: 469709 - DNA, 36 bp, Homo sapiens; identical to SEQ ID NO: 459533
  chr19:49242773-49242809
  hypo
  melanoma vs. ovary

SEQ ID NO: 469710 - DNA, 19 bp, Homo sapiens
  chr19:49242911-49242930
  hypo
  melanoma vs. ovary
cgccggggaacagagtcgc

SEQ ID NO: 469711 - DNA, 193 bp, Homo sapiens; identical to SEQ ID NO: 344125
  chr19:56981677-56981870
  hypo
  melanoma vs. sarcoma

SEQ ID NO: 469712 - DNA, 162 bp, Homo sapiens; identical to SEQ ID NO: 382843
  chr19:59003731-59003893
  hypo
  melanoma vs. liver_bileduct

SEQ ID NO: 469713 - DNA, 295 bp, Homo sapiens; identical to SEQ ID NO: 337457
  chr2:364121-364416
  hypo
  melanoma vs. lymphoid_neoplasm,sarcoma

SEQ ID NO: 469714 - DNA, 230 bp, Homo sapiens; identical to SEQ ID NO: 337465
  chr2:1488408-1488638
  hypo
  melanoma vs. lymphoid_neoplasm,head_and_neck

SEQ ID NO: 469715 - DNA, 271 bp, Homo sapiens; identical to SEQ ID NO: 466865
  chr2:7005163-7005434
  hypo
  melanoma vs. liver_bileduct,upper_gi,cervical,lung,ovary, uterine,pancreas_gallbladder,anorectal

SEQ ID NO: 469716 - DNA, 460 bp, Homo sapiens; identical to SEQ ID NO: 466866
  chr2:7005469-7005929
  hypo
  melanoma vs. liver_bileduct,upper_gi,cervical,lung,ovary, uterine,pancreas_gallbladder,anorectal

SEQ ID NO: 469717 - DNA, 728 bp, Homo sapiens; identical to SEQ ID NO: 349448
  chr2:7005469-7006197
  hypo
  melanoma vs. liver_bileduct

SEQ ID NO: 469718 - DNA, 247 bp, Homo sapiens; identical to SEQ ID NO: 337500
  chr2:7073094-7073341
  hypo
  melanoma vs. sarcoma,renal,prostate,head_and_neck, bladder_and_urothelial,lymphoid_neoplasm

SEQ ID NO: 469719 - DNA, 510 bp, Homo sapiens; identical to SEQ ID NO: 337539
  chr2:10512203-10512713
  hypo
  melanoma vs. bladder_and_urothelial

SEQ ID NO: 469720 - DNA, 178 bp, Homo sapiens; identical to SEQ ID NO: 345000
  chr2:10588876-10589054
  hypo
  melanoma vs. liver_bileduct,sarcoma,pancreas_gallbladder, lymphoid_neoplasm,colorectal,renal,anorectal,thyroid, myeloid_neoplasm,upper_gi,cervical,non_cancer,ovary,uterine, prostate,bladder_and_urothelial,multiple_myeloma

SEQ ID NO: 469721 - DNA, 117 bp, Homo sapiens; identical to SEQ ID NO: 455869
  chr2:10589056-10589173
  hypo
  melanoma vs. liver_bileduct,sarcoma,pancreas_gallbladder, lymphoid_neoplasm,colorectal,renal,anorectal,thyroid, myeloid_neoplasm,upper_gi,cervical,non_cancer,ovary,uterine, prostate,bladder_and_urothelial,multiple_myeloma

SEQ ID NO: 469722 - DNA, 236 bp, Homo sapiens; identical to SEQ ID NO: 453103
  chr2:74781700-74781936
  hypo
  melanoma vs. lymphoid_neoplasm,colorectal, myeloid_neoplasm,thyroid,uterine,multiple_myeloma,non_cancer, renal,upper_gi,pancreas_gallbladder,ovary,sarcoma

SEQ ID NO: 469723 - DNA, 25 bp, Homo sapiens
  chr2:97651764-97651789
  hypo
  melanoma vs. lymphoid_neoplasm
cggccgcgcagtggcctgtggagag

SEQ ID NO: 469724 - DNA, 312 bp, Homo sapiens
  chr2:97651885-97652197
  hypo
  melanoma vs. lymphoid_neoplasm
aggcctggaccagccaggagtcccagggaagtcgagtgctctctgagcgctaaccacgcgcccctgcggttcctcggcctcagtttccttacctgtaaaatggagccgctgatcctgcctcctgagttgtggagcgaggcccgcacctggaagccttggccacatagggcgggaagggcagggctccggggtgagggagggtggcgggaattcgcacggcctcagaggacggggccagctagccgggaaaggaagcaggagcaggctccccaggcggcgcagtgggaggaccccaagagttgcgtccctaga

SEQ ID NO: 469725 - DNA, 84 bp, Homo sapiens
  chr2:97652405-97652489
  hypo
  melanoma vs. lymphoid_neoplasm
ggaagctcctgcccccaggcagtcctgggtcacgcgcacttgtagtagcttgcatttaccaagacagtgagacagtggcctggc

SEQ ID NO: 469726 - DNA, 71 bp, Homo sapiens; identical to SEQ ID NO: 468970
  chr2:112656507-112656578
  hypo
  melanoma vs. sarcoma,uterine,prostate,lung, multiple_myeloma

SEQ ID NO: 469727 - DNA, 33 bp, Homo sapiens; identical to SEQ ID NO: 468971
  chr2:112657092-112657125
  hypo
  melanoma vs. sarcoma,uterine,prostate,lung, multiple_myeloma

SEQ ID NO: 469728 - DNA, 594 bp, Homo sapiens; identical to SEQ ID NO: 468977
  chr2:153192142-153192736
  hypo
  melanoma vs. lung,sarcoma,colorectal,renal,upper_gi, cervical,multiple_myeloma,bladder_and_urothelial

SEQ ID NO: 469729 - DNA, 9 bp, Homo sapiens
  chr2:160760627-160760636
  hypo
  melanoma vs. lymphoid_neoplasm,anorectal,upper_gi, cervical
cgggaatcg

SEQ ID NO: 469730 - DNA, 626 bp, Homo sapiens; identical to SEQ ID NO: 468982
  chr2:162271677-162272303
  hypo
  melanoma vs. breast,upper_gi,prostate,colorectal

SEQ ID NO: 469731 - DNA, 263 bp, Homo sapiens; identical to SEQ ID NO: 457880
  chr2:162930659-162930922
  hypo
  melanoma vs. renal,colorectal,uterine,thyroid,sarcoma, prostate,multiple_myeloma,non_cancer,pancreas_gallbladder

SEQ ID NO: 469732 - DNA, 38 bp, Homo sapiens; identical to SEQ ID NO: 468987
  chr2:166650106-166650144
  hypo
  melanoma vs. prostate,upper_gi,bladder_and_urothelial, pancreas_gallbladder,ovary,lung,head_and_neck,multiple_myeloma, breast,anorectal,cervical,myeloid_neoplasm,thyroid,renal, colorectal,non_cancer,uterine

SEQ ID NO: 469733 - DNA, 313 bp, Homo sapiens; identical to SEQ ID NO: 468988
  chr2:166650508-166650821
  hypo
  melanoma vs. prostate,upper_gi,bladder_and_urothelial, pancreas_gallbladder,ovary,lung,head_and_neck,multiple_myeloma, breast,anorectal,cervical,myeloid_neoplasm,thyroid,renal, colorectal,non_cancer,uterine

SEQ ID NO: 469734 - DNA, 723 bp, Homo sapiens; identical to SEQ ID NO: 345049
  chr2:166650508-166651231
  hypo
  melanoma vs. colorectal,prostate,non_cancer,uterine,lung, bladder_and_urothelial,pancreas_gallbladder,head_and_neck, multiple_myeloma,breast,anorectal,cervical,myeloid_neoplasm, thyroid,ovary,upper_gi,renal,lymphoid_neoplasm,sarcoma

SEQ ID NO: 469735 - DNA, 897 bp, Homo sapiens; identical to SEQ ID NO: 331573
  chr2:200320451-200321348
  hypo
  melanoma vs. liver_bileduct,cervical, bladder_and_urothelial,colorectal

SEQ ID NO: 469736 - DNA, 58 bp, Homo sapiens; identical to SEQ ID NO: 469005
  chr2:207307406-207307464
  hypo
  melanoma vs. sarcoma

SEQ ID NO: 469737 - DNA, 21 bp, Homo sapiens
  chr2:217559556-217559577
  hypo
  melanoma vs. breast,ovary,anorectal,prostate, head_and_neck,bladder_and_urothelial,uterine,myeloid_neoplasm, sarcoma,renal
aaaggggccaagagggccccc

SEQ ID NO: 469738 - DNA, 411 bp, Homo sapiens; identical to SEQ ID NO: 469012
  chr2:217559556-217559967
  hypo
  melanoma vs. head_and_neck,breast,anorectal,prostate, uterine,sarcoma

SEQ ID NO: 469739 - DNA, 95 bp, Homo sapiens; identical to SEQ ID NO: 469023
  chr2:223185036-223185131
  hypo
  melanoma vs. bladder_and_urothelial,upper_gi,cervical, pancreas_gallbladder,colorectal,ovary

SEQ ID NO: 469740 - DNA, 137 bp, Homo sapiens; identical to SEQ ID NO: 337929
  chr2:237999682-237999819
  hypo
  melanoma vs. liver_bileduct,lymphoid_neoplasm,lung, head_and_neck

SEQ ID NO: 469741 - DNA, 477 bp, Homo sapiens; identical to SEQ ID NO: 337990
  chr2:242350123-242350600
  hypo
  melanoma vs. head_and_neck,lymphoid_neoplasm,breast, prostate

SEQ ID NO: 469742 - DNA, 101 bp, Homo sapiens; identical to SEQ ID NO: 338002
  chr2:242618731-242618832
  hypo
  melanoma vs. liver_bileduct

SEQ ID NO: 469743 - DNA, 127 bp, Homo sapiens; identical to SEQ ID NO: 460980
  chr20:9048369-9048496
  hypo
  melanoma vs. breast

SEQ ID NO: 469744 - DNA, 632 bp, Homo sapiens; identical to SEQ ID NO: 460981
  chr20:9048532-9049164
  hypo
  melanoma vs. breast

SEQ ID NO: 469745 - DNA, 35 bp, Homo sapiens; identical to SEQ ID NO: 460982
  chr20:9049238-9049273
  hypo
  melanoma vs. breast

SEQ ID NO: 469746 - DNA, 439 bp, Homo sapiens; identical to SEQ ID NO: 344188
  chr20:25012790-25013229
  hypo
  melanoma vs. renal,cervical,colorectal,prostate, head_and_neck,lymphoid_neoplasm,uterine

SEQ ID NO: 469747 - DNA, 913 bp, Homo sapiens; identical to SEQ ID NO: 469042
  chr20:30192854-30193767
  hypo
  melanoma vs. lung,cervical,liver_bileduct,renal, colorectal,anorectal,pancreas_gallbladder,uterine,upper_gi, multiple_myeloma,head_and_neck,non_cancer,prostate, bladder_and_urothelial,myeloid_neoplasm,thyroid,breast

SEQ ID NO: 469748 - DNA, 585 bp, Homo sapiens; identical to SEQ ID NO: 455929
  chr20:30193272-30193857
  hypo
  melanoma vs. lung,liver_bileduct,renal,cervical,uterine, multiple_myeloma,thyroid,non_cancer,upper_gi,colorectal, pancreas_gallbladder,bladder_and_urothelial,myeloid_neoplasm, anorectal,prostate

SEQ ID NO: 469749 - DNA, 189 bp, Homo sapiens; identical to SEQ ID NO: 345629
  chr20:30193992-30194181
  hypo
  melanoma vs. lung,liver_bileduct,renal,cervical,uterine, multiple_myeloma,thyroid,non_cancer,upper_gi,colorectal, pancreas_gallbladder,bladder_and_urothelial,myeloid_neoplasm, anorectal,prostate

SEQ ID NO: 469750 - DNA, 390 bp, Homo sapiens; identical to SEQ ID NO: 455936
  chr20:37433723-37434113
  hypo
  melanoma vs. ovary,multiple_myeloma

SEQ ID NO: 469751 - DNA, 27 bp, Homo sapiens
  chr20:37434086-37434113
  hypo
  melanoma vs. multiple_myeloma,ovary,prostate,uterine, lymphoid_neoplasm,non_cancer,myeloid_neoplasm, bladder_and_urothelial,thyroid
cggggtgggggttaggaaaactatttt

SEQ ID NO: 469752 - DNA, 343 bp, Homo sapiens; identical to SEQ ID NO: 356298
  chr20:48504339-48504682
  hypo
  melanoma vs. sarcoma,colorectal,upper_gi,lung, head_and_neck,renal,uterine,liver_bileduct,prostate, bladder_and_urothelial

SEQ ID NO: 469753 - DNA, 113 bp, Homo sapiens; identical to SEQ ID NO: 345643
  chr20:57225466-57225579
  hypo
  melanoma vs. myeloid_neoplasm,thyroid,non_cancer, multiple_myeloma

SEQ ID NO: 469754 - DNA, 84 bp, Homo sapiens; identical to SEQ ID NO: 456873
  chr20:60544922-60545006
  hypo
  melanoma vs. sarcoma,lymphoid_neoplasm,renal, liver_bileduct,prostate,uterine,head_and_neck,cervical, pancreas_gallbladder,lung,colorectal,non_cancer, bladder_and_urothelial,upper_gi,ovary,anorectal,thyroid

SEQ ID NO: 469755 - DNA, 209 bp, Homo sapiens; identical to SEQ ID NO: 456874
  chr20:60545058-60545267
  hypo
  melanoma vs. sarcoma,lymphoid_neoplasm,renal, liver_bileduct,prostate,uterine,head_and_neck,cervical, pancreas_gallbladder,lung,colorectal,non_cancer, bladder_and_urothelial,upper_gi,ovary,anorectal,thyroid

SEQ ID NO: 469756 - DNA, 266 bp, Homo sapiens; identical to SEQ ID NO: 456875
  chr20:60545296-60545562
  hypo
  melanoma vs. sarcoma,lymphoid_neoplasm,renal, liver_bileduct,prostate,uterine,head_and_neck,cervical, pancreas_gallbladder,lung,colorectal,non_cancer, bladder_and_urothelial,upper_gi,ovary,anorectal,thyroid

SEQ ID NO: 469757 - DNA, 187 bp, Homo sapiens; identical to SEQ ID NO: 344366
  chr20:60868207-60868394
  hypo
  melanoma vs. liver_bileduct

SEQ ID NO: 469758 - DNA, 19 bp, Homo sapiens
  chr20:62314830-62314849
  hypo
  melanoma vs. liver_bileduct,head_and_neck
cgtacccaggcacgtgcac

SEQ ID NO: 469759 - DNA, 161 bp, Homo sapiens; identical to SEQ ID NO: 356358
  chr20:62314955-62315116
  hypo
  melanoma vs. liver_bileduct,head_and_neck

SEQ ID NO: 469760 - DNA, 35 bp, Homo sapiens; identical to SEQ ID NO: 469070
  chr21:46351619-46351654
  hypo
  melanoma vs. sarcoma

SEQ ID NO: 469761 - DNA, 323 bp, Homo sapiens; identical to SEQ ID NO: 352573
  chr21:46352279-46352602
  hypo
  melanoma vs. sarcoma

SEQ ID NO: 469762 - DNA, 289 bp, Homo sapiens; identical to SEQ ID NO: 356479
  chr22:18348544-18348833
  hypo
  melanoma vs. liver_bileduct,lymphoid_neoplasm,renal

SEQ ID NO: 469763 - DNA, 18 bp, Homo sapiens
  chr22:22899582-22899600
  hypo
  melanoma vs. cervical
cggtcttgcagcgacatt

SEQ ID NO: 469764 - DNA, 134 bp, Homo sapiens; identical to SEQ ID NO: 349101
  chr22:22899978-22900112
  hypo
  melanoma vs. cervical

SEQ ID NO: 469765 - DNA, 96 bp, Homo sapiens; identical to SEQ ID NO: 346280
  chr22:36902565-36902661
  hypo
  melanoma vs. renal

SEQ ID NO: 469766 - DNA, 290 bp, Homo sapiens; identical to SEQ ID NO: 344753
  chr22:38061005-38061295
  hypo
  melanoma vs. lung,lymphoid_neoplasm

SEQ ID NO: 469767 - DNA, 237 bp, Homo sapiens; identical to SEQ ID NO: 344756
  chr22:38363635-38363872
  hypo
  melanoma vs. liver_bileduct

SEQ ID NO: 469768 - DNA, 54 bp, Homo sapiens; identical to SEQ ID NO: 383476
  chr22:38365003-38365057
  hypo
  melanoma vs. sarcoma

SEQ ID NO: 469769 - DNA, 316 bp, Homo sapiens; identical to SEQ ID NO: 344758
  chr22:38369819-38370135
  hypo
  melanoma vs. liver_bileduct

SEQ ID NO: 469770 - DNA, 271 bp, Homo sapiens; identical to SEQ ID NO: 344759
  chr22:38378835-38379106
  hypo
  melanoma vs. liver_bileduct

SEQ ID NO: 469771 - DNA, 54 bp, Homo sapiens
  chr22:38380268-38380322
  hypo
  melanoma vs. liver_bileduct,sarcoma,lymphoid_neoplasm, bladder_and_urothelial,colorectal
cggggtgtcgcctctctccacctcacagcagggtcccaggcctgggcgggccag

SEQ ID NO: 469772 - DNA, 136 bp, Homo sapiens; identical to SEQ ID NO: 368784
  chr22:38380437-38380573
  hypo
  melanoma vs. liver_bileduct,sarcoma,lymphoid_neoplasm, bladder_and_urothelial,colorectal

SEQ ID NO: 469773 - DNA, 230 bp, Homo sapiens; identical to SEQ ID NO: 344762
  chr22:38381994-38382224
  hypo
  melanoma vs. sarcoma,liver_bileduct,lymphoid_neoplasm, bladder_and_urothelial

SEQ ID NO: 469774 - DNA, 592 bp, Homo sapiens; identical to SEQ ID NO: 456925
  chr22:38434385-38434977
  hypo
  melanoma vs. lymphoid_neoplasm,liver_bileduct, pancreas_gallbladder,sarcoma,colorectal

SEQ ID NO: 469775 - DNA, 146 bp, Homo sapiens; identical to SEQ ID NO: 356535
  chr22:38435006-38435152
  hypo
  melanoma vs. lymphoid_neoplasm,liver_bileduct, pancreas_gallbladder,sarcoma,colorectal

SEQ ID NO: 469776 - DNA, 123 bp, Homo sapiens; identical to SEQ ID NO: 362064
  chr22:38966046-38966169
  hypo
  melanoma vs. lymphoid_neoplasm

SEQ ID NO: 469777 - DNA, 23 bp, Homo sapiens
  chr22:41839279-41839302
  hypo
  melanoma vs. sarcoma,lymphoid_neoplasm
cgcgcgcgcatgtgtctgcctgc

SEQ ID NO: 469778 - DNA, 2 bp, Homo sapiens
  chr22:41839382-41839384
  hypo
  melanoma vs. sarcoma,lymphoid_neoplasm
gc

SEQ ID NO: 469779 - DNA, 173 bp, Homo sapiens; identical to SEQ ID NO: 344802
  chr22:43529312-43529485
  hypo
  melanoma vs. liver_bileduct,lymphoid_neoplasm,renal

SEQ ID NO: 469780 - DNA, 208 bp, Homo sapiens; identical to SEQ ID NO: 338025
  chr3:10541012-10541220
  hypo
  melanoma vs. liver_bileduct

SEQ ID NO: 469781 - DNA, 94 bp, Homo sapiens; identical to SEQ ID NO: 338033
  chr3:12626586-12626680
  hypo
  melanoma vs. lymphoid_neoplasm,lung,sarcoma,breast, head_and_neck,liver_bileduct,bladder_and_urothelial,renal, upper_gi,colorectal,cervical

SEQ ID NO: 469782 - DNA, 78 bp, Homo sapiens; identical to SEQ ID NO: 345081
  chr3:16555426-16555504
  hypo
  melanoma vs. lymphoid_neoplasm

SEQ ID NO: 469783 - DNA, 108 bp, Homo sapiens; identical to SEQ ID NO: 454364
  chr3:16925425-16925533
  hypo
  melanoma vs. myeloid_neoplasm,thyroid,lymphoid_neoplasm, pancreas_gallbladder

SEQ ID NO: 469784 - DNA, 74 bp, Homo sapiens; identical to SEQ ID NO: 454365
  chr3:16925583-16925657
  hypo
  melanoma vs. myeloid_neoplasm,thyroid,lymphoid_neoplasm, pancreas_gallbladder

SEQ ID NO: 469785 - DNA, 231 bp, Homo sapiens; identical to SEQ ID NO: 454366
  chr3:16925705-16925936
  hypo
  melanoma vs. myeloid_neoplasm,thyroid,lymphoid_neoplasm, pancreas_gallbladder

SEQ ID NO: 469786 - DNA, 256 bp, Homo sapiens; identical to SEQ ID NO: 454367
  chr3:16925965-16926221
  hypo
  melanoma vs. myeloid_neoplasm,thyroid,lymphoid_neoplasm, pancreas_gallbladder

SEQ ID NO: 469787 - DNA, 989 bp, Homo sapiens; identical to SEQ ID NO: 331712
  chr3:24536360-24537349
  hypo
  melanoma vs. liver_bileduct,pancreas_gallbladder,breast, cervical,lung,prostate,anorectal,uterine

SEQ ID NO: 469788 - DNA, 168 bp, Homo sapiens; identical to SEQ ID NO: 357574
  chr3:32279558-32279726
  hypo
  melanoma vs. lung,breast,liver_bileduct

SEQ ID NO: 469789 - DNA, 9 bp, Homo sapiens
  chr3:45188139-45188148
  hypo
  melanoma vs. lung
gcgaaggtc

SEQ ID NO: 469790 - DNA, 77 bp, Homo sapiens
  chr3:52415754-52415831
  hypo
  melanoma vs. sarcoma
cgcatcagccgcaccctacgccaggcgctgggcaatgcactcctgctgggcgtgggtggcagcggccgcagctccct

SEQ ID NO: 469791 - DNA, 572 bp, Homo sapiens; identical to SEQ ID NO: 357616
  chr3:53527829-53528401
  hypo
  melanoma vs. liver_bileduct

SEQ ID NO: 469792 - DNA, 783 bp, Homo sapiens; identical to SEQ ID NO: 454373
  chr3:66550318-66551101
  hypo
  melanoma vs. sarcoma,breast,upper_gi

SEQ ID NO: 469793 - DNA, 222 bp, Homo sapiens; identical to SEQ ID NO: 469130
  chr3:69434926-69435148
  hypo
  melanoma vs. breast,renal,pancreas_gallbladder,cervical, prostate,anorectal

SEQ ID NO: 469794 - DNA, 838 bp, Homo sapiens; identical to SEQ ID NO: 469131
  chr3:71113110-71113948
  hypo
  melanoma vs. upper_gi,pancreas_gallbladder,colorectal, bladder_and_urothelial,prostate,uterine

SEQ ID NO: 469795 - DNA, 957 bp, Homo sapiens; identical to SEQ ID NO: 469132
  chr3:71113488-71114445
  hypo
  melanoma vs. upper_gi,head_and_neck,sarcoma, bladder_and_urothelial,lung,breast,pancreas_gallbladder,ovary, liver_bileduct,colorectal,cervical,uterine,renal,anorectal, prostate,non_cancer,myeloid_neoplasm,thyroid

SEQ ID NO: 469796 - DNA, 827 bp, Homo sapiens; identical to SEQ ID NO: 345093
  chr3:71113993-71114820
  hypo
  melanoma vs. ovary,upper_gi,bladder_and_urothelial, uterine,anorectal,myeloid_neoplasm,lung,breast,non_cancer, thyroid,pancreas_gallbladder,prostate,renal,colorectal,cervical, head_and_neck,liver_bileduct,sarcoma

SEQ ID NO: 469797 - DNA, 77 bp, Homo sapiens
  chr3:71187313-71187390
  hypo
  melanoma vs. liver_bileduct,head_and_neck,renal
cgcagaatggtgacgctgtctggagaacacacgtggaggaagaagcgaatgcttctaattgcctcaaaatgggattt

SEQ ID NO: 469798 - DNA, 123 bp, Homo sapiens; identical to SEQ ID NO: 353344
  chr3:71187419-71187542
  hypo
  melanoma vs. liver_bileduct,head_and_neck,renal

SEQ ID NO: 469799 - DNA, 913 bp, Homo sapiens; identical to SEQ ID NO: 345094
  chr3:71630573-71631486
  hypo
  melanoma vs. sarcoma,head_and_neck,upper_gi,renal, pancreas_gallbladder,prostate,uterine,ovary,breast,cervical, anorectal,non_cancer,myeloid_neoplasm,thyroid,colorectal, liver_bileduct,lung,bladder_and_urothelial

SEQ ID NO: 469800 - DNA, 912 bp, Homo sapiens; identical to SEQ ID NO: 469135
  chr3:71630988-71631900
  hypo
  melanoma vs. liver_bileduct,sarcoma,ovary,head_and_neck, upper_gi,breast,renal,anorectal,prostate,lung

SEQ ID NO: 469801 - DNA, 102 bp, Homo sapiens; identical to SEQ ID NO: 455975
  chr3:99594790-99594892
  hypo
  melanoma vs. sarcoma,myeloid_neoplasm,upper_gi,thyroid, colorectal,bladder_and_urothelial

SEQ ID NO: 469802 - DNA, 163 bp, Homo sapiens; identical to SEQ ID NO: 469138
  chr3:105088087-105088250
  hypo
  melanoma vs. liver_bileduct,head_and_neck,lung, lymphoid_neoplasm,prostate,pancreas_gallbladder,breast, bladder_and_urothelial,renal,colorectal,uterine,ovary,upper_gi, anorectal,cervical,non_cancer,multiple_myeloma

SEQ ID NO: 469803 - DNA, 459 bp, Homo sapiens; identical to SEQ ID NO: 346577
  chr3:105088087-105088546
  hypo
  melanoma vs. liver_bileduct,head_and_neck, lymphoid_neoplasm,lung,bladder_and_urothelial, pancreas_gallbladder,breast,prostate,ovary,colorectal,anorectal, upper_gi,renal,cervical,uterine,non_cancer,multiple_myeloma,
  CONT. FROM ABOVE: myeloid_neoplasm,thyroid

SEQ ID NO: 469804 - DNA, 69 bp, Homo sapiens; identical to SEQ ID NO: 338152
  chr3:107520023-107520092
  hypo
  melanoma vs. upper_gi,lymphoid_neoplasm

SEQ ID NO: 469805 - DNA, 832 bp, Homo sapiens; identical to SEQ ID NO: 345097
  chr3:113251180-113252012
  hypo
  melanoma vs. multiple_myeloma,cervical,breast,anorectal, uterine,prostate,myeloid_neoplasm,thyroid,upper_gi,non_cancer, lung,colorectal,lymphoid_neoplasm,ovary,pancreas_gallbladder, bladder_and_urothelial,head_and_neck

SEQ ID NO: 469806 - DNA, 824 bp, Homo sapiens; identical to SEQ ID NO: 469142
  chr3:113251532-113252356
  hypo
  melanoma vs. cervical,breast,anorectal,uterine, multiple_myeloma,upper_gi,non_cancer,lung,myeloid_neoplasm, thyroid

SEQ ID NO: 469807 - DNA, 123 bp, Homo sapiens; identical to SEQ ID NO: 455978
  chr3:127794271-127794394
  hypo
  melanoma vs. anorectal,sarcoma

SEQ ID NO: 469808 - DNA, 292 bp, Homo sapiens; identical to SEQ ID NO: 338277
  chr3:184626085-184626377
  hypo
  melanoma vs. liver_bileduct

SEQ ID NO: 469809 - DNA, 105 bp, Homo sapiens; identical to SEQ ID NO: 455251
  chr3:196754412-196754517
  hypo
  melanoma vs. lymphoid_neoplasm

SEQ ID NO: 469810 - DNA, 118 bp, Homo sapiens; identical to SEQ ID NO: 363449
  chr3:196754758-196754876
  hypo
  melanoma vs. lymphoid_neoplasm

SEQ ID NO: 469811 - DNA, 78 bp, Homo sapiens
  chr4:4417408-4417486
  hypo
  melanoma vs. sarcoma,lymphoid_neoplasm, bladder_and_urothelial,renal,cervical,prostate
cgtttctgagccatctcgtatgccagccctgagcggggccgccactccacaggtgttggccgcatcaggtcttgcagg

SEQ ID NO: 469812 - DNA, 3 bp, Homo sapiens
  chr4:4417933-4417936
  hypo
  melanoma vs. sarcoma,lymphoid_neoplasm, bladder_and_urothelial,renal,cervical,prostate
tac

SEQ ID NO: 469813 - DNA, 230 bp, Homo sapiens; identical to SEQ ID NO: 338432
  chr4:6058789-6059019
  hypo
  melanoma vs. lymphoid_neoplasm

SEQ ID NO: 469814 - DNA, 609 bp, Homo sapiens; identical to SEQ ID NO: 332064
  chr4:25863681-25864290
  hypo
  melanoma vs. lung,bladder_and_urothelial,ovary, multiple_myeloma,liver_bileduct,upper_gi,breast,cervical, sarcoma,uterine,anorectal,prostate,pancreas_gallbladder, myeloid_neoplasm,head_and_neck,thyroid,renal,colorectal,
  CONT. FROM ABOVE: non_cancer,lymphoid_neoplasm

SEQ ID NO: 469815 - DNA, 650 bp, Homo sapiens; identical to SEQ ID NO: 370427
  chr4:41363167-41363817
  hypo
  melanoma vs. liver_bileduct

SEQ ID NO: 469816 - DNA, 768 bp, Homo sapiens; identical to SEQ ID NO: 469185
  chr4:42657902-42658670
  hypo
  melanoma vs. lymphoid_neoplasm,prostate,colorectal, upper_gi,breast,ovary,lung,renal,anorectal,multiple_myeloma, uterine

SEQ ID NO: 469817 - DNA, 728 bp, Homo sapiens; identical to SEQ ID NO: 469186
  chr4:42658241-42658969
  hypo
  melanoma vs. lymphoid_neoplasm,colorectal,ovary,prostate, breast,multiple_myeloma,lung,renal,upper_gi,uterine,anorectal

SEQ ID NO: 469818 - DNA, 51 bp, Homo sapiens; identical to SEQ ID NO: 363585
  chr4:83839357-83839408
  hypo
  melanoma vs. liver_bileduct,sarcoma

SEQ ID NO: 469819 - DNA, 28 bp, Homo sapiens
  chr4:106067046-106067074
  hypo
  melanoma vs. lymphoid_neoplasm,cervical,anorectal,lung, bladder_and_urothelial,breast,non_cancer,myeloid_neoplasm, thyroid,renal
cggggcggggagaaacagaactcggtca

SEQ ID NO: 469820 - DNA, 269 bp, Homo sapiens; identical to SEQ ID NO: 349958
  chr4:106067220-106067489
  hypo
  melanoma vs. lymphoid_neoplasm,cervical,anorectal,lung, bladder_and_urothelial,breast,non_cancer,myeloid_neoplasm, thyroid,renal

SEQ ID NO: 469821 - DNA, 761 bp, Homo sapiens; identical to SEQ ID NO: 346652
  chr4:124317751-124318512
  hypo
  melanoma vs. lung,liver_bileduct,head_and_neck,upper_gi

SEQ ID NO: 469822 - DNA, 942 bp, Homo sapiens; identical to SEQ ID NO: 469199
  chr4:124318042-124318984
  hypo
  melanoma vs. liver_bileduct

SEQ ID NO: 469823 - DNA, 766 bp, Homo sapiens; identical to SEQ ID NO: 469200
  chr4:124318522-124319288
  hypo
  melanoma vs. liver_bileduct

SEQ ID NO: 469824 - DNA, 824 bp, Homo sapiens; identical to SEQ ID NO: 332200
  chr4:142557243-142558067
  hypo
  melanoma vs. liver_bileduct

SEQ ID NO: 469825 - DNA, 194 bp, Homo sapiens; identical to SEQ ID NO: 456009
  chr4:187026475-187026669
  hypo
  melanoma vs. lung,ovary

SEQ ID NO: 469826 - DNA, 829 bp, Homo sapiens; identical to SEQ ID NO: 346671
  chr5:472600-473429
  hypo
  melanoma vs. liver_bileduct,lymphoid_neoplasm

SEQ ID NO: 469827 - DNA, 966 bp, Homo sapiens; identical to SEQ ID NO: 469215
  chr5:472934-473900
  hypo
  melanoma vs. lymphoid_neoplasm,liver_bileduct,sarcoma, breast,lung,head_and_neck,bladder_and_urothelial

SEQ ID NO: 469828 - DNA, 829 bp, Homo sapiens; identical to SEQ ID NO: 469216
  chr5:473431-474260
  hypo
  melanoma vs. liver_bileduct

SEQ ID NO: 469829 - DNA, 171 bp, Homo sapiens; identical to SEQ ID NO: 456015
  chr5:10564301-10564472
  hypo
  melanoma vs. lymphoid_neoplasm

SEQ ID NO: 469830 - DNA, 71 bp, Homo sapiens; identical to SEQ ID NO: 338718
  chr5:31410355-31410426
  hypo
  melanoma vs. liver_bileduct,lymphoid_neoplasm

SEQ ID NO: 469831 - DNA, 38 bp, Homo sapiens; identical to SEQ ID NO: 456033
  chr5:77268330-77268368
  hypo
  melanoma vs. myeloid_neoplasm,thyroid,ovary

SEQ ID NO: 469832 - DNA, 15 bp, Homo sapiens
  chr5:79911142-79911157
  hypo
  melanoma vs. lymphoid_neoplasm,sarcoma
cgcggggctacagag

SEQ ID NO: 469833 - DNA, 240 bp, Homo sapiens; identical to SEQ ID NO: 363789
  chr5:79911325-79911565
  hypo
  melanoma vs. lymphoid_neoplasm,sarcoma

SEQ ID NO: 469834 - DNA, 738 bp, Homo sapiens; identical to SEQ ID NO: 332448
  chr5:110847638-110848376
  hypo
  melanoma vs. colorectal,pancreas_gallbladder

SEQ ID NO: 469835 - DNA, 211 bp, Homo sapiens; identical to SEQ ID NO: 338808
  chr5:139113843-139114054
  hypo
  melanoma vs. sarcoma

SEQ ID NO: 469836 - DNA, 394 bp, Homo sapiens; identical to SEQ ID NO: 469266
  chr6:710660-711054
  hypo
  melanoma vs. lymphoid_neoplasm,bladder_and_urothelial, multiple_myeloma,cervical,anorectal,head_and_neck,colorectal, uterine,myeloid_neoplasm,thyroid,non_cancer,renal,ovary, upper_gi,sarcoma,breast

SEQ ID NO: 469837 - DNA, 95 bp, Homo sapiens; identical to SEQ ID NO: 200248
  chr6:4775543-4775638
  hypo
  melanoma vs. myeloid_neoplasm,ovary,uterine, head_and_neck,non_cancer,lung,thyroid,renal,multiple_myeloma, upper_gi,prostate,pancreas_gallbladder

SEQ ID NO: 469838 - DNA, 305 bp, Homo sapiens; identical to SEQ ID NO: 458177
  chr6:4775640-4775945
  hypo
  melanoma vs. myeloid_neoplasm,ovary,uterine, head_and_neck,non_cancer,lung,thyroid,renal,multiple_myeloma, upper_gi,prostate,pancreas_gallbladder

SEQ ID NO: 469839 - DNA, 95 bp, Homo sapiens; identical to SEQ ID NO: 200248
  chr6:4775543-4775638
  hypo
  melanoma vs. multiple_myeloma,pancreas_gallbladder,lung, ovary,head_and_neck,uterine,myeloid_neoplasm,thyroid,breast

SEQ ID NO: 469840 - DNA, 358 bp, Homo sapiens; identical to SEQ ID NO: 469286
  chr6:4775640-4775998
  hypo
  melanoma vs. multiple_myeloma,pancreas_gallbladder,lung, ovary,head_and_neck,uterine,myeloid_neoplasm,thyroid,breast

SEQ ID NO: 469841 - DNA, 76 bp, Homo sapiens; identical to SEQ ID NO: 358382
  chr6:4776187-4776263
  hypo
  melanoma vs. multiple_myeloma,pancreas_gallbladder,lung, ovary,head_and_neck,uterine,myeloid_neoplasm,thyroid,breast

SEQ ID NO: 469842 - DNA, 74 bp, Homo sapiens
  chr6:20640178-20640252
  hypo
  melanoma vs. liver_bileduct
cgcgagccaccgcgccgaccattttcattggttttaagaagttatttttcaagttgtaccttaagggtgctttc

SEQ ID NO: 469843 - DNA, 370 bp, Homo sapiens; identical to SEQ ID NO: 469334
  chr6:37666475-37666845
  hypo
  melanoma vs. bladder_and_urothelial,ovary,lung,breast, prostate,upper_gi,cervical,multiple_myeloma,head_and_neck, pancreas_gallbladder,anorectal,non_cancer,uterine,thyroid,renal, lymphoid_neoplasm,colorectal

SEQ ID NO: 469844 - DNA, 218 bp, Homo sapiens; identical to SEQ ID NO: 345233
  chr6:37666866-37667084
  hypo
  melanoma vs. bladder_and_urothelial,ovary,lung,breast, prostate,upper_gi,cervical,multiple_myeloma,head_and_neck, pancreas_gallbladder,anorectal,non_cancer,uterine,thyroid,renal, lymphoid_neoplasm,colorectal

SEQ ID NO: 469845 - DNA, 373 bp, Homo sapiens; identical to SEQ ID NO: 453380
  chr6:46097250-46097623
  hypo
  melanoma vs. lymphoid_neoplasm,renal,ovary,prostate, uterine,pancreas_gallbladder,breast,colorectal,thyroid, liver_bileduct,non_cancer,lung

SEQ ID NO: 469846 - DNA, 521 bp, Homo sapiens; identical to SEQ ID NO: 345237
  chr6:46097694-46098215
  hypo
  melanoma vs. lymphoid_neoplasm,renal,ovary,prostate, uterine,pancreas_gallbladder,breast,colorectal,thyroid, liver_bileduct,non_cancer,lung

SEQ ID NO: 469847 - DNA, 353 bp, Homo sapiens; identical to SEQ ID NO: 462978
  chr6:106533693-106534046
  hypo
  melanoma vs. head_and_neck,bladder_and_urothelial, colorectal,lymphoid_neoplasm,upper_gi,cervical,prostate,lung, uterine,renal,breast,multiple_myeloma,anorectal,ovary, pancreas_gallbladder

SEQ ID NO: 469848 - DNA, 155 bp, Homo sapiens; identical to SEQ ID NO: 345249
  chr6:106961023-106961178
  hypo
  melanoma vs. lymphoid_neoplasm,myeloid_neoplasm,thyroid, prostate,renal,head_and_neck,non_cancer,pancreas_gallbladder, colorectal,cervical

SEQ ID NO: 469849 - DNA, 163 bp, Homo sapiens; identical to SEQ ID NO: 332893
  chr6:108455187-108455350
  hypo
  melanoma vs. liver_bileduct

SEQ ID NO: 469850 - DNA, 147 bp, Homo sapiens; identical to SEQ ID NO: 339162
  chr6:157430380-157430527
  hypo
  melanoma vs. sarcoma

SEQ ID NO: 469851 - DNA, 249 bp, Homo sapiens
  chr7:373783-374032
  hypo
  melanoma vs. lymphoid_neoplasm,liver_bileduct
cgcgcacacatgcacacatgcacccacatgcacgcagaaacacacgcacaaacaaacgcgcacacatgcacacatgcatccacatgcatgcagaaacgcacacacaaacgcgcacacatgcacacatgcacccacatgcacgcagaaacacacacacaaacgtgcacacatgcacacatgcacacatgcacccacatgcacgcagaaacacacaaacgtgcacacatgcacacatgcacccacatgcac

SEQ ID NO: 469852 - DNA, 141 bp, Homo sapiens; identical to SEQ ID NO: 456108
  chr7:22893437-22893578
  hypo
  melanoma vs. lymphoid_neoplasm,liver_bileduct,lung, prostate,uterine,multiple_myeloma,cervical,renal,head_and_neck, bladder_and_urothelial,anorectal,non_cancer,sarcoma,ovary, thyroid,colorectal,myeloid_neoplasm,pancreas_gallbladder,
  CONT. FROM ABOVE: upper_gi

SEQ ID NO: 469853 - DNA, 700 bp, Homo sapiens; identical to SEQ ID NO: 456109
  chr7:22893607-22894307
  hypo
  melanoma vs. lymphoid_neoplasm,liver_bileduct,lung, prostate,uterine,multiple_myeloma,cervical,renal,head_and_neck, bladder_and_urothelial,anorectal,non_cancer,sarcoma,ovary, thyroid,colorectal,myeloid_neoplasm,pancreas_gallbladder,
  CONT. FROM ABOVE: upper_gi

SEQ ID NO: 469854 - DNA, 867 bp, Homo sapiens; identical to SEQ ID NO: 456110
  chr7:22893828-22894695
  hypo
  melanoma vs. lymphoid_neoplasm,lung,prostate, bladder_and_urothelial,liver_bileduct,anorectal,head_and_neck, multiple_myeloma,uterine,thyroid,renal,myeloid_neoplasm, non_cancer,colorectal,ovary,cervical,pancreas_gallbladder,
  CONT. FROM ABOVE: sarcoma

SEQ ID NO: 469855 - DNA, 229 bp, Homo sapiens; identical to SEQ ID NO: 454480
  chr7:23513246-23513475
  hypo
  melanoma vs. anorectal

SEQ ID NO: 469856 - DNA, 221 bp, Homo sapiens; identical to SEQ ID NO: 333064
  chr7:23570157-23570378
  hypo
  melanoma vs. lymphoid_neoplasm,liver_bileduct,renal, head_and_neck,lung,breast,pancreas_gallbladder,upper_gi, colorectal,cervical,bladder_and_urothelial,anorectal,prostate, uterine,multiple_myeloma

SEQ ID NO: 469857 - DNA, 99 bp, Homo sapiens; identical to SEQ ID NO: 469397
  chr7:25989912-25990011
  hypo
  melanoma vs. sarcoma

SEQ ID NO: 469858 - DNA, 585 bp, Homo sapiens; identical to SEQ ID NO: 371493
  chr7:25990228-25990813
  hypo
  melanoma vs. sarcoma

SEQ ID NO: 469859 - DNA, 54 bp, Homo sapiens; identical to SEQ ID NO: 457122
  chr7:30603338-30603392
  hypo
  melanoma vs. lymphoid_neoplasm

SEQ ID NO: 469860 - DNA, 110 bp, Homo sapiens; identical to SEQ ID NO: 378122
  chr7:30603436-30603546
  hypo
  melanoma vs. lymphoid_neoplasm

SEQ ID NO: 469861 - DNA, 158 bp, Homo sapiens; identical to SEQ ID NO: 339514
  chr7:55571348-55571506
  hypo
  melanoma vs. sarcoma

SEQ ID NO: 469862 - DNA, 56 bp, Homo sapiens; identical to SEQ ID NO: 339516
  chr7:56075649-56075705
  hypo
  melanoma vs. liver_bileduct

SEQ ID NO: 469863 - DNA, 216 bp, Homo sapiens; identical to SEQ ID NO: 339561
  chr7:98955444-98955660
  hypo
  melanoma vs. liver_bileduct,upper_gi,lymphoid_neoplasm, head_and_neck,sarcoma,lung,colorectal,prostate,ovary,renal, pancreas_gallbladder,uterine,cervical,multiple_myeloma, anorectal

SEQ ID NO: 469864 - DNA, 215 bp, Homo sapiens; identical to SEQ ID NO: 339565
  chr7:99084631-99084846
  hypo
  melanoma vs. lymphoid_neoplasm,liver_bileduct,lung, head_and_neck

SEQ ID NO: 469865 - DNA, 20 bp, Homo sapiens
  chr7:100823770-100823790
  hypo
  melanoma vs. ovary
actgaggatggtggtgtctc

SEQ ID NO: 469866 - DNA, 487 bp, Homo sapiens; identical to SEQ ID NO: 350630
  chr7:101460542-101461029
  hypo
  melanoma vs. liver_bileduct

SEQ ID NO: 469867 - DNA, 95 bp, Homo sapiens; identical to SEQ ID NO: 469437
  chr7:128509984-128510079
  hypo
  melanoma vs. pancreas_gallbladder

SEQ ID NO: 469868 - DNA, 2 bp, Homo sapiens
  chr7:128510198-128510200
  hypo
  melanoma vs. pancreas_gallbladder
cc

SEQ ID NO: 469869 - DNA, 362 bp, Homo sapiens; identical to SEQ ID NO: 345285
  chr7:139930346-139930708
  hypo
  melanoma vs. cervical,colorectal

SEQ ID NO: 469870 - DNA, 140 bp, Homo sapiens; identical to SEQ ID NO: 201208
  chr7:140774419-140774559
  hypo
  melanoma vs. renal

SEQ ID NO: 469871 - DNA, 134 bp, Homo sapiens; identical to SEQ ID NO: 339656
  chr7:147354952-147355086
  hypo
  melanoma vs. lymphoid_neoplasm,sarcoma

SEQ ID NO: 469872 - DNA, 127 bp, Homo sapiens; identical to SEQ ID NO: 364538
  chr7:150081308-150081435
  hypo
  melanoma vs. renal,lymphoid_neoplasm,liver_bileduct, sarcoma

SEQ ID NO: 469873 - DNA, 271 bp, Homo sapiens; identical to SEQ ID NO: 339686
  chr7:151165408-151165679
  hypo
  melanoma vs. head_and_neck,lymphoid_neoplasm,sarcoma, renal,anorectal,cervical,uterine,prostate,liver_bileduct

SEQ ID NO: 469874 - DNA, 42 bp, Homo sapiens; identical to SEQ ID NO: 455419
  chr7:157262486-157262528
  hypo
  melanoma vs. lymphoid_neoplasm

SEQ ID NO: 469875 - DNA, 3 bp, Homo sapiens
  chr7:157353111-157353114
  hypo
  melanoma vs. renal
atc

SEQ ID NO: 469876 - DNA, 158 bp, Homo sapiens
  chr7:157370313-157370471
  hypo
  melanoma vs. lymphoid_neoplasm
cggaccccacttaaaggcttgttatatgggaccgggaccacgctgtgaggcgaatgttttttctactctgttatcatttggatttagaaaaatctaaaagataaaaaccacaccacactcccagggtctggttcatgagcacacagccgtgtgaacca

SEQ ID NO: 469877 - DNA, 116 bp, Homo sapiens; identical to SEQ ID NO: 378403
  chr7:157370789-157370905
  hypo
  melanoma vs. lymphoid_neoplasm

SEQ ID NO: 469878 - DNA, 267 bp, Homo sapiens; identical to SEQ ID NO: 339742
  chr7:157446450-157446717
  hypo
  melanoma vs. lymphoid_neoplasm

SEQ ID NO: 469879 - DNA, 203 bp, Homo sapiens; identical to SEQ ID NO: 339758
  chr7:157642963-157643166
  hypo
  melanoma vs. head_and_neck,lymphoid_neoplasm

SEQ ID NO: 469880 - DNA, 38 bp, Homo sapiens
  chr7:157659219-157659257
  hypo
  melanoma vs. lymphoid_neoplasm
cgcatgtgcctctcagcccttgccatgacaaccatgag

SEQ ID NO: 469881 - DNA, 25 bp, Homo sapiens
  chr7:157659473-157659498
  hypo
  melanoma vs. lymphoid_neoplasm
acacggccactaccccgcccccgac

SEQ ID NO: 469882 - DNA, 273 bp, Homo sapiens; identical to SEQ ID NO: 339764
  chr7:157738113-157738386
  hypo
  melanoma vs. lymphoid_neoplasm

SEQ ID NO: 469883 - DNA, 145 bp, Homo sapiens; identical to SEQ ID NO: 339765
  chr7:157744287-157744432
  hypo
  melanoma vs. lymphoid_neoplasm

SEQ ID NO: 469884 - DNA, 234 bp, Homo sapiens; identical to SEQ ID NO: 339772
  chr7:157929571-157929805
  hypo
  melanoma vs. lymphoid_neoplasm

SEQ ID NO: 469885 - DNA, 767 bp, Homo sapiens; identical to SEQ ID NO: 346965
  chr8:18870226-18870993
  hypo
  melanoma vs. liver_bileduct,renal,lung,uterine, colorectal,bladder_and_urothelial,anorectal,prostate,ovary, cervical,head_and_neck,pancreas_gallbladder,breast,thyroid, myeloid_neoplasm,multiple_myeloma,non_cancer,upper_gi

SEQ ID NO: 469886 - DNA, 751 bp, Homo sapiens; identical to SEQ ID NO: 469450
  chr8:18870545-18871296
  hypo
  melanoma vs. lung,liver_bileduct,ovary

SEQ ID NO: 469887 - DNA, 20 bp, Homo sapiens
  chr8:23020932-23020952
  hypo
  melanoma vs. cervical,colorectal,renal,non_cancer, anorectal,liver_bileduct,pancreas_gallbladder,upper_gi, myeloid_neoplasm,multiple_myeloma,uterine,prostate
cgaacgaacgaacgaacgaa

SEQ ID NO: 469888 - DNA, 25 bp, Homo sapiens
  chr8:23021107-23021132
  hypo
  melanoma vs. cervical,colorectal,renal,non_cancer, anorectal,liver_bileduct,pancreas_gallbladder,upper_gi, myeloid_neoplasm,multiple_myeloma,uterine,prostate
cggcccggtcgctcctgcccagccc

SEQ ID NO: 469889 - DNA, 127 bp, Homo sapiens; identical to SEQ ID NO: 345299
  chr8:23021590-23021717
  hypo
  melanoma vs. cervical,colorectal,renal,non_cancer, anorectal,liver_bileduct,pancreas_gallbladder,upper_gi, myeloid_neoplasm,multiple_myeloma,uterine,prostate

SEQ ID NO: 469890 - DNA, 173 bp, Homo sapiens; identical to SEQ ID NO: 456160
  chr8:56791852-56792025
  hypo
  melanoma vs. lymphoid_neoplasm,upper_gi,colorectal, pancreas_gallbladder,bladder_and_urothelial,cervical

SEQ ID NO: 469891 - DNA, 731 bp, Homo sapiens; identical to SEQ ID NO: 456161
  chr8:56792065-56792796
  hypo
  melanoma vs. lymphoid_neoplasm,upper_gi,colorectal, pancreas_gallbladder,bladder_and_urothelial,cervical

SEQ ID NO: 469892 - DNA, 935 bp, Homo sapiens; identical to SEQ ID NO: 350750
  chr8:56792306-56793241
  hypo
  melanoma vs. liver_bileduct,lung,upper_gi

SEQ ID NO: 469893 - DNA, 239 bp, Homo sapiens; identical to SEQ ID NO: 453448
  chr8:60030908-60031147
  hypo
  melanoma vs. non_cancer,thyroid,myeloid_neoplasm,renal

SEQ ID NO: 469894 - DNA, 144 bp, Homo sapiens; identical to SEQ ID NO: 201426
  chr8:61822883-61823027
  hypo
  melanoma vs. ovary,colorectal

SEQ ID NO: 469895 - DNA, 209 bp, Homo sapiens; identical to SEQ ID NO: 459875
  chr8:80803900-80804109
  hypo
  melanoma vs. multiple_myeloma,pancreas_gallbladder, sarcoma,breast

SEQ ID NO: 469896 - DNA, 107 bp, Homo sapiens; identical to SEQ ID NO: 340030
  chr8:128957492-128957599
  hypo
  melanoma vs. lymphoid_neoplasm

SEQ ID NO: 469897 - DNA, 107 bp, Homo sapiens; identical to SEQ ID NO: 456182
  chr8:142427489-142427596
  hypo
  melanoma vs. anorectal,multiple_myeloma,colorectal, myeloid_neoplasm,non_cancer,thyroid

SEQ ID NO: 469898 - DNA, 328 bp, Homo sapiens; identical to SEQ ID NO: 456183
  chr8:142427700-142428028
  hypo
  melanoma vs. anorectal,multiple_myeloma,colorectal, myeloid_neoplasm,non_cancer,thyroid

SEQ ID NO: 469899 - DNA, 64 bp, Homo sapiens; identical to SEQ ID NO: 333690
  chr9:82188495-82188559
  hypo
  melanoma vs. colorectal,cervical,prostate,head_and_neck, lung,bladder_and_urothelial,anorectal

SEQ ID NO: 469900 - DNA, 545 bp, Homo sapiens; identical to SEQ ID NO: 461329
  chr9:93955385-93955930
  hypo
  melanoma vs. lymphoid_neoplasm,pancreas_gallbladder, cervical

SEQ ID NO: 469901 - DNA, 82 bp, Homo sapiens; identical to SEQ ID NO: 461330
  chr9:93956177-93956259
  hypo
  melanoma vs. lymphoid_neoplasm,pancreas_gallbladder, cervical

SEQ ID NO: 469902 - DNA, 156 bp, Homo sapiens; identical to SEQ ID NO: 453504
  chr9:93955774-93955930
  hypo
  melanoma vs. pancreas_gallbladder,cervical, lymphoid_neoplasm,colorectal

SEQ ID NO: 469903 - DNA, 268 bp, Homo sapiens; identical to SEQ ID NO: 453505
  chr9:93956177-93956445
  hypo
  melanoma vs. pancreas_gallbladder,cervical, lymphoid_neoplasm,colorectal

SEQ ID NO: 469904 - DNA, 395 bp, Homo sapiens; identical to SEQ ID NO: 333758
  chr9:116111663-116112058
  hypo
  melanoma vs. lung

SEQ ID NO: 469905 - DNA, 253 bp, Homo sapiens; identical to SEQ ID NO: 340314
  chr9:126165468-126165721
  hypo
  melanoma vs. liver_bileduct

SEQ ID NO: 469906 - DNA, 280 bp, Homo sapiens; identical to SEQ ID NO: 333801
  chr9:132145475-132145755
  hypo
  melanoma vs. liver_bileduct,upper_gi,head_and_neck, breast,lung,bladder_and_urothelial,colorectal, pancreas_gallbladder,prostate,cervical,ovary,uterine

SEQ ID NO: 469907 - DNA, 306 bp, Homo sapiens; identical to SEQ ID NO: 459908
  chr9:135286324-135286630
  hypo
  melanoma vs. myeloid_neoplasm,thyroid,non_cancer, multiple_myeloma,prostate,cervical,bladder_and_urothelial

SEQ ID NO: 469908 - DNA, 630 bp, Homo sapiens; identical to SEQ ID NO: 345338
  chr9:135286324-135286954
  hypo
  melanoma vs. multiple_myeloma,pancreas_gallbladder, uterine,colorectal,myeloid_neoplasm,non_cancer,thyroid,prostate, lung,bladder_and_urothelial,upper_gi,renal,cervical,breast, ovary,lymphoid_neoplasm,head_and_neck

SEQ ID NO: 469909 - DNA, 520 bp, Homo sapiens; identical to SEQ ID NO: 350968
  chr9:139948370-139948890
  hypo
  melanoma vs. lung,breast,uterine,head_and_neck, colorectal,liver_bileduct,prostate,pancreas_gallbladder, anorectal,upper_gi,renal

SEQ ID NO: 469910 - DNA, 283 bp, Homo sapiens; identical to SEQ ID NO: 334379
  chr11:119587853-119588136
  hyper
  multiple_myeloma vs. upper_gi,lung,liver_bileduct, cervical,pancreas_gallbladder,ovary,renal,uterine,anorectal, breast,thyroid,colorectal,non_cancer,sarcoma, bladder_and_urothelial

SEQ ID NO: 469911 - DNA, 897 bp, Homo sapiens; identical to SEQ ID NO: 334943
  chr14:62162333-62163230
  hyper
  multiple_myeloma vs. liver_bileduct

SEQ ID NO: 469912 - DNA, 260 bp, Homo sapiens
  chr16:89189500-89189760
  hyper
  multiple_myeloma vs. colorectal,renal,thyroid,uterine, upper_gi,bladder_and_urothelial,non_cancer,prostate, pancreas_gallbladder,cervical
cgggaacatttccagttcagccaaggagtcggtgcagcaggtggagtacagctgccctgcggggcctggctccaccaggggccaagacccttcgtggggaggagcacagcctgagggcctcagggtttgtgccctccgacacctgagattcagggctcccagaggggtgggtgggcgccccaggacaaccaggtgatgatgggcgctgtgaactctgaaaagccccagcatcagagacctgctgctctctcatgtgaagg

SEQ ID NO: 469913 - DNA, 790 bp, Homo sapiens
  chr18:3449180-3449970
  hyper
  multiple_myeloma vs. lung,pancreas_gallbladder,ovary, liver_bileduct,head_and_neck,upper_gi,myeloid_neoplasm,melanoma
cgggtgtttacttaatggctagtttctgtttgaaatgggaggagggatcccctagcagggttccaatccgaagagtagacactgttgaccgaaacagacgagcaggcacggcgtggtcaccccttagctataaaagtggccgctgccggggttcggcgactcggggtgtcaggcggagtcttggtgaggcaggcgcgcgcccggccgtccccgggcagagacgtttaaagagcatgtgagcgtgacaagtgtctgtccgcaacgtgtcagatttcgaaactgccttgcaatccagtccggaactcgcagctttagcccgggggaacagacgttcgtttaggctgtgtctcatcattcccccccgccccacccccgccgacctcccactgtcgctgctggaggaagagccccgggaggagaagggtgcgccgcgccgcgcccgcgtgtcaatggcagccgcgcattctggaagaagttggttcttgtctcgaatacttttcctcccgtgccccgccccttgaatcagaggcggctgtctcgtgcggctagagcagggccagtagagttcggggcagctgtcaaaaacgagacggggaggcttttcttcccgggggtggaggagggaaggagggaggtgtccttttttccatctgttgcagtttccgaaccaaacgcaccctcgccagccccgggaagaaaggcccaagggagaaacctggggcgctcggctggtgcccccaccgccgggcgagggatgcgggcggtccgtgcgcggcaggcggaaaggatc

SEQ ID NO: 469914 - DNA, 990 bp, Homo sapiens
  chr18:3449477-3450467
  hyper
  multiple_myeloma vs. lung,pancreas_gallbladder,ovary, colorectal,breast
cggaactcgcagctttagcccgggggaacagacgttcgtttaggctgtgtctcatcattcccccccgccccacccccgccgacctcccactgtcgctgctggaggaagagccccgggaggagaagggtgcgccgcgccgcgcccgcgtgtcaatggcagccgcgcattctggaagaagttggttcttgtctcgaatacttttcctcccgtgccccgccccttgaatcagaggcggctgtctcgtgcggctagagcagggccagtagagttcggggcagctgtcaaaaacgagacggggaggcttttcttcccgggggtggaggagggaaggagggaggtgtccttttttccatctgttgcagtttccgaaccaaacgcaccctcgccagccccgggaagaaaggcccaagggagaaacctggggcgctcggctggtgcccccaccgccgggcgagggatgcgggcggtccgtgcgcggcaggcggaaaggatcgtgtttctggacccggccaccccccgcgtccgcaccgccgcccccgagggacgagtgacagcggccgccgcgctcggtccagtcttcccggctggaaggtgcgggggaggggcggaggagcggcggggcgggagggggacggggcgggcggctgggggcggaggcaggacctcctgtaccttccctcctcgcctctctcactctgacagcgccgaggtgcgccgagcaggagcagggaacaaaggagcggagaggggaggggagagagttgggcgagggagagcccccggccggctgccagaagatcccggcgggaggaagcccaagtgtcacttgaattccacccaaggagcgggcgcctgggatcagagcgtcctgtttagcaataacggctggagcacgtcctacaagttacgggagagtcggctgtgaaggagacgttcgcttatcccctgtgtccccgctcctggcccctccagacccccgccttgcctcgc

SEQ ID NO: 469915 - DNA, 985 bp, Homo sapiens; identical to SEQ ID NO: 347477
  chr18:3449983-3450968
  hyper
  multiple_myeloma vs. pancreas_gallbladder,lung, colorectal,sarcoma,uterine,breast,ovary,upper_gi,renal, head_and_neck,anorectal,thyroid,bladder_and_urothelial,melanoma, myeloid_neoplasm,non_cancer

SEQ ID NO: 469916 - DNA, 947 bp, Homo sapiens
  chr18:3450509-3451456
  hyper
  multiple_myeloma vs. pancreas_gallbladder,lung, head_and_neck,ovary,melanoma,sarcoma,renal,breast,uterine, myeloid_neoplasm
cggccgcgggctgcgcgcaccagaagacgcgagtccggggaaacgtgctggccgggccgcgccgcgcggagtcacttggtggacttttccgcccaggggctctcatgctggagtggcggccgtgctctttgttgaggctgcgtctgaaacggcagcggctgttttcctgctagacacaacacgaggggctgttgtggggcgagcctctccacgctgctggcacgttgtcaagaaacacgctcagcgccttgtttgtgcgcctgcaagtttcattgtctccgccgacaccccacgctcggcccagccgccgcgtggcttctcgctctttctcgcgtgctggggatatggggtccgagtagggaggacccagcccctcgtttttcccgatccggacccaggcggccggggccgcgggaccgccgcggctttgtctgaaagttccactcctaggctccccccgcccccgcccccgccgcccccctactcccagccgggccctagcactgttctttagggatgtggtgtttttacgatcgaaggaatgcgattctggaccccctcatcgccctcgggtgtaaacagctttggaaagctagacttttacaaatccccagtctctaaaagttttcccacgatgaattttggggcaggaggaagagttagcacccagggccagcagcttcaagcggcatgcagtcaaaatgcgtccaaatgtgacaagcaggcttggttgtaagtgcaaagagcaaggctgtcattgtttccacgaagtgttctggaagctttacaactaaaacttgccgtcagtttggtttaaaaacaaaatacaccggagggggacggggggtggagaaaccacacaaaacaccccgaaaggtcagagtgtgaagtcccttttgaagttaacaaaaattgagtccctggctgggaggtcccccgagtgttcc

SEQ ID NO: 469917 - DNA, 782 bp, Homo sapiens; identical to SEQ ID NO: 336161
  chr19:45004129-45004911
  hyper
  multiple_myeloma vs. liver_bileduct,lung

SEQ ID NO: 469918 - DNA, 581 bp, Homo sapiens; identical to SEQ ID NO: 347682
  chr20:49224897-49225478
  hyper
  multiple_myeloma vs. breast,myeloid_neoplasm,lung, prostate,melanoma,thyroid,non_cancer,renal,cervical,uterine, anorectal,pancreas_gallbladder,ovary,colorectal,upper_gi, bladder_and_urothelial

SEQ ID NO: 469919 - DNA, 305 bp, Homo sapiens; identical to SEQ ID NO: 336468
  chr20:49225991-49226296
  hyper
  multiple_myeloma vs. lung,sarcoma,breast,cervical, myeloid_neoplasm,bladder_and_urothelial,colorectal

SEQ ID NO: 469920 - DNA, 348 bp, Homo sapiens
  chr21:46800403-46800751
  hyper
  multiple_myeloma vs. anorectal,thyroid,sarcoma,renal, cervical,uterine
cgtccgtccgtgcacacacgctcacctcgcacccagcgtccgtccgtgcacacgctcacctcgcacccagcgtccgtccgtgcacacgctcacctcgtacccagcgtccgtctgtgcacacatgctcccctcgcaccgagcgtctgtccgtgcacacgcttacctcacacccagcatccatctgtgcacacacgctcccctcgcacccagcatccgtgcacacgctcacctcgcacccagcatctgtccatgcacacactcccctcgcacctagcgtccgtccatgcacatactcaccttgcacccagcatccatctgtgcacacaccctcacctcgcacccagcatc

SEQ ID NO: 469921 - DNA, 304 bp, Homo sapiens; identical to SEQ ID NO: 362010
  chr21:46800780-46801084
  hyper
  multiple_myeloma vs. anorectal,thyroid,sarcoma,renal, cervical,uterine

SEQ ID NO: 469922 - DNA, 214 bp, Homo sapiens; identical to SEQ ID NO: 336588
  chr21:46801338-46801552
  hyper
  multiple_myeloma vs. lymphoid_neoplasm,uterine, myeloid_neoplasm

SEQ ID NO: 469923 - DNA, 990 bp, Homo sapiens; identical to SEQ ID NO: 454374
  chr3:66550603-66551593
  hyper
  multiple_myeloma vs. upper_gi,liver_bileduct

SEQ ID NO: 469924 - DNA, 207 bp, Homo sapiens; identical to SEQ ID NO: 332281
  chr5:1061585-1061792
  hyper
  multiple_myeloma vs. liver_bileduct

SEQ ID NO: 469925 - DNA, 860 bp, Homo sapiens; identical to SEQ ID NO: 332282
  chr5:1064412-1065272
  hyper
  multiple_myeloma vs. upper_gi,uterine, bladder_and_urothelial,colorectal,liver_bileduct,breast, cervical,head_and_neck,pancreas_gallbladder,renal,prostate, non_cancer,ovary,myeloid_neoplasm,lung,thyroid

SEQ ID NO: 469926 - DNA, 955 bp, Homo sapiens
  chr6:18263786-18264741
  hyper
  multiple_myeloma vs. lung,liver_bileduct, lymphoid_neoplasm,upper_gi,colorectal,myeloid_neoplasm, pancreas_gallbladder
cgtcaaatgatgaaatgttaacgaacgtttagagcggacgagaagtcggctgcactccaatacatctctaccacgctaacaaatactttaaaaaccggaatacacaaagtcaattctacgccatcgctcaaaacaaaagcagataaattgtgcacacattctcgctgaaaatcactccgacttcacgcctctaaacaccaaaagagcaagaaaactgtttcctgggtgaaaaatacaaaaaaacttcggtctgaaaaattcatcagttgggatgcgactccccccacctttttcctcctcctcctcctcctcgtcgtcctcgtcctcttcctcctcgctctcctctctgggaccgggcatttcgggttctttctcggacgcgggctgggtgggggttccctccccctccgcagcaggggccgaggcggacatgctgtgaacctgcatgcgggaagaaagccggacgtctcggtcctcctactcccgcaggcaggaccgggcggccaccctgaatgatgctacccttcccgcgggacacctgccctgaaagttgcctcctcccatagccgggaccgcagcgctcagtccccaggggcggcttccctcccgctccgccgccgccgtccagggattcccgaggcgggaaaccgcgcccgctgccccgcgtgcgcgcgcgcccgcccggcctgcgctgttcccggcccggcccgagctgccggccctccacgtcccctcccccgccccaggccgccgtccaaatggccgcgtccctcccccgtcggccgcggcaggggcgaccgggcctccggcgtcccgaagcagcccttaccgcggatttcggccgccgcgggcctggcacgcgagggcacgaggaggttctgggaggcggcggcggccgacgccgaggagaaggcgcgcgggccgctgtctggcgtgacgctcgcgccgcgcgctc

SEQ ID NO: 469927 - DNA, 956 bp, Homo sapiens; identical to SEQ ID NO: 350287
  chr6:18264270-18265226
  hyper
  multiple_myeloma vs. lung,upper_gi,lymphoid_neoplasm, pancreas_gallbladder,head_and_neck,liver_bileduct

SEQ ID NO: 469928 - DNA, 255 bp, Homo sapiens; identical to SEQ ID NO: 461366
  chr1:2275835-2276090
  hypo
  multiple_myeloma vs. ovary,lymphoid_neoplasm,sarcoma, breast

SEQ ID NO: 469929 - DNA, 386 bp, Homo sapiens; identical to SEQ ID NO: 461367
  chr1:2276200-2276586
  hypo
  multiple_myeloma vs. ovary,lymphoid_neoplasm,sarcoma, breast

SEQ ID NO: 469930 - DNA, 821 bp, Homo sapiens; identical to SEQ ID NO: 352727
  chr1:2276200-2277021
  hypo
  multiple_myeloma vs. bladder_and_urothelial,ovary, head_and_neck,breast,anorectal,sarcoma,thyroid

SEQ ID NO: 469931 - DNA, 215 bp, Homo sapiens; identical to SEQ ID NO: 336811
  chr1:2726383-2726598
  hypo
  multiple_myeloma vs. lymphoid_neoplasm

SEQ ID NO: 469932 - DNA, 3 bp, Homo sapiens
  chr1:2726837-2726840
  hypo
  multiple_myeloma vs. thyroid
cgt

SEQ ID NO: 469933 - DNA, 83 bp, Homo sapiens; identical to SEQ ID NO: 375546
  chr1:2726958-2727041
  hypo
  multiple_myeloma vs. thyroid

SEQ ID NO: 469934 - DNA, 44 bp, Homo sapiens
  chr1:2846750-2846794
  hypo
  multiple_myeloma vs. lymphoid_neoplasm,myeloid_neoplasm, uterine,pancreas_gallbladder
cgtgcacacacatacatgcaaacacatgtgcacacacacacgtg

SEQ ID NO: 469935 - DNA, 547 bp, Homo sapiens; identical to SEQ ID NO: 352739
  chr1:2846823-2847370
  hypo
  multiple_myeloma vs. lymphoid_neoplasm,myeloid_neoplasm, uterine,pancreas_gallbladder

SEQ ID NO: 469936 - DNA, 450 bp, Homo sapiens
  chr1:2850546-2850996
  hypo
  multiple_myeloma vs. thyroid,lymphoid_neoplasm,uterine
cggccagccgggctctaacatgtcctcaactttcaggaaaccagagcctccgagtaagtatcagatgagttgctaatgttggaaaaaaagcgagaaacatgcttgggggctctgttttacggctgcacttgaagtcggaatctgcgatcgtaacccaatgctggcctcgccaacgtgttttcggtattgtcgggataattgaaagtccagacaaatttggctatcagggctccaggcagcggaatcccatggtggcccctggtgtgatgagctcgccgaggccgtctcaggtcctgcgcccaccacggtcttcgggagcagctgtcggctttgcaaaagccccaggactttccgggtggacatggggggcttggctttgtcaccgggacctcttgaaaggcagccggtcctgggcctctcatctggccccgcacccttcttggccaccga

SEQ ID NO: 469937 - DNA, 32 bp, Homo sapiens; identical to SEQ ID NO: 352741
  chr1:2851025-2851057
  hypo
  multiple_myeloma vs. thyroid,lymphoid_neoplasm,uterine

SEQ ID NO: 469938 - DNA, 2 bp, Homo sapiens
  chr1:2918722-2918724
  hypo
  multiple_myeloma vs. anorectal,uterine,thyroid, non_cancer,lymphoid_neoplasm,prostate,renal,cervical
ac

SEQ ID NO: 469939 - DNA, 529 bp, Homo sapiens
  chr1:2938633-2939162
  hypo
  multiple_myeloma vs. anorectal,non_cancer, pancreas_gallbladder
cgagaacttcggcgtgcccgctttctacctgtcggaccaggcggtgctggctctctacgcctctgcctgtgtcacgggcctggtggtggacagcggggatgcggtcacctgcactgtccccatctttgagggttactccctgccccacgcagtcaccaagctccacgtggcgggcagggacatcacggagctcctcatgcagctgctcctggccagcggccacaccttcccctgccagctggacaagggtctcgtggacgacatcaaaaagaagctgtgctacgtggccttggagcccgagaaggagctttcccggaggccggaggaggtcctgagggagtacaagctgcccgacgggaacatcatcagcctcggggacccgctgcaccaggcgcccgaggccctgttcgtgccccagcagctgggcagccagagccccgggctctcgaatatggtctccagcagcatcaccaagtgtgataccgacatccagaagatcctctttggggagattgtgctgtcggggggc

SEQ ID NO: 469940 - DNA, 169 bp, Homo sapiens; identical to SEQ ID NO: 362256
  chr1:2939191-2939360
  hypo
  multiple_myeloma vs. anorectal,non_cancer, pancreas_gallbladder

SEQ ID NO: 469941 - DNA, 33 bp, Homo sapiens; identical to SEQ ID NO: 463100
  chr1:2999791-2999824
  hypo
  multiple_myeloma vs. lymphoid_neoplasm

SEQ ID NO: 469942 - DNA, 83 bp, Homo sapiens; identical to SEQ ID NO: 352743
  chr1:2999864-2999947
  hypo
  multiple_myeloma vs. lymphoid_neoplasm

SEQ ID NO: 469943 - DNA, 584 bp, Homo sapiens; identical to SEQ ID NO: 336819
  chr1:3000551-3001135
  hypo
  multiple_myeloma vs. anorectal

SEQ ID NO: 469944 - DNA, 108 bp, Homo sapiens
  chr1:3008438-3008546
  hypo
  multiple_myeloma vs. lymphoid_neoplasm,thyroid
cgggggtgatggacagttcgcaggtggtcagatgcgagagaattcacatcgcagaacctgccaggaaaatcaatgggaccgtgaggactgctaggtttgggaggcccg

SEQ ID NO: 469945 - DNA, 68 bp, Homo sapiens; identical to SEQ ID NO: 362260
  chr1:3008575-3008643
  hypo
  multiple_myeloma vs. lymphoid_neoplasm,thyroid

SEQ ID NO: 469946 - DNA, 253 bp, Homo sapiens
  chr1:3032644-3032897
  hypo
  multiple_myeloma vs. lymphoid_neoplasm
cggcaggcgtcaggttgagtccttggggttcagggaggtcaaggtcaggcctagcgtgggtggtcatctcaggggcagcactggtggccgttgaattgttccttaccggggagaacaggtggcagggagggatggttccagaccccatggcacccgtgtctctgcagtgtgtccctctcatggggggacagtaggcagagctccccggctgccctgcgccggcgtgctcactccgcggtgcgtgcttaatacc

SEQ ID NO: 469947 - DNA, 177 bp, Homo sapiens; identical to SEQ ID NO: 362262
  chr1:3032979-3033156
  hypo
  multiple_myeloma vs. lymphoid_neoplasm

SEQ ID NO: 469948 - DNA, 125 bp, Homo sapiens; identical to SEQ ID NO: 375561
  chr1:3037182-3037307
  hypo
  multiple_myeloma vs. upper_gi,thyroid

SEQ ID NO: 469949 - DNA, 145 bp, Homo sapiens; identical to SEQ ID NO: 336823
  chr1:3050813-3050958
  hypo
  multiple_myeloma vs. lymphoid_neoplasm,anorectal,thyroid, renal,prostate,uterine,non_cancer,colorectal,breast, bladder_and_urothelial,pancreas_gallbladder,sarcoma

SEQ ID NO: 469950 - DNA, 304 bp, Homo sapiens; identical to SEQ ID NO: 463102
  chr1:3052594-3052898
  hypo
  multiple_myeloma vs. lymphoid_neoplasm,anorectal, upper_gi,uterine,thyroid,non_cancer,colorectal,prostate, myeloid_neoplasm,pancreas_gallbladder,sarcoma

SEQ ID NO: 469951 - DNA, 40 bp, Homo sapiens; identical to SEQ ID NO: 345690
  chr1:3052927-3052967
  hypo
  multiple_myeloma vs. lymphoid_neoplasm,anorectal, upper_gi,uterine,thyroid,non_cancer,colorectal,prostate, myeloid_neoplasm,pancreas_gallbladder,sarcoma

SEQ ID NO: 469952 - DNA, 120 bp, Homo sapiens; identical to SEQ ID NO: 454537
  chr1:3111118-3111238
  hypo
  multiple_myeloma vs. anorectal,lymphoid_neoplasm, upper_gi,renal,non_cancer,pancreas_gallbladder,uterine,thyroid

SEQ ID NO: 469953 - DNA, 326 bp, Homo sapiens; identical to SEQ ID NO: 347777
  chr1:3111463-3111789
  hypo
  multiple_myeloma vs. anorectal,lymphoid_neoplasm, upper_gi,renal,non_cancer,pancreas_gallbladder,uterine,thyroid

SEQ ID NO: 469954 - DNA, 683 bp, Homo sapiens; identical to SEQ ID NO: 362268
  chr1:3114432-3115115
  hypo
  multiple_myeloma vs. upper_gi

SEQ ID NO: 469955 - DNA, 188 bp, Homo sapiens; identical to SEQ ID NO: 352749
  chr1:3125905-3126093
  hypo
  multiple_myeloma vs. lymphoid_neoplasm,anorectal

SEQ ID NO: 469956 - DNA, 187 bp, Homo sapiens; identical to SEQ ID NO: 336829
  chr1:3172404-3172591
  hypo
  multiple_myeloma vs. thyroid,non_cancer,renal

SEQ ID NO: 469957 - DNA, 164 bp, Homo sapiens; identical to SEQ ID NO: 336831
  chr1:3193780-3193944
  hypo
  multiple_myeloma vs. upper_gi

SEQ ID NO: 469958 - DNA, 473 bp, Homo sapiens; identical to SEQ ID NO: 336832
  chr1:3195292-3195765
  hypo
  multiple_myeloma vs. lymphoid_neoplasm,anorectal, upper_gi,pancreas_gallbladder

SEQ ID NO: 469959 - DNA, 550 bp, Homo sapiens; identical to SEQ ID NO: 336834
  chr1:3228695-3229245
  hypo
  multiple_myeloma vs. melanoma

SEQ ID NO: 469960 - DNA, 859 bp, Homo sapiens; identical to SEQ ID NO: 352751
  chr1:3321132-3321991
  hypo
  multiple_myeloma vs. anorectal,thyroid,upper_gi,renal, lymphoid_neoplasm,colorectal,non_cancer,prostate,cervical

SEQ ID NO: 469961 - DNA, 489 bp, Homo sapiens; identical to SEQ ID NO: 454539
  chr1:3321510-3321999
  hypo
  multiple_myeloma vs. lymphoid_neoplasm

SEQ ID NO: 469962 - DNA, 121 bp, Homo sapiens; identical to SEQ ID NO: 362275
  chr1:3322260-3322381
  hypo
  multiple_myeloma vs. lymphoid_neoplasm

SEQ ID NO: 469963 - DNA, 5 bp, Homo sapiens
  chr1:3328265-3328270
  hypo
  multiple_myeloma vs. anorectal,thyroid,non_cancer, myeloid_neoplasm,renal
cggcg

SEQ ID NO: 469964 - DNA, 215 bp, Homo sapiens; identical to SEQ ID NO: 454543
  chr1:3328319-3328534
  hypo
  multiple_myeloma vs. anorectal,thyroid,non_cancer, myeloid_neoplasm,renal

SEQ ID NO: 469965 - DNA, 371 bp, Homo sapiens; identical to SEQ ID NO: 352754
  chr1:3328625-3328996
  hypo
  multiple_myeloma vs. anorectal,thyroid,non_cancer, myeloid_neoplasm,renal

SEQ ID NO: 469966 - DNA, 644 bp, Homo sapiens; identical to SEQ ID NO: 362278
  chr1:3328625-3329269
  hypo
  multiple_myeloma vs. anorectal

SEQ ID NO: 469967 - DNA, 152 bp, Homo sapiens; identical to SEQ ID NO: 336839
  chr1:3331040-3331192
  hypo
  multiple_myeloma vs. lymphoid_neoplasm,sarcoma,uterine, upper_gi,myeloid_neoplasm,renal

SEQ ID NO: 469968 - DNA, 238 bp, Homo sapiens; identical to SEQ ID NO: 362280
  chr1:3343487-3343725
  hypo
  multiple_myeloma vs. sarcoma,upper_gi

SEQ ID NO: 469969 - DNA, 561 bp, Homo sapiens; identical to SEQ ID NO: 336844
  chr1:3351144-3351705
  hypo
  multiple_myeloma vs. lymphoid_neoplasm,non_cancer, anorectal

SEQ ID NO: 469970 - DNA, 168 bp, Homo sapiens; identical to SEQ ID NO: 336845
  chr1:3361098-3361266
  hypo
  multiple_myeloma vs. melanoma

SEQ ID NO: 469971 - DNA, 353 bp, Homo sapiens; identical to SEQ ID NO: 336847
  chr1:3379762-3380115
  hypo
  multiple_myeloma vs. upper_gi,lung,pancreas_gallbladder

SEQ ID NO: 469972 - DNA, 337 bp, Homo sapiens; identical to SEQ ID NO: 336848
  chr1:3385485-3385822
  hypo
  multiple_myeloma vs. lung

SEQ ID NO: 469973 - DNA, 238 bp, Homo sapiens; identical to SEQ ID NO: 336851
  chr1:3425542-3425780
  hypo
  multiple_myeloma vs. melanoma

SEQ ID NO: 469974 - DNA, 617 bp, Homo sapiens; identical to SEQ ID NO: 336852
  chr1:3435632-3436249
  hypo
  multiple_myeloma vs. head_and_neck

SEQ ID NO: 469975 - DNA, 214 bp, Homo sapiens; identical to SEQ ID NO: 336865
  chr1:4037053-4037267
  hypo
  multiple_myeloma vs. colorectal,anorectal,thyroid

SEQ ID NO: 469976 - DNA, 788 bp, Homo sapiens
  chr1:7723202-7723990
  hypo
  multiple_myeloma vs. ovary,melanoma,thyroid, pancreas_gallbladder,colorectal,renal
cgtgggacggcccccgggcttggggtacgtgtccaagggctgagagtctgtggcctgcctggggtaccgggcctggactttgccagggaccccagccgctgtggggcaggtccaccacggtcctagctctgactctcttttgtgtgtgcatgtgtgtgtgcacatgtgtgcctgcgtgtgcgtgcgcgtgttgtgttccgatctccgcaggagctggcggcagcgtgcatcacaagtgtaacagcgccaaacaccgcatcatctcgcccaaggtggagccacggacaggggggtacgggagccactcggaggtgcagcacaatgacgtgtcggagggcaagcacgagcacagccacagcaagggctccagccgtgagaagaggaacggcaaggtggccaagcccgtgctcctgcaccagagcagcaccgaggtctcctccaccaaccaggtggaagtccccgacaccacccagagctcccctgtgtccatcagcagcgggctcaacagcgacccggacatggtggacagcccggtggtcacaggtgtgtccggtatggcggtggcctctgtgatggggagcttgtcccagagcgccacggtgttcatgtcagaggtcaccaatgaggccgtgtacaccatgtcccccaccgctggccccaaccaccacctcctctcacctgacgcctctcagggcctcgtcctggccgtgagctctgatggccacaagttcgcctttcccaccacgggcagctcggagagcctgtccatgctgcccaccaacgtgtcc

SEQ ID NO: 469977 - DNA, 980 bp, Homo sapiens
  chr1:7723508-7724488
  hypo
cggaggtgcagcacaatgacgtgtcggagggcaagcacgagcacagccacagcaagggctccagccgtgagaagaggaacggcaaggtggccaagcccgtgctcctgcaccagagcagcaccgaggtctcctccaccaaccaggtggaagtccccgacaccacccagagctcccctgtgtccatcagcagcgggctcaacagcgacccggacatggtggacagcccggtggtcacaggtgtgtccggtatggcggtggcctctgtgatggggagcttgtcccagagcgccacggtgttcatgtcagaggtcaccaatgaggccgtgtacaccatgtcccccaccgctggccccaaccaccacctcctctcacctgacgcctctcagggcctcgtcctggccgtgagctctgatggccacaagttcgcctttcccaccacgggcagctcggagagcctgtccatgctgcccaccaacgtgtccgaagagctggtcctctccaccaccctcgacggtggccggaagattccagaaaccaccatgaactttgaccccgactgtttccttaataacccaaagcagggccagacgtacgggggtggaggcctgaaagccgagatggtcagctccaacatccggcactcgccacccggggagcggagcttcagctttaccaccgtcctcaccaaggagatcaagaccgaggacacctccttcgagcagcagatggccaaagaagcgtactcctcctccgcggcggctgtggcagccagctccctcaccctgaccgccggctccagcctcctgccgtcgggcggcggcctgagtcccagcaccaccctggagcagatggacttcagcgccatcgactccaacaaggactacacgtccagcttcagccagacgggccacagcccccacatccaccagaccccctccccgagcttcttcctgcaggacgccagcaaacccctccccgtc

SEQ ID NO: 469978 - DNA, 787 bp, Homo sapiens
  chr1:7724016-7724803
  hypo
cgacggtggccggaagattccagaaaccaccatgaactttgaccccgactgtttccttaataacccaaagcagggccagacgtacgggggtggaggcctgaaagccgagatggtcagctccaacatccggcactcgccacccggggagcggagcttcagctttaccaccgtcctcaccaaggagatcaagaccgaggacacctccttcgagcagcagatggccaaagaagcgtactcctcctccgcggcggctgtggcagccagctccctcaccctgaccgccggctccagcctcctgccgtcgggcggcggcctgagtcccagcaccaccctggagcagatggacttcagcgccatcgactccaacaaggactacacgtccagcttcagccagacgggccacagcccccacatccaccagaccccctccccgagcttcttcctgcaggacgccagcaaacccctccccgtcgagcagaacacccacagcagcctgagtgactctgggggcaccttcgtgatgcccacggtgaaaacggaggcctcgtcccaaaccagctcctgcagcggtcacgtggagacgcggatcgagtccacttcctccctccacctcatgcagttccaggccaacttccaggccatgacggcagaaggggaggtcaccatggagacctcgcaggcggcggaagggagcgaggtcctgctcaagtctggggagctgcaggcttgcagctctgagcactacctgcagccggagaccaacggggtaatccgaagcgccggcggc

SEQ ID NO: 469979 - DNA, 411 bp, Homo sapiens; identical to SEQ ID NO: 375660
  chr1:10707634-10708045
  hypo
  multiple_myeloma vs. liver_bileduct

SEQ ID NO: 469980 - DNA, 138 bp, Homo sapiens; identical to SEQ ID NO: 375661
  chr1:10713961-10714099
  hypo
  multiple_myeloma vs. liver_bileduct

SEQ ID NO: 469981 - DNA, 863 bp, Homo sapiens; identical to SEQ ID NO: 345696
  chr1:10719750-10720613
  hypo
  multiple_myeloma vs. liver_bileduct

SEQ ID NO: 469982 - DNA, 142 bp, Homo sapiens; identical to SEQ ID NO: 336927
  chr1:12241609-12241751
  hypo
  multiple_myeloma vs. liver_bileduct

SEQ ID NO: 469983 - DNA, 186 bp, Homo sapiens; identical to SEQ ID NO: 336932
  chr1:12630214-12630400
  hypo
  multiple_myeloma vs. melanoma,liver_bileduct, head_and_neck,thyroid

SEQ ID NO: 469984 - DNA, 315 bp, Homo sapiens; identical to SEQ ID NO: 336933
  chr1:12638803-12639118
  hypo
  multiple_myeloma vs. liver_bileduct,head_and_neck

SEQ ID NO: 469985 - DNA, 121 bp, Homo sapiens; identical to SEQ ID NO: 336939
  chr1:15102346-15102467
  hypo
  multiple_myeloma vs. melanoma,sarcoma,ovary,cervical, bladder_and_urothelial,head_and_neck

SEQ ID NO: 469986 - DNA, 220 bp, Homo sapiens; identical to SEQ ID NO: 336942
  chr1:15283890-15284110
  hypo
  multiple_myeloma vs. melanoma,ovary,sarcoma,lung, head_and_neck

SEQ ID NO: 469987 - DNA, 383 bp, Homo sapiens; identical to SEQ ID NO: 336943
  chr1:15374975-15375358
  hypo
  multiple_myeloma vs. bladder_and_urothelial

SEQ ID NO: 469988 - DNA, 517 bp, Homo sapiens; identical to SEQ ID NO: 362371
  chr1:16464269-16464786
  hypo
  multiple_myeloma vs. upper_gi,sarcoma

SEQ ID NO: 469989 - DNA, 170 bp, Homo sapiens
  chr1:16474862-16475032
  hypo
  multiple_myeloma vs. melanoma
cgtcactcaccctggcaggcatcctccaccttctcgtagcctgcctggcacaggcactgcccaatgggcaccagccactcgccatccactgcacagtgcatacggggctcttcaccccccggtggcaccacggcatggtccacacaggtgccggccacagtggccaggga

SEQ ID NO: 469990 - DNA, 75 bp, Homo sapiens; identical to SEQ ID NO: 347796
  chr1:16475432-16475507
  hypo
  multiple_myeloma vs. melanoma

SEQ ID NO: 469991 - DNA, 310 bp, Homo sapiens; identical to SEQ ID NO: 336953
  chr1:18023481-18023791
  hypo
  multiple_myeloma vs. head_and_neck,pancreas_gallbladder, bladder_and_urothelial,lung,liver_bileduct

SEQ ID NO: 469992 - DNA, 247 bp, Homo sapiens; identical to SEQ ID NO: 336954
  chr1:18026186-18026433
  hypo
  multiple_myeloma vs. colorectal,pancreas_gallbladder, bladder_and_urothelial,liver_bileduct,upper_gi,lung

SEQ ID NO: 469993 - DNA, 108 bp, Homo sapiens; identical to SEQ ID NO: 336971
  chr1:21889603-21889711
  hypo
  multiple_myeloma vs. lung

SEQ ID NO: 469994 - DNA, 430 bp, Homo sapiens; identical to SEQ ID NO: 345705
  chr1:47685395-47685825
  hypo
  multiple_myeloma vs. colorectal,lymphoid_neoplasm, upper_gi,cervical,myeloid_neoplasm,head_and_neck,thyroid, uterine,breast,non_cancer,bladder_and_urothelial, pancreas_gallbladder,sarcoma,prostate,lung,ovary

SEQ ID NO: 469995 - DNA, 428 bp, Homo sapiens; identical to SEQ ID NO: 337069
  chr1:48459812-48460240
  hypo
  multiple_myeloma vs. pancreas_gallbladder,upper_gi, prostate,breast,colorectal,liver_bileduct,uterine,anorectal, thyroid,head_and_neck,non_cancer,bladder_and_urothelial, lymphoid_neoplasm

SEQ ID NO: 469996 - DNA, 244 bp, Homo sapiens; identical to SEQ ID NO: 337120
  chr1:94495968-94496212
  hypo
  multiple_myeloma vs. bladder_and_urothelial

SEQ ID NO: 469997 - DNA, 204 bp, Homo sapiens; identical to SEQ ID NO: 337155
  chr1:118163688-118163892
  hypo
  multiple_myeloma vs. lung,ovary,breast,sarcoma, lymphoid_neoplasm,uterine,myeloid_neoplasm,cervical,non_cancer, pancreas_gallbladder,anorectal,prostate,colorectal, bladder_and_urothelial,thyroid,head_and_neck,renal,upper_gi,
  CONT. FROM ABOVE: melanoma

SEQ ID NO: 469998 - DNA, 199 bp, Homo sapiens; identical to SEQ ID NO: 337156
  chr1:118166377-118166576
  hypo
  multiple_myeloma vs. ovary,myeloid_neoplasm

SEQ ID NO: 469999 - DNA, 298 bp, Homo sapiens; identical to SEQ ID NO: 337168
  chr1:152733117-152733415
  hypo
  multiple_myeloma vs. head_and_neck,cervical

SEQ ID NO: 470000 - DNA, 515 bp, Homo sapiens; identical to SEQ ID NO: 337217
  chr1:164768766-164769281
  hypo
  multiple_myeloma vs. colorectal,ovary,head_and_neck, sarcoma,breast

SEQ ID NO: 470001 - DNA, 181 bp, Homo sapiens; identical to SEQ ID NO: 454587
  chr1:175372314-175372495
  hypo
  multiple_myeloma vs. non_cancer,anorectal,thyroid, uterine,lymphoid_neoplasm

SEQ ID NO: 470002 - DNA, 145 bp, Homo sapiens; identical to SEQ ID NO: 347841
  chr1:175372572-175372717
  hypo
  multiple_myeloma vs. non_cancer,anorectal,thyroid, uterine,lymphoid_neoplasm

SEQ ID NO: 470003 - DNA, 226 bp, Homo sapiens; identical to SEQ ID NO: 362609
  chr1:181382621-181382847
  hypo
  multiple_myeloma vs. head_and_neck

SEQ ID NO: 470004 - DNA, 121 bp, Homo sapiens; identical to SEQ ID NO: 337256
  chr1:181765823-181765944
  hypo
  multiple_myeloma vs. myeloid_neoplasm

SEQ ID NO: 470005 - DNA, 203 bp, Homo sapiens; identical to SEQ ID NO: 463155
  chr1:181767556-181767759
  hypo
  multiple_myeloma vs. thyroid,lymphoid_neoplasm, non_cancer

SEQ ID NO: 470006 - DNA, 85 bp, Homo sapiens; identical to SEQ ID NO: 352948
  chr1:181767807-181767892
  hypo
  multiple_myeloma vs. thyroid,lymphoid_neoplasm, non_cancer

SEQ ID NO: 470007 - DNA, 302 bp, Homo sapiens; identical to SEQ ID NO: 337275
  chr1:203134410-203134712
  hypo

SEQ ID NO: 470008 - DNA, 189 bp, Homo sapiens; identical to SEQ ID NO: 337279
  chr1:204124923-204125112
  hypo
  multiple_myeloma vs. ovary,liver_bileduct, bladder_and_urothelial,head_and_neck,breast

SEQ ID NO: 470009 - DNA, 370 bp, Homo sapiens; identical to SEQ ID NO: 337281
  chr1:204197954-204198324
  hypo
  multiple_myeloma vs. liver_bileduct, bladder_and_urothelial,head_and_neck,colorectal,breast

SEQ ID NO: 470010 - DNA, 154 bp, Homo sapiens; identical to SEQ ID NO: 337282
  chr1:204199556-204199710
  hypo
  multiple_myeloma vs. upper_gi,liver_bileduct, head_and_neck,renal,pancreas_gallbladder,breast,colorectal, cervical,prostate

SEQ ID NO: 470011 - DNA, 383 bp, Homo sapiens; identical to SEQ ID NO: 337283
  chr1:204226544-204226927
  hypo
  multiple_myeloma vs. bladder_and_urothelial,upper_gi, pancreas_gallbladder,ovary,colorectal,breast,anorectal,lung, myeloid_neoplasm,lymphoid_neoplasm,melanoma,renal,uterine, cervical,liver_bileduct,non_cancer,thyroid,prostate,
  CONT. FROM ABOVE: head_and_neck

SEQ ID NO: 470012 - DNA, 277 bp, Homo sapiens; identical to SEQ ID NO: 337284
  chr1:204228369-204228646
  hypo
  multiple_myeloma vs. upper_gi

SEQ ID NO: 470013 - DNA, 75 bp, Homo sapiens; identical to SEQ ID NO: 337290
  chr1:204913459-204913534
  hypo
  multiple_myeloma vs. anorectal,cervical

SEQ ID NO: 470014 - DNA, 171 bp, Homo sapiens; identical to SEQ ID NO: 337291
  chr1:204948556-204948727
  hypo
  multiple_myeloma vs. lymphoid_neoplasm

SEQ ID NO: 470015 - DNA, 315 bp, Homo sapiens; identical to SEQ ID NO: 345724
  chr1:204955352-204955667
  hypo
  multiple_myeloma vs. cervical,myeloid_neoplasm, non_cancer,breast,prostate,uterine,melanoma,renal,thyroid,ovary, anorectal

SEQ ID NO: 470016 - DNA, 256 bp, Homo sapiens; identical to SEQ ID NO: 337302
  chr1:207195396-207195652
  hypo
  multiple_myeloma vs. myeloid_neoplasm

SEQ ID NO: 470017 - DNA, 214 bp, Homo sapiens
  chr1:207200605-207200819
  hypo
  multiple_myeloma vs. melanoma
cggcggaaaaagtctcatttgcccagttgctctctaaggtcgtcccatcctattctctatagagccagggctgactcaggcagaaagcacccactggtgttgtgaatcactccccaacaatgaaagagaaggtgcagtgagccaggatgggtggcaggaaaggatagggcagggcagggcagggcaggtgtgcagagagcagaccaggttgcgg

SEQ ID NO: 470018 - DNA, 205 bp, Homo sapiens
  chr1:214637813-214638018
  hypo
  multiple_myeloma vs. bladder_and_urothelial,colorectal, head_and_neck,cervical,lymphoid_neoplasm
cgtgctaagaataacaggattcttataaacacatcgtcgcttaggccaaaaaacacaacagatgccaaaaaacagatggctggtcccttcggtgagttctccttcacatacccaacacgcatgcacgcgcacatgcgcacacagacacacccctcttacctctcgcagctccagcctctgggccacagcctccaggcattcttgc

SEQ ID NO: 470019 - DNA, 34 bp, Homo sapiens; identical to SEQ ID NO: 352966
  chr1:214638090-214638124
  hypo
  multiple_myeloma vs. bladder_and_urothelial,colorectal, head_and_neck,cervical,lymphoid_neoplasm

SEQ ID NO: 470020 - DNA, 270 bp, Homo sapiens
  chr1:228081860-228082130
  hypo
  multiple_myeloma vs. renal,thyroid,upper_gi,sarcoma, cervical,prostate,head_and_neck,non_cancer,ovary, pancreas_gallbladder,uterine,lymphoid_neoplasm,colorectal, myeloid_neoplasm
cgcaggagaaggggagcaagtggggcggagtgactgcatcctttgggtactggcatgggacaaggtgggtgcccgagagccctggagcacagatgtctgtgcacggctctgtgcaccagcccaggtgcagggtgtccacagtgcaagagcccacaagcacacaaccacaataggtgttcgcacacgagcccaggatgtgtggtgcctgcaggcatgtgcccaggacccaaggtgtccacaaacgtacccatgcccttcacatggactcag

SEQ ID NO: 470021 - DNA, 581 bp, Homo sapiens; identical to SEQ ID NO: 337346
  chr1:228109246-228109827
  hypo

SEQ ID NO: 470022 - DNA, 129 bp, Homo sapiens; identical to SEQ ID NO: 337364
  chr1:229160222-229160351
  hypo
  multiple_myeloma vs. ovary,colorectal,melanoma,uterine, pancreas_gallbladder,cervical,upper_gi,prostate

SEQ ID NO: 470023 - DNA, 117 bp, Homo sapiens
  chr1:233601764-233601881
  hypo
  multiple_myeloma vs. head_and_neck
cggaggtatggagggagaggcccgggcgggaaccagggctgtacgtgaagcttgtggcgagcccgggttccggctgggtgcaggctcagtggcccgcagtcggagcggccggtcggc

SEQ ID NO: 470024 - DNA, 499 bp, Homo sapiens; identical to SEQ ID NO: 337400
  chr1:236156658-236157157
  hypo
  multiple_myeloma vs. melanoma,lymphoid_neoplasm,sarcoma, head_and_neck

SEQ ID NO: 470025 - DNA, 145 bp, Homo sapiens; identical to SEQ ID NO: 337402
  chr1:236274591-236274736
  hypo
  multiple_myeloma vs. lung

SEQ ID NO: 470026 - DNA, 156 bp, Homo sapiens; identical to SEQ ID NO: 463177
  chr10:1443319-1443475
  hypo
  multiple_myeloma vs. head_and_neck,lymphoid_neoplasm, anorectal

SEQ ID NO: 470027 - DNA, 311 bp, Homo sapiens; identical to SEQ ID NO: 354480
  chr10:1443566-1443877
  hypo
  multiple_myeloma vs. head_and_neck,lymphoid_neoplasm, anorectal

SEQ ID NO: 470028 - DNA, 413 bp, Homo sapiens; identical to SEQ ID NO: 340634
  chr10:44198155-44198568
  hypo
  multiple_myeloma vs. myeloid_neoplasm,anorectal

SEQ ID NO: 470029 - DNA, 234 bp, Homo sapiens; identical to SEQ ID NO: 379315
  chr10:71405328-71405562
  hypo
  multiple_myeloma vs. bladder_and_urothelial,melanoma

SEQ ID NO: 470030 - DNA, 138 bp, Homo sapiens; identical to SEQ ID NO: 340680
  chr10:80848861-80848999
  hypo
  multiple_myeloma vs. myeloid_neoplasm,colorectal, liver_bileduct

SEQ ID NO: 470031 - DNA, 423 bp, Homo sapiens; identical to SEQ ID NO: 340682
  chr10:80878255-80878678
  hypo
  multiple_myeloma vs. upper_gi,melanoma,head_and_neck, bladder_and_urothelial,sarcoma,liver_bileduct,colorectal,breast, lung

SEQ ID NO: 470032 - DNA, 253 bp, Homo sapiens; identical to SEQ ID NO: 340683
  chr10:80921761-80922014
  hypo
  multiple_myeloma vs. lung,upper_gi,liver_bileduct, cervical,renal,uterine,bladder_and_urothelial,myeloid_neoplasm, breast,colorectal,prostate,non_cancer,head_and_neck,ovary, pancreas_gallbladder,melanoma,thyroid,sarcoma

SEQ ID NO: 470033 - DNA, 178 bp, Homo sapiens; identical to SEQ ID NO: 340684
  chr10:80928401-80928579
  hypo
  multiple_myeloma vs. bladder_and_urothelial,melanoma, pancreas_gallbladder

SEQ ID NO: 470034 - DNA, 197 bp, Homo sapiens; identical to SEQ ID NO: 340688
  chr10:81036003-81036200
  hypo
  multiple_myeloma vs. liver_bileduct,lung

SEQ ID NO: 470035 - DNA, 261 bp, Homo sapiens; identical to SEQ ID NO: 340689
  chr10:81050762-81051023
  hypo
  multiple_myeloma vs. liver_bileduct,upper_gi, head_and_neck,bladder_and_urothelial,melanoma,ovary,lung

SEQ ID NO: 470036 - DNA, 447 bp, Homo sapiens; identical to SEQ ID NO: 340691
  chr10:81063491-81063938
  hypo
  multiple_myeloma vs. lung,pancreas_gallbladder

SEQ ID NO: 470037 - DNA, 366 bp, Homo sapiens; identical to SEQ ID NO: 340692
  chr10:81065719-81066085
  hypo
  multiple_myeloma vs. liver_bileduct,lung,melanoma

SEQ ID NO: 470038 - DNA, 635 bp, Homo sapiens; identical to SEQ ID NO: 348435
  chr10:88441134-88441769
  hypo
  multiple_myeloma vs. myeloid_neoplasm,prostate, colorectal,uterine,non_cancer,anorectal,renal,thyroid, bladder_and_urothelial,lymphoid_neoplasm,ovary,cervical,lung, upper_gi

SEQ ID NO: 470039 - DNA, 115 bp, Homo sapiens; identical to SEQ ID NO: 340746
  chr10:116050056-116050171
  hypo
  multiple_myeloma vs. melanoma,head_and_neck

SEQ ID NO: 470040 - DNA, 114 bp, Homo sapiens; identical to SEQ ID NO: 340773
  chr10:126711488-126711602
  hypo
  multiple_myeloma vs. sarcoma,upper_gi, bladder_and_urothelial,cervical

SEQ ID NO: 470041 - DNA, 885 bp, Homo sapiens
  chr10:126714633-126715518
  hypo
  multiple_myeloma vs. melanoma,upper_gi
cggggaggatgtattacttggttctggtgcaagcatggtggacacgatgatgggtgcccctgtgcgccgggccaccttctggtacggtgagtgaggcgtgtggaggctctggctggccggcggcagggtggatggccccaggggtgcacctggcttccgcaagacctgggggctgccgtgagggctgggcagcggagaggcggccacgttgcgctccctctttagcagctccatgggcaccgtgtatgccgtggagtaggctgttctggggcctgggtgaagggggtttgaggggcccgggttagtcaaggccacccctgcctgcagggggtacgtggggctcagacgcgctgtcagggcgcaaggggtgggagagctgtacccggagttggaggggaagtgtggggcatgggtgcccacgccaggggcagaataggtggctgccgtctccaggaggtgctgagatggtgcgctggagggacggcgagccgggtctccagctcggggggatgctgtctgcagaggagccgcagcgcccagagaagccaagtcaccatggagcagttcgcttcggtggctgaagctgctggaccgcgcccggggcagcgggcccccccggtcctgcctccgcagctgcatttcggtcctgcagctattggccaggcggctcagaacacgggcctggcccaggttgggtgcgacagacttgatatccgcgtcctccagggtagccaggacggccggggagtcaaagccctgctgcagtagggctcccagcgtggcctctgccagcccctccgcccgcagaaaggccaggaactcagggagcacggtcctcttgccaccaggaccctggaaggtggacaggtcagcttcgtaagtctc

SEQ ID NO: 470042 - DNA, 972 bp, Homo sapiens
  chr10:126715052-126716024
  hypo
  multiple_myeloma vs. melanoma,pancreas_gallbladder, upper_gi,lung,head_and_neck,myeloid_neoplasm,colorectal
cgccaggggcagaataggtggctgccgtctccaggaggtgctgagatggtgcgctggagggacggcgagccgggtctccagctcggggggatgctgtctgcagaggagccgcagcgcccagagaagccaagtcaccatggagcagttcgcttcggtggctgaagctgctggaccgcgcccggggcagcgggcccccccggtcctgcctccgcagctgcatttcggtcctgcagctattggccaggcggctcagaacacgggcctggcccaggttgggtgcgacagacttgatatccgcgtcctccagggtagccaggacggccggggagtcaaagccctgctgcagtagggctcccagcgtggcctctgccagcccctccgcccgcagaaaggccaggaactcagggagcacggtcctcttgccaccaggaccctggaaggtggacaggtcagcttcgtaagtctcgtaagccatcttggatgggatgctttcccgggcaggcccgtagccacgattcagggcccctggggccacccctgtgctgccttcgggggcagcagctgaactggggtccacaaccaggcacgtcggggccacctgtctggcaggggcagggtcaatgggtctttcgctgatgtcgctgaagacctggctgagggggtaggcaggcacctccgccccatacctggtgtcgggctgctcccgtccataccgcccgggagatgcagccctgctctgtgtctgccgcccctgagggatcattttacctccaggatcccggtacaggtgaccggcgtcctgcagggcaggtgaccggccttgcattggatcccatgacgttctgctgccaagcactccgtagctggggaccggccggctgactcctgggtcccgatagaggggaggctctttgggtaccctagcagctccagacggatcactgtagtactcccgtggcagcagggggctgc

SEQ ID NO: 470043 - DNA, 888 bp, Homo sapiens
  chr10:126715546-126716434
  hypo
  multiple_myeloma vs. upper_gi,bladder_and_urothelial, head_and_neck,pancreas_gallbladder
cgggcaggcccgtagccacgattcagggcccctggggccacccctgtgctgccttcgggggcagcagctgaactggggtccacaaccaggcacgtcggggccacctgtctggcaggggcagggtcaatgggtctttcgctgatgtcgctgaagacctggctgagggggtaggcaggcacctccgccccatacctggtgtcgggctgctcccgtccataccgcccgggagatgcagccctgctctgtgtctgccgcccctgagggatcattttacctccaggatcccggtacaggtgaccggcgtcctgcagggcaggtgaccggccttgcattggatcccatgacgttctgctgccaagcactccgtagctggggaccggccggctgactcctgggtcccgatagaggggaggctctttgggtaccctagcagctccagacggatcactgtagtactcccgtggcagcagggggctgcgaccagacatcactgcctgtctgctgtcgtagaaggtgaagtcaggagtagacccctttcttgcagccactgagttataaacggcctcccggtacaggtagggctcggcggccacgggcagggcagcgtcctgtggtcggtggtttggctcaaaccaagtcccctctgctgtgccatacgtcagggagcttctcctccccagaggccgcagggactcggcgttctcccaggggccctcgtaccacccagcagcatcccagctctgagaacgaccaatatttatatgcctgctgggaactggcattggaaaaaaaatgactgcggatgaggcagaggagaagcttttctttataaatcttcaattacatacatcaaaaacagacctggctgtgtgctaacccttccgagac

SEQ ID NO: 470044 - DNA, 295 bp, Homo sapiens; identical to SEQ ID NO: 340775
  chr10:126721936-126722231
  hypo
  multiple_myeloma vs. myeloid_neoplasm

SEQ ID NO: 470045 - DNA, 549 bp, Homo sapiens; identical to SEQ ID NO: 340777
  chr10:126771776-126772325
  hypo
  multiple_myeloma vs. melanoma,upper_gi,head_and_neck, colorectal

SEQ ID NO: 470046 - DNA, 409 bp, Homo sapiens; identical to SEQ ID NO: 340779
  chr10:126794880-126795289
  hypo
  multiple_myeloma vs. lung,sarcoma

SEQ ID NO: 470047 - DNA, 392 bp, Homo sapiens; identical to SEQ ID NO: 340780
  chr10:126819324-126819716
  hypo
  multiple_myeloma vs. lung,bladder_and_urothelial, pancreas_gallbladder,sarcoma,head_and_neck,renal,upper_gi, prostate,anorectal,colorectal,breast,myeloid_neoplasm,ovary, non_cancer,cervical,melanoma,uterine

SEQ ID NO: 470048 - DNA, 76 bp, Homo sapiens
  chr10:126828919-126828995
  hypo
  multiple_myeloma vs. sarcoma
cgatgactgccgcttaaacctgccctcagcctgactgatgtgatgagggaaggggacaaagaatgagctccgaaag

SEQ ID NO: 470049 - DNA, 379 bp, Homo sapiens; identical to SEQ ID NO: 340782
  chr10:126830153-126830532
  hypo
  multiple_myeloma vs. lung,head_and_neck,upper_gi

SEQ ID NO: 470050 - DNA, 213 bp, Homo sapiens; identical to SEQ ID NO: 340786
  chr10:128813812-128814025
  hypo
  multiple_myeloma vs. melanoma

SEQ ID NO: 470051 - DNA, 307 bp, Homo sapiens; identical to SEQ ID NO: 340787
  chr10:129195296-129195603
  hypo
  multiple_myeloma vs. upper_gi,pancreas_gallbladder

SEQ ID NO: 470052 - DNA, 413 bp, Homo sapiens; identical to SEQ ID NO: 340788
  chr10:129195681-129196094
  hypo
  multiple_myeloma vs. upper_gi,lung

SEQ ID NO: 470053 - DNA, 669 bp, Homo sapiens; identical to SEQ ID NO: 340792
  chr10:129245272-129245941
  hypo
  multiple_myeloma vs. upper_gi

SEQ ID NO: 470054 - DNA, 118 bp, Homo sapiens; identical to SEQ ID NO: 365494
  chr10:134680051-134680169
  hypo
  multiple_myeloma vs. sarcoma,melanoma,colorectal, lymphoid_neoplasm

SEQ ID NO: 470055 - DNA, 119 bp, Homo sapiens; identical to SEQ ID NO: 340838
  chr10:134694283-134694402
  hypo
  multiple_myeloma vs. sarcoma

SEQ ID NO: 470056 - DNA, 231 bp, Homo sapiens; identical to SEQ ID NO: 454633
  chr10:134733835-134734066
  hypo
  multiple_myeloma vs. anorectal,non_cancer, lymphoid_neoplasm,renal

SEQ ID NO: 470057 - DNA, 163 bp, Homo sapiens; identical to SEQ ID NO: 469566
  chr10:134734534-134734697
  hypo
  multiple_myeloma vs. renal

SEQ ID NO: 470058 - DNA, 117 bp, Homo sapiens
  chr10:134738029-134738146
  hypo
  multiple_myeloma vs. lymphoid_neoplasm,renal
cgacgtgcctggcccggagctgggacagagggtggcccttattgagtacagggggagtctgttgcttgtggcactgtcatggcaagggggcttgggccaccttctcctcctctgtct

SEQ ID NO: 470059 - DNA, 298 bp, Homo sapiens; identical to SEQ ID NO: 365500
  chr10:134738688-134738986
  hypo
  multiple_myeloma vs. lymphoid_neoplasm,renal

SEQ ID NO: 470060 - DNA, 152 bp, Homo sapiens; identical to SEQ ID NO: 340844
  chr10:134758138-134758290
  hypo
  multiple_myeloma vs. thyroid,lymphoid_neoplasm

SEQ ID NO: 470061 - DNA, 288 bp, Homo sapiens; identical to SEQ ID NO: 354629
  chr10:134790715-134791003
  hypo
  multiple_myeloma vs. lymphoid_neoplasm, bladder_and_urothelial,head_and_neck,anorectal,thyroid, non_cancer

SEQ ID NO: 470062 - DNA, 488 bp, Homo sapiens; identical to SEQ ID NO: 340850
  chr10:134829387-134829875
  hypo
  multiple_myeloma vs. lymphoid_neoplasm

SEQ ID NO: 470063 - DNA, 367 bp, Homo sapiens
  chr10:134836865-134837232
  hypo
  multiple_myeloma vs. anorectal,lymphoid_neoplasm, head_and_neck
cgtgaccacggcaagagcgagctggagcggagcctcgggtagccatgactaacagacatggttcgcaaacccacgcacaccttccaaaaacgccaggctggcctcacatgaccaggggcctcaccaagtgcagtgggtccctgcgtgtcagggaggctgcccagagctgtggctgctcctgtcttagcctcaacctgtgcccggggccctgtggatggatccgcgtggggcggtggtgttccaagtccacgtggggcggtggtgttccaggtccacgtggggcggtggtgttccaggtccacgtggggcggtggtgttccaggtccacgtggggtggtggtgttccaagtccacgtgggacggcggt

SEQ ID NO: 470064 - DNA, 179 bp, Homo sapiens; identical to SEQ ID NO: 340859
  chr10:135001623-135001802
  hypo
  multiple_myeloma vs. thyroid,renal,non_cancer

SEQ ID NO: 470065 - DNA, 27 bp, Homo sapiens
  chr10:135014662-135014689
  hypo
  multiple_myeloma vs. myeloid_neoplasm
cgtgagggggcagagggacacagtcct

SEQ ID NO: 470066 - DNA, 156 bp, Homo sapiens
  chr10:135025560-135025716
  hypo
  multiple_myeloma vs. anorectal,lymphoid_neoplasm
cgtgcacatatgcatgcaccttcacacaatccacacgtgcacatgcgtgcacactcaatccacacgtgcacacgcacgtgcaccttcacacagccatacatgcactcgtgtgcaccctcacacatatccacacctacacgtgtgcaccctcacaca

SEQ ID NO: 470067 - DNA, 145 bp, Homo sapiens; identical to SEQ ID NO: 365519
  chr10:135025748-135025893
  hypo
  multiple_myeloma vs. anorectal,lymphoid_neoplasm

SEQ ID NO: 470068 - DNA, 499 bp, Homo sapiens; identical to SEQ ID NO: 469568
  chr11:1103476-1103975
  hypo
  multiple_myeloma vs. lymphoid_neoplasm,cervical, colorectal

SEQ ID NO: 470069 - DNA, 20 bp, Homo sapiens
  chr11:1104214-1104234
  hypo
  multiple_myeloma vs. lymphoid_neoplasm,cervical, colorectal
cacctcccgccgggcccggc

SEQ ID NO: 470070 - DNA, 213 bp, Homo sapiens; identical to SEQ ID NO: 469570
  chr11:1103762-1103975
  hypo
  multiple_myeloma vs. lymphoid_neoplasm,cervical

SEQ ID NO: 470071 - DNA, 313 bp, Homo sapiens; identical to SEQ ID NO: 365558
  chr11:1104214-1104527
  hypo
  multiple_myeloma vs. lymphoid_neoplasm,cervical

SEQ ID NO: 470072 - DNA, 182 bp, Homo sapiens
  chr11:1446149-1446331
  hypo
  multiple_myeloma vs. pancreas_gallbladder,anorectal, colorectal,prostate,non_cancer
cgggaggggtgttctccccgcctccatgggcaaagaatctggggcccttgtcagagaccgcggggtcagtgggattggcgcccaggccctgctgtgacgccacgtgtttcccactcagcgaggctgttcctgccaggcgtggggactcggaccctggtcctgagtgctgccccgaggcccgt

SEQ ID NO: 470073 - DNA, 50 bp, Homo sapiens; identical to SEQ ID NO: 365568
  chr11:1446400-1446450
  hypo
  multiple_myeloma vs. pancreas_gallbladder,anorectal, colorectal,prostate,non_cancer

SEQ ID NO: 470074 - DNA, 3 bp, Homo sapiens
  chr11:1795286-1795289
  hypo
  multiple_myeloma vs. myeloid_neoplasm,melanoma
gcc

SEQ ID NO: 470075 - DNA, 189 bp, Homo sapiens; identical to SEQ ID NO: 340925
  chr11:1795707-1795896
  hypo
  multiple_myeloma vs. sarcoma,anorectal,upper_gi, bladder_and_urothelial,cervical,ovary,breast,lung,head_and_neck, melanoma

SEQ ID NO: 470076 - DNA, 150 bp, Homo sapiens; identical to SEQ ID NO: 340926
  chr11:1800836-1800986
  hypo
  multiple_myeloma vs. ovary,melanoma,breast,upper_gi, head_and_neck,bladder_and_urothelial,anorectal,cervical,uterine, myeloid_neoplasm,non_cancer,sarcoma,pancreas_gallbladder

SEQ ID NO: 470077 - DNA, 400 bp, Homo sapiens; identical to SEQ ID NO: 340928
  chr11:1824649-1825049
  hypo
  multiple_myeloma vs. sarcoma,melanoma,head_and_neck, anorectal,breast,cervical

SEQ ID NO: 470078 - DNA, 28 bp, Homo sapiens
  chr11:1825144-1825172
  hypo
  multiple_myeloma vs. sarcoma,melanoma,myeloid_neoplasm, non_cancer,thyroid,bladder_and_urothelial,breast,prostate,renal
cgctctgggcctcgccacccacatagaa

SEQ ID NO: 470079 - DNA, 22 bp, Homo sapiens
  chr11:1958360-1958382
  hypo
  multiple_myeloma vs. myeloid_neoplasm
caggccacccaggccagcatgc

SEQ ID NO: 470080 - DNA, 282 bp, Homo sapiens; identical to SEQ ID NO: 340936
  chr11:2026733-2027015
  hypo
  multiple_myeloma vs. sarcoma

SEQ ID NO: 470081 - DNA, 39 bp, Homo sapiens; identical to SEQ ID NO: 463240
  chr11:2108016-2108055
  hypo
  multiple_myeloma vs. pancreas_gallbladder

SEQ ID NO: 470082 - DNA, 64 bp, Homo sapiens; identical to SEQ ID NO: 379597
  chr11:2108109-2108173
  hypo
  multiple_myeloma vs. pancreas_gallbladder

SEQ ID NO: 470083 - DNA, 331 bp, Homo sapiens; identical to SEQ ID NO: 340938
  chr11:2117541-2117872
  hypo
  multiple_myeloma vs. myeloid_neoplasm,ovary,thyroid, renal,prostate,colorectal,uterine,non_cancer, pancreas_gallbladder

SEQ ID NO: 470084 - DNA, 42 bp, Homo sapiens; identical to SEQ ID NO: 365584
  chr11:2122493-2122535
  hypo
  multiple_myeloma vs. bladder_and_urothelial,prostate

SEQ ID NO: 470085 - DNA, 450 bp, Homo sapiens; identical to SEQ ID NO: 340940
  chr11:2124971-2125421
  hypo
  multiple_myeloma vs. anorectal,colorectal, bladder_and_urothelial,myeloid_neoplasm,non_cancer,prostate, upper_gi

SEQ ID NO: 470086 - DNA, 339 bp, Homo sapiens; identical to SEQ ID NO: 365589
  chr11:2334660-2334999
  hypo
  multiple_myeloma vs. bladder_and_urothelial,melanoma

SEQ ID NO: 470087 - DNA, 380 bp, Homo sapiens; identical to SEQ ID NO: 348466
  chr11:2337172-2337552
  hypo
  multiple_myeloma vs. sarcoma,myeloid_neoplasm,uterine, thyroid,prostate,non_cancer,melanoma,bladder_and_urothelial, pancreas_gallbladder,breast,colorectal,renal

SEQ ID NO: 470088 - DNA, 174 bp, Homo sapiens; identical to SEQ ID NO: 340948
  chr11:2362566-2362740
  hypo
  multiple_myeloma vs. head_and_neck

SEQ ID NO: 470089 - DNA, 558 bp, Homo sapiens; identical to SEQ ID NO: 340950
  chr11:2412921-2413479
  hypo
  multiple_myeloma vs. head_and_neck,lung, bladder_and_urothelial,colorectal,melanoma,upper_gi,breast, liver_bileduct,anorectal,uterine,prostate,ovary,sarcoma

SEQ ID NO: 470090 - DNA, 559 bp, Homo sapiens
  chr11:2435414-2435973
  hypo
ctgtagcactcggagaagaggtctgcccccggaggccctggccgctaggacgagacgccgatgcccggcccggcccccgacgcccctcctccatcccctgcccagacctgggctctgcagccgcaccctgcgttcaacacgcagggcccagccaggccttctgccccctccggcctgctccgggcccttcctgaacctccgtccttctccggctctgtccctcccccagcaggacaaagggaacctctgccacgctaaatgtccctcgtcctgcggcagggcccagtgtatgcccggggtgtgaggctgtatcgtcctcaccacgtgcacagcggtcccacactcagggtctggggccgcctccaccccaggcagagccgtctgtcctctcctatggaggaggcccctgagggcacctggagccccacggcggtaacaggcagccctggcgaggcccaggacccttcgtccgacccctccgtcacatcctcccccgcgcgcgggcccggccccagccgccggtcactcaccaagggccagccgctcgtatttcgcctcg

SEQ ID NO: 470091 - DNA, 479 bp, Homo sapiens
  chr11:2435494-2435973
  hypo
cgcccctcctccatcccctgcccagacctgggctctgcagccgcaccctgcgttcaacacgcagggcccagccaggccttctgccccctccggcctgctccgggcccttcctgaacctccgtccttctccggctctgtccctcccccagcaggacaaagggaacctctgccacgctaaatgtccctcgtcctgcggcagggcccagtgtatgcccggggtgtgaggctgtatcgtcctcaccacgtgcacagcggtcccacactcagggtctggggccgcctccaccccaggcagagccgtctgtcctctcctatggaggaggcccctgagggcacctggagccccacggcggtaacaggcagccctggcgaggcccaggacccttcgtccgacccctccgtcacatcctcccccgcgcgcgggcccggccccagccgccggtcactcaccaagggccagccgctcgtatttcgcctcg

SEQ ID NO: 470092 - DNA, 408 bp, Homo sapiens
  chr11:2436014-2436422
  hypo
catctctttgaggattttgcaggcggccagtgcggctgccacaccttcctggccctacgagacctggtctcaggaggccgcccctcccctgcccccgcgctgggcccgcggcctgggctcaccatggcccagaagtaggtggccatctcgtggcggttctgcagcacggcccacaggaacaggtcccgccaggggttctcgctcttctggttcaggtccagcagccacttctggcccgtgggccgcttggccgggcccttctcctggaggacacgggcgtcggcctcctgctgcggccccagcctcgccctccatccccacggagcccccgctcaccgccctcctgcggtcccctggccggccgtcctggtagaagcctcggcaggcgtcctgcaggaagtccttgag

SEQ ID NO: 470093 - DNA, 408 bp, Homo sapiens; identical to SEQ ID NO: 470092
  chr11:2436014-2436422
  hypo

SEQ ID NO: 470094 - DNA, 136 bp, Homo sapiens; identical to SEQ ID NO: 365595
  chr11:2436611-2436747
  hypo

SEQ ID NO: 470095 - DNA, 716 bp, Homo sapiens; identical to SEQ ID NO: 340964
  chr11:3243313-3244029
  hypo
  multiple_myeloma vs. colorectal,lymphoid_neoplasm, sarcoma,cervical,renal,uterine,ovary,breast,myeloid_neoplasm, non_cancer,anorectal,melanoma,thyroid,bladder_and_urothelial, lung,pancreas_gallbladder,prostate,head_and_neck

SEQ ID NO: 470096 - DNA, 357 bp, Homo sapiens; identical to SEQ ID NO: 340988
  chr11:12182020-12182377
  hypo
  multiple_myeloma vs. cervical,bladder_and_urothelial, lung,head_and_neck,melanoma,ovary,prostate

SEQ ID NO: 470097 - DNA, 372 bp, Homo sapiens; identical to SEQ ID NO: 340989
  chr11:12183631-12184003
  hypo
  multiple_myeloma vs. melanoma,colorectal, bladder_and_urothelial,breast,prostate,upper_gi,ovary,lung, uterine,thyroid,myeloid_neoplasm,renal,non_cancer

SEQ ID NO: 470098 - DNA, 78 bp, Homo sapiens; identical to SEQ ID NO: 340990
  chr11:12225829-12225907
  hypo
  multiple_myeloma vs. pancreas_gallbladder,lung,upper_gi, bladder_and_urothelial,colorectal,ovary,melanoma,liver_bileduct, cervical,prostate,breast,non_cancer,head_and_neck, myeloid_neoplasm,sarcoma,renal,uterine

SEQ ID NO: 470099 - DNA, 63 bp, Homo sapiens
  chr11:12230977-12231040
  hypo
  multiple_myeloma vs. melanoma,bladder_and_urothelial
cggggggtataatcattctcttcccacctctctctgccaactcatctcatttctctgtcctgg

SEQ ID NO: 470100 - DNA, 58 bp, Homo sapiens; identical to SEQ ID NO: 365622
  chr11:12231069-12231127
  hypo
  multiple_myeloma vs. melanoma,bladder_and_urothelial

SEQ ID NO: 470101 - DNA, 258 bp, Homo sapiens; identical to SEQ ID NO: 340992
  chr11:12240017-12240275
  hypo
  multiple_myeloma vs. lung,bladder_and_urothelial, melanoma,ovary,myeloid_neoplasm,breast,renal

SEQ ID NO: 470102 - DNA, 251 bp, Homo sapiens; identical to SEQ ID NO: 340993
  chr11:12247662-12247913
  hypo
  multiple_myeloma vs. myeloid_neoplasm, bladder_and_urothelial,liver_bileduct,pancreas_gallbladder, colorectal,lung,anorectal,upper_gi,renal,melanoma,breast,ovary, cervical,head_and_neck,prostate

SEQ ID NO: 470103 - DNA, 264 bp, Homo sapiens; identical to SEQ ID NO: 340994
  chr11:12248553-12248817
  hypo
  multiple_myeloma vs. liver_bileduct

SEQ ID NO: 470104 - DNA, 97 bp, Homo sapiens; identical to SEQ ID NO: 340995
  chr11:12262569-12262666
  hypo
  multiple_myeloma vs. myeloid_neoplasm,sarcoma,melanoma, liver_bileduct,renal

SEQ ID NO: 470105 - DNA, 180 bp, Homo sapiens; identical to SEQ ID NO: 340996
  chr11:12267687-12267867
  hypo
  multiple_myeloma vs. melanoma,renal,prostate, liver_bileduct,pancreas_gallbladder,thyroid,myeloid_neoplasm, non_cancer,colorectal,upper_gi,uterine,cervical

SEQ ID NO: 470106 - DNA, 352 bp, Homo sapiens; identical to SEQ ID NO: 340997
  chr11:12278228-12278580
  hypo
  multiple_myeloma vs. lung,liver_bileduct,melanoma, colorectal,sarcoma,cervical,head_and_neck,pancreas_gallbladder, breast,uterine,renal,bladder_and_urothelial,anorectal, non_cancer,upper_gi,ovary,prostate,myeloid_neoplasm,
  CONT. FROM ABOVE: lymphoid_neoplasm,thyroid

SEQ ID NO: 470107 - DNA, 141 bp, Homo sapiens; identical to SEQ ID NO: 340998
  chr11:12279396-12279537
  hypo
  multiple_myeloma vs. lung,melanoma,breast, bladder_and_urothelial,cervical,colorectal,head_and_neck, upper_gi,liver_bileduct,myeloid_neoplasm

SEQ ID NO: 470108 - DNA, 301 bp, Homo sapiens; identical to SEQ ID NO: 340999
  chr11:12281112-12281413
  hypo
  multiple_myeloma vs. sarcoma,colorectal,lung,upper_gi, liver_bileduct,cervical,pancreas_gallbladder,ovary, head_and_neck,prostate,bladder_and_urothelial,non_cancer, uterine,myeloid_neoplasm,breast

SEQ ID NO: 470109 - DNA, 434 bp, Homo sapiens; identical to SEQ ID NO: 341000
  chr11:12283321-12283755
  hypo
  multiple_myeloma vs. upper_gi,pancreas_gallbladder, cervical,myeloid_neoplasm,colorectal,bladder_and_urothelial, breast,prostate,lung,anorectal,thyroid,liver_bileduct,melanoma, renal,non_cancer,ovary,uterine

SEQ ID NO: 470110 - DNA, 366 bp, Homo sapiens; identical to SEQ ID NO: 341001
  chr11:12284011-12284377
  hypo
  multiple_myeloma vs. lung,upper_gi, bladder_and_urothelial,colorectal,breast,prostate,head_and_neck, uterine,non_cancer,cervical

SEQ ID NO: 470111 - DNA, 142 bp, Homo sapiens; identical to SEQ ID NO: 341039
  chr11:44608911-44609053
  hypo
  multiple_myeloma vs. pancreas_gallbladder,liver_bileduct, head_and_neck,upper_gi,bladder_and_urothelial,colorectal, sarcoma,melanoma,uterine,lymphoid_neoplasm,prostate,renal, non_cancer,cervical,breast,anorectal,lung,thyroid,ovary,
  CONT. FROM ABOVE: myeloid_neoplasm

SEQ ID NO: 470112 - DNA, 151 bp, Homo sapiens; identical to SEQ ID NO: 341040
  chr11:44621715-44621866
  hypo
  multiple_myeloma vs. colorectal,head_and_neck, lymphoid_neoplasm,upper_gi,pancreas_gallbladder, bladder_and_urothelial,uterine,renal,lung,breast,ovary, myeloid_neoplasm,non_cancer,liver_bileduct,prostate,anorectal,
  CONT. FROM ABOVE: thyroid,cervical

SEQ ID NO: 470113 - DNA, 237 bp, Homo sapiens; identical to SEQ ID NO: 341041
  chr11:44625100-44625337
  hypo
  multiple_myeloma vs. renal,bladder_and_urothelial,ovary, cervical,uterine,melanoma,non_cancer,sarcoma,liver_bileduct, breast,prostate

SEQ ID NO: 470114 - DNA, 457 bp, Homo sapiens; identical to SEQ ID NO: 341042
  chr11:44639755-44640212
  hypo
  multiple_myeloma vs. bladder_and_urothelial,melanoma, ovary,head_and_neck,lymphoid_neoplasm,anorectal, pancreas_gallbladder,thyroid,prostate,cervical,breast,renal, non_cancer,uterine,sarcoma,myeloid_neoplasm,liver_bileduct,
  CONT. FROM ABOVE: colorectal,lung,upper_gi

SEQ ID NO: 470115 - DNA, 495 bp, Homo sapiens; identical to SEQ ID NO: 341043
  chr11:44640545-44641040
  hypo
  multiple_myeloma vs. lymphoid_neoplasm,head_and_neck, ovary,breast,melanoma,uterine,renal,sarcoma,colorectal,cervical, pancreas_gallbladder,anorectal,myeloid_neoplasm, bladder_and_urothelial,prostate,non_cancer,thyroid,
  CONT. FROM ABOVE: liver_bileduct,upper_gi,lung

SEQ ID NO: 470116 - DNA, 2 bp, Homo sapiens
  chr11:44941504-44941506
  hypo
  multiple_myeloma vs. sarcoma,cervical,non_cancer,uterine, breast,thyroid,prostate,anorectal
cc

SEQ ID NO: 470117 - DNA, 541 bp, Homo sapiens; identical to SEQ ID NO: 341047
  chr11:46337908-46338449
  hypo
  multiple_myeloma vs. bladder_and_urothelial, myeloid_neoplasm,melanoma,colorectal,sarcoma

SEQ ID NO: 470118 - DNA, 365 bp, Homo sapiens; identical to SEQ ID NO: 341057
  chr11:57182515-57182880
  hypo
  multiple_myeloma vs. melanoma,myeloid_neoplasm, liver_bileduct,sarcoma,renal,uterine,ovary,lymphoid_neoplasm, breast,cervical

SEQ ID NO: 470119 - DNA, 233 bp, Homo sapiens; identical to SEQ ID NO: 341058
  chr11:57188507-57188740
  hypo
  multiple_myeloma vs. melanoma,myeloid_neoplasm, lymphoid_neoplasm,pancreas_gallbladder,sarcoma,liver_bileduct

SEQ ID NO: 470120 - DNA, 169 bp, Homo sapiens; identical to SEQ ID NO: 341070
  chr11:61490202-61490371
  hypo
  multiple_myeloma vs. liver_bileduct

SEQ ID NO: 470121 - DNA, 591 bp, Homo sapiens; identical to SEQ ID NO: 341072
  chr11:61511518-61512109
  hypo
  multiple_myeloma vs. bladder_and_urothelial

SEQ ID NO: 470122 - DNA, 309 bp, Homo sapiens; identical to SEQ ID NO: 341074
  chr11:61640585-61640894
  hypo
  multiple_myeloma vs. melanoma,bladder_and_urothelial, cervical

SEQ ID NO: 470123 - DNA, 200 bp, Homo sapiens; identical to SEQ ID NO: 341078
  chr11:61668820-61669020
  hypo
  multiple_myeloma vs. sarcoma,bladder_and_urothelial, ovary,colorectal,lung,upper_gi,myeloid_neoplasm, lymphoid_neoplasm,prostate,renal,breast,non_cancer, pancreas_gallbladder,uterine,cervical,thyroid

SEQ ID NO: 470124 - DNA, 214 bp, Homo sapiens; identical to SEQ ID NO: 341079
  chr11:61672924-61673138
  hypo
  multiple_myeloma vs. pancreas_gallbladder,sarcoma, cervical,renal,uterine,breast,thyroid,prostate,lung,non_cancer, upper_gi,colorectal,myeloid_neoplasm,bladder_and_urothelial, lymphoid_neoplasm

SEQ ID NO: 470125 - DNA, 371 bp, Homo sapiens; identical to SEQ ID NO: 341080
  chr11:61673908-61674279
  hypo
  multiple_myeloma vs. myeloid_neoplasm,renal,breast, thyroid,lung,prostate,cervical,ovary,non_cancer,sarcoma, liver_bileduct,uterine,colorectal,pancreas_gallbladder,melanoma

SEQ ID NO: 470126 - DNA, 97 bp, Homo sapiens
  chr11:61674760-61674857
  hypo
  multiple_myeloma vs. prostate,renal,breast, myeloid_neoplasm,thyroid,colorectal,non_cancer, pancreas_gallbladder,uterine,lymphoid_neoplasm,lung,melanoma, cervical,ovary,upper_gi
cgggccaggtgagcgtccactcgggcagcaaagctcagtgctcgctgagccgggaggcagggggggtgcctgggctggcctgggcaggcggggatgg

SEQ ID NO: 470127 - DNA, 85 bp, Homo sapiens; identical to SEQ ID NO: 348498
  chr11:61675100-61675185
  hypo
  multiple_myeloma vs. prostate,renal,breast, myeloid_neoplasm,thyroid,colorectal,non_cancer, pancreas_gallbladder,uterine,lymphoid_neoplasm,lung,melanoma, cervical,ovary,upper_gi

SEQ ID NO: 470128 - DNA, 180 bp, Homo sapiens
  chr11:64323500-64323680
  hypo
  multiple_myeloma vs. bladder_and_urothelial,anorectal
cggaggcgtgggcctcttccagaccctgcaggtgctcaccttcatcctcccctgcctcatgataccttcccagatgctcctggagaacttctcagccgccatcccaggccaccgatgctggacacacatgctggacaatggctctgcggtttccacaaacatgacccccaaggcccttct

SEQ ID NO: 470129 - DNA, 322 bp, Homo sapiens; identical to SEQ ID NO: 365705
  chr11:64323741-64324063
  hypo
  multiple_myeloma vs. bladder_and_urothelial,anorectal

SEQ ID NO: 470130 - DNA, 328 bp, Homo sapiens; identical to SEQ ID NO: 341134
  chr11:66655218-66655546
  hypo
  multiple_myeloma vs. anorectal

SEQ ID NO: 470131 - DNA, 250 bp, Homo sapiens; identical to SEQ ID NO: 341139
  chr11:67432668-67432918
  hypo
  multiple_myeloma vs. pancreas_gallbladder,melanoma, head_and_neck,colorectal

SEQ ID NO: 470132 - DNA, 134 bp, Homo sapiens; identical to SEQ ID NO: 379806
  chr11:68772692-68772826
  hypo
  multiple_myeloma vs. liver_bileduct

SEQ ID NO: 470133 - DNA, 267 bp, Homo sapiens; identical to SEQ ID NO: 341156
  chr11:69931095-69931362
  hypo
  multiple_myeloma vs. upper_gi,colorectal,sarcoma, head_and_neck,pancreas_gallbladder,lymphoid_neoplasm,ovary, uterine,anorectal,renal,breast,bladder_and_urothelial, non_cancer,prostate,lung,thyroid

SEQ ID NO: 470134 - DNA, 476 bp, Homo sapiens; identical to SEQ ID NO: 341157
  chr11:69946965-69947441
  hypo
  multiple_myeloma vs. upper_gi,head_and_neck,anorectal

SEQ ID NO: 470135 - DNA, 422 bp, Homo sapiens; identical to SEQ ID NO: 341158
  chr11:69962357-69962779
  hypo
  multiple_myeloma vs. head_and_neck

SEQ ID NO: 470136 - DNA, 540 bp, Homo sapiens; identical to SEQ ID NO: 379814
  chr11:69982802-69983342
  hypo
  multiple_myeloma vs. melanoma,head_and_neck

SEQ ID NO: 470137 - DNA, 206 bp, Homo sapiens; identical to SEQ ID NO: 456402
  chr11:70016958-70017164
  hypo
  multiple_myeloma vs. sarcoma

SEQ ID NO: 470138 - DNA, 196 bp, Homo sapiens; identical to SEQ ID NO: 341164
  chr11:70028548-70028744
  hypo
  multiple_myeloma vs. sarcoma,upper_gi,head_and_neck, bladder_and_urothelial,ovary,uterine

SEQ ID NO: 470139 - DNA, 297 bp, Homo sapiens; identical to SEQ ID NO: 341165
  chr11:70031529-70031826
  hypo
  multiple_myeloma vs. bladder_and_urothelial,upper_gi, prostate,ovary,pancreas_gallbladder,breast,uterine

SEQ ID NO: 470140 - DNA, 202 bp, Homo sapiens; identical to SEQ ID NO: 341182
  chr11:73063854-73064056
  hypo
  multiple_myeloma vs. ovary

SEQ ID NO: 470141 - DNA, 233 bp, Homo sapiens; identical to SEQ ID NO: 341192
  chr11:74994376-74994609
  hypo
  multiple_myeloma vs. upper_gi,lung,ovary,thyroid, melanoma,breast,sarcoma,colorectal,renal,prostate,uterine, pancreas_gallbladder,head_and_neck,anorectal

SEQ ID NO: 470142 - DNA, 58 bp, Homo sapiens; identical to SEQ ID NO: 460021
  chr11:85906179-85906237
  hypo
  multiple_myeloma vs. melanoma

SEQ ID NO: 470143 - DNA, 208 bp, Homo sapiens; identical to SEQ ID NO: 354801
  chr11:85906275-85906483
  hypo
  multiple_myeloma vs. melanoma

SEQ ID NO: 470144 - DNA, 257 bp, Homo sapiens; identical to SEQ ID NO: 341244
  chr11:119290824-119291081
  hypo
  multiple_myeloma vs. head_and_neck,breast

SEQ ID NO: 470145 - DNA, 199 bp, Homo sapiens; identical to SEQ ID NO: 341245
  chr11:119505179-119505378
  hypo
  multiple_myeloma vs. head_and_neck,myeloid_neoplasm

SEQ ID NO: 470146 - DNA, 261 bp, Homo sapiens; identical to SEQ ID NO: 341246
  chr11:119506104-119506365
  hypo
  multiple_myeloma vs. myeloid_neoplasm,anorectal,thyroid, non_cancer,prostate,renal,ovary,bladder_and_urothelial,upper_gi

SEQ ID NO: 470147 - DNA, 130 bp, Homo sapiens; identical to SEQ ID NO: 341247
  chr11:119506981-119507111
  hypo
  multiple_myeloma vs. bladder_and_urothelial, head_and_neck,myeloid_neoplasm,sarcoma,breast,upper_gi,ovary, pancreas_gallbladder,cervical,prostate,uterine,non_cancer

SEQ ID NO: 470148 - DNA, 750 bp, Homo sapiens; identical to SEQ ID NO: 341248
  chr11:119535401-119536151
  hypo
  multiple_myeloma vs. bladder_and_urothelial,melanoma, colorectal,uterine,myeloid_neoplasm,upper_gi,prostate,thyroid, non_cancer,liver_bileduct,lung,pancreas_gallbladder,breast, renal,cervical,sarcoma,ovary,lymphoid_neoplasm

SEQ ID NO: 470149 - DNA, 286 bp, Homo sapiens; identical to SEQ ID NO: 341249
  chr11:119574555-119574841
  hypo
  multiple_myeloma vs. colorectal

SEQ ID NO: 470150 - DNA, 471 bp, Homo sapiens; identical to SEQ ID NO: 341250
  chr11:119579320-119579791
  hypo
  multiple_myeloma vs. myeloid_neoplasm,melanoma,sarcoma, breast,colorectal,pancreas_gallbladder

SEQ ID NO: 470151 - DNA, 283 bp, Homo sapiens; identical to SEQ ID NO: 334379
  chr11:119587853-119588136
  hypo
  multiple_myeloma vs. upper_gi,lung,liver_bileduct, cervical,pancreas_gallbladder,ovary,renal,uterine,anorectal, breast,thyroid,colorectal,non_cancer,sarcoma, bladder_and_urothelial

SEQ ID NO: 470152 - DNA, 123 bp, Homo sapiens; identical to SEQ ID NO: 379898
  chr11:119589823-119589946
  hypo
  multiple_myeloma vs. liver_bileduct

SEQ ID NO: 470153 - DNA, 128 bp, Homo sapiens; identical to SEQ ID NO: 341253
  chr11:119590586-119590714
  hypo
  multiple_myeloma vs. upper_gi,lung,ovary, myeloid_neoplasm,melanoma,colorectal

SEQ ID NO: 470154 - DNA, 83 bp, Homo sapiens; identical to SEQ ID NO: 341255
  chr11:119606553-119606636
  hypo
  multiple_myeloma vs. sarcoma,colorectal,cervical,breast, uterine

SEQ ID NO: 470155 - DNA, 291 bp, Homo sapiens; identical to SEQ ID NO: 341256
  chr11:119970240-119970531
  hypo
  multiple_myeloma vs. bladder_and_urothelial,cervical, colorectal

SEQ ID NO: 470156 - DNA, 268 bp, Homo sapiens; identical to SEQ ID NO: 341271
  chr11:124794665-124794933
  hypo
  multiple_myeloma vs. bladder_and_urothelial,cervical, renal,uterine,head_and_neck,anorectal,prostate,thyroid,melanoma, non_cancer

SEQ ID NO: 470157 - DNA, 400 bp, Homo sapiens; identical to SEQ ID NO: 341272
  chr11:125817639-125818039
  hypo
  multiple_myeloma vs. pancreas_gallbladder, myeloid_neoplasm,renal,colorectal,lung,head_and_neck,upper_gi

SEQ ID NO: 470158 - DNA, 168 bp, Homo sapiens; identical to SEQ ID NO: 341273
  chr11:125971144-125971312
  hypo
  multiple_myeloma vs. liver_bileduct,melanoma,sarcoma, bladder_and_urothelial,renal,lymphoid_neoplasm,breast,upper_gi

SEQ ID NO: 470159 - DNA, 720 bp, Homo sapiens; identical to SEQ ID NO: 341294
  chr11:133790547-133791267
  hypo
  multiple_myeloma vs. sarcoma,melanoma,head_and_neck, cervical

SEQ ID NO: 470160 - DNA, 176 bp, Homo sapiens; identical to SEQ ID NO: 379949
  chr11:134608740-134608916
  hypo
  multiple_myeloma vs. myeloid_neoplasm

SEQ ID NO: 470161 - DNA, 454 bp, Homo sapiens; identical to SEQ ID NO: 341312
  chr12:1943616-1944070
  hypo
  multiple_myeloma vs. anorectal,breast

SEQ ID NO: 470162 - DNA, 155 bp, Homo sapiens; identical to SEQ ID NO: 341313
  chr12:1992067-1992222
  hypo
  multiple_myeloma vs. uterine,thyroid,non_cancer,breast, renal

SEQ ID NO: 470163 - DNA, 75 bp, Homo sapiens; identical to SEQ ID NO: 354855
  chr12:2023599-2023674
  hypo
  multiple_myeloma vs. myeloid_neoplasm,thyroid,uterine, non_cancer,breast

SEQ ID NO: 470164 - DNA, 116 bp, Homo sapiens; identical to SEQ ID NO: 341321
  chr12:2613903-2614019
  hypo
  multiple_myeloma vs. sarcoma

SEQ ID NO: 470165 - DNA, 482 bp, Homo sapiens; identical to SEQ ID NO: 341328
  chr12:3103789-3104271
  hypo
  multiple_myeloma vs. melanoma,lung,sarcoma,upper_gi, ovary,pancreas_gallbladder

SEQ ID NO: 470166 - DNA, 144 bp, Homo sapiens; identical to SEQ ID NO: 341417
  chr12:53007462-53007606
  hypo
  multiple_myeloma vs. head_and_neck,cervical,anorectal, breast,prostate,lymphoid_neoplasm,bladder_and_urothelial, uterine,non_cancer,thyroid,colorectal,pancreas_gallbladder, renal,myeloid_neoplasm,sarcoma,ovary

SEQ ID NO: 470167 - DNA, 99 bp, Homo sapiens; identical to SEQ ID NO: 354952
  chr12:117531122-117531221
  hypo
  multiple_myeloma vs. lymphoid_neoplasm,thyroid, colorectal,non_cancer,myeloid_neoplasm,uterine,prostate,renal

SEQ ID NO: 470168 - DNA, 230 bp, Homo sapiens; identical to SEQ ID NO: 463304
  chr12:129189650-129189880
  hypo
  multiple_myeloma vs. lymphoid_neoplasm,colorectal

SEQ ID NO: 470169 - DNA, 206 bp, Homo sapiens; identical to SEQ ID NO: 463305
  chr12:129189909-129190115
  hypo
  multiple_myeloma vs. lymphoid_neoplasm,colorectal

SEQ ID NO: 470170 - DNA, 63 bp, Homo sapiens; identical to SEQ ID NO: 366142
  chr12:129190144-129190207
  hypo
  multiple_myeloma vs. lymphoid_neoplasm,colorectal

SEQ ID NO: 470171 - DNA, 74 bp, Homo sapiens
  chr12:130909511-130909585
  hypo
  multiple_myeloma vs. thyroid,lymphoid_neoplasm, non_cancer,uterine,prostate
cgaggggggggaagcatgcgtctactcaggccgggggcatgccgtggagggctctgcaatgaaaacagaatggg

SEQ ID NO: 470172 - DNA, 475 bp, Homo sapiens; identical to SEQ ID NO: 354999
  chr12:130909737-130910212
  hypo
  multiple_myeloma vs. thyroid,lymphoid_neoplasm, non_cancer,uterine,prostate

SEQ ID NO: 470173 - DNA, 429 bp, Homo sapiens; identical to SEQ ID NO: 341630
  chr12:131095743-131096172
  hypo
  multiple_myeloma vs. head_and_neck,colorectal

SEQ ID NO: 470174 - DNA, 617 bp, Homo sapiens; identical to SEQ ID NO: 341781
  chr13:106912373-106912990
  hypo
  multiple_myeloma vs. pancreas_gallbladder,ovary,cervical

SEQ ID NO: 470175 - DNA, 178 bp, Homo sapiens
  chr13:113797753-113797931
  hypo
  multiple_myeloma vs. liver_bileduct
cgcacacgcccagcacttgggttctcctgttggcatcctccggccagatgcattcatcccatttcgcccggcccgtttgtctctgtccatccgtcaagctttcttgacttcttggtgcattttcaggcaaaccgcagacgccaacactcccctcgctgcctgggttgctgcctggcgt

SEQ ID NO: 470176 - DNA, 112 bp, Homo sapiens; identical to SEQ ID NO: 348614
  chr13:113797960-113798072
  hypo
  multiple_myeloma vs. liver_bileduct

SEQ ID NO: 470177 - DNA, 897 bp, Homo sapiens; identical to SEQ ID NO: 334943
  chr14:62162333-62163230
  hypo
  multiple_myeloma vs. liver_bileduct

SEQ ID NO: 470178 - DNA, 227 bp, Homo sapiens; identical to SEQ ID NO: 366389
  chr14:65207965-65208192
  hypo
  multiple_myeloma vs. liver_bileduct,lung

SEQ ID NO: 470179 - DNA, 126 bp, Homo sapiens
  chr14:65209843-65209969
  hypo
  multiple_myeloma vs. liver_bileduct
cgcctgggggccggccctccgcccggagccccctcagccccacagagaccttcagctggcccgacgtccgtgagctctgctccaagtatgcctcccgcgatgaggcacgccgagcagggggcggcc

SEQ ID NO: 470180 - DNA, 127 bp, Homo sapiens; identical to SEQ ID NO: 341937
  chr14:65236155-65236282
  hypo
  multiple_myeloma vs. lung,myeloid_neoplasm,breast,ovary, renal,cervical

SEQ ID NO: 470181 - DNA, 50 bp, Homo sapiens; identical to SEQ ID NO: 355132
  chr14:65239794-65239844
  hypo
  multiple_myeloma vs. lymphoid_neoplasm,thyroid, non_cancer,myeloid_neoplasm,renal

SEQ ID NO: 470182 - DNA, 185 bp, Homo sapiens; identical to SEQ ID NO: 341939
  chr14:65271617-65271802
  hypo
  multiple_myeloma vs. lung,head_and_neck,myeloid_neoplasm, colorectal,bladder_and_urothelial,uterine,breast,cervical, upper_gi,sarcoma,pancreas_gallbladder,ovary,non_cancer,thyroid, prostate

SEQ ID NO: 470183 - DNA, 150 bp, Homo sapiens; identical to SEQ ID NO: 342032
  chr14:101134041-101134191
  hypo
  multiple_myeloma vs. sarcoma,colorectal

SEQ ID NO: 470184 - DNA, 415 bp, Homo sapiens; identical to SEQ ID NO: 342036
  chr14:101489771-101490186
  hypo
  multiple_myeloma vs. renal,cervical,lymphoid_neoplasm

SEQ ID NO: 470185 - DNA, 495 bp, Homo sapiens; identical to SEQ ID NO: 380671
  chr14:102068306-102068801
  hypo
  multiple_myeloma vs. anorectal,thyroid

SEQ ID NO: 470186 - DNA, 7 bp, Homo sapiens
  chr14:104618440-104618447
  hypo
  multiple_myeloma vs. non_cancer,anorectal,cervical, thyroid,prostate,lymphoid_neoplasm,renal
cgtctgc

SEQ ID NO: 470187 - DNA, 237 bp, Homo sapiens; identical to SEQ ID NO: 454786
  chr14:104618440-104618677
  hypo
  multiple_myeloma vs. anorectal,thyroid,non_cancer, cervical,prostate,renal,colorectal,myeloid_neoplasm

SEQ ID NO: 470188 - DNA, 100 bp, Homo sapiens; identical to SEQ ID NO: 348642
  chr14:104623761-104623861
  hypo
  multiple_myeloma vs. myeloid_neoplasm,non_cancer, anorectal,prostate,thyroid,renal,lymphoid_neoplasm,colorectal, pancreas_gallbladder,breast

SEQ ID NO: 470189 - DNA, 226 bp, Homo sapiens; identical to SEQ ID NO: 342086
  chr14:104633637-104633863
  hypo
  multiple_myeloma vs. thyroid,prostate

SEQ ID NO: 470190 - DNA, 3 bp, Homo sapiens
  chr14:104639887-104639890
  hypo
  multiple_myeloma vs. lymphoid_neoplasm,thyroid
tgc

SEQ ID NO: 470191 - DNA, 138 bp, Homo sapiens; identical to SEQ ID NO: 454788
  chr14:104640046-104640184
  hypo
  multiple_myeloma vs. lymphoid_neoplasm,anorectal, non_cancer,myeloid_neoplasm,colorectal

SEQ ID NO: 470192 - DNA, 101 bp, Homo sapiens; identical to SEQ ID NO: 355209
  chr14:104640582-104640683
  hypo
  multiple_myeloma vs. lymphoid_neoplasm,anorectal, non_cancer,myeloid_neoplasm,colorectal

SEQ ID NO: 470193 - DNA, 140 bp, Homo sapiens; identical to SEQ ID NO: 454790
  chr14:104641166-104641306
  hypo
  multiple_myeloma vs. myeloid_neoplasm,thyroid,non_cancer, prostate,colorectal,cervical,renal

SEQ ID NO: 470194 - DNA, 212 bp, Homo sapiens
  chr14:104642243-104642455
  hypo
  multiple_myeloma vs. anorectal,non_cancer,cervical
tgtccctgggggcgcttgccggagctgggcggcccaccagcctggctagcttcgacagtgactgctccctgcgggccctggcctcggggtcccggccagtcagcatcatcagcagcatcaatgatgagtttgacgcctacacctctcaggcccctgagggggggcccctggagggggcagcctgggccggcagcagtcacggctcctccatc

SEQ ID NO: 470195 - DNA, 119 bp, Homo sapiens; identical to SEQ ID NO: 366513
  chr14:104642742-104642861
  hypo
  multiple_myeloma vs. anorectal,non_cancer,cervical

SEQ ID NO: 470196 - DNA, 164 bp, Homo sapiens
  chr14:104645553-104645717
  hypo
  multiple_myeloma vs. lymphoid_neoplasm,myeloid_neoplasm, anorectal,non_cancer
cgcccgccctgcctcccagggtctggcgtgcgtcagtacaaggctgcggctggcggagcgcaggcagcagcggctgcgggaggtgcaggccaagcacaagcacctgtgtgaggagctggccgagacccagggccggctgatgctggagcctggccgctggctgg

SEQ ID NO: 470197 - DNA, 3 bp, Homo sapiens
  chr14:104646706-104646709
  hypo
  multiple_myeloma vs. lymphoid_neoplasm,myeloid_neoplasm, anorectal,non_cancer
ccc

SEQ ID NO: 470198 - DNA, 563 bp, Homo sapiens; identical to SEQ ID NO: 342094
  chr14:104746303-104746866
  hypo

SEQ ID NO: 470199 - DNA, 786 bp, Homo sapiens; identical to SEQ ID NO: 342107
  chr14:105517526-105518312
  hypo
  multiple_myeloma vs. melanoma,ovary

SEQ ID NO: 470200 - DNA, 203 bp, Homo sapiens; identical to SEQ ID NO: 342119
  chr15:26026151-26026354
  hypo
  multiple_myeloma vs. pancreas_gallbladder,ovary, lymphoid_neoplasm

SEQ ID NO: 470201 - DNA, 273 bp, Homo sapiens; identical to SEQ ID NO: 342127
  chr15:29415573-29415846
  hypo
  multiple_myeloma vs. ovary

SEQ ID NO: 470202 - DNA, 245 bp, Homo sapiens; identical to SEQ ID NO: 342128
  chr15:29417894-29418139
  hypo
  multiple_myeloma vs. ovary,prostate,uterine,renal

SEQ ID NO: 470203 - DNA, 67 bp, Homo sapiens; identical to SEQ ID NO: 342129
  chr15:29418595-29418662
  hypo
  multiple_myeloma vs. ovary

SEQ ID NO: 470204 - DNA, 139 bp, Homo sapiens; identical to SEQ ID NO: 342133
  chr15:31453201-31453340
  hypo
  multiple_myeloma vs. lymphoid_neoplasm,myeloid_neoplasm, upper_gi,bladder_and_urothelial,uterine,breast,prostate, anorectal

SEQ ID NO: 470205 - DNA, 497 bp, Homo sapiens; identical to SEQ ID NO: 342195
  chr15:62753676-62754173
  hypo
  multiple_myeloma vs. sarcoma,pancreas_gallbladder

SEQ ID NO: 470206 - DNA, 310 bp, Homo sapiens; identical to SEQ ID NO: 342198
  chr15:62993112-62993422
  hypo
  multiple_myeloma vs. sarcoma,breast

SEQ ID NO: 470207 - DNA, 222 bp, Homo sapiens; identical to SEQ ID NO: 342199
  chr15:63000769-63000991
  hypo
  multiple_myeloma vs. colorectal,anorectal,thyroid,lung, sarcoma,bladder_and_urothelial,breast,prostate

SEQ ID NO: 470208 - DNA, 220 bp, Homo sapiens; identical to SEQ ID NO: 342200
  chr15:63029125-63029345
  hypo
  multiple_myeloma vs. sarcoma,bladder_and_urothelial, melanoma,upper_gi,ovary

SEQ ID NO: 470209 - DNA, 290 bp, Homo sapiens; identical to SEQ ID NO: 342201
  chr15:63030480-63030770
  hypo
  multiple_myeloma vs. anorectal,thyroid,lung,uterine, melanoma,renal,breast,colorectal,prostate,non_cancer, bladder_and_urothelial,upper_gi,pancreas_gallbladder

SEQ ID NO: 470210 - DNA, 67 bp, Homo sapiens; identical to SEQ ID NO: 342202
  chr15:63059828-63059895
  hypo
  multiple_myeloma vs. upper_gi,lung,sarcoma,colorectal, breast,pancreas_gallbladder,anorectal,ovary,prostate

SEQ ID NO: 470211 - DNA, 131 bp, Homo sapiens; identical to SEQ ID NO: 366604
  chr15:63072875-63073006
  hypo
  multiple_myeloma vs. lung

SEQ ID NO: 470212 - DNA, 374 bp, Homo sapiens; identical to SEQ ID NO: 342205
  chr15:63075618-63075992
  hypo
  multiple_myeloma vs. lung,ovary,liver_bileduct

SEQ ID NO: 470213 - DNA, 222 bp, Homo sapiens; identical to SEQ ID NO: 342207
  chr15:63088341-63088563
  hypo
  multiple_myeloma vs. bladder_and_urothelial,upper_gi, colorectal,renal,lung,uterine,breast

SEQ ID NO: 470214 - DNA, 142 bp, Homo sapiens; identical to SEQ ID NO: 342209
  chr15:63115985-63116127
  hypo
  multiple_myeloma vs. lung,cervical,breast

SEQ ID NO: 470215 - DNA, 760 bp, Homo sapiens
  chr15:63132478-63133238
  hypo
  multiple_myeloma vs. bladder_and_urothelial,ovary, cervical,prostate,liver_bileduct,upper_gi,lung,myeloid_neoplasm
cgtgttttcatggctcagctgggtcattagtctcaaaacccaaacagtgacagaggctggtcgccagagctaagaaagctgttccggatgtgctgcagtgtcccacggtcgcgggagccgtggagctcacatgagcagtggggtgggtcggagggttttctacaaagtgttaggtccatccagcttgttgctttctttctagatcatcgccgcccaggaagaaatgctaaagaaagagcgagaactggaagaagcaaggaaaaaactggcccaaatccgccagcagcagtataagtttttacccaccgagctgagggaagatgagggctaaaggtgcgagcccagatggcgagccccaggggatggccctggctgaactggacagacagtgttcctgagaggctgggcacttagctggaaaccgcccacctccctcccgggtgagcctggagccctgcgtgcttgttctcacatctctgtcccgtcggcactggctgcatgatcgtgatgtcacacggtacaatgtcctacccacaactcctctgccgcctcccctcatgcctcaccgtgtctcaggagagaggggtgcacgtttcatggactgttaccaacaaagaaaagtcagtattatgttgttctcagacactttggcttttgttggtccttctcttaggcctgctcctggacctctttatgatattgtgatagggaaaaaaatcattgacgtcatagaatattcttcttcctctcaggagaagac

SEQ ID NO: 470216 - DNA, 747 bp, Homo sapiens; identical to SEQ ID NO: 355264
  chr15:63132755-63133502
  hypo
  multiple_myeloma vs. ovary

SEQ ID NO: 470217 - DNA, 421 bp, Homo sapiens; identical to SEQ ID NO: 342221
  chr15:66946036-66946457
  hypo
  multiple_myeloma vs. liver_bileduct,sarcoma,lung, colorectal,renal,melanoma,prostate,upper_gi, pancreas_gallbladder,anorectal,breast,bladder_and_urothelial, cervical,ovary,non_cancer,thyroid,uterine

SEQ ID NO: 470218 - DNA, 115 bp, Homo sapiens; identical to SEQ ID NO: 342224
  chr15:68888212-68888327
  hypo
  multiple_myeloma vs. melanoma,thyroid

SEQ ID NO: 470219 - DNA, 99 bp, Homo sapiens; identical to SEQ ID NO: 342225
  chr15:68893753-68893852
  hypo
  multiple_myeloma vs. sarcoma,melanoma,prostate,uterine, lymphoid_neoplasm,renal,cervical,breast,non_cancer,thyroid,lung, myeloid_neoplasm,bladder_and_urothelial,colorectal,ovary

SEQ ID NO: 470220 - DNA, 174 bp, Homo sapiens; identical to SEQ ID NO: 342227
  chr15:68937507-68937681
  hypo
  multiple_myeloma vs. head_and_neck,ovary, bladder_and_urothelial,sarcoma,renal,lymphoid_neoplasm

SEQ ID NO: 470221 - DNA, 274 bp, Homo sapiens; identical to SEQ ID NO: 342248
  chr15:78010517-78010791
  hypo
  multiple_myeloma vs. myeloid_neoplasm

SEQ ID NO: 470222 - DNA, 124 bp, Homo sapiens
  chr15:79081981-79082105
  hypo
cgagggtgaagctcggctctcagtgtagcaatgggggcaggcacagtacctgtgcccgagctcgtgggctacagtgaaggccagcggcaggcccgtgtcctcgttgatgctgcagctgcggtgc

SEQ ID NO: 470223 - DNA, 121 bp, Homo sapiens; identical to SEQ ID NO: 342271
  chr15:89386721-89386842
  hypo
  multiple_myeloma vs. lymphoid_neoplasm

SEQ ID NO: 470224 - DNA, 230 bp, Homo sapiens; identical to SEQ ID NO: 463376
  chr15:93595181-93595411
  hypo
  multiple_myeloma vs. cervical,lung,anorectal, bladder_and_urothelial,head_and_neck,uterine,breast,ovary, prostate,lymphoid_neoplasm,non_cancer

SEQ ID NO: 470225 - DNA, 121 bp, Homo sapiens; identical to SEQ ID NO: 355299
  chr15:93595508-93595629
  hypo
  multiple_myeloma vs. cervical,lung,anorectal, bladder_and_urothelial,head_and_neck,uterine,breast,ovary, prostate,lymphoid_neoplasm,non_cancer

SEQ ID NO: 470226 - DNA, 409 bp, Homo sapiens; identical to SEQ ID NO: 342317
  chr15:101910626-101911035
  hypo
  multiple_myeloma vs. liver_bileduct,upper_gi

SEQ ID NO: 470227 - DNA, 247 bp, Homo sapiens; identical to SEQ ID NO: 342318
  chr15:101938625-101938872
  hypo
  multiple_myeloma vs. liver_bileduct

SEQ ID NO: 470228 - DNA, 216 bp, Homo sapiens; identical to SEQ ID NO: 342319
  chr15:102020345-102020561
  hypo
  multiple_myeloma vs. liver_bileduct,anorectal

SEQ ID NO: 470229 - DNA, 544 bp, Homo sapiens; identical to SEQ ID NO: 342321
  chr15:102076822-102077366
  hypo
  multiple_myeloma vs. pancreas_gallbladder,colorectal, bladder_and_urothelial

SEQ ID NO: 470230 - DNA, 133 bp, Homo sapiens
  chr16:1270065-1270198
  hypo
  multiple_myeloma vs. renal
cggtgaggccggtgacccaggggggctccctgcagtccccaccacgctccccacggcccgccagcgtccgcactcgtaagcataccttcggacagcgctgcgtctccagccggccggcggccccaggcggaga

SEQ ID NO: 470231 - DNA, 332 bp, Homo sapiens; identical to SEQ ID NO: 381003
  chr16:1270449-1270781
  hypo
  multiple_myeloma vs. renal

SEQ ID NO: 470232 - DNA, 157 bp, Homo sapiens; identical to SEQ ID NO: 342596
  chr16:58078950-58079107
  hypo
  multiple_myeloma vs. melanoma

SEQ ID NO: 470233 - DNA, 177 bp, Homo sapiens; identical to SEQ ID NO: 342608
  chr16:67221106-67221283
  hypo
  multiple_myeloma vs. ovary,upper_gi,head_and_neck

SEQ ID NO: 470234 - DNA, 477 bp, Homo sapiens; identical to SEQ ID NO: 366970
  chr16:72991953-72992430
  hypo
  multiple_myeloma vs. melanoma,lung, bladder_and_urothelial,pancreas_gallbladder,lymphoid_neoplasm, liver_bileduct

SEQ ID NO: 470235 - DNA, 166 bp, Homo sapiens; identical to SEQ ID NO: 342646
  chr16:75127929-75128095
  hypo
  multiple_myeloma vs. upper_gi,liver_bileduct, bladder_and_urothelial,melanoma,sarcoma,cervical,colorectal, lung

SEQ ID NO: 470236 - DNA, 368 bp, Homo sapiens; identical to SEQ ID NO: 342662
  chr16:80646305-80646673
  hypo
  multiple_myeloma vs. cervical

SEQ ID NO: 470237 - DNA, 257 bp, Homo sapiens; identical to SEQ ID NO: 342694
  chr16:85407706-85407963
  hypo
  multiple_myeloma vs. lymphoid_neoplasm,renal, pancreas_gallbladder,sarcoma,colorectal,head_and_neck,upper_gi, lung,uterine,melanoma,ovary,bladder_and_urothelial,prostate, non_cancer

SEQ ID NO: 470238 - DNA, 260 bp, Homo sapiens; identical to SEQ ID NO: 469912
  chr16:89189500-89189760
  hypo
  multiple_myeloma vs. colorectal,renal,thyroid,uterine, upper_gi,bladder_and_urothelial,non_cancer,prostate, pancreas_gallbladder,cervical

SEQ ID NO: 470239 - DNA, 336 bp, Homo sapiens; identical to SEQ ID NO: 342850
  chr17:4392128-4392464
  hypo
  multiple_myeloma vs. bladder_and_urothelial

SEQ ID NO: 470240 - DNA, 520 bp, Homo sapiens; identical to SEQ ID NO: 342853
  chr17:4500096-4500616
  hypo
  multiple_myeloma vs. upper_gi

SEQ ID NO: 470241 - DNA, 206 bp, Homo sapiens; identical to SEQ ID NO: 342873
  chr17:7951722-7951928
  hypo
  multiple_myeloma vs. bladder_and_urothelial

SEQ ID NO: 470242 - DNA, 196 bp, Homo sapiens; identical to SEQ ID NO: 342886
  chr17:9631380-9631576
  hypo
  multiple_myeloma vs. pancreas_gallbladder,upper_gi, head_and_neck,renal,lung,colorectal,ovary,prostate,cervical, breast,lymphoid_neoplasm,anorectal,thyroid,myeloid_neoplasm, uterine

SEQ ID NO: 470243 - DNA, 199 bp, Homo sapiens; identical to SEQ ID NO: 342909
  chr17:17637969-17638168
  hypo
  multiple_myeloma vs. melanoma,liver_bileduct,colorectal

SEQ ID NO: 470244 - DNA, 508 bp, Homo sapiens; identical to SEQ ID NO: 342975
  chr17:39658629-39659137
  hypo
  multiple_myeloma vs. renal,breast,colorectal,thyroid, ovary,uterine,non_cancer,lung,pancreas_gallbladder,upper_gi

SEQ ID NO: 470245 - DNA, 104 bp, Homo sapiens; identical to SEQ ID NO: 342976
  chr17:39659216-39659320
  hypo
  multiple_myeloma vs. upper_gi,colorectal, myeloid_neoplasm,thyroid

SEQ ID NO: 470246 - DNA, 191 bp, Homo sapiens; identical to SEQ ID NO: 355636
  chr17:39788236-39788427
  hypo
  multiple_myeloma vs. sarcoma

SEQ ID NO: 470247 - DNA, 649 bp, Homo sapiens; identical to SEQ ID NO: 348804
  chr17:40371760-40372409
  hypo
  multiple_myeloma vs. lung,melanoma,colorectal, head_and_neck,bladder_and_urothelial,renal,anorectal, pancreas_gallbladder,thyroid,liver_bileduct,upper_gi,cervical, breast,non_cancer,ovary,prostate,myeloid_neoplasm,uterine,
  CONT. FROM ABOVE: sarcoma

SEQ ID NO: 470248 - DNA, 139 bp, Homo sapiens; identical to SEQ ID NO: 342982
  chr17:40372634-40372773
  hypo
  multiple_myeloma vs. lung,liver_bileduct, bladder_and_urothelial,melanoma

SEQ ID NO: 470249 - DNA, 418 bp, Homo sapiens; identical to SEQ ID NO: 342983
  chr17:40375292-40375710
  hypo
  multiple_myeloma vs. melanoma,pancreas_gallbladder

SEQ ID NO: 470250 - DNA, 249 bp, Homo sapiens; identical to SEQ ID NO: 381636
  chr17:42334648-42334897
  hypo
  multiple_myeloma vs. myeloid_neoplasm

SEQ ID NO: 470251 - DNA, 93 bp, Homo sapiens
  chr17:42335362-42335455
  hypo
  multiple_myeloma vs. cervical,prostate,renal,thyroid, ovary,breast,non_cancer
cgccgaaggtgatggcgggtgacagtgcagcaaagtagatgaagatgacggcagccaggacctgggggctgaatgcatctgtgatgtcactca

SEQ ID NO: 470252 - DNA, 99 bp, Homo sapiens; identical to SEQ ID NO: 342995
  chr17:42338019-42338118
  hypo
  multiple_myeloma vs. colorectal,ovary,sarcoma,prostate, breast,cervical,liver_bileduct,lymphoid_neoplasm,anorectal, thyroid,upper_gi,non_cancer,renal,lung,myeloid_neoplasm

SEQ ID NO: 470253 - DNA, 50 bp, Homo sapiens
  chr17:56435251-56435301
  hypo
  multiple_myeloma vs. liver_bileduct, bladder_and_urothelial,myeloid_neoplasm
cgtcaactgggccaggggctggctcagggagggccctggggcactgtggg

SEQ ID NO: 470254 - DNA, 215 bp, Homo sapiens; identical to SEQ ID NO: 367292
  chr17:56435330-56435545
  hypo
  multiple_myeloma vs. liver_bileduct, bladder_and_urothelial,myeloid_neoplasm

SEQ ID NO: 470255 - DNA, 80 bp, Homo sapiens; identical to SEQ ID NO: 343039
  chr17:56439864-56439944
  hypo

SEQ ID NO: 470256 - DNA, 214 bp, Homo sapiens; identical to SEQ ID NO: 348821
  chr17:60754652-60754866
  hypo
  multiple_myeloma vs. lung,head_and_neck, bladder_and_urothelial,lymphoid_neoplasm,melanoma,upper_gi, renal,cervical,pancreas_gallbladder,myeloid_neoplasm,non_cancer, sarcoma,anorectal,uterine,prostate

SEQ ID NO: 470257 - DNA, 207 bp, Homo sapiens; identical to SEQ ID NO: 343051
  chr17:60766578-60766785
  hypo
  multiple_myeloma vs. myeloid_neoplasm,thyroid,upper_gi, non_cancer,bladder_and_urothelial,head_and_neck

SEQ ID NO: 470258 - DNA, 103 bp, Homo sapiens; identical to SEQ ID NO: 456628
  chr17:60766832-60766935
  hypo
  multiple_myeloma vs. melanoma,myeloid_neoplasm, bladder_and_urothelial,prostate,non_cancer,lymphoid_neoplasm, cervical,sarcoma

SEQ ID NO: 470259 - DNA, 224 bp, Homo sapiens; identical to SEQ ID NO: 348823
  chr17:60767107-60767331
  hypo
  multiple_myeloma vs. melanoma,myeloid_neoplasm, bladder_and_urothelial,prostate,non_cancer,lymphoid_neoplasm, cervical,sarcoma

SEQ ID NO: 470260 - DNA, 256 bp, Homo sapiens; identical to SEQ ID NO: 343083
  chr17:71431621-71431877
  hypo
  multiple_myeloma vs. lymphoid_neoplasm,cervical,prostate, breast,colorectal,myeloid_neoplasm,head_and_neck,anorectal, thyroid,sarcoma,uterine

SEQ ID NO: 470261 - DNA, 194 bp, Homo sapiens; identical to SEQ ID NO: 343119
  chr17:74013689-74013883
  hypo
  multiple_myeloma vs. lung,colorectal,upper_gi,ovary, bladder_and_urothelial,breast,pancreas_gallbladder,uterine, anorectal

SEQ ID NO: 470262 - DNA, 127 bp, Homo sapiens; identical to SEQ ID NO: 343120
  chr17:74019389-74019516
  hypo
  multiple_myeloma vs. lung

SEQ ID NO: 470263 - DNA, 269 bp, Homo sapiens; identical to SEQ ID NO: 343136
  chr17:74621445-74621714
  hypo
  multiple_myeloma vs. ovary

SEQ ID NO: 470264 - DNA, 119 bp, Homo sapiens; identical to SEQ ID NO: 343137
  chr17:74625074-74625193
  hypo
  multiple_myeloma vs. lung,bladder_and_urothelial, cervical

SEQ ID NO: 470265 - DNA, 47 bp, Homo sapiens; identical to SEQ ID NO: 463451
  chr17:77126804-77126851
  hypo
  multiple_myeloma vs. sarcoma

SEQ ID NO: 470266 - DNA, 245 bp, Homo sapiens; identical to SEQ ID NO: 463452
  chr17:77126880-77127125
  hypo
  multiple_myeloma vs. sarcoma

SEQ ID NO: 470267 - DNA, 295 bp, Homo sapiens; identical to SEQ ID NO: 367405
  chr17:77127177-77127472
  hypo
  multiple_myeloma vs. sarcoma

SEQ ID NO: 470268 - DNA, 741 bp, Homo sapiens; identical to SEQ ID NO: 343182
  chr17:77914408-77915149
  hypo
  multiple_myeloma vs. liver_bileduct

SEQ ID NO: 470269 - DNA, 445 bp, Homo sapiens; identical to SEQ ID NO: 343188
  chr17:77928738-77929183
  hypo
  multiple_myeloma vs. myeloid_neoplasm,lung,colorectal, pancreas_gallbladder,breast,renal,bladder_and_urothelial

SEQ ID NO: 470270 - DNA, 75 bp, Homo sapiens; identical to SEQ ID NO: 367418
  chr17:77930343-77930418
  hypo
  multiple_myeloma vs. melanoma,myeloid_neoplasm

SEQ ID NO: 470271 - DNA, 431 bp, Homo sapiens; identical to SEQ ID NO: 343214
  chr17:79048174-79048605
  hypo

SEQ ID NO: 470272 - DNA, 403 bp, Homo sapiens; identical to SEQ ID NO: 343215
  chr17:79053502-79053905
  hypo
  multiple_myeloma vs. head_and_neck,cervical,ovary, bladder_and_urothelial,breast,renal

SEQ ID NO: 470273 - DNA, 196 bp, Homo sapiens; identical to SEQ ID NO: 343217
  chr17:79060680-79060876
  hypo
  multiple_myeloma vs. liver_bileduct

SEQ ID NO: 470274 - DNA, 264 bp, Homo sapiens; identical to SEQ ID NO: 343218
  chr17:79072884-79073148
  hypo
  multiple_myeloma vs. lung,ovary,renal,head_and_neck, upper_gi,anorectal,melanoma

SEQ ID NO: 470275 - DNA, 257 bp, Homo sapiens; identical to SEQ ID NO: 343219
  chr17:79074754-79075011
  hypo
  multiple_myeloma vs. liver_bileduct,upper_gi,sarcoma, pancreas_gallbladder,lung

SEQ ID NO: 470276 - DNA, 659 bp, Homo sapiens; identical to SEQ ID NO: 343220
  chr17:79077368-79078027
  hypo
  multiple_myeloma vs. melanoma

SEQ ID NO: 470277 - DNA, 508 bp, Homo sapiens; identical to SEQ ID NO: 343221
  chr17:79082625-79083133
  hypo
  multiple_myeloma vs. melanoma

SEQ ID NO: 470278 - DNA, 241 bp, Homo sapiens; identical to SEQ ID NO: 367439
  chr17:79084476-79084717
  hypo
  multiple_myeloma vs. upper_gi,colorectal,ovary

SEQ ID NO: 470279 - DNA, 168 bp, Homo sapiens; identical to SEQ ID NO: 367440
  chr17:79086354-79086522
  hypo
  multiple_myeloma vs. upper_gi,melanoma,sarcoma

SEQ ID NO: 470280 - DNA, 158 bp, Homo sapiens; identical to SEQ ID NO: 343224
  chr17:79086890-79087048
  hypo
  multiple_myeloma vs. lung,pancreas_gallbladder,ovary

SEQ ID NO: 470281 - DNA, 389 bp, Homo sapiens
  chr17:79612376-79612765
  hypo
  multiple_myeloma vs. breast,prostate,cervical,anorectal, renal,non_cancer,sarcoma,head_and_neck,ovary,uterine, bladder_and_urothelial,thyroid,lung
cgcagtgagcctggctggctacctgggcgccctctgtgagaacacctgcctgttacgtggcttctctgggggcatccttgccttcctggtgcttgaggccgtggcgggggccctggtggtggccctctggggcccgctgcaagacagcctggagcacaccctgcgtgtggccatcgcccactaccaggacgacccagacctgcgcttcctcctcgaccaagtccagctcgggctgaggtgctgcggagctgcctcctaccaggactggcagcagaacctgtgagtcttggagtgggcgagggacagggccaccacagggtcgcagaggccacacacccttgtgcgtgtacacacagtcactcacacgtacatactcattcgtgcatgcc

SEQ ID NO: 470282 - DNA, 26 bp, Homo sapiens
  chr17:79612812-79612838
  hypo
  multiple_myeloma vs. breast,prostate,cervical,anorectal, renal,non_cancer,sarcoma,head_and_neck,ovary,uterine, bladder_and_urothelial,thyroid,lung
gcacgtctcgtgctcacaggtttcac

SEQ ID NO: 470283 - DNA, 790 bp, Homo sapiens; identical to SEQ ID NO: 469913
  chr18:3449180-3449970
  hypo
  multiple_myeloma vs. lung,pancreas_gallbladder,ovary, liver_bileduct,head_and_neck,upper_gi,myeloid_neoplasm,melanoma

SEQ ID NO: 470284 - DNA, 990 bp, Homo sapiens; identical to SEQ ID NO: 469914
  chr18:3449477-3450467
  hypo
  multiple_myeloma vs. lung,pancreas_gallbladder,ovary, colorectal,breast

SEQ ID NO: 470285 - DNA, 985 bp, Homo sapiens; identical to SEQ ID NO: 347477
  chr18:3449983-3450968
  hypo
  multiple_myeloma vs. pancreas_gallbladder,lung, colorectal,sarcoma,uterine,breast,ovary,upper_gi,renal, head_and_neck,anorectal,thyroid,bladder_and_urothelial,melanoma, myeloid_neoplasm,non_cancer

SEQ ID NO: 470286 - DNA, 947 bp, Homo sapiens; identical to SEQ ID NO: 469916
  chr18:3450509-3451456
  hypo
  multiple_myeloma vs. pancreas_gallbladder,lung, head_and_neck,ovary,melanoma,sarcoma,renal,breast,uterine, myeloid_neoplasm

SEQ ID NO: 470287 - DNA, 477 bp, Homo sapiens; identical to SEQ ID NO: 343333
  chr18:10165791-10166268
  hypo
  multiple_myeloma vs. sarcoma

SEQ ID NO: 470288 - DNA, 257 bp, Homo sapiens; identical to SEQ ID NO: 343334
  chr18:10485485-10485742
  hypo
  multiple_myeloma vs. cervical,colorectal,anorectal, head_and_neck,melanoma,pancreas_gallbladder,sarcoma,breast, lymphoid_neoplasm,non_cancer,uterine,renal

SEQ ID NO: 470289 - DNA, 414 bp, Homo sapiens; identical to SEQ ID NO: 343373
  chr18:35249615-35250029
  hypo
  multiple_myeloma vs. myeloid_neoplasm,lymphoid_neoplasm, thyroid

SEQ ID NO: 470290 - DNA, 486 bp, Homo sapiens; identical to SEQ ID NO: 355854
  chr18:59483218-59483704
  hypo
  multiple_myeloma vs. head_and_neck

SEQ ID NO: 470291 - DNA, 164 bp, Homo sapiens; identical to SEQ ID NO: 343404
  chr18:60120657-60120821
  hypo
  multiple_myeloma vs. bladder_and_urothelial

SEQ ID NO: 470292 - DNA, 115 bp, Homo sapiens; identical to SEQ ID NO: 343417
  chr18:74068664-74068779
  hypo
  multiple_myeloma vs. liver_bileduct

SEQ ID NO: 470293 - DNA, 153 bp, Homo sapiens; identical to SEQ ID NO: 343418
  chr18:74069268-74069421
  hypo
  multiple_myeloma vs. melanoma,liver_bileduct, bladder_and_urothelial,cervical,anorectal,lung,breast,thyroid, renal,ovary,upper_gi

SEQ ID NO: 470294 - DNA, 163 bp, Homo sapiens; identical to SEQ ID NO: 343419
  chr18:74073695-74073858
  hypo
  multiple_myeloma vs. liver_bileduct,melanoma

SEQ ID NO: 470295 - DNA, 684 bp, Homo sapiens; identical to SEQ ID NO: 343420
  chr18:74083302-74083986
  hypo
  multiple_myeloma vs. melanoma,liver_bileduct, bladder_and_urothelial,colorectal,renal,cervical,head_and_neck, lung,pancreas_gallbladder,lymphoid_neoplasm,thyroid

SEQ ID NO: 470296 - DNA, 951 bp, Homo sapiens
  chr18:74090923-74091874
  hypo
  multiple_myeloma vs. liver_bileduct,sarcoma,melanoma, myeloid_neoplasm,lymphoid_neoplasm,renal,lung,cervical,upper_gi, pancreas_gallbladder,bladder_and_urothelial
cggccaccggctcctgtttgatggagtgtaggacgggggggcgccccagccacgccgggctgggcctgcaaggccgcgtcgcccctggaccccgcagcacaggtggccagagtcctcagctcctgggctgccttcgaggggggctcgcggggaggtagaggaggagcgcccccttcgccctttgcaggaggtggaccctgaggctgagcactgaatttggctttcagggagtccggggcactgtgcttatttgtgggggcaaagccagcccccgctggggggaccccaaacttctccacaggcttgctattggccgagggctgcgcgccagcccgggcgatgacggtgggcgtaggggtggcgctcctgctgaagcccccgccacccggggcaggcaccggtttggagctagcctcctgcctgggcttggccaggggcccctgtgtggccgcgccatgtggctcctggccgtgacaaggtttggtctgtcgatacccgtcagggccgggcgcccacagagcgcagggacctccggaatggctctccttattcttaggcatgctagcggcttttgtgaccactcccaggggagaagagccacttttggaccccggcatcccccctggcacctgagtgcgggtgaaccgagcaaggagcaaaggctggcattctttgccaccgagggcaggcggggggcccgtgcgtccgctccgggaaaggaaaaccaaattgcttctgatgcttttgtaaccattgggctgaatccacgggggagccacggagttgcagctgacgcggtgccagatgcgtttgtgcatccacaggacctcggggtagtaggtcttgtggctgcagtaaggacacgggtgaacgactaaagccgcctgcagggaggaggccgtctccttattgctggggtcatcccgcgtcgacctcgcacttaaatctagc

SEQ ID NO: 470297 - DNA, 935 bp, Homo sapiens
  chr18:74091392-74092327
  hypo
  multiple_myeloma vs. liver_bileduct,lymphoid_neoplasm, sarcoma,renal,melanoma,cervical,bladder_and_urothelial,upper_gi, pancreas_gallbladder,lung,anorectal,thyroid
cgtgacaaggtttggtctgtcgatacccgtcagggccgggcgcccacagagcgcagggacctccggaatggctctccttattcttaggcatgctagcggcttttgtgaccactcccaggggagaagagccacttttggaccccggcatcccccctggcacctgagtgcgggtgaaccgagcaaggagcaaaggctggcattctttgccaccgagggcaggcggggggcccgtgcgtccgctccgggaaaggaaaaccaaattgcttctgatgcttttgtaaccattgggctgaatccacgggggagccacggagttgcagctgacgcggtgccagatgcgtttgtgcatccacaggacctcggggtagtaggtcttgtggctgcagtaaggacacgggtgaacgactaaagccgcctgcagggaggaggccgtctccttattgctggggtcatcccgcgtcgacctcgcacttaaatctagcggcatgaggtctggggccagcgcccgcttccctcccccagagtgttccttgttgtgcaaatcggacagcttttctgcagggtgacccgtctggccctccgctcccgtactggaagggaactccacaccatcaccagggacgggcacctcctgcttggggtgaaatgctggcatctttaagtccatagaaaatctgtgctgctcttgccttctagaagtctctctgctactgttttcaagtatggacacagaagctgcgatccctgccttggactcgccggtgtctctttccgaggcgttatctcccatcttgtgactctggtctccactggagagctcggtcgaagtcacctcttcggaaaagcagcagcggcgcggctgtccccctagaggaggcaaaatatgaaacgggaagttaccatttctcatcagaacacagcaagacacacggtgc

SEQ ID NO: 470298 - DNA, 874 bp, Homo sapiens; identical to SEQ ID NO: 343422
  chr18:74096607-74097481
  hypo
  multiple_myeloma vs. liver_bileduct,head_and_neck, lymphoid_neoplasm,colorectal,anorectal,lung,renal,melanoma, pancreas_gallbladder,ovary,cervical,non_cancer,prostate, upper_gi,bladder_and_urothelial,breast

SEQ ID NO: 470299 - DNA, 451 bp, Homo sapiens; identical to SEQ ID NO: 343424
  chr18:74120305-74120756
  hypo
  multiple_myeloma vs. liver_bileduct,sarcoma,melanoma

SEQ ID NO: 470300 - DNA, 158 bp, Homo sapiens; identical to SEQ ID NO: 343426
  chr18:74134955-74135113
  hypo
  multiple_myeloma vs. liver_bileduct

SEQ ID NO: 470301 - DNA, 801 bp, Homo sapiens; identical to SEQ ID NO: 367621
  chr18:74144952-74145753
  hypo
  multiple_myeloma vs. liver_bileduct,melanoma

SEQ ID NO: 470302 - DNA, 821 bp, Homo sapiens
  chr18:74145292-74146113
  hypo
  multiple_myeloma vs. bladder_and_urothelial
cgtgagtcctgcggggccctcaagaaaaagcaggtctggcccctgtcttcaatgagatggcaatttgaggatgcctgacgcaaggcggatgctggggacagagagggtcatcctgcctgaaaagaatgtgtccacgcaacagggaggaatggggccagcctgaggcccaggtttgcattccaccctgggtgccgtaccgcggctgcacgctcaggccttgtggaggagacatgggagccttgagtctgggcatagcatccgggtcacagcaaggtggagaggggagaagacgggcaggtgccagagctgaaatgcatatggagctgggagccacctcagcttgcaaggaggaacaccaaagggctgggcagaagggtgggaatccgtgcgttaagcaaacgcctagtgaagaatcgagaaaggatgggcttagtcgcagcacatcacggatacaggagggcgacaacacaaccaacacaggcaggtgcagaatcatcagtcggaatgactagaatctcccaaaaagctcagcagcaaggcatcatctcacagtgccacgtccccagctccacaggggtgcacaccgctccatggcatcacacctctcctggccgggaaaccccaccgcgaccgccagcaccttttctcacaggtgcaccaagccctcggcaacgccttacccaacccagcacctgctgctctggccgttgctgtccgttcttccagctggtcaggaactgacggctcggagtggaatcagacctccctctttaccaggagcgatcctgcctggtccatgagatgccctatctcacgggaac

SEQ ID NO: 470303 - DNA, 266 bp, Homo sapiens; identical to SEQ ID NO: 343428
  chr18:74148373-74148639
  hypo
  multiple_myeloma vs. liver_bileduct,colorectal, head_and_neck,sarcoma,lung,lymphoid_neoplasm, pancreas_gallbladder,melanoma,renal,anorectal

SEQ ID NO: 470304 - DNA, 308 bp, Homo sapiens; identical to SEQ ID NO: 382087
  chr18:74170482-74170790
  hypo
  multiple_myeloma vs. bladder_and_urothelial

SEQ ID NO: 470305 - DNA, 367 bp, Homo sapiens
  chr18:74171117-74171484
  hypo
  multiple_myeloma vs. head_and_neck,melanoma,renal,lung, colorectal,lymphoid_neoplasm
cgctgcagcagtaacggggcgccgggcccacctgctgcccctctcctgtgcatagggcgctctctccctgccccgagcttcggcttctcctccatgcacggtcactgctggaggcacactggacccagtgccagctcgggaaatcctgggccggtgacagccctgacccgtggccaccatccactcaacatcattgagccctcccacaggcacccaagctctctgaggacagccgtcctagcttccttcgtgggagaaaactctggccctccactgccggccagggaggcctcgcgtgccaagctggccctgagctcagcccaggatttgtgccattcaggacgtggcggccgtgtgcaccccatcg

SEQ ID NO: 470306 - DNA, 122 bp, Homo sapiens; identical to SEQ ID NO: 355868
  chr18:74171505-74171627
  hypo
  multiple_myeloma vs. head_and_neck,melanoma,renal,lung, colorectal,lymphoid_neoplasm

SEQ ID NO: 470307 - DNA, 177 bp, Homo sapiens; identical to SEQ ID NO: 343433
  chr18:74175495-74175672
  hypo
  multiple_myeloma vs. liver_bileduct

SEQ ID NO: 470308 - DNA, 124 bp, Homo sapiens; identical to SEQ ID NO: 367627
  chr18:74176907-74177031
  hypo
  multiple_myeloma vs. colorectal,melanoma

SEQ ID NO: 470309 - DNA, 147 bp, Homo sapiens; identical to SEQ ID NO: 343435
  chr18:74183568-74183715
  hypo
  multiple_myeloma vs. bladder_and_urothelial, liver_bileduct

SEQ ID NO: 470310 - DNA, 427 bp, Homo sapiens; identical to SEQ ID NO: 343436
  chr18:74194245-74194672
  hypo
  multiple_myeloma vs. liver_bileduct,melanoma

SEQ ID NO: 470311 - DNA, 246 bp, Homo sapiens
  chr18:74325503-74325749
  hypo
cggtctcgtgcaagccccgcctctcccttactagcaaagttgtgaggacagcgcctgcacgcaacacttgcttactaacttgtaactgttattacagaaagcgtggagccaaacagatggcagaggcccaaggaagagcgcgctaaacccgaagtagatctgatttcacatcttgacttggcgattgtttagctgggtcagggtaaatgcctcactgttcctcgtctgtaaatgaacacgggtgct

SEQ ID NO: 470312 - DNA, 173 bp, Homo sapiens; identical to SEQ ID NO: 355871
  chr18:74325938-74326111
  hypo

SEQ ID NO: 470313 - DNA, 140 bp, Homo sapiens; identical to SEQ ID NO: 355873
  chr18:74721790-74721930
  hypo
  multiple_myeloma vs. sarcoma,lung,upper_gi,head_and_neck, anorectal

SEQ ID NO: 470314 - DNA, 886 bp, Homo sapiens; identical to SEQ ID NO: 348895
  chr18:74736601-74737487
  hypo
  multiple_myeloma vs. upper_gi,melanoma,colorectal, pancreas_gallbladder,head_and_neck,cervical,liver_bileduct, renal,bladder_and_urothelial,uterine,non_cancer, lymphoid_neoplasm,prostate

SEQ ID NO: 470315 - DNA, 957 bp, Homo sapiens
  chr18:74736998-74737955
  hypo
  multiple_myeloma vs. melanoma,upper_gi,head_and_neck, pancreas_gallbladder,lymphoid_neoplasm,colorectal,renal, anorectal,thyroid,uterine,prostate,cervical,non_cancer
cgaggcgggtggttttagtagcccttttattcataccagaaactgagacttagcaaagttaaggtgggattgatggaggagctgccgttcactcctgcctaaactccctccgtatgttctagaaacgcaggcgatcccccacctctagctgtctgacaccagcccttctccagcccaaagtggctttcactgcagccaggcttttcctctcagggtaaaattgaactgcagataatcgatggctgacgcatctgtggctagcagctgcttcacggagggctgaccaggagagacccagaggctttctgatctgtcgggagccaagagctgagccagggcccccgcctgcagccacagggacctcgagtgcactcagcggtcttggtgcaccatagccacctggacatcgatacgttaatgactgttaaacatgaacaaaagccgagtcccacactccaggacattcaacacccacccgacagtctgtccgagtgttacctccaacagtatgaagctcaccgtgcaacggctccaggcttgtttaggaaactgtcccactctcatcttgctctaatcagaacatggcaggaatcaaatatccatacctgactgtctccagtagaatggtgatgacagagcggacactgtcctctattgaaatacttttttttttttttttttttacctagagcatgtttctcgtgctccattcccctgcatccgtggaaatcacatcgcacaagtaacttccatcaaaaccagcacgtgtgagagacaaacatctgggttcccaggcacaccccacaccctgagtaaaccaggacggacaggccgaggttccgctgctgcctttctggcacacgcaggggagcagtgggcagcgggttactccctctccgaaaaaccgtccttctccccatgccctgcggcaccgtgagtgcatcgctcatcccgctc

SEQ ID NO: 470316 - DNA, 859 bp, Homo sapiens; identical to SEQ ID NO: 346186
  chr18:74737517-74738376
  hypo
  multiple_myeloma vs. lymphoid_neoplasm,head_and_neck, colorectal,upper_gi,melanoma,pancreas_gallbladder,renal, cervical,lung,prostate,anorectal,non_cancer,thyroid,uterine, ovary,liver_bileduct,sarcoma,bladder_and_urothelial,breast

SEQ ID NO: 470317 - DNA, 48 bp, Homo sapiens
  chr18:74755425-74755473
  hypo
  multiple_myeloma vs. myeloid_neoplasm,upper_gi,renal
cgtggcatctgaaaatgtaaataagtgatgtaccctgtggggtagctc

SEQ ID NO: 470318 - DNA, 7 bp, Homo sapiens
  chr18:74755502-74755509
  hypo
  multiple_myeloma vs. myeloid_neoplasm,upper_gi,renal
gaccctg

SEQ ID NO: 470319 - DNA, 368 bp, Homo sapiens; identical to SEQ ID NO: 367640
  chr18:74755590-74755958
  hypo
  multiple_myeloma vs. myeloid_neoplasm,upper_gi,renal

SEQ ID NO: 470320 - DNA, 337 bp, Homo sapiens; identical to SEQ ID NO: 343451
  chr18:74759077-74759414
  hypo
  multiple_myeloma vs. pancreas_gallbladder,melanoma, colorectal,head_and_neck,lung,sarcoma,lymphoid_neoplasm, upper_gi,liver_bileduct

SEQ ID NO: 470321 - DNA, 636 bp, Homo sapiens; identical to SEQ ID NO: 355876
  chr18:74763734-74764370
  hypo
  multiple_myeloma vs. pancreas_gallbladder,melanoma, head_and_neck,sarcoma,liver_bileduct,upper_gi,colorectal

SEQ ID NO: 470322 - DNA, 75 bp, Homo sapiens; identical to SEQ ID NO: 367643
  chr18:74806376-74806451
  hypo
  multiple_myeloma vs. head_and_neck,liver_bileduct,lung

SEQ ID NO: 470323 - DNA, 107 bp, Homo sapiens; identical to SEQ ID NO: 463478
  chr18:76123588-76123695
  hypo
  multiple_myeloma vs. anorectal

SEQ ID NO: 470324 - DNA, 31 bp, Homo sapiens; identical to SEQ ID NO: 367649
  chr18:76123894-76123925
  hypo
  multiple_myeloma vs. anorectal

SEQ ID NO: 470325 - DNA, 115 bp, Homo sapiens; identical to SEQ ID NO: 463483
  chr18:76189679-76189794
  hypo
  multiple_myeloma vs. lymphoid_neoplasm

SEQ ID NO: 470326 - DNA, 273 bp, Homo sapiens; identical to SEQ ID NO: 355883
  chr18:76189872-76190145
  hypo
  multiple_myeloma vs. lymphoid_neoplasm

SEQ ID NO: 470327 - DNA, 487 bp, Homo sapiens; identical to SEQ ID NO: 463488
  chr18:76486313-76486800
  hypo
  multiple_myeloma vs. anorectal,thyroid

SEQ ID NO: 470328 - DNA, 26 bp, Homo sapiens
  chr18:76486873-76486899
  hypo
  multiple_myeloma vs. anorectal,thyroid
accccagtgcacatggagacttccac

SEQ ID NO: 470329 - DNA, 367 bp, Homo sapiens; identical to SEQ ID NO: 343582
  chr19:1785308-1785675
  hypo
  multiple_myeloma vs. sarcoma,bladder_and_urothelial, renal,prostate,cervical,breast,uterine,non_cancer,anorectal, thyroid,colorectal,pancreas_gallbladder,lymphoid_neoplasm,ovary

SEQ ID NO: 470330 - DNA, 183 bp, Homo sapiens; identical to SEQ ID NO: 343612
  chr19:2997586-2997769
  hypo
  multiple_myeloma vs. sarcoma

SEQ ID NO: 470331 - DNA, 130 bp, Homo sapiens
  chr19:4550735-4550865
  hypo
  multiple_myeloma vs. renal,cervical,prostate,sarcoma, breast,melanoma,non_cancer
cggaagccccagccctcggccctggggatcaggacctcatccgggcatgtgactcaggatggagggggttctcaccggggtcgaggcacctgatcctccggcaccggcgtccagatggactcgggggact

SEQ ID NO: 470332 - DNA, 922 bp, Homo sapiens; identical to SEQ ID NO: 343679
  chr19:5994773-5995695
  hypo
  multiple_myeloma vs. bladder_and_urothelial,melanoma, cervical,lung,pancreas_gallbladder,anorectal,head_and_neck, lymphoid_neoplasm,upper_gi,thyroid,prostate,non_cancer,uterine, myeloid_neoplasm,breast,colorectal,liver_bileduct

SEQ ID NO: 470333 - DNA, 487 bp, Homo sapiens; identical to SEQ ID NO: 343681
  chr19:6001747-6002234
  hypo
  multiple_myeloma vs. colorectal,lung, pancreas_gallbladder,lymphoid_neoplasm,cervical,breast

SEQ ID NO: 470334 - DNA, 449 bp, Homo sapiens; identical to SEQ ID NO: 343682
  chr19:6004120-6004569
  hypo
  multiple_myeloma vs. lung,pancreas_gallbladder

SEQ ID NO: 470335 - DNA, 328 bp, Homo sapiens; identical to SEQ ID NO: 343683
  chr19:6005196-6005524
  hypo
  multiple_myeloma vs. anorectal,cervical, bladder_and_urothelial

SEQ ID NO: 470336 - DNA, 462 bp, Homo sapiens; identical to SEQ ID NO: 343684
  chr19:6006891-6007353
  hypo
  multiple_myeloma vs. sarcoma

SEQ ID NO: 470337 - DNA, 385 bp, Homo sapiens
  chr19:6017219-6017604
  hypo
  multiple_myeloma vs. thyroid,renal
cgacagggcaagacttcgtctctttcaaaaaacgaaacaaaacaaaaagatgggctaaatgagtcccgagccaaggactatgcctcgagaggtgaacatccagttagaagggctgcgagaactgtccacacgaagagctcagtccccacactgggcatggacgcaaaggtggcctgcccaccaactgatgccctcacccaggtgccttaaagactgcggcttaattctggtttccacctctccctctgctatcgtctgtcccctgatccagagaggtctgctatgtgaatacaaaaggcttgcactgatgcctgcgatttgcagaaagacaggaattccacgcacagaagcgaggcccgagtccagatcccatgtcaagagcgtc

SEQ ID NO: 470338 - DNA, 111 bp, Homo sapiens; identical to SEQ ID NO: 343688
  chr19:6024069-6024180
  hypo
  multiple_myeloma vs. sarcoma,anorectal

SEQ ID NO: 470339 - DNA, 510 bp, Homo sapiens; identical to SEQ ID NO: 348931
  chr19:6024679-6025189
  hypo
  multiple_myeloma vs. lung,lymphoid_neoplasm,sarcoma, colorectal,cervical,anorectal,non_cancer,thyroid, pancreas_gallbladder,upper_gi,prostate,breast,melanoma,renal, bladder_and_urothelial,head_and_neck,ovary,myeloid_neoplasm

SEQ ID NO: 470340 - DNA, 127 bp, Homo sapiens; identical to SEQ ID NO: 343690
  chr19:6033089-6033216
  hypo
  multiple_myeloma vs. melanoma

SEQ ID NO: 470341 - DNA, 313 bp, Homo sapiens; identical to SEQ ID NO: 343691
  chr19:6044422-6044735
  hypo
  multiple_myeloma vs. sarcoma,upper_gi,melanoma,lung

SEQ ID NO: 470342 - DNA, 653 bp, Homo sapiens; identical to SEQ ID NO: 343692
  chr19:6045007-6045660
  hypo
  multiple_myeloma vs. renal,sarcoma,lung,non_cancer, breast,bladder_and_urothelial,upper_gi,uterine,prostate, cervical,pancreas_gallbladder,colorectal,anorectal

SEQ ID NO: 470343 - DNA, 124 bp, Homo sapiens; identical to SEQ ID NO: 343693
  chr19:6064123-6064247
  hypo
  multiple_myeloma vs. upper_gi,lung,head_and_neck,renal, cervical,colorectal,bladder_and_urothelial

SEQ ID NO: 470344 - DNA, 257 bp, Homo sapiens; identical to SEQ ID NO: 343694
  chr19:6105459-6105716
  hypo
  multiple_myeloma vs. head_and_neck,upper_gi, bladder_and_urothelial

SEQ ID NO: 470345 - DNA, 185 bp, Homo sapiens; identical to SEQ ID NO: 382415
  chr19:8606663-8606848
  hypo
  multiple_myeloma vs. liver_bileduct

SEQ ID NO: 470346 - DNA, 154 bp, Homo sapiens
  chr19:13119777-13119931
  hypo
  multiple_myeloma vs. liver_bileduct
cgctgtagccaggtcctcaccgaggtagatttgcgggggtctcccagtcccagtcccacacactgcctcatccccactcacagtcaacgcccgcaacaccccgccacccgcagtctgtcgcgcagtgacagcctgtcacaagcaccgccgcaca

SEQ ID NO: 470347 - DNA, 21 bp, Homo sapiens
  chr19:13120022-13120043
  hypo
  multiple_myeloma vs. liver_bileduct
cctcacgcgatcacaccaagc

SEQ ID NO: 470348 - DNA, 229 bp, Homo sapiens; identical to SEQ ID NO: 343784
  chr19:13156427-13156656
  hypo
  multiple_myeloma vs. liver_bileduct,lung

SEQ ID NO: 470349 - DNA, 73 bp, Homo sapiens; identical to SEQ ID NO: 346198
  chr19:13181444-13181517
  hypo
  multiple_myeloma vs. lung,colorectal,head_and_neck, upper_gi,bladder_and_urothelial,ovary,melanoma,breast,uterine, prostate,anorectal,liver_bileduct,myeloid_neoplasm,non_cancer, renal,pancreas_gallbladder,thyroid,lymphoid_neoplasm,sarcoma,
  CONT. FROM ABOVE: cervical

SEQ ID NO: 470350 - DNA, 420 bp, Homo sapiens; identical to SEQ ID NO: 343786
  chr19:13186075-13186495
  hypo
  multiple_myeloma vs. melanoma,liver_bileduct,ovary, thyroid,non_cancer,renal,myeloid_neoplasm,uterine,colorectal, lung,cervical,head_and_neck,upper_gi,prostate,anorectal,breast, pancreas_gallbladder,bladder_and_urothelial

SEQ ID NO: 470351 - DNA, 119 bp, Homo sapiens; identical to SEQ ID NO: 343787
  chr19:13194593-13194712
  hypo
  multiple_myeloma vs. liver_bileduct,myeloid_neoplasm

SEQ ID NO: 470352 - DNA, 35 bp, Homo sapiens
  chr19:13201116-13201151
  hypo
  multiple_myeloma vs. pancreas_gallbladder,renal, lymphoid_neoplasm,non_cancer,liver_bileduct,prostate,melanoma, colorectal,bladder_and_urothelial,cervical
cgcaacgacaggcgcctcctctgccaaccggtttg

SEQ ID NO: 470353 - DNA, 155 bp, Homo sapiens; identical to SEQ ID NO: 343797
  chr19:14522737-14522892
  hypo
  multiple_myeloma vs. myeloid_neoplasm, bladder_and_urothelial,lung,upper_gi,colorectal,anorectal, prostate,head_and_neck,renal,breast,ovary

SEQ ID NO: 470354 - DNA, 366 bp, Homo sapiens; identical to SEQ ID NO: 343807
  chr19:15302345-15302711
  hypo
  multiple_myeloma vs. ovary,myeloid_neoplasm

SEQ ID NO: 470355 - DNA, 287 bp, Homo sapiens; identical to SEQ ID NO: 343842
  chr19:18123660-18123947
  hypo
  multiple_myeloma vs. liver_bileduct

SEQ ID NO: 470356 - DNA, 574 bp, Homo sapiens; identical to SEQ ID NO: 463540
  chr19:31769887-31770461
  hypo
  multiple_myeloma vs. sarcoma,lymphoid_neoplasm

SEQ ID NO: 470357 - DNA, 157 bp, Homo sapiens; identical to SEQ ID NO: 348964
  chr19:31770490-31770647
  hypo
  multiple_myeloma vs. sarcoma,lymphoid_neoplasm

SEQ ID NO: 470358 - DNA, 476 bp, Homo sapiens; identical to SEQ ID NO: 343914
  chr19:34303771-34304247
  hypo
  multiple_myeloma vs. melanoma,anorectal

SEQ ID NO: 470359 - DNA, 450 bp, Homo sapiens; identical to SEQ ID NO: 356121
  chr19:35551123-35551573
  hypo
  multiple_myeloma vs. melanoma,uterine,thyroid,prostate, pancreas_gallbladder,liver_bileduct

SEQ ID NO: 470360 - DNA, 321 bp, Homo sapiens; identical to SEQ ID NO: 382659
  chr19:38964045-38964366
  hypo
  multiple_myeloma vs. lymphoid_neoplasm

SEQ ID NO: 470361 - DNA, 257 bp, Homo sapiens; identical to SEQ ID NO: 343952
  chr19:39015907-39016164
  hypo
  multiple_myeloma vs. bladder_and_urothelial

SEQ ID NO: 470362 - DNA, 162 bp, Homo sapiens; identical to SEQ ID NO: 368123
  chr19:41643155-41643317
  hypo
  multiple_myeloma vs. upper_gi,melanoma,sarcoma

SEQ ID NO: 470363 - DNA, 782 bp, Homo sapiens; identical to SEQ ID NO: 336161
  chr19:45004129-45004911
  hypo
  multiple_myeloma vs. liver_bileduct,lung

SEQ ID NO: 470364 - DNA, 373 bp, Homo sapiens; identical to SEQ ID NO: 382708
  chr19:45314498-45314871
  hypo
  multiple_myeloma vs. upper_gi

SEQ ID NO: 470365 - DNA, 300 bp, Homo sapiens; identical to SEQ ID NO: 344001
  chr19:45315421-45315721
  hypo
  multiple_myeloma vs. lung,renal,liver_bileduct,thyroid

SEQ ID NO: 470366 - DNA, 292 bp, Homo sapiens; identical to SEQ ID NO: 356156
  chr19:45322448-45322740
  hypo
  multiple_myeloma vs. liver_bileduct,lung, pancreas_gallbladder,upper_gi,sarcoma,ovary,colorectal,breast

SEQ ID NO: 470367 - DNA, 362 bp, Homo sapiens; identical to SEQ ID NO: 344004
  chr19:45377472-45377834
  hypo
  multiple_myeloma vs. upper_gi,liver_bileduct,lung, bladder_and_urothelial,melanoma

SEQ ID NO: 470368 - DNA, 510 bp, Homo sapiens; identical to SEQ ID NO: 344018
  chr19:46330394-46330904
  hypo
  multiple_myeloma vs. myeloid_neoplasm

SEQ ID NO: 470369 - DNA, 112 bp, Homo sapiens; identical to SEQ ID NO: 382777
  chr19:50774482-50774594
  hypo
  multiple_myeloma vs. liver_bileduct

SEQ ID NO: 470370 - DNA, 230 bp, Homo sapiens; identical to SEQ ID NO: 344068
  chr19:50784855-50785085
  hypo
  multiple_myeloma vs. lung,bladder_and_urothelial, liver_bileduct,upper_gi,breast,lymphoid_neoplasm,sarcoma, head_and_neck,pancreas_gallbladder,cervical

SEQ ID NO: 470371 - DNA, 40 bp, Homo sapiens
  chr19:50789768-50789808
  hypo
  multiple_myeloma vs. anorectal,upper_gi, bladder_and_urothelial
cgggcagtggaggaacgtgagcgggccgaggcagagggcc

SEQ ID NO: 470372 - DNA, 26 bp, Homo sapiens
  chr19:50789973-50789999
  hypo
  multiple_myeloma vs. anorectal,upper_gi, bladder_and_urothelial
gggacacactgggtgaggggagacac

SEQ ID NO: 470373 - DNA, 143 bp, Homo sapiens; identical to SEQ ID NO: 344098
  chr19:53806012-53806155
  hypo
  multiple_myeloma vs. sarcoma,anorectal,thyroid, lymphoid_neoplasm

SEQ ID NO: 470374 - DNA, 230 bp, Homo sapiens; identical to SEQ ID NO: 337465
  chr2:1488408-1488638
  hypo
  multiple_myeloma vs. lymphoid_neoplasm,sarcoma

SEQ ID NO: 470375 - DNA, 605 bp, Homo sapiens; identical to SEQ ID NO: 362772
  chr2:1863600-1864205
  hypo
  multiple_myeloma vs. anorectal,thyroid,lymphoid_neoplasm, uterine,non_cancer

SEQ ID NO: 470376 - DNA, 42 bp, Homo sapiens
  chr2:2673043-2673085
  hypo
  multiple_myeloma vs. lymphoid_neoplasm,myeloid_neoplasm
cgaggagtcagggcccccgaatctctgggaggacgcatccta

SEQ ID NO: 470377 - DNA, 205 bp, Homo sapiens; identical to SEQ ID NO: 362780
  chr2:2673114-2673319
  hypo
  multiple_myeloma vs. lymphoid_neoplasm,myeloid_neoplasm

SEQ ID NO: 470378 - DNA, 98 bp, Homo sapiens; identical to SEQ ID NO: 463593
  chr2:2854244-2854342
  hypo
  multiple_myeloma vs. lymphoid_neoplasm,thyroid,uterine, non_cancer

SEQ ID NO: 470379 - DNA, 160 bp, Homo sapiens; identical to SEQ ID NO: 353046
  chr2:2854463-2854623
  hypo
  multiple_myeloma vs. lymphoid_neoplasm,thyroid,uterine, non_cancer

SEQ ID NO: 470380 - DNA, 348 bp, Homo sapiens; identical to SEQ ID NO: 337515
  chr2:9078588-9078936
  hypo
  multiple_myeloma vs. upper_gi,breast,myeloid_neoplasm, lung,bladder_and_urothelial,ovary,renal,uterine,colorectal, non_cancer,cervical,anorectal,thyroid

SEQ ID NO: 470381 - DNA, 783 bp, Homo sapiens; identical to SEQ ID NO: 353062
  chr2:9236530-9237313
  hypo
  multiple_myeloma vs. pancreas_gallbladder,melanoma, bladder_and_urothelial,lung,renal,colorectal,ovary, head_and_neck,thyroid

SEQ ID NO: 470382 - DNA, 234 bp, Homo sapiens; identical to SEQ ID NO: 337519
  chr2:9245045-9245279
  hypo
  multiple_myeloma vs. sarcoma,myeloid_neoplasm,cervical, prostate,renal

SEQ ID NO: 470383 - DNA, 314 bp, Homo sapiens; identical to SEQ ID NO: 337564
  chr2:23785024-23785338
  hypo
  multiple_myeloma vs. pancreas_gallbladder,ovary

SEQ ID NO: 470384 - DNA, 346 bp, Homo sapiens; identical to SEQ ID NO: 337646
  chr2:72359340-72359686
  hypo
  multiple_myeloma vs. breast

SEQ ID NO: 470385 - DNA, 436 bp, Homo sapiens; identical to SEQ ID NO: 353137
  chr2:97544651-97545087
  hypo
  multiple_myeloma vs. head_and_neck,colorectal,lung,renal, cervical,bladder_and_urothelial,breast,uterine,prostate,ovary, anorectal,thyroid,non_cancer,melanoma

SEQ ID NO: 470386 - DNA, 200 bp, Homo sapiens; identical to SEQ ID NO: 337684
  chr2:97545395-97545595
  hypo
  multiple_myeloma vs. lung,bladder_and_urothelial,sarcoma, melanoma,uterine,colorectal,ovary,breast,head_and_neck,cervical, non_cancer,prostate,thyroid,pancreas_gallbladder, myeloid_neoplasm,renal

SEQ ID NO: 470387 - DNA, 305 bp, Homo sapiens; identical to SEQ ID NO: 337685
  chr2:97576055-97576360
  hypo
  multiple_myeloma vs. lung,head_and_neck, bladder_and_urothelial,uterine,anorectal,upper_gi,melanoma, breast,colorectal,prostate

SEQ ID NO: 470388 - DNA, 439 bp, Homo sapiens; identical to SEQ ID NO: 337686
  chr2:97587010-97587449
  hypo
  multiple_myeloma vs. upper_gi

SEQ ID NO: 470389 - DNA, 249 bp, Homo sapiens; identical to SEQ ID NO: 337687
  chr2:97589058-97589307
  hypo
  multiple_myeloma vs. head_and_neck

SEQ ID NO: 470390 - DNA, 231 bp, Homo sapiens; identical to SEQ ID NO: 337697
  chr2:102486147-102486378
  hypo
  multiple_myeloma vs. liver_bileduct

SEQ ID NO: 470391 - DNA, 143 bp, Homo sapiens; identical to SEQ ID NO: 337698
  chr2:102683385-102683528
  hypo
  multiple_myeloma vs. melanoma,upper_gi,prostate,thyroid, liver_bileduct,ovary

SEQ ID NO: 470392 - DNA, 205 bp, Homo sapiens; identical to SEQ ID NO: 337718
  chr2:110011299-110011504
  hypo
  multiple_myeloma vs. pancreas_gallbladder,breast, colorectal,thyroid,bladder_and_urothelial,lymphoid_neoplasm, prostate,non_cancer,uterine

SEQ ID NO: 470393 - DNA, 187 bp, Homo sapiens
  chr2:110015134-110015321
  hypo
  multiple_myeloma vs. lymphoid_neoplasm,breast, head_and_neck,colorectal,thyroid,non_cancer,myeloid_neoplasm, prostate
cggcgctgtggccagcgtggccccaagtcccactttaagcagctcaggggcggtcagtgcctttcagcggcgtgtggatggcaagaagaacaccaagaaacgccactccttcaccgcgctcagtgtgacgcacagatcctcccaggctgccagccacaggcattccatggaaattagtgctccagtg

SEQ ID NO: 470394 - DNA, 112 bp, Homo sapiens; identical to SEQ ID NO: 353157
  chr2:110015364-110015476
  hypo
  multiple_myeloma vs. lymphoid_neoplasm,breast, head_and_neck,colorectal,thyroid,non_cancer,myeloid_neoplasm, prostate

SEQ ID NO: 470395 - DNA, 215 bp, Homo sapiens; identical to SEQ ID NO: 362962
  chr2:110016725-110016940
  hypo
  multiple_myeloma vs. bladder_and_urothelial

SEQ ID NO: 470396 - DNA, 134 bp, Homo sapiens; identical to SEQ ID NO: 376414
  chr2:110017061-110017195
  hypo
  multiple_myeloma vs. pancreas_gallbladder

SEQ ID NO: 470397 - DNA, 452 bp, Homo sapiens; identical to SEQ ID NO: 337722
  chr2:110021654-110022106
  hypo
  multiple_myeloma vs. sarcoma,breast,anorectal,uterine, thyroid,non_cancer,prostate,myeloid_neoplasm, bladder_and_urothelial,lymphoid_neoplasm,head_and_neck, colorectal,pancreas_gallbladder,lung,renal

SEQ ID NO: 470398 - DNA, 73 bp, Homo sapiens; identical to SEQ ID NO: 337723
  chr2:110022456-110022529
  hypo
  multiple_myeloma vs. prostate,breast,uterine,cervical, head_and_neck,non_cancer,colorectal

SEQ ID NO: 470399 - DNA, 124 bp, Homo sapiens; identical to SEQ ID NO: 337724
  chr2:110028510-110028634
  hypo
  multiple_myeloma vs. bladder_and_urothelial,anorectal, breast,uterine,upper_gi,lung,thyroid,prostate,non_cancer,renal, head_and_neck,colorectal,cervical,lymphoid_neoplasm, pancreas_gallbladder,ovary,sarcoma

SEQ ID NO: 470400 - DNA, 146 bp, Homo sapiens; identical to SEQ ID NO: 337725
  chr2:110048964-110049110
  hypo
  multiple_myeloma vs. sarcoma

SEQ ID NO: 470401 - DNA, 213 bp, Homo sapiens; identical to SEQ ID NO: 362977
  chr2:121549381-121549594
  hypo
  multiple_myeloma vs. sarcoma

SEQ ID NO: 470402 - DNA, 325 bp, Homo sapiens; identical to SEQ ID NO: 337744
  chr2:121742106-121742431
  hypo
  multiple_myeloma vs. sarcoma

SEQ ID NO: 470403 - DNA, 140 bp, Homo sapiens; identical to SEQ ID NO: 337745
  chr2:122010702-122010842
  hypo
  multiple_myeloma vs. lung,upper_gi,ovary, bladder_and_urothelial,colorectal,sarcoma

SEQ ID NO: 470404 - DNA, 231 bp, Homo sapiens; identical to SEQ ID NO: 337746
  chr2:122011463-122011694
  hypo
  multiple_myeloma vs. lymphoid_neoplasm,lung

SEQ ID NO: 470405 - DNA, 96 bp, Homo sapiens; identical to SEQ ID NO: 376454
  chr2:130669922-130670018
  hypo
  multiple_myeloma vs. sarcoma,cervical

SEQ ID NO: 470406 - DNA, 502 bp, Homo sapiens; identical to SEQ ID NO: 337847
  chr2:217528438-217528940
  hypo
  multiple_myeloma vs. bladder_and_urothelial,breast

SEQ ID NO: 470407 - DNA, 180 bp, Homo sapiens; identical to SEQ ID NO: 337849
  chr2:217674486-217674666
  hypo
  multiple_myeloma vs. sarcoma,ovary,melanoma,anorectal, myeloid_neoplasm,lymphoid_neoplasm

SEQ ID NO: 470408 - DNA, 85 bp, Homo sapiens
  chr2:217674965-217675050
  hypo
  multiple_myeloma vs. sarcoma,melanoma,thyroid, myeloid_neoplasm,lymphoid_neoplasm
cgacgctctggtgtgggcagcccgagaggtgatggggtttcagtaaatcatggcggggagttcaggccaccgccggagtccagtg

SEQ ID NO: 470409 - DNA, 181 bp, Homo sapiens; identical to SEQ ID NO: 337851
  chr2:217691004-217691185
  hypo
  multiple_myeloma vs. breast,bladder_and_urothelial, non_cancer,myeloid_neoplasm,melanoma

SEQ ID NO: 470410 - DNA, 93 bp, Homo sapiens; identical to SEQ ID NO: 337852
  chr2:218678441-218678534
  hypo
  multiple_myeloma vs. breast,lymphoid_neoplasm,ovary, bladder_and_urothelial,melanoma,cervical,lung,non_cancer, anorectal,thyroid,prostate,head_and_neck,renal,sarcoma,uterine, pancreas_gallbladder,myeloid_neoplasm,liver_bileduct

SEQ ID NO: 470411 - DNA, 839 bp, Homo sapiens; identical to SEQ ID NO: 337853
  chr2:218682490-218683329
  hypo
  multiple_myeloma vs. breast,cervical,head_and_neck, anorectal,myeloid_neoplasm,thyroid,non_cancer, bladder_and_urothelial,uterine,ovary,prostate,sarcoma,lung, liver_bileduct,lymphoid_neoplasm,renal,upper_gi,colorectal,
  CONT. FROM ABOVE: melanoma

SEQ ID NO: 470412 - DNA, 138 bp, Homo sapiens; identical to SEQ ID NO: 337854
  chr2:218686231-218686369
  hypo
  multiple_myeloma vs. lymphoid_neoplasm,cervical, head_and_neck,breast,uterine,melanoma,ovary,myeloid_neoplasm, lung,prostate,upper_gi,non_cancer,anorectal,colorectal, liver_bileduct,renal,thyroid,bladder_and_urothelial,sarcoma

SEQ ID NO: 470413 - DNA, 267 bp, Homo sapiens; identical to SEQ ID NO: 337855
  chr2:218694781-218695048
  hypo
  multiple_myeloma vs. myeloid_neoplasm,sarcoma, bladder_and_urothelial,breast,cervical,ovary,non_cancer, prostate,uterine,head_and_neck,pancreas_gallbladder,lung,renal, thyroid,liver_bileduct,upper_gi

SEQ ID NO: 470414 - DNA, 57 bp, Homo sapiens
  chr2:218697833-218697890
  hypo
  multiple_myeloma vs. melanoma,sarcoma
cggtcattcatggaataaccacgaagcagccccagcccacaggtacgcgcatgttta

SEQ ID NO: 470415 - DNA, 178 bp, Homo sapiens; identical to SEQ ID NO: 363067
  chr2:218697937-218698115
  hypo
  multiple_myeloma vs. melanoma,sarcoma

SEQ ID NO: 470416 - DNA, 79 bp, Homo sapiens; identical to SEQ ID NO: 337857
  chr2:218700747-218700826
  hypo
  multiple_myeloma vs. liver_bileduct,sarcoma

SEQ ID NO: 470417 - DNA, 288 bp, Homo sapiens; identical to SEQ ID NO: 337858
  chr2:218704299-218704587
  hypo
  multiple_myeloma vs. melanoma,ovary

SEQ ID NO: 470418 - DNA, 758 bp, Homo sapiens
  chr2:218712694-218713452
  hypo
  multiple_myeloma vs. melanoma,sarcoma,ovary
cggaggctggctccaggtccagcatcagcatattgagtgtttcgatggactgttcaatctcctgctgggaggctgctcgcgggaactcagggagactggggatgggggtctctgccaatggctgagggctgggcctgctggctacaagactctccaagtgggctctttcctgctggcgtggaggtgggcgaggctgctgctgctgctgctgctgctgctgccacgaattcagtcccctttgcacagcctcccggctgcttccccctcggaccggagctgggggcagctggggttcagcttccgaaaaggattgagagcggaacataccgctggggtcatgggcatagtgggaggtggtcactggctgtggccaggctgggtggggcccctccctctggtagccagctaaaccctcctgtgcagagtaggagggccgcatgggggccgtgtggccagcatgggcaggccccgcccggctggcagactcgtaggggtagcctcctccattgaccataggctccatggggtaggacttgtccagaccgttggtcagtggggacagggcctctgggtagcccccctcactggtgttggtgaccccgtccagagaagagagtgtgcccatgctgcccgcactgtgaccatcctggtttggcaattcatcgtccaggatgtctgtctcccgctcagatgctaacgccccaccattgacatgaacctgggctgggacaacgtggcgtccagaggagggcacagcc

SEQ ID NO: 470419 - DNA, 771 bp, Homo sapiens; identical to SEQ ID NO: 345777
  chr2:218712965-218713736
  hypo
  multiple_myeloma vs. cervical,prostate,anorectal, myeloid_neoplasm,thyroid,melanoma,renal,head_and_neck, non_cancer,uterine,ovary,breast,pancreas_gallbladder,sarcoma, liver_bileduct,lung

SEQ ID NO: 470420 - DNA, 171 bp, Homo sapiens; identical to SEQ ID NO: 337860
  chr2:218765473-218765644
  hypo
  multiple_myeloma vs. liver_bileduct

SEQ ID NO: 470421 - DNA, 360 bp, Homo sapiens; identical to SEQ ID NO: 337877
  chr2:220427099-220427459
  hypo
  multiple_myeloma vs. melanoma

SEQ ID NO: 470422 - DNA, 123 bp, Homo sapiens; identical to SEQ ID NO: 363083
  chr2:220428136-220428259
  hypo
  multiple_myeloma vs. anorectal,melanoma,prostate,uterine

SEQ ID NO: 470423 - DNA, 160 bp, Homo sapiens; identical to SEQ ID NO: 337915
  chr2:236672645-236672805
  hypo
  multiple_myeloma vs. liver_bileduct,upper_gi,ovary

SEQ ID NO: 470424 - DNA, 181 bp, Homo sapiens; identical to SEQ ID NO: 337916
  chr2:236675966-236676147
  hypo
  multiple_myeloma vs. lung

SEQ ID NO: 470425 - DNA, 366 bp, Homo sapiens; identical to SEQ ID NO: 337917
  chr2:236685979-236686345
  hypo
  multiple_myeloma vs. sarcoma,melanoma,renal, head_and_neck,upper_gi,bladder_and_urothelial,liver_bileduct, breast,pancreas_gallbladder,uterine,anorectal,prostate, non_cancer,colorectal,cervical

SEQ ID NO: 470426 - DNA, 137 bp, Homo sapiens; identical to SEQ ID NO: 337918
  chr2:236722564-236722701
  hypo
  multiple_myeloma vs. head_and_neck,pancreas_gallbladder, lung,ovary,liver_bileduct,upper_gi,lymphoid_neoplasm

SEQ ID NO: 470427 - DNA, 317 bp, Homo sapiens; identical to SEQ ID NO: 337920
  chr2:236801881-236802198
  hypo
  multiple_myeloma vs. liver_bileduct

SEQ ID NO: 470428 - DNA, 348 bp, Homo sapiens; identical to SEQ ID NO: 337921
  chr2:236826196-236826544
  hypo
  multiple_myeloma vs. liver_bileduct

SEQ ID NO: 470429 - DNA, 544 bp, Homo sapiens; identical to SEQ ID NO: 337922
  chr2:236839051-236839595
  hypo
  multiple_myeloma vs. liver_bileduct,upper_gi,lung

SEQ ID NO: 470430 - DNA, 96 bp, Homo sapiens; identical to SEQ ID NO: 337923
  chr2:236840424-236840520
  hypo
  multiple_myeloma vs. liver_bileduct

SEQ ID NO: 470431 - DNA, 139 bp, Homo sapiens; identical to SEQ ID NO: 337926
  chr2:237018173-237018312
  hypo
  multiple_myeloma vs. liver_bileduct,ovary

SEQ ID NO: 470432 - DNA, 391 bp, Homo sapiens
  chr2:237032663-237033054
  hypo
  multiple_myeloma vs. lung,pancreas_gallbladder,upper_gi
cggctgccccgacgagcgcttcgtgctcatggccacccctaacctgtccaggagaaacaataaccggaacaacagcagtgggagggtgcccaccatcatctgaggaacagccgtgcccgcctgctcgccgcacctgggacgcggcagcctcgccgcattctcgctcagaagtcgcagcacgtgagtcccgtcgcatcccctccctcttcctggtggccacctccctcccgcccacccactctcaccccaaacaaaatcacaaaacctggacatccctcaaggggcgaagaggcggccgggagactgcagaagtggctccttttcataaactcccctaaaccacacacaggagagagcgacgggcctcggccctttgatgatagcacatggc

SEQ ID NO: 470433 - DNA, 67 bp, Homo sapiens; identical to SEQ ID NO: 463641
  chr2:238280432-238280499
  hypo
  multiple_myeloma vs. anorectal,uterine,thyroid,melanoma

SEQ ID NO: 470434 - DNA, 235 bp, Homo sapiens; identical to SEQ ID NO: 347951
  chr2:238280812-238281047
  hypo
  multiple_myeloma vs. anorectal,uterine,thyroid,melanoma

SEQ ID NO: 470435 - DNA, 339 bp, Homo sapiens; identical to SEQ ID NO: 376619
  chr2:238793969-238794308
  hypo
  multiple_myeloma vs. liver_bileduct

SEQ ID NO: 470436 - DNA, 105 bp, Homo sapiens; identical to SEQ ID NO: 463643
  chr2:239888414-239888519
  hypo
  multiple_myeloma vs. melanoma,anorectal, lymphoid_neoplasm

SEQ ID NO: 470437 - DNA, 76 bp, Homo sapiens; identical to SEQ ID NO: 363140
  chr2:239888789-239888865
  hypo
  multiple_myeloma vs. melanoma,anorectal, lymphoid_neoplasm

SEQ ID NO: 470438 - DNA, 298 bp, Homo sapiens; identical to SEQ ID NO: 337977
  chr2:241689824-241690122
  hypo
  multiple_myeloma vs. sarcoma,anorectal,thyroid

SEQ ID NO: 470439 - DNA, 136 bp, Homo sapiens; identical to SEQ ID NO: 363169
  chr2:241697788-241697924
  hypo
  multiple_myeloma vs. lung

SEQ ID NO: 470440 - DNA, 433 bp, Homo sapiens; identical to SEQ ID NO: 337980
  chr2:241724232-241724665
  hypo
  multiple_myeloma vs. lymphoid_neoplasm,sarcoma

SEQ ID NO: 470441 - DNA, 264 bp, Homo sapiens; identical to SEQ ID NO: 344182
  chr20:23015064-23015328
  hypo
  multiple_myeloma vs. uterine,cervical

SEQ ID NO: 470442 - DNA, 71 bp, Homo sapiens
  chr20:23092311-23092382
  hypo
  multiple_myeloma vs. anorectal
cggggcgaaccaaagatgggagaggagcatcagtgcccccctccccatcaccacattagaatcctgcggga

SEQ ID NO: 470443 - DNA, 118 bp, Homo sapiens; identical to SEQ ID NO: 382888
  chr20:23092426-23092544
  hypo
  multiple_myeloma vs. anorectal

SEQ ID NO: 470444 - DNA, 554 bp, Homo sapiens
  chr20:30584500-30585054
  hypo
  multiple_myeloma vs. thyroid
ttttggcatcttcatcgtggcccactggtgcgtcatgaccttctgggtcatccaaggggagacggacttctgcatgtccaagtgggaggagatcatctacaacatggtcgtgggcatcatctacatcttctgctggttcaacgtcaaggagggccgcagccgccgccgcatgaccctctaccactgcatcgtcctgctggagaacgccgcgctcaccggcttctggtactccagccgcaacttctcaaccgacttctactcgctcatcatggtctgcgtagtggcctccagctttgcgctgggcatattcttcatgtgtgtctactactgtctcctgcaccccaatgggcccatgctgggtccccaggcacctggttgcatcttccgtaaggcctcagagccctgtggcccacccgctgacgccatcacgagtccccccaggtccctgccaaggactacaggtgctgagcgggatggggcctcggcgggagagcgtgcagggacccccaccccacctgtcttccaggtgcggcctggcttgcctcccacaccag

SEQ ID NO: 470445 - DNA, 106 bp, Homo sapiens; identical to SEQ ID NO: 382904
  chr20:30585104-30585210
  hypo
  multiple_myeloma vs. thyroid

SEQ ID NO: 470446 - DNA, 538 bp, Homo sapiens; identical to SEQ ID NO: 356273
  chr20:36760841-36761379
  hypo
  multiple_myeloma vs. melanoma,cervical,liver_bileduct, lymphoid_neoplasm,uterine,pancreas_gallbladder,anorectal, colorectal,breast

SEQ ID NO: 470447 - DNA, 117 bp, Homo sapiens
  chr20:36764040-36764157
  hypo
  multiple_myeloma vs. ovary,liver_bileduct,colorectal, cervical,lymphoid_neoplasm,thyroid,myeloid_neoplasm,breast, melanoma,renal,uterine,non_cancer,prostate,upper_gi, head_and_neck,lung
cggactctcggggcctggatgagcagcgagggccgggtcctttctacaccaccgaggtgtcagggacacaggaacccccgagcccagggctgacaccactgcctgggacagaaggtg

SEQ ID NO: 470448 - DNA, 124 bp, Homo sapiens; identical to SEQ ID NO: 349022
  chr20:36764186-36764310
  hypo
  multiple_myeloma vs. ovary,liver_bileduct,colorectal, cervical,lymphoid_neoplasm,thyroid,myeloid_neoplasm,breast, melanoma,renal,uterine,non_cancer,prostate,upper_gi, head_and_neck,lung

SEQ ID NO: 470449 - DNA, 186 bp, Homo sapiens; identical to SEQ ID NO: 344229
  chr20:36765901-36766087
  hypo
  multiple_myeloma vs. melanoma,liver_bileduct,colorectal, breast,lymphoid_neoplasm,thyroid,prostate,pancreas_gallbladder, ovary,sarcoma,renal,cervical,non_cancer

SEQ ID NO: 470450 - DNA, 278 bp, Homo sapiens; identical to SEQ ID NO: 344230
  chr20:36766589-36766867
  hypo
  multiple_myeloma vs. anorectal,bladder_and_urothelial, thyroid,prostate,breast,cervical,melanoma,non_cancer

SEQ ID NO: 470451 - DNA, 187 bp, Homo sapiens; identical to SEQ ID NO: 455102
  chr20:36767690-36767877
  hypo
  multiple_myeloma vs. liver_bileduct

SEQ ID NO: 470452 - DNA, 109 bp, Homo sapiens; identical to SEQ ID NO: 368336
  chr20:36767917-36768026
  hypo
  multiple_myeloma vs. liver_bileduct

SEQ ID NO: 470453 - DNA, 477 bp, Homo sapiens; identical to SEQ ID NO: 368376
  chr20:49223746-49224223
  hypo
  multiple_myeloma vs. renal,upper_gi,myeloid_neoplasm, bladder_and_urothelial,melanoma,ovary,lung

SEQ ID NO: 470454 - DNA, 581 bp, Homo sapiens; identical to SEQ ID NO: 347682
  chr20:49224897-49225478
  hypo
  multiple_myeloma vs. breast,myeloid_neoplasm,lung, prostate,melanoma,thyroid,non_cancer,renal,cervical,uterine, anorectal,pancreas_gallbladder,ovary,colorectal,upper_gi, bladder_and_urothelial

SEQ ID NO: 470455 - DNA, 305 bp, Homo sapiens; identical to SEQ ID NO: 336468
  chr20:49225991-49226296
  hypo
  multiple_myeloma vs. lung,sarcoma,breast,cervical, myeloid_neoplasm,bladder_and_urothelial,colorectal

SEQ ID NO: 470456 - DNA, 159 bp, Homo sapiens; identical to SEQ ID NO: 356308
  chr20:49236444-49236603
  hypo
  multiple_myeloma vs. renal,lung,bladder_and_urothelial, cervical,myeloid_neoplasm,sarcoma,anorectal,prostate,ovary, pancreas_gallbladder,breast,non_cancer,uterine,colorectal

SEQ ID NO: 470457 - DNA, 146 bp, Homo sapiens; identical to SEQ ID NO: 344290
  chr20:49240816-49240962
  hypo
  multiple_myeloma vs. myeloid_neoplasm

SEQ ID NO: 470458 - DNA, 141 bp, Homo sapiens; identical to SEQ ID NO: 344291
  chr20:49247308-49247449
  hypo
  multiple_myeloma vs. pancreas_gallbladder, myeloid_neoplasm,lung,cervical,upper_gi,colorectal, head_and_neck,prostate,ovary,bladder_and_urothelial,renal, non_cancer,thyroid,breast,sarcoma,anorectal,uterine,melanoma

SEQ ID NO: 470459 - DNA, 433 bp, Homo sapiens; identical to SEQ ID NO: 344333
  chr20:59872770-59873203
  hypo
  multiple_myeloma vs. lymphoid_neoplasm

SEQ ID NO: 470460 - DNA, 211 bp, Homo sapiens; identical to SEQ ID NO: 344334
  chr20:60094644-60094855
  hypo
  multiple_myeloma vs. lymphoid_neoplasm,anorectal

SEQ ID NO: 470461 - DNA, 146 bp, Homo sapiens; identical to SEQ ID NO: 344335
  chr20:60173821-60173967
  hypo
  multiple_myeloma vs. lymphoid_neoplasm

SEQ ID NO: 470462 - DNA, 428 bp, Homo sapiens; identical to SEQ ID NO: 368418
  chr20:60226081-60226509
  hypo
  multiple_myeloma vs. myeloid_neoplasm,anorectal

SEQ ID NO: 470463 - DNA, 353 bp, Homo sapiens; identical to SEQ ID NO: 463670
  chr20:60238496-60238849
  hypo
  multiple_myeloma vs. renal,lymphoid_neoplasm,non_cancer, prostate

SEQ ID NO: 470464 - DNA, 331 bp, Homo sapiens; identical to SEQ ID NO: 356333
  chr20:60273150-60273481
  hypo
  multiple_myeloma vs. lymphoid_neoplasm,anorectal,thyroid, non_cancer,head_and_neck

SEQ ID NO: 470465 - DNA, 546 bp, Homo sapiens; identical to SEQ ID NO: 344339
  chr20:60275663-60276209
  hypo
  multiple_myeloma vs. anorectal,thyroid

SEQ ID NO: 470466 - DNA, 30 bp, Homo sapiens; identical to SEQ ID NO: 455116
  chr20:60281877-60281907
  hypo
  multiple_myeloma vs. anorectal,thyroid,non_cancer

SEQ ID NO: 470467 - DNA, 249 bp, Homo sapiens; identical to SEQ ID NO: 368422
  chr20:60313847-60314096
  hypo
  multiple_myeloma vs. lymphoid_neoplasm

SEQ ID NO: 470468 - DNA, 178 bp, Homo sapiens; identical to SEQ ID NO: 344342
  chr20:60316318-60316496
  hypo
  multiple_myeloma vs. lymphoid_neoplasm

SEQ ID NO: 470469 - DNA, 350 bp, Homo sapiens; identical to SEQ ID NO: 368425
  chr20:60373188-60373538
  hypo
  multiple_myeloma vs. lymphoid_neoplasm

SEQ ID NO: 470470 - DNA, 111 bp, Homo sapiens; identical to SEQ ID NO: 368426
  chr20:60448951-60449062
  hypo
  multiple_myeloma vs. anorectal,lymphoid_neoplasm,thyroid

SEQ ID NO: 470471 - DNA, 597 bp, Homo sapiens; identical to SEQ ID NO: 344374
  chr20:61000254-61000851
  hypo
  multiple_myeloma vs. head_and_neck,upper_gi, bladder_and_urothelial,breast,colorectal

SEQ ID NO: 470472 - DNA, 97 bp, Homo sapiens
  chr20:61749643-61749740
  hypo
  multiple_myeloma vs. lymphoid_neoplasm
cgctgtgtcctgctgcattgctgggcagtgtccactgcacgtcgctcgctgcattgctgggcagtgtccgcggcatgtcgctctctgcattgctggg

SEQ ID NO: 470473 - DNA, 65 bp, Homo sapiens; identical to SEQ ID NO: 368469
  chr20:61749920-61749985
  hypo
  multiple_myeloma vs. lymphoid_neoplasm

SEQ ID NO: 470474 - DNA, 7 bp, Homo sapiens
  chr20:62046195-62046202
  hypo
  multiple_myeloma vs. thyroid,anorectal,non_cancer
cgtggcc

SEQ ID NO: 470475 - DNA, 419 bp, Homo sapiens; identical to SEQ ID NO: 383160
  chr21:33370937-33371356
  hypo
  multiple_myeloma vs. melanoma

SEQ ID NO: 470476 - DNA, 270 bp, Homo sapiens; identical to SEQ ID NO: 344450
  chr21:33781936-33782206
  hypo
  multiple_myeloma vs. breast,lung,thyroid,sarcoma

SEQ ID NO: 470477 - DNA, 749 bp, Homo sapiens; identical to SEQ ID NO: 344480
  chr21:40316188-40316937
  hypo
  multiple_myeloma vs. ovary,lung,pancreas_gallbladder, upper_gi,bladder_and_urothelial,lymphoid_neoplasm,head_and_neck, sarcoma,myeloid_neoplasm,renal,colorectal,melanoma,uterine, breast,non_cancer,prostate,anorectal,thyroid,liver_bileduct

SEQ ID NO: 470478 - DNA, 168 bp, Homo sapiens; identical to SEQ ID NO: 344482
  chr21:40348667-40348835
  hypo
  multiple_myeloma vs. sarcoma

SEQ ID NO: 470479 - DNA, 338 bp, Homo sapiens; identical to SEQ ID NO: 383192
  chr21:40506192-40506530
  hypo
  multiple_myeloma vs. head_and_neck,lung

SEQ ID NO: 470480 - DNA, 238 bp, Homo sapiens; identical to SEQ ID NO: 344487
  chr21:42572234-42572472
  hypo
  multiple_myeloma vs. sarcoma,melanoma,cervical,upper_gi, lymphoid_neoplasm,head_and_neck,uterine,prostate

SEQ ID NO: 470481 - DNA, 151 bp, Homo sapiens; identical to SEQ ID NO: 344488
  chr21:42593821-42593972
  hypo
  multiple_myeloma vs. upper_gi,lymphoid_neoplasm,sarcoma, bladder_and_urothelial,colorectal,pancreas_gallbladder,cervical, head_and_neck,ovary,breast,anorectal,prostate,lung,melanoma, uterine,non_cancer,thyroid

SEQ ID NO: 470482 - DNA, 147 bp, Homo sapiens
  chr21:42617817-42617964
  hypo
  multiple_myeloma vs. colorectal,head_and_neck, bladder_and_urothelial,sarcoma,upper_gi,melanoma, lymphoid_neoplasm,prostate,uterine,cervical,anorectal,breast, pancreas_gallbladder,lung,non_cancer
cggctagagccacgtggggcggggagcgccactgtcactcacgcacctttccctttctctcccggttcaagtataacgcagacaaggccatcgtggacagtggcaccacgctgctgcgcctgccccagaaggtgtttgatgcggtgg

SEQ ID NO: 470483 - DNA, 92 bp, Homo sapiens; identical to SEQ ID NO: 346250
  chr21:42617995-42618087
  hypo
  multiple_myeloma vs. colorectal,head_and_neck, bladder_and_urothelial,sarcoma,upper_gi,melanoma, lymphoid_neoplasm,prostate,uterine,cervical,anorectal,breast, pancreas_gallbladder,lung,non_cancer

SEQ ID NO: 470484 - DNA, 211 bp, Homo sapiens; identical to SEQ ID NO: 344491
  chr21:42629074-42629285
  hypo
  multiple_myeloma vs. colorectal,upper_gi,melanoma, bladder_and_urothelial,sarcoma,pancreas_gallbladder,cervical, lung,head_and_neck,breast,uterine,prostate,thyroid,anorectal, lymphoid_neoplasm,non_cancer

SEQ ID NO: 470485 - DNA, 114 bp, Homo sapiens; identical to SEQ ID NO: 383203
  chr21:42649202-42649316
  hypo
  multiple_myeloma vs. melanoma

SEQ ID NO: 470486 - DNA, 824 bp, Homo sapiens; identical to SEQ ID NO: 356394
  chr21:43160967-43161791
  hypo
  multiple_myeloma vs. liver_bileduct,lung, lymphoid_neoplasm,pancreas_gallbladder,upper_gi,colorectal, ovary,renal,cervical

SEQ ID NO: 470487 - DNA, 283 bp, Homo sapiens; identical to SEQ ID NO: 344495
  chr21:43161857-43162140
  hypo
  multiple_myeloma vs. lung,ovary,melanoma,liver_bileduct, bladder_and_urothelial,upper_gi

SEQ ID NO: 470488 - DNA, 317 bp, Homo sapiens; identical to SEQ ID NO: 344496
  chr21:43162557-43162874
  hypo
  multiple_myeloma vs. liver_bileduct,lung,sarcoma, upper_gi,colorectal,bladder_and_urothelial,lymphoid_neoplasm, ovary,renal,head_and_neck,pancreas_gallbladder,anorectal, melanoma,uterine

SEQ ID NO: 470489 - DNA, 364 bp, Homo sapiens; identical to SEQ ID NO: 344497
  chr21:43165727-43166091
  hypo
  multiple_myeloma vs. liver_bileduct

SEQ ID NO: 470490 - DNA, 297 bp, Homo sapiens; identical to SEQ ID NO: 344498
  chr21:43166652-43166949
  hypo
  multiple_myeloma vs. upper_gi,sarcoma

SEQ ID NO: 470491 - DNA, 157 bp, Homo sapiens; identical to SEQ ID NO: 344499
  chr21:43168170-43168327
  hypo
  multiple_myeloma vs. upper_gi,ovary,lung,liver_bileduct

SEQ ID NO: 470492 - DNA, 516 bp, Homo sapiens; identical to SEQ ID NO: 344507
  chr21:43791392-43791908
  hypo
  multiple_myeloma vs. upper_gi,colorectal,anorectal, thyroid,breast,lung,prostate,non_cancer,uterine,cervical,ovary, renal,pancreas_gallbladder,lymphoid_neoplasm, bladder_and_urothelial,head_and_neck,myeloid_neoplasm

SEQ ID NO: 470493 - DNA, 562 bp, Homo sapiens; identical to SEQ ID NO: 368567
  chr21:44112757-44113319
  hypo
  multiple_myeloma vs. bladder_and_urothelial,ovary, uterine

SEQ ID NO: 470494 - DNA, 467 bp, Homo sapiens; identical to SEQ ID NO: 356404
  chr21:44180227-44180694
  hypo
  multiple_myeloma vs. sarcoma,bladder_and_urothelial, anorectal,ovary,uterine,myeloid_neoplasm,prostate,renal,lung, breast,non_cancer

SEQ ID NO: 470495 - DNA, 401 bp, Homo sapiens; identical to SEQ ID NO: 344512
  chr21:44190679-44191080
  hypo
  multiple_myeloma vs. anorectal

SEQ ID NO: 470496 - DNA, 321 bp, Homo sapiens; identical to SEQ ID NO: 344513
  chr21:44205103-44205424
  hypo
  multiple_myeloma vs. sarcoma

SEQ ID NO: 470497 - DNA, 468 bp, Homo sapiens; identical to SEQ ID NO: 344553
  chr21:45941802-45942270
  hypo
  multiple_myeloma vs. anorectal,thyroid,colorectal, non_cancer,lymphoid_neoplasm,breast,prostate,renal

SEQ ID NO: 470498 - DNA, 161 bp, Homo sapiens
  chr21:46316870-46317031
  hypo
  multiple_myeloma vs. renal,cervical,sarcoma,colorectal, bladder_and_urothelial,breast,anorectal,thyroid, lymphoid_neoplasm,head_and_neck,prostate,non_cancer, pancreas_gallbladder,uterine
cgtcatggccacctacagatgggacacagggctgtgacatcctgaccagcaggtggtctctgtggatgtccggccccagccctgccctgcgctgacccactgtcccggcagcctgaccagctctgggtgcccactcggagggtcccccagacacctgcccc

SEQ ID NO: 470499 - DNA, 175 bp, Homo sapiens; identical to SEQ ID NO: 356422
  chr21:46317252-46317427
  hypo
  multiple_myeloma vs. renal,cervical,sarcoma,colorectal, bladder_and_urothelial,breast,anorectal,thyroid, lymphoid_neoplasm,head_and_neck,prostate,non_cancer, pancreas_gallbladder,uterine

SEQ ID NO: 470500 - DNA, 643 bp, Homo sapiens; identical to SEQ ID NO: 368616
  chr21:46320233-46320876
  hypo
  multiple_myeloma vs. thyroid

SEQ ID NO: 470501 - DNA, 218 bp, Homo sapiens; identical to SEQ ID NO: 344569
  chr21:46324938-46325156
  hypo
  multiple_myeloma vs. bladder_and_urothelial,breast, anorectal,prostate,thyroid,cervical

SEQ ID NO: 470502 - DNA, 422 bp, Homo sapiens; identical to SEQ ID NO: 344570
  chr21:46326574-46326996
  hypo
  multiple_myeloma vs. lymphoid_neoplasm,prostate,uterine, myeloid_neoplasm,thyroid,non_cancer,renal,melanoma

SEQ ID NO: 470503 - DNA, 262 bp, Homo sapiens; identical to SEQ ID NO: 344578
  chr21:46748053-46748315
  hypo
  multiple_myeloma vs. renal,anorectal

SEQ ID NO: 470504 - DNA, 634 bp, Homo sapiens; identical to SEQ ID NO: 344579
  chr21:46779388-46780022
  hypo
  multiple_myeloma vs. melanoma

SEQ ID NO: 470505 - DNA, 184 bp, Homo sapiens; identical to SEQ ID NO: 344580
  chr21:46799934-46800118
  hypo
  multiple_myeloma vs. melanoma,cervical,uterine, myeloid_neoplasm,prostate,sarcoma,renal,breast,non_cancer, lymphoid_neoplasm,colorectal,ovary

SEQ ID NO: 470506 - DNA, 348 bp, Homo sapiens; identical to SEQ ID NO: 469920
  chr21:46800403-46800751
  hypo
  multiple_myeloma vs. anorectal,thyroid,sarcoma,renal, cervical,uterine

SEQ ID NO: 470507 - DNA, 304 bp, Homo sapiens; identical to SEQ ID NO: 362010
  chr21:46800780-46801084
  hypo
  multiple_myeloma vs. anorectal,thyroid,sarcoma,renal, cervical,uterine

SEQ ID NO: 470508 - DNA, 214 bp, Homo sapiens; identical to SEQ ID NO: 336588
  chr21:46801338-46801552
  hypo
  multiple_myeloma vs. lymphoid_neoplasm,uterine, myeloid_neoplasm

SEQ ID NO: 470509 - DNA, 571 bp, Homo sapiens; identical to SEQ ID NO: 356429
  chr21:46801817-46802388
  hypo
  multiple_myeloma vs. melanoma,cervical,renal

SEQ ID NO: 470510 - DNA, 177 bp, Homo sapiens; identical to SEQ ID NO: 344584
  chr21:46802668-46802845
  hypo
  multiple_myeloma vs. melanoma,ovary,sarcoma,prostate, myeloid_neoplasm,anorectal,renal,pancreas_gallbladder, non_cancer,uterine,cervical,breast,lymphoid_neoplasm, bladder_and_urothelial

SEQ ID NO: 470511 - DNA, 18 bp, Homo sapiens
  chr21:46805775-46805793
  hypo
  multiple_myeloma vs. melanoma,renal,uterine
cgtggctgcctctccgtg

SEQ ID NO: 470512 - DNA, 141 bp, Homo sapiens
  chr21:46808694-46808835
  hypo
  multiple_myeloma vs. anorectal,prostate,melanoma, non_cancer,renal,uterine
cgcagggcgaggtcgggggaatggactcccctgggtttctccctgccgatcgctgtagtggttgagtcctccactgagcacagccactcctgtaggcttaccccgctgcagctcgctctcggatcctaataaacaagtgag

SEQ ID NO: 470513 - DNA, 339 bp, Homo sapiens; identical to SEQ ID NO: 344587
  chr21:46811012-46811351
  hypo
  multiple_myeloma vs. ovary,lymphoid_neoplasm,uterine, cervical,renal

SEQ ID NO: 470514 - DNA, 333 bp, Homo sapiens; identical to SEQ ID NO: 346256
  chr21:46811998-46812331
  hypo
  multiple_myeloma vs. pancreas_gallbladder,cervical, uterine,ovary,thyroid,prostate,renal,sarcoma,melanoma, non_cancer,lymphoid_neoplasm,breast,lung

SEQ ID NO: 470515 - DNA, 82 bp, Homo sapiens; identical to SEQ ID NO: 455153
  chr21:46812995-46813077
  hypo
  multiple_myeloma vs. prostate,cervical,myeloid_neoplasm, renal,lymphoid_neoplasm,non_cancer,thyroid,uterine,sarcoma, melanoma,colorectal,breast,pancreas_gallbladder,ovary,upper_gi

SEQ ID NO: 470516 - DNA, 192 bp, Homo sapiens; identical to SEQ ID NO: 346258
  chr21:46813106-46813298
  hypo
  multiple_myeloma vs. prostate,cervical,myeloid_neoplasm, renal,lymphoid_neoplasm,non_cancer,thyroid,uterine,sarcoma, melanoma,colorectal,breast,pancreas_gallbladder,ovary,upper_gi

SEQ ID NO: 470517 - DNA, 265 bp, Homo sapiens; identical to SEQ ID NO: 344590
  chr21:46813682-46813947
  hypo
  multiple_myeloma vs. uterine,renal,melanoma,sarcoma, thyroid

SEQ ID NO: 470518 - DNA, 391 bp, Homo sapiens; identical to SEQ ID NO: 344591
  chr21:46834432-46834823
  hypo
  multiple_myeloma vs. melanoma,myeloid_neoplasm,sarcoma, uterine,prostate,bladder_and_urothelial

SEQ ID NO: 470519 - DNA, 499 bp, Homo sapiens; identical to SEQ ID NO: 344592
  chr21:46835379-46835878
  hypo
  multiple_myeloma vs. sarcoma,myeloid_neoplasm,uterine, lymphoid_neoplasm,prostate,pancreas_gallbladder,anorectal, melanoma,thyroid,colorectal,non_cancer,breast,head_and_neck, cervical,lung,renal,upper_gi

SEQ ID NO: 470520 - DNA, 192 bp, Homo sapiens; identical to SEQ ID NO: 344593
  chr21:46837296-46837488
  hypo
  multiple_myeloma vs. myeloid_neoplasm

SEQ ID NO: 470521 - DNA, 168 bp, Homo sapiens; identical to SEQ ID NO: 368640
  chr21:46838491-46838659
  hypo
  multiple_myeloma vs. myeloid_neoplasm

SEQ ID NO: 470522 - DNA, 261 bp, Homo sapiens; identical to SEQ ID NO: 346259
  chr21:46839249-46839510
  hypo
  multiple_myeloma vs. anorectal,uterine,prostate,ovary, myeloid_neoplasm,non_cancer,melanoma,breast,thyroid,renal, cervical

SEQ ID NO: 470523 - DNA, 139 bp, Homo sapiens; identical to SEQ ID NO: 356439
  chr21:46842404-46842543
  hypo
  multiple_myeloma vs. melanoma,myeloid_neoplasm,sarcoma, lymphoid_neoplasm,cervical,prostate,thyroid

SEQ ID NO: 470524 - DNA, 325 bp, Homo sapiens; identical to SEQ ID NO: 455156
  chr21:46844304-46844629
  hypo
  multiple_myeloma vs. melanoma,lymphoid_neoplasm, non_cancer,prostate,uterine,myeloid_neoplasm,cervical,breast

SEQ ID NO: 470525 - DNA, 449 bp, Homo sapiens; identical to SEQ ID NO: 455157
  chr21:46844763-46845212
  hypo
  multiple_myeloma vs. melanoma,lymphoid_neoplasm, non_cancer,prostate,uterine,myeloid_neoplasm,cervical,breast

SEQ ID NO: 470526 - DNA, 8 bp, Homo sapiens
  chr21:46845243-46845251
  hypo
  multiple_myeloma vs. melanoma,lymphoid_neoplasm, non_cancer,prostate,uterine,myeloid_neoplasm,cervical,breast
ctggacac

SEQ ID NO: 470527 - DNA, 68 bp, Homo sapiens
  chr21:46848505-46848573
  hypo
  multiple_myeloma vs. myeloid_neoplasm,renal,ovary
cgccggagagagggagccctgggccatcacgcagccaccgcccggccccaagaacctgcgagtccact

SEQ ID NO: 470528 - DNA, 28 bp, Homo sapiens
  chr21:46848762-46848790
  hypo
  multiple_myeloma vs. myeloid_neoplasm,renal,ovary
tttatgtgcctgaaatgtctctgcactc

SEQ ID NO: 470529 - DNA, 670 bp, Homo sapiens; identical to SEQ ID NO: 344602
  chr21:46849594-46850264
  hypo
  multiple_myeloma vs. head_and_neck,sarcoma, lymphoid_neoplasm,melanoma,prostate,renal,myeloid_neoplasm, ovary,uterine,cervical,non_cancer,lung,breast,anorectal,thyroid, pancreas_gallbladder,colorectal,bladder_and_urothelial

SEQ ID NO: 470530 - DNA, 1 bp, Homo sapiens
  chr21:46859943-46859944
  hypo
  multiple_myeloma vs. cervical,renal,uterine,ovary
c

SEQ ID NO: 470531 - DNA, 786 bp, Homo sapiens; identical to SEQ ID NO: 344603
  chr21:46861383-46862169
  hypo
  multiple_myeloma vs. melanoma,renal,thyroid,non_cancer, uterine,ovary,prostate,anorectal,sarcoma,cervical,head_and_neck, myeloid_neoplasm,pancreas_gallbladder,breast,liver_bileduct, lymphoid_neoplasm

SEQ ID NO: 470532 - DNA, 107 bp, Homo sapiens; identical to SEQ ID NO: 356444
  chr21:46862420-46862527
  hypo
  multiple_myeloma vs. melanoma,sarcoma,ovary

SEQ ID NO: 470533 - DNA, 295 bp, Homo sapiens
  chr21:46863364-46863659
  hypo
  multiple_myeloma vs. myeloid_neoplasm,melanoma, liver_bileduct
cggcatcgcagcagagtcccggtggtggagatgctttgccactggccacccagagctaggagcctcggccaagggctccctccttgcactgtggtctctcgggacctaggaggtcccggggtgtggactgtgctgaactgttctccgacaggcggccctttttctcccacgtgggcgaaaagtgaagcctctgggtggtcctgtacctgtctgtcacatcccgggctgcagccgggtccccagggaggcctccgtgaaaacacaaatcaagtgccaatttcctggtgaagagtct

SEQ ID NO: 470534 - DNA, 45 bp, Homo sapiens
  chr21:46863708-46863753
  hypo
  multiple_myeloma vs. myeloid_neoplasm,melanoma, liver_bileduct
agaggaatagctgagctgcagcactaaggagagatgcctgctgca

SEQ ID NO: 470535 - DNA, 55 bp, Homo sapiens; identical to SEQ ID NO: 455159
  chr21:46864076-46864131
  hypo
  multiple_myeloma vs. melanoma,thyroid,renal,non_cancer, ovary,cervical,uterine,myeloid_neoplasm,prostate,anorectal

SEQ ID NO: 470536 - DNA, 297 bp, Homo sapiens; identical to SEQ ID NO: 344607
  chr21:46870768-46871065
  hypo
  multiple_myeloma vs. myeloid_neoplasm,melanoma,ovary, renal,prostate,non_cancer,uterine,sarcoma,cervical,thyroid, head_and_neck,pancreas_gallbladder,bladder_and_urothelial, breast,lung,liver_bileduct,anorectal

SEQ ID NO: 470537 - DNA, 307 bp, Homo sapiens; identical to SEQ ID NO: 344608
  chr21:46885721-46886028
  hypo
  multiple_myeloma vs. ovary,myeloid_neoplasm,renal

SEQ ID NO: 470538 - DNA, 274 bp, Homo sapiens; identical to SEQ ID NO: 344609
  chr21:46886377-46886651
  hypo
  multiple_myeloma vs. anorectal,renal,prostate, myeloid_neoplasm,non_cancer,liver_bileduct,cervical, head_and_neck,uterine,lung,melanoma

SEQ ID NO: 470539 - DNA, 222 bp, Homo sapiens; identical to SEQ ID NO: 344610
  chr21:46893658-46893880
  hypo
  multiple_myeloma vs. ovary,melanoma,renal, myeloid_neoplasm,cervical,breast,prostate,non_cancer, head_and_neck,thyroid,liver_bileduct,uterine,sarcoma,lung

SEQ ID NO: 470540 - DNA, 278 bp, Homo sapiens
  chr21:46894494-46894772
  hypo
  multiple_myeloma vs. non_cancer,thyroid,liver_bileduct, ovary,prostate,uterine,renal,cervical,sarcoma,melanoma, myeloid_neoplasm,breast,anorectal,head_and_neck, pancreas_gallbladder,lung,lymphoid_neoplasm
cgtgtgtgttggtggggtgtgtggaatcacgtggtacccaaggggagaatcccccagccccaggtgtgaggaacagcagggaattctcactcaggggcccagatcacaacatgccccacgtgaacatggacccacagcctcgctcctgggggcgtgggcaggagacgccgtggacgtggacccacagcctcgctcctgggggcgtgggcaggagacaccgtggctggactgtgggcagtgtgtgaacatccatgttactttcatgctttttctttatt

SEQ ID NO: 470541 - DNA, 258 bp, Homo sapiens
  chr21:46894910-46895168
  hypo
  multiple_myeloma vs. non_cancer,thyroid,liver_bileduct, ovary,prostate,uterine,renal,cervical,sarcoma,melanoma, myeloid_neoplasm,breast,anorectal,head_and_neck, pancreas_gallbladder,lung,lymphoid_neoplasm
gcctgtcttgccctcaggggtcagtagcggtccctgaggatgtttctcctccgggttttcctgaagtttaaaacatccagccgccttggcgcgtgttcggcccagccgggcgtgcgctggggaaacctgtgcggggagcatctgcggtgcggcctcctccagggcagggctctggccagaagagaggagcgcgttccccctcccgcctccgcatgtctgaccaccggccgaggcaggttcagaagcgtcactgtcctc

SEQ ID NO: 470542 - DNA, 231 bp, Homo sapiens; identical to SEQ ID NO: 455160
  chr21:46894937-46895168
  hypo
  multiple_myeloma vs. ovary,renal,sarcoma, myeloid_neoplasm,non_cancer,liver_bileduct,uterine,prostate, thyroid,breast,cervical,pancreas_gallbladder,lymphoid_neoplasm, head_and_neck

SEQ ID NO: 470543 - DNA, 216 bp, Homo sapiens; identical to SEQ ID NO: 455161
  chr21:46895491-46895707
  hypo
  multiple_myeloma vs. ovary,renal,sarcoma, myeloid_neoplasm,non_cancer,liver_bileduct,uterine,prostate, thyroid,breast,cervical,pancreas_gallbladder,lymphoid_neoplasm, head_and_neck

SEQ ID NO: 470544 - DNA, 151 bp, Homo sapiens; identical to SEQ ID NO: 455162
  chr21:46895736-46895887
  hypo
  multiple_myeloma vs. ovary,renal,sarcoma, myeloid_neoplasm,non_cancer,liver_bileduct,uterine,prostate, thyroid,breast,cervical,pancreas_gallbladder,lymphoid_neoplasm, head_and_neck

SEQ ID NO: 470545 - DNA, 216 bp, Homo sapiens; identical to SEQ ID NO: 455161
  chr21:46895491-46895707
  hypo
  multiple_myeloma vs. ovary,renal,non_cancer,prostate, lymphoid_neoplasm,uterine,liver_bileduct,breast,sarcoma,thyroid, cervical,myeloid_neoplasm,pancreas_gallbladder,anorectal

SEQ ID NO: 470546 - DNA, 575 bp, Homo sapiens; identical to SEQ ID NO: 346266
  chr21:46895736-46896311
  hypo
  multiple_myeloma vs. ovary,renal,non_cancer,prostate, lymphoid_neoplasm,uterine,liver_bileduct,breast,sarcoma,thyroid, cervical,myeloid_neoplasm,pancreas_gallbladder,anorectal

SEQ ID NO: 470547 - DNA, 866 bp, Homo sapiens; identical to SEQ ID NO: 344612
  chr21:46900291-46901157
  hypo
  multiple_myeloma vs. renal,myeloid_neoplasm,prostate, ovary,thyroid,anorectal,liver_bileduct,non_cancer,melanoma, breast,pancreas_gallbladder,uterine,head_and_neck, lymphoid_neoplasm,lung,cervical

SEQ ID NO: 470548 - DNA, 251 bp, Homo sapiens; identical to SEQ ID NO: 356454
  chr21:46901458-46901709
  hypo
  multiple_myeloma vs. liver_bileduct,ovary,anorectal, sarcoma

SEQ ID NO: 470549 - DNA, 828 bp, Homo sapiens; identical to SEQ ID NO: 455165
  chr21:46906455-46907283
  hypo
  multiple_myeloma vs. prostate,renal,uterine, myeloid_neoplasm,anorectal,sarcoma,thyroid,non_cancer, lymphoid_neoplasm,ovary,breast,liver_bileduct, pancreas_gallbladder,cervical,lung,melanoma,upper_gi

SEQ ID NO: 470550 - DNA, 853 bp, Homo sapiens
  chr21:46906836-46907689
  hypo
  multiple_myeloma vs. liver_bileduct,renal, myeloid_neoplasm,uterine,anorectal,prostate,non_cancer,thyroid, sarcoma,lymphoid_neoplasm,cervical,breast,melanoma,ovary,lung, pancreas_gallbladder,head_and_neck,upper_gi,
  CONT. FROM ABOVE: bladder_and_urothelial
cggacctgctggaccaccaggcccccctgggccccctgggcccccaggaccaggactccccgctggatttgtgagtaccgcctacacctgaccccctggagagccgggggctgccgttgccccagccctactacccctggcatctcactcacagagcagcacgtcctgggcggtggccttgctggcactgcctcatcctgggattccatattccgcatggtggggctcgagtctctcgcccgtcgcccgtgccccacggtgctgatggggatcttggcccagccatgccccagcacccgtgccctgaccaagagcgaatgagctgacccgagacgggctgccccgggggggctccacccaggccctgccaccaggtagacagtccccatctgagaacggcggctccccaggccaccgtggccccaaagcatgtcccaccctcctctcgggcagtgccaccccagggaggggtccttccctaagaagggacacaggcccctacgtgtctcgtgtgtctcttccaggatgacatggaaggctccggggggcccttctggtcaacagcccgaagcgctgatgggccacaggtagtgttgtgagctgggcgtggccggctctgaggggtaagggggtgttgcctggggcaggagagtgtccctgagagccaccggccttgcatgggatcggaagccgccctgcagagccgtgaggaccacgtgtggcgggcgctgtgccccgcgggccacccttgttcttcggagatgccccttcattgaactaaagtcacggggtgagggcctggtctgcaaagtgggagacactgtgagtggtcaagacaaaggaacacggggcc

SEQ ID NO: 470551 - DNA, 310 bp, Homo sapiens; identical to SEQ ID NO: 368663
  chr21:46910337-46910647
  hypo
  multiple_myeloma vs. sarcoma

SEQ ID NO: 470552 - DNA, 616 bp, Homo sapiens; identical to SEQ ID NO: 344616
  chr21:46911022-46911638
  hypo
  multiple_myeloma vs. cervical,breast,anorectal,prostate, pancreas_gallbladder,uterine,bladder_and_urothelial,renal, non_cancer,lung,ovary,liver_bileduct,sarcoma,melanoma, myeloid_neoplasm,head_and_neck,thyroid,lymphoid_neoplasm,
  CONT. FROM ABOVE: upper_gi

SEQ ID NO: 470553 - DNA, 294 bp, Homo sapiens; identical to SEQ ID NO: 453887
  chr21:46912528-46912822
  hypo
  multiple_myeloma vs. myeloid_neoplasm,thyroid,melanoma, non_cancer,ovary,renal,prostate,uterine,breast,cervical, liver_bileduct

SEQ ID NO: 470554 - DNA, 756 bp, Homo sapiens; identical to SEQ ID NO: 455167
  chr21:46912528-46913284
  hypo
  multiple_myeloma vs. ovary,myeloid_neoplasm,prostate, thyroid,uterine,non_cancer,renal,pancreas_gallbladder,breast, melanoma,lymphoid_neoplasm,cervical,liver_bileduct,sarcoma, upper_gi

SEQ ID NO: 470555 - DNA, 400 bp, Homo sapiens
  chr21:46912884-46913284
  hypo
  multiple_myeloma vs. cervical,sarcoma,uterine,non_cancer, prostate,myeloid_neoplasm,breast,renal,ovary,thyroid, head_and_neck,bladder_and_urothelial,melanoma,liver_bileduct, lung,lymphoid_neoplasm,pancreas_gallbladder,anorectal
cgggaggtgtcctggtgggggtcacctgcggaggcctgcagtgtccagagtgaggctggggccgcgaggggccctggtcgggctgtcgaggcaggcatattgcggggggcagctgtcgggggagatggagcagccgtcggggatgggggagatgccagccgctcgggcctcacggcctggcctccattccagggacctgcaggacccaagggcaacctgggctctaagggcgaacgaggctccccgggacccaaggtaaggggctcaggtgctgtccctcaaccccctttgtgacccaggggtggctccagcctgcccagatgaccactgttgggagggacctgggaccccccggctgctgctgtgacacgtgaggggtacatccctgctcgggccgtcc

SEQ ID NO: 470556 - DNA, 319 bp, Homo sapiens; identical to SEQ ID NO: 346270
  chr21:46913360-46913679
  hypo
  multiple_myeloma vs. cervical,sarcoma,uterine,non_cancer, prostate,myeloid_neoplasm,breast,renal,ovary,thyroid, head_and_neck,bladder_and_urothelial,melanoma,liver_bileduct, lung,lymphoid_neoplasm,pancreas_gallbladder,anorectal

SEQ ID NO: 470557 - DNA, 469 bp, Homo sapiens; identical to SEQ ID NO: 356459
  chr21:46914465-46914934
  hypo
  multiple_myeloma vs. myeloid_neoplasm,uterine,melanoma, ovary,renal,prostate,breast,liver_bileduct,anorectal,non_cancer, pancreas_gallbladder,thyroid,lung,sarcoma, bladder_and_urothelial,cervical,head_and_neck

SEQ ID NO: 470558 - DNA, 395 bp, Homo sapiens; identical to SEQ ID NO: 344619
  chr21:46918218-46918613
  hypo
  multiple_myeloma vs. melanoma,sarcoma,anorectal,prostate, renal,thyroid,breast,non_cancer,uterine,lymphoid_neoplasm, head_and_neck,liver_bileduct,ovary,cervical,myeloid_neoplasm, lung,upper_gi,pancreas_gallbladder

SEQ ID NO: 470559 - DNA, 223 bp, Homo sapiens
  chr21:46918891-46919114
  hypo
  multiple_myeloma vs. myeloid_neoplasm,melanoma, liver_bileduct,cervical
cgagggctccgagggctctagagggaacagtgtttgcaggcggaatggctgatgctcttccaaagccaaggaaggctcagagcattcccctcattcgaaggatcaacaattagagtgacgagatttctcaacaaaacgggagaagccagaagaccataaatggtttccaaaatatccaagaaagtcaattgccagtgtagactccgacagccagtggtactcc

SEQ ID NO: 470560 - DNA, 229 bp, Homo sapiens; identical to SEQ ID NO: 329091
  chr21:46919143-46919372
  hypo
  multiple_myeloma vs. myeloid_neoplasm,melanoma, liver_bileduct,cervical

SEQ ID NO: 470561 - DNA, 505 bp, Homo sapiens
  chr21:47413791-47414296
  hypo
  multiple_myeloma vs. renal
cgggtccacggagcttgctggagaagcagggatgcacgcagggacgcctctggggccccaggaggagctgccggcctcctgaatgaagatagccatagccagccacgccgatggccacgcacgtgggccgaggaaacgcttggcgaggccaggaaggggctgtgcggggagggaaggccggaacagcccagtgaccacctggacagcatgctgtggctcccagcgtgcccgggcagccatcctccccaaggatggcccagctccacactcacggctcgtttctcttcagggtgaagctggcccgcagggtgatcagggaagagaaggccccgttggtgtccctggagacccggtaggaagcgctgtggggttggggggcgttggccaatttgggttttgggggtagaagtgctccagcagctcacgcactgggggtctgttcatttccgtttgagggcctctgtgtttccgtagatctcgggggtgtccctgcgtgggagccggc

SEQ ID NO: 470562 - DNA, 44 bp, Homo sapiens; identical to SEQ ID NO: 356466
  chr21:47414327-47414371
  hypo
  multiple_myeloma vs. renal

SEQ ID NO: 470563 - DNA, 209 bp, Homo sapiens; identical to SEQ ID NO: 368682
  chr21:47414718-47414927
  hypo
  multiple_myeloma vs. melanoma

SEQ ID NO: 470564 - DNA, 195 bp, Homo sapiens; identical to SEQ ID NO: 383356
  chr21:47484109-47484304
  hypo
  multiple_myeloma vs. myeloid_neoplasm

SEQ ID NO: 470565 - DNA, 116 bp, Homo sapiens
  chr21:47489821-47489937
  hypo
  multiple_myeloma vs. lymphoid_neoplasm
cgatggcactttctgtaggccgcagaggtaggggccgcagagccaagcttgctagcatccatgggacgctgaggccccaaataatagagaccagatggcagcgcttacccccaggg

SEQ ID NO: 470566 - DNA, 172 bp, Homo sapiens; identical to SEQ ID NO: 383358
  chr21:47497763-47497935
  hypo
  multiple_myeloma vs. thyroid,sarcoma

SEQ ID NO: 470567 - DNA, 152 bp, Homo sapiens
  chr22:24179789-24179941
  hypo
  multiple_myeloma vs. myeloid_neoplasm,sarcoma, bladder_and_urothelial,liver_bileduct,melanoma,uterine
cgtgtcctgaggggagtggccagcctggggcggactagatgtaccgggaggctcacccagcaggtccacgaggatggagttgcccagcagcagcgagaagcccatgagcgcccaaggcaggaacggtgcctggaaagtgagcaggccgaaga

SEQ ID NO: 470568 - DNA, 226 bp, Homo sapiens; identical to SEQ ID NO: 356500
  chr22:24179982-24180208
  hypo
  multiple_myeloma vs. myeloid_neoplasm,sarcoma, bladder_and_urothelial,liver_bileduct,melanoma,uterine

SEQ ID NO: 470569 - DNA, 305 bp, Homo sapiens; identical to SEQ ID NO: 344700
  chr22:25561932-25562237
  hypo
  multiple_myeloma vs. liver_bileduct,lung,ovary, pancreas_gallbladder,colorectal,head_and_neck

SEQ ID NO: 470570 - DNA, 122 bp, Homo sapiens; identical to SEQ ID NO: 344701
  chr22:25570292-25570414
  hypo
  multiple_myeloma vs. lung,head_and_neck,renal,colorectal, liver_bileduct,breast,bladder_and_urothelial,anorectal,thyroid, ovary,upper_gi,cervical

SEQ ID NO: 470571 - DNA, 352 bp, Homo sapiens; identical to SEQ ID NO: 344702
  chr22:25602982-25603334
  hypo
  multiple_myeloma vs. liver_bileduct,upper_gi,renal, pancreas_gallbladder

SEQ ID NO: 470572 - DNA, 496 bp, Homo sapiens; identical to SEQ ID NO: 344726
  chr22:30939634-30940130
  hypo
  multiple_myeloma vs. renal,bladder_and_urothelial, colorectal,non_cancer

SEQ ID NO: 470573 - DNA, 132 bp, Homo sapiens; identical to SEQ ID NO: 383449
  chr22:30940932-30941064
  hypo
  multiple_myeloma vs. breast

SEQ ID NO: 470574 - DNA, 99 bp, Homo sapiens; identical to SEQ ID NO: 344730
  chr22:31260817-31260916
  hypo
  multiple_myeloma vs. breast

SEQ ID NO: 470575 - DNA, 688 bp, Homo sapiens; identical to SEQ ID NO: 344731
  chr22:31266269-31266957
  hypo
  multiple_myeloma vs. ovary,breast,uterine,renal, colorectal,thyroid,prostate,myeloid_neoplasm,non_cancer

SEQ ID NO: 470576 - DNA, 389 bp, Homo sapiens; identical to SEQ ID NO: 344743
  chr22:32665378-32665767
  hypo
  multiple_myeloma vs. ovary,renal,prostate,breast, non_cancer

SEQ ID NO: 470577 - DNA, 121 bp, Homo sapiens; identical to SEQ ID NO: 368801
  chr22:40024720-40024841
  hypo
  multiple_myeloma vs. myeloid_neoplasm

SEQ ID NO: 470578 - DNA, 424 bp, Homo sapiens
  chr22:40045208-40045632
  hypo
  multiple_myeloma vs. myeloid_neoplasm,breast,uterine, cervical,thyroid,prostate,non_cancer,pancreas_gallbladder,lung, renal,lymphoid_neoplasm
cggtcagcacggatgcgcgccctgcaccgtgctgggcccatcatgtgccttaagggagagaatcctcctacagcctgcatggtgggcgttcctgccccaacttctacaacaggggcagacaaagctcagagagctgcagccgcttccccaggcacccctgaccgcctttccaggctgggtcggctggttccaggcagacctgtgggcctgggagccaagcgcactcagggatgtgtcccagggtggattgggcctggtgtgggcaacgactctatgcccctctcatttgcttttcagagctgtgcccgcaacatagccccctggatgcgacgccccacaccctggtgcagcccatccccgccacgctggcttccgatcccgccagctgcccttgctgccagcatgaggacggccggcggccctc

SEQ ID NO: 470579 - DNA, 220 bp, Homo sapiens; identical to SEQ ID NO: 356542
  chr22:40045721-40045941
  hypo
  multiple_myeloma vs. myeloid_neoplasm,breast,uterine, cervical,thyroid,prostate,non_cancer,pancreas_gallbladder,lung, renal,lymphoid_neoplasm

SEQ ID NO: 470580 - DNA, 328 bp, Homo sapiens
  chr22:45074483-45074811
  hypo
  multiple_myeloma vs. upper_gi,colorectal,uterine, anorectal,prostate
cgcgccctgcctgctagttctttaagccgctgctggaaggcatccttctctagaaagtcttcctggctgcctcctgttcaccgcaggccaggcggacccacggccccctcagtgccatctcaccctgggctctgctcatgcctttgggccagcgcttgtcatacagagcttctctgccctgttcccaggtctccccgacagcctggggctgctctgtgtgattcatctctgggtcccagggctcagctgggggctggcacagagtgggaccccagcagcattcgatgaattgagagcacgagtgagcgacagacatcagggcacctgc

SEQ ID NO: 470581 - DNA, 392 bp, Homo sapiens; identical to SEQ ID NO: 344822
  chr22:45959040-45959432
  hypo
  multiple_myeloma vs. head_and_neck,ovary,sarcoma, upper_gi,lymphoid_neoplasm,pancreas_gallbladder,lung,prostate

SEQ ID NO: 470582 - DNA, 223 bp, Homo sapiens; identical to SEQ ID NO: 208732
  chr3:8595841-8596064
  hypo
  multiple_myeloma vs. liver_bileduct

SEQ ID NO: 470583 - DNA, 271 bp, Homo sapiens; identical to SEQ ID NO: 455200
  chr3:13611739-13612010
  hypo
  multiple_myeloma vs. sarcoma,renal

SEQ ID NO: 470584 - DNA, 186 bp, Homo sapiens; identical to SEQ ID NO: 363219
  chr3:13612341-13612527
  hypo
  multiple_myeloma vs. sarcoma,renal

SEQ ID NO: 470585 - DNA, 157 bp, Homo sapiens; identical to SEQ ID NO: 338116
  chr3:54237704-54237861
  hypo
  multiple_myeloma vs. head_and_neck

SEQ ID NO: 470586 - DNA, 990 bp, Homo sapiens; identical to SEQ ID NO: 454374
  chr3:66550603-66551593
  hypo
  multiple_myeloma vs. upper_gi,liver_bileduct

SEQ ID NO: 470587 - DNA, 167 bp, Homo sapiens; identical to SEQ ID NO: 338168
  chr3:124281735-124281902
  hypo
  multiple_myeloma vs. ovary,colorectal, bladder_and_urothelial,liver_bileduct,upper_gi

SEQ ID NO: 470588 - DNA, 360 bp, Homo sapiens; identical to SEQ ID NO: 338169
  chr3:124515276-124515636
  hypo
  multiple_myeloma vs. liver_bileduct,ovary,melanoma, sarcoma,renal,lung,colorectal,upper_gi,bladder_and_urothelial, cervical,pancreas_gallbladder,head_and_neck

SEQ ID NO: 470589 - DNA, 177 bp, Homo sapiens; identical to SEQ ID NO: 338273
  chr3:184225995-184226172
  hypo
  multiple_myeloma vs. anorectal,prostate,non_cancer, breast

SEQ ID NO: 470590 - DNA, 34 bp, Homo sapiens; identical to SEQ ID NO: 353408
  chr3:185363305-185363339
  hypo
  multiple_myeloma vs. melanoma,cervical

SEQ ID NO: 470591 - DNA, 477 bp, Homo sapiens; identical to SEQ ID NO: 338284
  chr3:185374988-185375465
  hypo
  multiple_myeloma vs. ovary,melanoma,lung,sarcoma, upper_gi,colorectal,prostate

SEQ ID NO: 470592 - DNA, 245 bp, Homo sapiens
  chr3:185407229-185407474
  hypo
  multiple_myeloma vs. upper_gi,cervical,colorectal,ovary, uterine
cgcagcgggaaatcaatctgtctggcctgagaagtgcccccaggggcgtggccttgctcccgggaagagtggtccccacgctgggctcgctgagggggcgaaggggagctcacctcttcatccgggatgtaggaaatcttgaaggagtagttctcaaactgatgcccgcttagcttctccatggctctgaaatgcagcaggacaggggagcttcgtcagaaaccaacatcaagaaagaccctccc

SEQ ID NO: 470593 - DNA, 197 bp, Homo sapiens
  chr3:185445861-185446058
  hypo
  multiple_myeloma vs. melanoma,cervical,thyroid,ovary, renal,uterine,prostate,non_cancer
cgttacgtatacctgaactatgtttgcgattcacacaaaataaagaattgaccaggaccaaccccagcctatgagaggcaaagttactgctgcccgctttaccccaccctagagcgccctctgatccacactctcacactgccttccagctttcccacggcgccagacccttgctgctcctgggccccttccccttg

SEQ ID NO: 470594 - DNA, 15 bp, Homo sapiens
  chr3:185446094-185446109
  hypo
  multiple_myeloma vs. melanoma,cervical,thyroid,ovary, renal,uterine,prostate,non_cancer
tcagcgccttgactc

SEQ ID NO: 470595 - DNA, 33 bp, Homo sapiens; identical to SEQ ID NO: 363532
  chr4:3467499-3467532
  hypo
  multiple_myeloma vs. pancreas_gallbladder,uterine, liver_bileduct

SEQ ID NO: 470596 - DNA, 496 bp, Homo sapiens; identical to SEQ ID NO: 338435
  chr4:6733162-6733658
  hypo
  multiple_myeloma vs. liver_bileduct,lung, bladder_and_urothelial

SEQ ID NO: 470597 - DNA, 273 bp, Homo sapiens; identical to SEQ ID NO: 338444
  chr4:8070965-8071238
  hypo
  multiple_myeloma vs. pancreas_gallbladder,colorectal, head_and_neck,anorectal,breast,sarcoma,cervical,prostate, upper_gi,renal,ovary

SEQ ID NO: 470598 - DNA, 173 bp, Homo sapiens; identical to SEQ ID NO: 353484
  chr4:8615920-8616093
  hypo
  multiple_myeloma vs. lymphoid_neoplasm

SEQ ID NO: 470599 - DNA, 29 bp, Homo sapiens
  chr4:57180896-57180925
  hypo
  multiple_myeloma vs. upper_gi
cgcacctggaggactggagggggcagctc

SEQ ID NO: 470600 - DNA, 894 bp, Homo sapiens; identical to SEQ ID NO: 463752
  chr4:57180972-57181866
  hypo
  multiple_myeloma vs. upper_gi

SEQ ID NO: 470601 - DNA, 298 bp, Homo sapiens; identical to SEQ ID NO: 463755
  chr4:57181886-57182184
  hypo
  multiple_myeloma vs. bladder_and_urothelial, lymphoid_neoplasm,upper_gi,ovary,anorectal,thyroid

SEQ ID NO: 470602 - DNA, 510 bp, Homo sapiens; identical to SEQ ID NO: 353496
  chr4:57182262-57182772
  hypo
  multiple_myeloma vs. bladder_and_urothelial, lymphoid_neoplasm,upper_gi,ovary,anorectal,thyroid

SEQ ID NO: 470603 - DNA, 386 bp, Homo sapiens; identical to SEQ ID NO: 338601
  chr5:569858-570244
  hypo
  multiple_myeloma vs. colorectal

SEQ ID NO: 470604 - DNA, 487 bp, Homo sapiens; identical to SEQ ID NO: 338608
  chr5:962533-963020
  hypo
  multiple_myeloma vs. upper_gi,colorectal

SEQ ID NO: 470605 - DNA, 150 bp, Homo sapiens; identical to SEQ ID NO: 338609
  chr5:1032302-1032452
  hypo
  multiple_myeloma vs. bladder_and_urothelial,colorectal, head_and_neck,ovary,upper_gi,uterine,pancreas_gallbladder, prostate,breast

SEQ ID NO: 470606 - DNA, 339 bp, Homo sapiens
  chr5:1033274-1033613
  hypo
  multiple_myeloma vs. lymphoid_neoplasm, pancreas_gallbladder,colorectal,upper_gi,thyroid,anorectal, head_and_neck,myeloid_neoplasm,non_cancer,renal
cgtgggctggtgagaggagggcacacccggctgtggctggccgggatagggcctccctcccctccgcaggggtcccaagatcgggctctcagctcaggcccgtctggacaggatcatggtgtggtgaggggagagcagcgagggtccccaatggcgggccacatcctccatgtgccctctgccagccccttcgcctcctcttgtccccctagtggcactccccgctgagaaagctgagggccgcgagcacccgggacaactcctcagcgcagatgacggagagagggcagcaaaccgcgagggcccgcgaggaccgggcgggcagcgcctcaacattga

SEQ ID NO: 470607 - DNA, 40 bp, Homo sapiens; identical to SEQ ID NO: 353545
  chr5:1033674-1033714
  hypo
  multiple_myeloma vs. lymphoid_neoplasm, pancreas_gallbladder,colorectal,upper_gi,thyroid,anorectal, head_and_neck,myeloid_neoplasm,non_cancer,renal

SEQ ID NO: 470608 - DNA, 144 bp, Homo sapiens
  chr5:1037852-1037996
  hypo
  multiple_myeloma vs. melanoma,colorectal, pancreas_gallbladder,lymphoid_neoplasm
cgtttctgaggagatgggaacctgagcctgcactcccagggcctcacactctgacctgtgtccgcagggtcccctcctgtgcaagcaaagcaggagccccagggcagggcctcgcacctccaggcccggtcccgctcccaggag

SEQ ID NO: 470609 - DNA, 454 bp, Homo sapiens; identical to SEQ ID NO: 353547
  chr5:1038035-1038489
  hypo
  multiple_myeloma vs. melanoma,colorectal, pancreas_gallbladder,lymphoid_neoplasm

SEQ ID NO: 470610 - DNA, 236 bp, Homo sapiens; identical to SEQ ID NO: 338614
  chr5:1049758-1049994
  hypo
  multiple_myeloma vs. ovary,upper_gi,uterine,colorectal, lymphoid_neoplasm,liver_bileduct,prostate,breast,non_cancer, pancreas_gallbladder

SEQ ID NO: 470611 - DNA, 263 bp, Homo sapiens; identical to SEQ ID NO: 338615
  chr5:1051312-1051575
  hypo
  multiple_myeloma vs. liver_bileduct,cervical,upper_gi, pancreas_gallbladder,anorectal,non_cancer,prostate,colorectal, breast,thyroid,renal,lung,ovary,head_and_neck,uterine, myeloid_neoplasm,sarcoma,bladder_and_urothelial

SEQ ID NO: 470612 - DNA, 862 bp, Homo sapiens
  chr5:1051905-1052767
  hypo
  multiple_myeloma vs. head_and_neck,colorectal,upper_gi, liver_bileduct,ovary,prostate,lung,anorectal,renal,thyroid, breast,non_cancer,uterine,cervical,bladder_and_urothelial, sarcoma,myeloid_neoplasm,pancreas_gallbladder
cgagggtgacacgggcatggacagagtcctccagcttcagtgccttgaggtacagaaacacaaagacagtcaaggaacagagtgactcggaggtgaccggggccctgagcggagccatggccagggctgacgtttcaccttcatcatcagggacagcttcagctccgggtgctcttccaagaatgttctggatggggtagaaatgcaacctaaccactgggtaaatccagccaaggaaaagaacttccagaaaccaaggcaagggctcactggcttcttgtgacctgcgagaagatctggccacgtccaggtcactccggtagcagcgtctgccctcagatgcaaggaaatcgtccagccacgccctgatttgctgagcctgttaaggctgaacaggagagccctaggtgacgggcctagaaacttccgtaggaagccccatgggcagcttgggcggcatcactgggggacaggtgtgtctgccgtctgtttccctgggccaagcccaggcccaggctgcccacgccgtcctccgtgcctgtcccagagtgccgtgatgctgttgggcattaggagtagatggtgatcacctcccggccgccacccctgaccaggaggactctgttcagcccctcggtcaggacttcaagaaactccatgtctgtggtcaacagagttaaggccacagctgatcttacctgagcgtgtgtagctgaaatcgtgataggagtgaggtttatcctctcctggttagctaagatttggtttgagaaacccagagccaaggtgaaaagagaggtggggattagagagaccccccaggcggggaggagcagggcaggggagagaggggccagtgctc

SEQ ID NO: 470613 - DNA, 821 bp, Homo sapiens
  chr5:1052316-1053137
  hypo
  multiple_myeloma vs. lung,colorectal,liver_bileduct, ovary,non_cancer,thyroid,pancreas_gallbladder,prostate,uterine, bladder_and_urothelial,renal,breast,myeloid_neoplasm,sarcoma, upper_gi
cgggcctagaaacttccgtaggaagccccatgggcagcttgggcggcatcactgggggacaggtgtgtctgccgtctgtttccctgggccaagcccaggcccaggctgcccacgccgtcctccgtgcctgtcccagagtgccgtgatgctgttgggcattaggagtagatggtgatcacctcccggccgccacccctgaccaggaggactctgttcagcccctcggtcaggacttcaagaaactccatgtctgtggtcaacagagttaaggccacagctgatcttacctgagcgtgtgtagctgaaatcgtgataggagtgaggtttatcctctcctggttagctaagatttggtttgagaaacccagagccaaggtgaaaagagaggtggggattagagagaccccccaggcggggaggagcagggcaggggagagaggggccagtgctcgggaaagagagggagcaccgtggccacagggaggacgagcagagacagcgacacagcccacggtgctgaccccacccgacagggaaccccagccacgggactgggtcctcaccagcctacaggggacctgggccacggattccgatcaggacgcatggaggacatgccctcactggccccagttcttggtgccaacctggcagggatgtgccaggcgtcaccctgtctgtgccaatacgcccagatgcactgcggagttctccttccaaagcacaaattcccaaagctgcgaccaattgtggccttaaagccgagagctgggctcctcacctcccaccgttgtcggcgcagggtggggctgagccccagc

SEQ ID NO: 470614 - DNA, 801 bp, Homo sapiens
  chr5:1053406-1054207
  hypo
  multiple_myeloma vs. breast,ovary,pancreas_gallbladder, bladder_and_urothelial,colorectal,liver_bileduct,cervical, head_and_neck,anorectal,uterine,lung,myeloid_neoplasm,upper_gi, thyroid,non_cancer,lymphoid_neoplasm,prostate,renal
cgagaagccaccagggggtgcccgcacgctcagcaggcacactgcaagaaaggatacagttctcgtctccctgccggtttttgggaggacctggcatgttgagcaggaccagctgcgcatcctgggacttgttgaggacgacgccattgagcttcacagccgtgtgcatccgcctgacgttggactggtccctgcaggggaggtgggcacggtcagcgggcggcgggtgcaccccacgctccggacacgaggctgagctgagccctgatgagctgcattcacacgtgttggaaagggctgtgtgagtcaggatcaggcggattctctgaccctgaaggatgcagaagtggcggctccgagcgaaaggcgctgactgcagccagggcgggcgttcagcagcgggatgctttggcctccagggacctagaactcagcccactaaggctgccaagcttctaagggctacagtcacacaacacaaaccgcaagcgctttcctaactacatctacatctgcaaagcaggcagaacagtggaagccgtctgggtggcccatgtgcctgacgccttcaaggctgacacgcttctcttgacatctacatcatcgcccctaaaccccacgtcagacactgccaaacacagacccgtcaggctgggcacacatggcctcctctccgagggtcctgatacaactgggtccaaggggccggaagctcaggaaggaaaggcccagagtcccccacaccggcctgtgcagccgttgctgctgaagctcccaggcctgacaaggacagggtatgcc

SEQ ID NO: 470615 - DNA, 970 bp, Homo sapiens; identical to SEQ ID NO: 345839
  chr5:1053723-1054693
  hypo
  multiple_myeloma vs. liver_bileduct,lung,colorectal, pancreas_gallbladder,upper_gi,head_and_neck,ovary,breast, anorectal,uterine,thyroid,lymphoid_neoplasm,non_cancer,prostate, cervical,bladder_and_urothelial

SEQ ID NO: 470616 - DNA, 759 bp, Homo sapiens
  chr5:1054261-1055020
  hypo
  multiple_myeloma vs. liver_bileduct,colorectal,upper_gi, head_and_neck,uterine,lung,pancreas_gallbladder,ovary, lymphoid_neoplasm,breast,cervical,anorectal,thyroid,non_cancer, bladder_and_urothelial,prostate
cggcccaccctgcccctgtctggccaagggctaaaggacaagcacttccaccgtgtggccgtccagcccccgccttccgtcctcacaacgcagctctgctccacgaccctccctgtctgctctctgaagctgctgtggccggtccatgtctcaaagcgtccctggcggcctgggcccggccacagccccacaggaggctccccaaccaagtaggtttggggacactgcagaatcatgctgtgaggtgctcaggcccttgcgggacagagcttatctccctcctctaccccacggtcccctcctaggcaggcccctaaactgcagcagaactggcgttccaggaggccacctggggaaacgctgggcggaggggagcacttgcgtttctgtgttggaaaaacccggcccgtgtgtggacttgaaagtcggagcgggtctcaggccagctgcagccgtgcggtcgtgactgtggccccctgggggaggtcaccagcgccctggacgcagaggggcggcggcggacagacagaggccgcccatgcagggtcatggagaggccccacggacgctatccaggctcacgccctttgatccgcttgacgcttaagccacataaacgtgatcataaccaccaatttccaggaggaacacagggagagaccttctatcttctctccagcctggtctaattacagatggggtctctgtccacagcacagtcaaggggctttcgtgccaggaacttggaactttgaattc

SEQ ID NO: 470617 - DNA, 123 bp, Homo sapiens; identical to SEQ ID NO: 353554
  chr5:1055426-1055549
  hypo
  multiple_myeloma vs. liver_bileduct,ovary,upper_gi

SEQ ID NO: 470618 - DNA, 418 bp, Homo sapiens; identical to SEQ ID NO: 338619
  chr5:1055588-1056006
  hypo
  multiple_myeloma vs. myeloid_neoplasm,lung, liver_bileduct

SEQ ID NO: 470619 - DNA, 899 bp, Homo sapiens
  chr5:1056108-1057007
  hypo
  multiple_myeloma vs. breast,pancreas_gallbladder, upper_gi,uterine,anorectal,liver_bileduct,renal,lung,ovary, non_cancer,thyroid,colorectal,head_and_neck,lymphoid_neoplasm
cggttactggcgggggcaggcaggggacagagacggcatcgaggactcccagggagcaccctgggggtccgtccagggtacaccctcccacctgccccggagctcagacgcaggtagctcctgccgagggtccgaccacacagagaactgatctgcacccctctccgcctggaggctggacagctttaacatggaaggcattccaggtgggaacgcgactcagctagcgcctgacccagaaggacgtggatggactcactgacgggccctgcgaggcgcacgcctcccctccactccggagcggctcggacacctcccaggtctcagttcctgggcctcacttaggaagaggcttcaggcgtgtgctggagccaccgtgaacagaggggagcgaaggcaacaggaaactgacgtgggagccgcagcagctctgggtgagctctggctgtacgcggacgcacacaagccaccgtgcacggggcaggcacaggcctagaacacgcgcacagacacacgcaggccacacacacacaggcatgcagggcaaccgggcccggaaggcgacctggttgtagcgagtggacttacaggtttccccattctctatgcaggagaaaaaaacaagagtgtgttactgacttcaggagagagcaccaggctgttccagatcgcatggctgcccaggaggacgccgcctcatcccaccccacagggcccaggagcccccagcccttcctgagaacctggctttagggtctggctctgaccccgggtgagaggtgtctcttgcgctctcatctggaactcagaggctgcgtctgcagaaccaaacccacacccgcaaggaccctgtacagccctggtgttcgcagcccaaggccacaggtgggagccttggc

SEQ ID NO: 470620 - DNA, 961 bp, Homo sapiens
  chr5:1056528-1057489
  hypo
  multiple_myeloma vs. liver_bileduct,upper_gi,breast, anorectal,lung,pancreas_gallbladder,uterine,cervical, lymphoid_neoplasm,ovary,colorectal,thyroid,head_and_neck, non_cancer
cgcagcagctctgggtgagctctggctgtacgcggacgcacacaagccaccgtgcacggggcaggcacaggcctagaacacgcgcacagacacacgcaggccacacacacacaggcatgcagggcaaccgggcccggaaggcgacctggttgtagcgagtggacttacaggtttccccattctctatgcaggagaaaaaaacaagagtgtgttactgacttcaggagagagcaccaggctgttccagatcgcatggctgcccaggaggacgccgcctcatcccaccccacagggcccaggagcccccagcccttcctgagaacctggctttagggtctggctctgaccccgggtgagaggtgtctcttgcgctctcatctggaactcagaggctgcgtctgcagaaccaaacccacacccgcaaggaccctgtacagccctggtgttcgcagcccaaggccacaggtgggagccttggcgtagggcaggccctaaggcccgacagcagcctgaactacccacagggtgaaggccaggaattctgtgcccagcggcacaagcctcctcgcctccatggaacagacccatctgcctgctgcagtgaggcttgcctgagtaaagcaggcctggccgcagggctgacttcagggctggcccaggtaccaggaggactgctcgtcacccagctgtggggttaacatcaggacccaccctaggtcctacaaggacccctcagcgcttggcactagaaggacccctcagcgcttggcactagaaggacccctcagcacttggcacccaggtcttacaaggactcccggccttggcactagaaggatccctcagcgcccggccacagggctgaactcagggcccggccttggcaccaaaaggacccctcagtgcccactcaggcggctccctgttctctaacgggcccactggcctgcagggttgcccc

SEQ ID NO: 470621 - DNA, 904 bp, Homo sapiens; identical to SEQ ID NO: 345840
  chr5:1057027-1057931
  hypo
  multiple_myeloma vs. pancreas_gallbladder,head_and_neck, lung,upper_gi,colorectal,cervical,anorectal,liver_bileduct, uterine,breast,ovary,thyroid,non_cancer,myeloid_neoplasm, prostate,sarcoma,lymphoid_neoplasm,bladder_and_urothelial,renal

SEQ ID NO: 470622 - DNA, 328 bp, Homo sapiens
  chr5:1058847-1059175
  hypo
  multiple_myeloma vs. pancreas_gallbladder,head_and_neck, upper_gi,liver_bileduct,colorectal,breast,lung,thyroid,ovary, prostate,non_cancer,uterine,myeloid_neoplasm,cervical, bladder_and_urothelial,renal,anorectal
cgcccggcccagcctaaatttcccatggccttgaacgtgaaaccagagcccaagggctgcccgctctcggcagagccagcgccgcccacctggcccgagggccaccgtgtaagtcactagagggtgtccacccagcgtctgcacagcagctcatccaaacccttctgcagagcggtgacacctccaacccccacctggcccaggaggggcccttcgagctcgagcttgctgttcccgctcccggtccctcctcggtcagcatttgctgactctccacactgaacttcccatgaagccatgggtggattcttgttcctagctggacccg

SEQ ID NO: 470623 - DNA, 99 bp, Homo sapiens
  chr5:1059425-1059524
  hypo
  multiple_myeloma vs. pancreas_gallbladder,head_and_neck, upper_gi,liver_bileduct,colorectal,breast,lung,thyroid,ovary, prostate,non_cancer,uterine,myeloid_neoplasm,cervical, bladder_and_urothelial,renal,anorectal
gctgcttagtgattccggctgtcagcacatatggccccacacgcagacccgtgtactgcaggttcctgctgaggccaaggccccagggcaggcaaatcc

SEQ ID NO: 470624 - DNA, 36 bp, Homo sapiens
  chr5:1059556-1059592
  hypo
  multiple_myeloma vs. pancreas_gallbladder,head_and_neck, upper_gi,liver_bileduct,colorectal,breast,lung,thyroid,ovary, prostate,non_cancer,uterine,myeloid_neoplasm,cervical, bladder_and_urothelial,renal,anorectal
agaaaaccaacacctgcacctggtctgcagacacac

SEQ ID NO: 470625 - DNA, 2 bp, Homo sapiens
  chr5:1059173-1059175
  hypo
  multiple_myeloma vs. colorectal,upper_gi, pancreas_gallbladder,head_and_neck,breast,liver_bileduct,ovary, thyroid,lung,myeloid_neoplasm,uterine,prostate,non_cancer, cervical,bladder_and_urothelial,anorectal,renal
cg

SEQ ID NO: 470626 - DNA, 99 bp, Homo sapiens; identical to SEQ ID NO: 470623
  chr5:1059425-1059524
  hypo
  multiple_myeloma vs. colorectal,upper_gi, pancreas_gallbladder,head_and_neck,breast,liver_bileduct,ovary, thyroid,lung,myeloid_neoplasm,uterine,prostate,non_cancer, cervical,bladder_and_urothelial,anorectal,renal

SEQ ID NO: 470627 - DNA, 317 bp, Homo sapiens; identical to SEQ ID NO: 345843
  chr5:1059556-1059873
  hypo
  multiple_myeloma vs. colorectal,upper_gi, pancreas_gallbladder,head_and_neck,breast,liver_bileduct,ovary, thyroid,lung,myeloid_neoplasm,uterine,prostate,non_cancer, cervical,bladder_and_urothelial,anorectal,renal

SEQ ID NO: 470628 - DNA, 97 bp, Homo sapiens; identical to SEQ ID NO: 338622
  chr5:1060676-1060773
  hypo
  multiple_myeloma vs. liver_bileduct,head_and_neck,lung, ovary,upper_gi,bladder_and_urothelial,melanoma, lymphoid_neoplasm,myeloid_neoplasm,pancreas_gallbladder, colorectal,uterine,breast,prostate

SEQ ID NO: 470629 - DNA, 342 bp, Homo sapiens; identical to SEQ ID NO: 338623
  chr5:1060864-1061206
  hypo
  multiple_myeloma vs. ovary,bladder_and_urothelial, head_and_neck,upper_gi,pancreas_gallbladder,sarcoma,colorectal, liver_bileduct,lymphoid_neoplasm,breast,lung,prostate,uterine

SEQ ID NO: 470630 - DNA, 207 bp, Homo sapiens; identical to SEQ ID NO: 332281
  chr5:1061585-1061792
  hypo
  multiple_myeloma vs. liver_bileduct

SEQ ID NO: 470631 - DNA, 811 bp, Homo sapiens; identical to SEQ ID NO: 338625
  chr5:1062902-1063713
  hypo
  multiple_myeloma vs. liver_bileduct, bladder_and_urothelial,breast,anorectal,lung,myeloid_neoplasm, upper_gi,head_and_neck,thyroid,prostate,colorectal, pancreas_gallbladder,uterine,renal,non_cancer,ovary,cervical

SEQ ID NO: 470632 - DNA, 860 bp, Homo sapiens; identical to SEQ ID NO: 332282
  chr5:1064412-1065272
  hypo
  multiple_myeloma vs. upper_gi,uterine, bladder_and_urothelial,colorectal,liver_bileduct,breast, cervical,head_and_neck,pancreas_gallbladder,renal,prostate, non_cancer,ovary,myeloid_neoplasm,lung,thyroid

SEQ ID NO: 470633 - DNA, 890 bp, Homo sapiens; identical to SEQ ID NO: 338627
  chr5:1065329-1066219
  hypo
  multiple_myeloma vs. pancreas_gallbladder,colorectal, uterine,liver_bileduct,breast,prostate,myeloid_neoplasm, anorectal,thyroid,non_cancer,cervical,lung,ovary,upper_gi, sarcoma,bladder_and_urothelial,head_and_neck,renal

SEQ ID NO: 470634 - DNA, 904 bp, Homo sapiens
  chr5:1068627-1069531
  hypo
  multiple_myeloma vs. head_and_neck,melanoma,lung, upper_gi,colorectal,liver_bileduct,bladder_and_urothelial, anorectal,breast,pancreas_gallbladder,uterine,lymphoid_neoplasm, prostate,thyroid,non_cancer,renal,cervical,ovary,
  CONT. FROM ABOVE: myeloid_neoplasm
cgatggaggagaatacggctccccagggcagtgcagccccaaaggcagccaagggaaggcggggcctgcggctggctccagccctcgcaaccaatgcagctaagtcacagccaaaggctcgctgagagcagcgggggcagggtgcgctcgtcctcccgtccgcaagagcgggctcctgtctgaggctgccccagaccccccagccgaagggctgtcggacggagaggatctgcctgtgagctccgttaacgtgagagtataagtgagcgcagctcttcccatggccgtgaagactgtggcagagcgtggcagggggtcccgtcatcccccagtcactgcaatccctgccctgtccctcgtgcgcacagacgcgccctcacacacctccagggaggccaggcagtgccaggattcttagaatccacgccagcagggcagttccaactccgggattcctcctaagagcattccagcatgggataaggaacacggaaagggacatatggggaccaggaccgtgaacatccccccgaaaaccacgatacctaaatccacgggttcacagtcaatagcagctaacgcctgaacccgtggtgagccatgacgccgccgtcagggaaagggaaggcccagagcatctcctgtcttccctgggaaggcgaacctgtgcaacagcctgagaaggtggccatccacgtggccaacgtggcgggagcggcgggggccattttttacctccatgggatcctggccctaggccacaccacctgaggctgctaccatccacgtgcccacagccctcttgagcagggttcccacccctaggctgaccggcccagacctggacgggcctcagtgcggctgtggttgtgcagagaaacggaccggggaggcggtggggggc

SEQ ID NO: 470635 - DNA, 928 bp, Homo sapiens
  chr5:1069116-1070044
  hypo
  multiple_myeloma vs. pancreas_gallbladder, bladder_and_urothelial,head_and_neck,breast,colorectal,prostate, lung,ovary,lymphoid_neoplasm,upper_gi,uterine,non_cancer, anorectal,liver_bileduct,thyroid,renal,cervical,
  CONT. FROM ABOVE: myeloid_neoplasm,melanoma
cggaaagggacatatggggaccaggaccgtgaacatccccccgaaaaccacgatacctaaatccacgggttcacagtcaatagcagctaacgcctgaacccgtggtgagccatgacgccgccgtcagggaaagggaaggcccagagcatctcctgtcttccctgggaaggcgaacctgtgcaacagcctgagaaggtggccatccacgtggccaacgtggcgggagcggcgggggccattttttacctccatgggatcctggccctaggccacaccacctgaggctgctaccatccacgtgcccacagccctcttgagcagggttcccacccctaggctgaccggcccagacctggacgggcctcagtgcggctgtggttgtgcagagaaacggaccggggaggcggtggggggcggctgcagatgcctggacacacccacaaggtcccagtgggggcctggcagcagggagctggctcccaacccacagcaaggacagagggggcacccgcatgggagggacctcggacacacaccactgcaacaggcacgtggtataggccccacagactcccacacacatgagggggaaggaggaggctcgaggcgcccacggcagccagccctgcctgggaatgaggtgcccttggcatgaaaatcacgcaggtgggcactcaaaagctccctgctttagcaagaaatacagaagtaactccaggtgacgtgacgtgacgtgacgtgatgggaccccacaggctttcatcgtgtcatcattccgtttctggatagtgtgaagcttcccataagaagtttgaaaatcagagaaatgaagacacaaagtctcagaccccgatgtcctggggcagccgactgcagcagcagggctcagagctggcaccagcatgctacacgcccggggcactcaccc

SEQ ID NO: 470636 - DNA, 431 bp, Homo sapiens; identical to SEQ ID NO: 453970
  chr5:1074389-1074820
  hypo
  multiple_myeloma vs. liver_bileduct

SEQ ID NO: 470637 - DNA, 806 bp, Homo sapiens; identical to SEQ ID NO: 353565
  chr5:1074389-1075195
  hypo
  multiple_myeloma vs. liver_bileduct,myeloid_neoplasm, cervical,upper_gi,pancreas_gallbladder,lung

SEQ ID NO: 470638 - DNA, 899 bp, Homo sapiens
  chr5:1075478-1076377
  hypo
  multiple_myeloma vs. liver_bileduct,upper_gi, bladder_and_urothelial,melanoma,myeloid_neoplasm, pancreas_gallbladder,colorectal,head_and_neck,breast,cervical, uterine
cgcttacccgcggtactcgatgtacttgtagatgcagccagcgatgagcatggcggacagcgcgtagtaccaggagcagatgaacatcagcgccaggcacaggctcatacccagaaaggacagggtcctgggggcggggcaagtggctcggggcggcccaacgccatgcagcccccacacctcagccaccaccacacggacactgcccctccctcagtaaaactctctgttaacactaggaaaacagtcactgacgcctgacgaccatggctgtactcaaccacctctgaggggtgacgtggctccctgggcccctgtgggagctgtcactccaaaacccagtacatagctccagctcccagcgtgcacacagcacctcggctgtgcatgcaacaaggggctgaagcgtccacccagcgcctgattcctggggaggggagttaagaagacccacagccctgatgggctacgccccaagcctgggaaggctgggctgaccacgggaggtacaaggcacatgcagacacctgggcatcctcgtaaccagaggccttcctcaggtgcagtctcatcagctgcgcaggggcttactccgcaaaggaacagtcaaggacgcgctggggtcttcaggcccagagcagctggccttgtagaggcacccagtgtcccagcctgtggggctcctgacgcctgtgctgagcggcctcaccagtggcagaggcacccagtgtcccagcctgtggggctcctcacgcccgtgctgagtggcctcaccagtggtagaacttgaagcgtggacgccagttgggggtacgtagcagggtctgcacggcgcaggccaggttcacgaacaggtagcacatgaggaagaacctgcagggacggccggccactgatac

SEQ ID NO: 470639 - DNA, 968 bp, Homo sapiens
  chr5:1075947-1076915
  hypo
  multiple_myeloma vs. upper_gi,liver_bileduct, head_and_neck,bladder_and_urothelial,breast,lung,ovary, anorectal,renal,thyroid,pancreas_gallbladder,cervical, colorectal,sarcoma,uterine,melanoma,myeloid_neoplasm,non_cancer
cgccccaagcctgggaaggctgggctgaccacgggaggtacaaggcacatgcagacacctgggcatcctcgtaaccagaggccttcctcaggtgcagtctcatcagctgcgcaggggcttactccgcaaaggaacagtcaaggacgcgctggggtcttcaggcccagagcagctggccttgtagaggcacccagtgtcccagcctgtggggctcctgacgcctgtgctgagcggcctcaccagtggcagaggcacccagtgtcccagcctgtggggctcctcacgcccgtgctgagtggcctcaccagtggtagaacttgaagcgtggacgccagttgggggtacgtagcagggtctgcacggcgcaggccaggttcacgaacaggtagcacatgaggaagaacctgcagggacggccggccactgatacgggcccactgggcccccctgagcccccagtcactgccacctgggagaccacccttgtcactgtccctcccacctgcgccttgtctccccatgtctgtctctgcacgtgagctgactcagactgattccgaatcaggccccctcaggttccagccatcctgtgaccacctggtccatcaagagatgggccatcgtcccttccccagcagccgtctgtccagccacactgtccctggctgaccccagcgggcggctgcctggaggcctgtgtacttgtcttccccggcgcaactcccttcccggcaggatcctgactgcccacagctggccatgcctgtctactgcttgtcctgagcaggacctcccatccacactgccccacgctccaggcccatacacccatccccaggtccccgtcctgtgggggctcacatggagaggatcggggccacgctgtccagagaggcgatgaggatgccagtctcgcagatgaggactgtcagcagcagcgcccacgtgggctccccgttggccttccc

SEQ ID NO: 470640 - DNA, 961 bp, Homo sapiens
  chr5:1076452-1077413
  hypo
  multiple_myeloma vs. sarcoma,liver_bileduct,colorectal, head_and_neck,thyroid,lung,anorectal,upper_gi,breast,uterine, bladder_and_urothelial,myeloid_neoplasm,non_cancer
cgccttgtctccccatgtctgtctctgcacgtgagctgactcagactgattccgaatcaggccccctcaggttccagccatcctgtgaccacctggtccatcaagagatgggccatcgtcccttccccagcagccgtctgtccagccacactgtccctggctgaccccagcgggcggctgcctggaggcctgtgtacttgtcttccccggcgcaactcccttcccggcaggatcctgactgcccacagctggccatgcctgtctactgcttgtcctgagcaggacctcccatccacactgccccacgctccaggcccatacacccatccccaggtccccgtcctgtgggggctcacatggagaggatcggggccacgctgtccagagaggcgatgaggatgccagtctcgcagatgaggactgtcagcagcagcgcccacgtgggctccccgttggccttcccgtggccaaacacctgcagggagaagggcaggaagatggggcagatgacaccacccttttaggagagaagctgcaggctggtcaggtctagcccagatgaatcttaaagacacagaccagcagaaacgcctttcacagtaggtccccgggacatcacgcggctggcctgggaagaagccctgacaaagggctgcagcccaggaggcttcagagctgtgcctacgcccggcttgcctgcaacctgtgtggccccagcctgcccccccgcctcagtttccccgaccacacaacacaggaccagcgtctccagggcactcgcggttccccagaccctgtggtgacctttctcatcaggccaccctcacctcccagaagctgaggcccacggggcctgtgtgcctgtccccttcctggacaccatgccctaggcccggctgggactgaagatgcaaccacacaaaggccctgcgggtcggcaccctgccgagggaccagcgac

SEQ ID NO: 470641 - DNA, 890 bp, Homo sapiens
  chr5:1077040-1077930
  hypo
  multiple_myeloma vs. liver_bileduct,thyroid, head_and_neck,pancreas_gallbladder,upper_gi,lung,ovary,breast, colorectal,uterine,cervical
cgcctttcacagtaggtccccgggacatcacgcggctggcctgggaagaagccctgacaaagggctgcagcccaggaggcttcagagctgtgcctacgcccggcttgcctgcaacctgtgtggccccagcctgcccccccgcctcagtttccccgaccacacaacacaggaccagcgtctccagggcactcgcggttccccagaccctgtggtgacctttctcatcaggccaccctcacctcccagaagctgaggcccacggggcctgtgtgcctgtccccttcctggacaccatgccctaggcccggctgggactgaagatgcaaccacacaaaggccctgcgggtcggcaccctgccgagggaccagcgacgggcaaggatggctctgccatccacgaccttcccacagctgcccctgggcccaggtagcaggaggagccacaatcggcagctctgggcacagcacacggacaggacccatgcgggcgtccgtgcaatcctcagagcagccacacacactggctgcaggtggctggtgacgccacctcccacgggctgaagagctcagccacacagagaaagatgtggcaggcaggcagagggcttctgaccagacaacagaccaggcacctctggacacgtggctgtgggccctcacagccgctcctgacacacccggggccgagctcggagggacctgcaggcaggagggctagaattgcctctgcccaccacccacctcccaccactcccatgctctgtgcagtggccaggggcagaatgaccaccatggggtccaagccgcgggcatgcgtcccacacacggcactgtgaggatcccgcaggggaggagagcccccgaccctgaccttccagggtccccccgac

SEQ ID NO: 470642 - DNA, 982 bp, Homo sapiens
  chr5:1077437-1078419
  hypo
  multiple_myeloma vs. liver_bileduct,colorectal,lung, pancreas_gallbladder,breast,uterine,head_and_neck,upper_gi, prostate,cervical,thyroid,non_cancer,lymphoid_neoplasm,renal
cgaccttcccacagctgcccctgggcccaggtagcaggaggagccacaatcggcagctctgggcacagcacacggacaggacccatgcgggcgtccgtgcaatcctcagagcagccacacacactggctgcaggtggctggtgacgccacctcccacgggctgaagagctcagccacacagagaaagatgtggcaggcaggcagagggcttctgaccagacaacagaccaggcacctctggacacgtggctgtgggccctcacagccgctcctgacacacccggggccgagctcggagggacctgcaggcaggagggctagaattgcctctgcccaccacccacctcccaccactcccatgctctgtgcagtggccaggggcagaatgaccaccatggggtccaagccgcgggcatgcgtcccacacacggcactgtgaggatcccgcaggggaggagagcccccgaccctgaccttccagggtccccccgacgagggtgcgggactcacctgcaggaaggggacgatgccgtcacgggcaatggcctgcagtaggcgcggtgcccccgtgaggctctgcaggccggcaccgcaggtggagaagaaggagccgatgacgatgacccagggggagggccaggccagcatgccgatgaccaggttcccctgcagggcctccccgaacctgcaggcaggcgggcaggcgggcgggcggctttcagaagtgagcctgagtcagacaaaatgtcttctcccacccagagcgaggggcccagtgcagtgggggcgactccttggaaagctgaggcccggcctccagtccccgttggctgaaacctccaccaggctctgcccagcatggccagaatgctctggagggtcttcagcgggggagggggtcctgctcacctcagggtcgctcttgggagcagggaagacccagcctggcatcagcttcagtcagggaccacccaggaccccc

SEQ ID NO: 470643 - DNA, 989 bp, Homo sapiens
  chr5:1077937-1078926
  hypo
  multiple_myeloma vs. pancreas_gallbladder,colorectal, uterine,liver_bileduct,head_and_neck,breast,lung,renal, non_cancer,thyroid,bladder_and_urothelial,prostate
cgggactcacctgcaggaaggggacgatgccgtcacgggcaatggcctgcagtaggcgcggtgcccccgtgaggctctgcaggccggcaccgcaggtggagaagaaggagccgatgacgatgacccagggggagggccaggccagcatgccgatgaccaggttcccctgcagggcctccccgaacctgcaggcaggcgggcaggcgggcgggcggctttcagaagtgagcctgagtcagacaaaatgtcttctcccacccagagcgaggggcccagtgcagtgggggcgactccttggaaagctgaggcccggcctccagtccccgttggctgaaacctccaccaggctctgcccagcatggccagaatgctctggagggtcttcagcgggggagggggtcctgctcacctcagggtcgctcttgggagcagggaagacccagcctggcatcagcttcagtcagggaccacccaggacccccggggccttggggctgccagacacgcacaccccatgaggatgcagggtcagtgatgacctgcctgggaccccactacttctccacttgccagcagggctgagggatctcccagggccaagcctcacccgtccacacccctgtggcctccccaggaagggcctgcgcccccagccgcatcagggcttggagttggctctgaacggttccccaggccctaggctccagcggaagagacgacacatcagaccaagggatcccaaccctgggaccaggacgccttcagctctgcacgcggacatgaagtcctagggcgatgtaatttcaaagccgaattcatcctcaggaaaacccttgaagactacaggctttgcacgaaaactgcaggtggaaacgtacttatctcgtaagaccacgccttcaatgcaggccccaaacagcacaatgcaggagagatccacagccctcgtcaaggaaaggcaggtccgtgggtgcagggtcctcaggtac

SEQ ID NO: 470644 - DNA, 985 bp, Homo sapiens
  chr5:1078441-1079426
  hypo
  multiple_myeloma vs. ovary,liver_bileduct, bladder_and_urothelial,myeloid_neoplasm,lung,colorectal,sarcoma, uterine
cgcacaccccatgaggatgcagggtcagtgatgacctgcctgggaccccactacttctccacttgccagcagggctgagggatctcccagggccaagcctcacccgtccacacccctgtggcctccccaggaagggcctgcgcccccagccgcatcagggcttggagttggctctgaacggttccccaggccctaggctccagcggaagagacgacacatcagaccaagggatcccaaccctgggaccaggacgccttcagctctgcacgcggacatgaagtcctagggcgatgtaatttcaaagccgaattcatcctcaggaaaacccttgaagactacaggctttgcacgaaaactgcaggtggaaacgtacttatctcgtaagaccacgccttcaatgcaggccccaaacagcacaatgcaggagagatccacagccctcgtcaaggaaaggcaggtccgtgggtgcagggtcctcaggtacggggggtggggtggggtggggtggggtgggtggggagatgcactggccagcgggccgcaggatccaggtgggcggggaccgttctgcatcccatcccatcccgggcacgtcctgtcccccgtgtcctcagcgcaccctcctggggctctgtccagcgccacagaacggggccctggggtggtggacacacacctggcctggtgcttgaccgccagggattggcaggggaccatgctgaggggacaatgctcggctggaaagaggcagccttgggattgagaagccagaggccccgcgggcccagcctgccggcggcacaccccacacaccgctgcgcatcactgtccacacgcggcagggtgactgcttctgttttctctacgatcgcatcacacagtggtgaagaagccagggtcctgacagcagcccttgccccgtctcccagggaggatgacgtggtgagagcacagcctaacctgggaagtcacatgctggtggcc

SEQ ID NO: 470645 - DNA, 895 bp, Homo sapiens
  chr5:1078976-1079871
  hypo
  multiple_myeloma vs. myeloid_neoplasm,sarcoma, bladder_and_urothelial,colorectal,head_and_neck,lung,breast, uterine,ovary,prostate,liver_bileduct,pancreas_gallbladder, anorectal,non_cancer,thyroid,upper_gi
cgggccgcaggatccaggtgggcggggaccgttctgcatcccatcccatcccgggcacgtcctgtcccccgtgtcctcagcgcaccctcctggggctctgtccagcgccacagaacggggccctggggtggtggacacacacctggcctggtgcttgaccgccagggattggcaggggaccatgctgaggggacaatgctcggctggaaagaggcagccttgggattgagaagccagaggccccgcgggcccagcctgccggcggcacaccccacacaccgctgcgcatcactgtccacacgcggcagggtgactgcttctgttttctctacgatcgcatcacacagtggtgaagaagccagggtcctgacagcagcccttgccccgtctcccagggaggatgacgtggtgagagcacagcctaacctgggaagtcacatgctggtggccgagggtatgatgctgagccggggagggcatgggggcctccccccaggcagaggctggaaccctcgcctgcacccctccaaggatacagatgaaagacgtcgtcactatggccaggatggtccccgtggggatggacttctgtgcatccttgaggtccccggaccggtttgaacccgccatgatacctgtgaacatggaaaatgctgcaaagacccatctgaggagtcagtgccatgtgatggcagcccctgcccagaaagctggaaaggcggtctctggggagaccccgagcgtgagctgcagccgaggctgcagtccaagctccgccagcccacgctgcaatactgcggctgaggggatgcgggcccaggcacgcggatgagcacccacgtctactgctcccctggatccgaggacgagaaccgaccccgtcactgacccccac

SEQ ID NO: 470646 - DNA, 939 bp, Homo sapiens
  chr5:1079444-1080383
  hypo
  multiple_myeloma vs. myeloid_neoplasm,lung, bladder_and_urothelial
cggggagggcatgggggcctccccccaggcagaggctggaaccctcgcctgcacccctccaaggatacagatgaaagacgtcgtcactatggccaggatggtccccgtggggatggacttctgtgcatccttgaggtccccggaccggtttgaacccgccatgatacctgtgaacatggaaaatgctgcaaagacccatctgaggagtcagtgccatgtgatggcagcccctgcccagaaagctggaaaggcggtctctggggagaccccgagcgtgagctgcagccgaggctgcagtccaagctccgccagcccacgctgcaatactgcggctgaggggatgcgggcccaggcacgcggatgagcacccacgtctactgctcccctggatccgaggacgagaaccgaccccgtcactgacccccacgccccccacacccagggcttctctggagcctgtgttaatcccatggccaagggtcagcccagagacggtgctgagcaatggctcacaggcccccaggacctaaggactttgggaatgagatcctagaacgactcagcccagccagccaggccagcagacgctgcgacccctcccgctgtggcaccaccttgctctagggagccacggccggggatgtttccacacaatcggctcctacaaagctctgggaagccgggtcggtgggggccacttcacgcctggctcggtcccatccaaggcgcagcctgaagcacccattgctcggggtggcctgggaggcagcagagcccacaatccagtgccgcggagacacccggagccacgcagaggctctgcccccacgccctccacccgcggctcagagacacccggagccacgcagaggctctacccccacgccctccacccgcggcgcggagacaccaggagccacgcagaggctctgcccccac

SEQ ID NO: 470647 - DNA, 69 bp, Homo sapiens; identical to SEQ ID NO: 338633
  chr5:1081429-1081498
  hypo
  multiple_myeloma vs. liver_bileduct,upper_gi,colorectal, head_and_neck,myeloid_neoplasm,thyroid,lung,breast,cervical

SEQ ID NO: 470648 - DNA, 304 bp, Homo sapiens; identical to SEQ ID NO: 338634
  chr5:1081824-1082128
  hypo
  multiple_myeloma vs. liver_bileduct

SEQ ID NO: 470649 - DNA, 708 bp, Homo sapiens; identical to SEQ ID NO: 338635
  chr5:1083641-1084349
  hypo
  multiple_myeloma vs. lymphoid_neoplasm,liver_bileduct, ovary,breast,colorectal,bladder_and_urothelial,head_and_neck, anorectal,prostate,cervical,non_cancer,pancreas_gallbladder, uterine,lung,sarcoma,thyroid

SEQ ID NO: 470650 - DNA, 545 bp, Homo sapiens; identical to SEQ ID NO: 353570
  chr5:1084386-1084931
  hypo
  multiple_myeloma vs. liver_bileduct, bladder_and_urothelial,myeloid_neoplasm,pancreas_gallbladder, cervical,head_and_neck

SEQ ID NO: 470651 - DNA, 822 bp, Homo sapiens; identical to SEQ ID NO: 348071
  chr5:1085196-1086018
  hypo
  multiple_myeloma vs. colorectal,liver_bileduct, bladder_and_urothelial,upper_gi,pancreas_gallbladder,uterine, lymphoid_neoplasm,prostate,breast,anorectal,ovary,lung, head_and_neck,non_cancer,myeloid_neoplasm,renal

SEQ ID NO: 470652 - DNA, 967 bp, Homo sapiens
  chr5:1085531-1086498
  hypo
  multiple_myeloma vs. bladder_and_urothelial, pancreas_gallbladder,upper_gi,liver_bileduct,colorectal,lung, lymphoid_neoplasm,cervical,breast,anorectal,uterine,ovary, sarcoma,prostate,head_and_neck,non_cancer
cgcctcgccacctgcagcctccgcctggaagatggccgcacccggggagatgtacgtctgtgggaacaaggccggtcgggaggccgtccccggacacaactccccagtgcccgtccctcccgcaagcccccagcgccacacaggggcctcctcccaacaggtgccggggccatcgggacgcatccgtgctggacggagcccgcgggggtcagcgcacaggcaagggacggagcccgcgggggtcagcgcacaggcgagggacggagcccgcgggggtcagcgcacaggcgagggacggagcccgcgggggtcagcgcacaggccatggacagccaggggcctgaacgtttcccaggaaccacccgggagccttagagtaaagcaacttcaggacccggggcatccgcatgtccgcactcaaaagaaacaccttctgctaagaggaatgtgactgctgcccagagagctcggcccaccccggctggacgtcctggacacacacagggtctgaccacgccggcggggggcaacctctgttctgcccagattcaagggaagggacggagacgtgagacagtgctgctcagctccctcaagaccaggacaggactggggtgcagcaggcatggagggcatggcacccacccccaccaaaggggatcctgggagtgcggcagccacggcacccggggcaggtggaaagatggagggacatggccaggggactcgggttgggacgggtgtgggtgcgaccccactgaaaggtttcagaaccttcttggccatgtggctctcttcaggaacccaggaggccaggaaccaggtctggcagcagagggaggggcagaaagactggggacaggggctcaggtgagcgtctctgaagccctgcagggacagcgggtttcagaacctcagcaggaaggacagcacccgtcggccagagaagggcggttcccgtccccac

SEQ ID NO: 470653 - DNA, 816 bp, Homo sapiens
  chr5:1086045-1086861
  hypo
  multiple_myeloma vs. ovary,liver_bileduct
cgccggcggggggcaacctctgttctgcccagattcaagggaagggacggagacgtgagacagtgctgctcagctccctcaagaccaggacaggactggggtgcagcaggcatggagggcatggcacccacccccaccaaaggggatcctgggagtgcggcagccacggcacccggggcaggtggaaagatggagggacatggccaggggactcgggttgggacgggtgtgggtgcgaccccactgaaaggtttcagaaccttcttggccatgtggctctcttcaggaacccaggaggccaggaaccaggtctggcagcagagggaggggcagaaagactggggacaggggctcaggtgagcgtctctgaagccctgcagggacagcgggtttcagaacctcagcaggaaggacagcacccgtcggccagagaagggcggttcccgtccccacgaggaccaaggaactcaggccacagctctcagctgtgctcaggtgatgtgggacatgctttgagcatgcctgttttgagaaggtgatgacatcacctggttgtacattgctgggctctgggaccctcggccaagtgcccagatcaggcagagaagaggctgggatcctggcaaaaggttcttctaagccgagttccagccctgctcctaaaacagctccgactgcaggactgcacctacgcggggctcagatctacagtccagatgtctacccagctcatgccaggcacgcctcacggagggcagcaatggtgctcaagggggacacaggtcgctgctgagtggacgctgcccagtggcttcc

SEQ ID NO: 470654 - DNA, 820 bp, Homo sapiens
  chr5:1087088-1087908
  hypo
  multiple_myeloma vs. liver_bileduct, bladder_and_urothelial,head_and_neck,upper_gi,myeloid_neoplasm, pancreas_gallbladder,breast,colorectal
cgacagcgcctccaaactcgggtcccagcgagcgcgatatcatgtagtaggacccgccagctgcggagacaaaggcggcagccgcgggtcaggggcgcacttggactcggacccgaggtgcggtctgcgctgccattcacgggcaaaggagggcctgtctctgcgaaggcagcgtgtagaccctcgtccacccgcaaagcagcacatggagacgcttccacggtgaactctcccctcccgaggctcggcacacgttccacaccaagagcacgcgctctcatggacatgaggaccaggtgagatcagggataaggctctctggggagcaggaggccccagcaggtcccagaaaaagtcccgcgtacatcagtggcagccccagcccccacttccactaagttttgcttatgaaaaaggcaaaagagaaactaggatgttcaggagtcgtctcgtgtactgtgaaccacgcacgctatcactggcgggaaagccgggcgcaaccccagggctgcctggagaacacagctctccctgctctgagcagtgcgtgtggcatgtggaaggggtcctaatggacgcggccatcgtgaagcagagactggtcccttggctgcggagggagacccctggtgaaggccctcgtgctctcctgaggccggggaagtccgctgagcaccaagcgatgcccccgtggggatggggaccagctgcgtgaggacctggtgctgagcaagcccagccgttaacacgcgcagcacacatgcactcagaagcagacgtggcagcgtctccgttcactagttatttcgtatcgtaattc

SEQ ID NO: 470655 - DNA, 961 bp, Homo sapiens
  chr5:1087446-1088407
  hypo
  multiple_myeloma vs. bladder_and_urothelial,upper_gi, liver_bileduct,sarcoma,colorectal,cervical,lung,breast
cgcgtacatcagtggcagccccagcccccacttccactaagttttgcttatgaaaaaggcaaaagagaaactaggatgttcaggagtcgtctcgtgtactgtgaaccacgcacgctatcactggcgggaaagccgggcgcaaccccagggctgcctggagaacacagctctccctgctctgagcagtgcgtgtggcatgtggaaggggtcctaatggacgcggccatcgtgaagcagagactggtcccttggctgcggagggagacccctggtgaaggccctcgtgctctcctgaggccggggaagtccgctgagcaccaagcgatgcccccgtggggatggggaccagctgcgtgaggacctggtgctgagcaagcccagccgttaacacgcgcagcacacatgcactcagaagcagacgtggcagcgtctccgttcactagttatttcgtatcgtaattcgtttattactaattaacagtatcatctcagtttactagttattacgtattgtaattaacttattactaattaatatcatctcggttcactagttatttagttattatgtattgtaattaacttattactaattaacaaggtcagggcagtgttttgtcttcaccttccctcgtgagatacaggttccaagaactcagcctatggcacacgctgggctacaggagccactggaatcgcccgtgcctccccctccccagcccgctgcctggtgggcactgcctaccctggcaagagacggtcaccacgcagcaaaatggggaagaaaaccaaacagccgtgacctcacggctcaaacgccagaggagccagtggagaacacgcagaaggcccggctgagacccccaggcagcccccggcccggcctcgccaagcggcctcctcgcggttgccgtgcggcaaaacacagactcctctaacaggactcagggccgcggctggc

SEQ ID NO: 470656 - DNA, 980 bp, Homo sapiens
  chr5:1087952-1088932
  hypo
  multiple_myeloma vs. liver_bileduct, bladder_and_urothelial,head_and_neck,sarcoma,upper_gi, colorectal,pancreas_gallbladder,ovary,cervical,breast, myeloid_neoplasm,thyroid,lung,prostate,non_cancer,anorectal,
  CONT. FROM ABOVE: lymphoid_neoplasm,uterine
cgtattgtaattaacttattactaattaatatcatctcggttcactagttatttagttattatgtattgtaattaacttattactaattaacaaggtcagggcagtgttttgtcttcaccttccctcgtgagatacaggttccaagaactcagcctatggcacacgctgggctacaggagccactggaatcgcccgtgcctccccctccccagcccgctgcctggtgggcactgcctaccctggcaagagacggtcaccacgcagcaaaatggggaagaaaaccaaacagccgtgacctcacggctcaaacgccagaggagccagtggagaacacgcagaaggcccggctgagacccccaggcagcccccggcccggcctcgccaagcggcctcctcgcggttgccgtgcggcaaaacacagactcctctaacaggactcagggccgcggctggcgggcaccccttacctgggaccacaccgttggtagcgatcgcactcatggaaatggcggtcagcattgtctgcaaaaagacaggcagccatctgaggagagttttccaacagcctgccggcatcgcaacactcccaagtcagggtctatgacccggctcccgccgaatgccagcccccaactccagggctctccatctcaatggagtggctaggaaacaggacctggaggctcccgggcaccaggcatgcgtgtcctggttcccaccccttcccctatgacagcgacccctgaaagtgcccaaggtccttccaaactggaggtgatgtcatcaaaacacagggtgtcccttcccttggaagcctcagcccccgggtgccgccccatgacacccaccactggctgagatgcctgtccgcagacacgggtaaatgaggtgccagcacgccagtcaacacgccagcactaaccccggacagtgtggcatctcatccccgcagctgcccggctctcgtggaggagacggc

SEQ ID NO: 470657 - DNA, 843 bp, Homo sapiens; identical to SEQ ID NO: 345847
  chr5:1088432-1089275
  hypo
  multiple_myeloma vs. pancreas_gallbladder,colorectal, bladder_and_urothelial,liver_bileduct,breast,lymphoid_neoplasm, head_and_neck,prostate,non_cancer,thyroid,uterine,lung,upper_gi, myeloid_neoplasm,renal,ovary,sarcoma,cervical

SEQ ID NO: 470658 - DNA, 212 bp, Homo sapiens; identical to SEQ ID NO: 338639
  chr5:1090437-1090649
  hypo
  multiple_myeloma vs. head_and_neck, bladder_and_urothelial,uterine,colorectal,lung,ovary, pancreas_gallbladder,breast,upper_gi,cervical,non_cancer, lymphoid_neoplasm,prostate,thyroid

SEQ ID NO: 470659 - DNA, 247 bp, Homo sapiens; identical to SEQ ID NO: 338640
  chr5:1091634-1091881
  hypo
  multiple_myeloma vs. ovary,liver_bileduct, myeloid_neoplasm,colorectal,bladder_and_urothelial,breast, lymphoid_neoplasm

SEQ ID NO: 470660 - DNA, 134 bp, Homo sapiens; identical to SEQ ID NO: 348073
  chr5:1094049-1094183
  hypo
  multiple_myeloma vs. pancreas_gallbladder,sarcoma,breast, colorectal,lung,liver_bileduct,ovary,head_and_neck, bladder_and_urothelial,non_cancer,anorectal,thyroid, myeloid_neoplasm,prostate,renal,upper_gi,uterine

SEQ ID NO: 470661 - DNA, 625 bp, Homo sapiens; identical to SEQ ID NO: 363701
  chr5:1094563-1095188
  hypo
  multiple_myeloma vs. liver_bileduct,colorectal,sarcoma

SEQ ID NO: 470662 - DNA, 390 bp, Homo sapiens; identical to SEQ ID NO: 338643
  chr5:1095619-1096009
  hypo
  multiple_myeloma vs. liver_bileduct, bladder_and_urothelial,colorectal,upper_gi,myeloid_neoplasm, sarcoma,breast,head_and_neck,prostate,pancreas_gallbladder, uterine,cervical,lung,ovary,anorectal,non_cancer,thyroid

SEQ ID NO: 470663 - DNA, 239 bp, Homo sapiens; identical to SEQ ID NO: 338645
  chr5:1114657-1114896
  hypo
  multiple_myeloma vs. liver_bileduct,colorectal,upper_gi, ovary,renal,cervical,pancreas_gallbladder, bladder_and_urothelial,lung,breast,non_cancer,thyroid

SEQ ID NO: 470664 - DNA, 635 bp, Homo sapiens; identical to SEQ ID NO: 338646
  chr5:1115157-1115792
  hypo
  multiple_myeloma vs. upper_gi,ovary,colorectal,breast, head_and_neck,bladder_and_urothelial,prostate,melanoma,lung, uterine,myeloid_neoplasm,renal,cervical,non_cancer

SEQ ID NO: 470665 - DNA, 601 bp, Homo sapiens; identical to SEQ ID NO: 338647
  chr5:1116675-1117276
  hypo
  multiple_myeloma vs. head_and_neck,liver_bileduct

SEQ ID NO: 470666 - DNA, 191 bp, Homo sapiens; identical to SEQ ID NO: 353578
  chr5:1120359-1120550
  hypo
  multiple_myeloma vs. liver_bileduct,colorectal,ovary, head_and_neck,lymphoid_neoplasm,sarcoma,bladder_and_urothelial, upper_gi,pancreas_gallbladder,breast,myeloid_neoplasm,cervical, lung,prostate

SEQ ID NO: 470667 - DNA, 103 bp, Homo sapiens; identical to SEQ ID NO: 363707
  chr5:1120577-1120680
  hypo
  multiple_myeloma vs. thyroid,cervical,ovary, liver_bileduct,head_and_neck

SEQ ID NO: 470668 - DNA, 178 bp, Homo sapiens; identical to SEQ ID NO: 338650
  chr5:1122647-1122825
  hypo
  multiple_myeloma vs. pancreas_gallbladder,liver_bileduct, ovary,colorectal,bladder_and_urothelial,sarcoma

SEQ ID NO: 470669 - DNA, 923 bp, Homo sapiens; identical to SEQ ID NO: 377314
  chr5:1143146-1144069
  hypo
  multiple_myeloma vs. upper_gi,pancreas_gallbladder

SEQ ID NO: 470670 - DNA, 277 bp, Homo sapiens; identical to SEQ ID NO: 338660
  chr5:1702104-1702381
  hypo
  multiple_myeloma vs. sarcoma,lymphoid_neoplasm

SEQ ID NO: 470671 - DNA, 335 bp, Homo sapiens; identical to SEQ ID NO: 338669
  chr5:1910394-1910729
  hypo
  multiple_myeloma vs. cervical

SEQ ID NO: 470672 - DNA, 161 bp, Homo sapiens; identical to SEQ ID NO: 463775
  chr5:1922827-1922988
  hypo
  multiple_myeloma vs. head_and_neck,anorectal,prostate

SEQ ID NO: 470673 - DNA, 48 bp, Homo sapiens; identical to SEQ ID NO: 363720
  chr5:1923074-1923122
  hypo
  multiple_myeloma vs. head_and_neck,anorectal,prostate

SEQ ID NO: 470674 - DNA, 23 bp, Homo sapiens
  chr5:2261209-2261232
  hypo
  multiple_myeloma vs. anorectal
cggaaagcctgctctccgggtgg

SEQ ID NO: 470675 - DNA, 298 bp, Homo sapiens; identical to SEQ ID NO: 463781
  chr5:2261313-2261611
  hypo
  multiple_myeloma vs. anorectal

SEQ ID NO: 470676 - DNA, 106 bp, Homo sapiens; identical to SEQ ID NO: 338695
  chr5:7825260-7825366
  hypo
  multiple_myeloma vs. anorectal

SEQ ID NO: 470677 - DNA, 383 bp, Homo sapiens
  chr5:9122712-9123095
  hypo
  multiple_myeloma vs. sarcoma
cgagaatctgagtttaatacacagcagcacaactggcgtgttctgagcggcacacctggaacagttggcgatctccatgccagggccctcgcactgccagccaccacactgcggggccgggctgtcgcaggagcgggttcgacagaggcaggatcccacggcgctgccatctgtgtgcgtgcaaggcgtccacggagaccacacaccaaagtgcccatccacggtgagattcctggtctaggaagcaaaaccaagcagaggtgtcagaaaaggttaaagctgaacacataatggagtaaaaattaaaaatccctcataagacaatcaaaactcctctagaatttgttgttgttgttgctgcagttagaaaaagggccaggcgc

SEQ ID NO: 470678 - DNA, 270 bp, Homo sapiens; identical to SEQ ID NO: 338712
  chr5:16794700-16794970
  hypo
  multiple_myeloma vs. sarcoma

SEQ ID NO: 470679 - DNA, 689 bp, Homo sapiens; identical to SEQ ID NO: 338811
  chr5:141248116-141248805
  hypo
  multiple_myeloma vs. melanoma,lung,cervical, head_and_neck,colorectal,uterine,breast

SEQ ID NO: 470680 - DNA, 100 bp, Homo sapiens; identical to SEQ ID NO: 338820
  chr5:148821027-148821127
  hypo
  multiple_myeloma vs. upper_gi,lung,cervical,ovary, colorectal,thyroid,head_and_neck,breast

SEQ ID NO: 470681 - DNA, 413 bp, Homo sapiens; identical to SEQ ID NO: 338821
  chr5:149323779-149324192
  hypo
  multiple_myeloma vs. lung,bladder_and_urothelial,breast, sarcoma

SEQ ID NO: 470682 - DNA, 435 bp, Homo sapiens; identical to SEQ ID NO: 338841
  chr5:159691947-159692382
  hypo
  multiple_myeloma vs. sarcoma

SEQ ID NO: 470683 - DNA, 196 bp, Homo sapiens; identical to SEQ ID NO: 338845
  chr5:168112681-168112877
  hypo
  multiple_myeloma vs. sarcoma,melanoma,head_and_neck, cervical,bladder_and_urothelial,anorectal,breast,colorectal, thyroid,prostate,uterine,lymphoid_neoplasm,upper_gi,non_cancer, pancreas_gallbladder,ovary,renal,lung

SEQ ID NO: 470684 - DNA, 214 bp, Homo sapiens; identical to SEQ ID NO: 338846
  chr5:168189525-168189739
  hypo
  multiple_myeloma vs. lymphoid_neoplasm,uterine, pancreas_gallbladder,cervical,non_cancer,sarcoma, bladder_and_urothelial,head_and_neck,prostate,anorectal,thyroid, breast,colorectal,ovary,melanoma,myeloid_neoplasm

SEQ ID NO: 470685 - DNA, 129 bp, Homo sapiens; identical to SEQ ID NO: 348113
  chr5:168195266-168195395
  hypo
  multiple_myeloma vs. anorectal,thyroid,non_cancer

SEQ ID NO: 470686 - DNA, 144 bp, Homo sapiens; identical to SEQ ID NO: 338848
  chr5:168284824-168284968
  hypo
  multiple_myeloma vs. myeloid_neoplasm, bladder_and_urothelial

SEQ ID NO: 470687 - DNA, 465 bp, Homo sapiens; identical to SEQ ID NO: 338857
  chr5:171766390-171766855
  hypo
  multiple_myeloma vs. liver_bileduct,ovary,head_and_neck, myeloid_neoplasm,upper_gi,melanoma,bladder_and_urothelial

SEQ ID NO: 470688 - DNA, 224 bp, Homo sapiens; identical to SEQ ID NO: 338865
  chr5:172724564-172724788
  hypo
  multiple_myeloma vs. ovary,renal,breast,lung

SEQ ID NO: 470689 - DNA, 501 bp, Homo sapiens; identical to SEQ ID NO: 338866
  chr5:172744598-172745099
  hypo
  multiple_myeloma vs. sarcoma,head_and_neck,anorectal, melanoma,thyroid

SEQ ID NO: 470690 - DNA, 117 bp, Homo sapiens; identical to SEQ ID NO: 338895
  chr5:177802468-177802585
  hypo
  multiple_myeloma vs. ovary

SEQ ID NO: 470691 - DNA, 88 bp, Homo sapiens
  chr5:177882646-177882734
  hypo
  multiple_myeloma vs. uterine,myeloid_neoplasm, bladder_and_urothelial,head_and_neck
cgccatcgcttctgtgtgtttcctctctgccacgcggacggaccgcacctcaaggccgagagctggcacctatcccctgcccacccat

SEQ ID NO: 470692 - DNA, 57 bp, Homo sapiens; identical to SEQ ID NO: 363913
  chr5:177882763-177882820
  hypo
  multiple_myeloma vs. uterine,myeloid_neoplasm, bladder_and_urothelial,head_and_neck

SEQ ID NO: 470693 - DNA, 421 bp, Homo sapiens; identical to SEQ ID NO: 338897
  chr5:177892711-177893132
  hypo
  multiple_myeloma vs. sarcoma

SEQ ID NO: 470694 - DNA, 102 bp, Homo sapiens; identical to SEQ ID NO: 338905
  chr5:178652545-178652647
  hypo
  multiple_myeloma vs. sarcoma

SEQ ID NO: 470695 - DNA, 280 bp, Homo sapiens; identical to SEQ ID NO: 338918
  chr5:180036597-180036877
  hypo
  multiple_myeloma vs. myeloid_neoplasm

SEQ ID NO: 470696 - DNA, 366 bp, Homo sapiens; identical to SEQ ID NO: 363935
  chr5:180055788-180056154
  hypo

SEQ ID NO: 470697 - DNA, 199 bp, Homo sapiens; identical to SEQ ID NO: 338943
  chr6:3579868-3580067
  hypo
  multiple_myeloma vs. head_and_neck

SEQ ID NO: 470698 - DNA, 504 bp, Homo sapiens; identical to SEQ ID NO: 353727
  chr6:3618094-3618598
  hypo
  multiple_myeloma vs. pancreas_gallbladder, bladder_and_urothelial,myeloid_neoplasm,head_and_neck,lung, cervical,breast,prostate

SEQ ID NO: 470699 - DNA, 349 bp, Homo sapiens; identical to SEQ ID NO: 338946
  chr6:3646980-3647329
  hypo
  multiple_myeloma vs. head_and_neck,pancreas_gallbladder

SEQ ID NO: 470700 - DNA, 307 bp, Homo sapiens; identical to SEQ ID NO: 338948
  chr6:3724319-3724626
  hypo
  multiple_myeloma vs. colorectal,upper_gi,lung, bladder_and_urothelial,head_and_neck,lymphoid_neoplasm,breast, pancreas_gallbladder,renal,ovary,uterine,cervical,sarcoma, prostate,liver_bileduct,non_cancer,anorectal,thyroid

SEQ ID NO: 470701 - DNA, 416 bp, Homo sapiens; identical to SEQ ID NO: 338949
  chr6:3725763-3726179
  hypo
  multiple_myeloma vs. liver_bileduct,pancreas_gallbladder, upper_gi,myeloid_neoplasm,breast,head_and_neck, bladder_and_urothelial,colorectal,cervical,lung,anorectal, thyroid,prostate,uterine

SEQ ID NO: 470702 - DNA, 348 bp, Homo sapiens; identical to SEQ ID NO: 338972
  chr6:7882630-7882978
  hypo
  multiple_myeloma vs. ovary,colorectal,sarcoma,melanoma, myeloid_neoplasm,uterine

SEQ ID NO: 470703 - DNA, 327 bp, Homo sapiens; identical to SEQ ID NO: 338973
  chr6:7887548-7887875
  hypo
  multiple_myeloma vs. lung,pancreas_gallbladder, colorectal,liver_bileduct,bladder_and_urothelial,upper_gi, lymphoid_neoplasm,melanoma,sarcoma,head_and_neck,breast,ovary, cervical,uterine,thyroid,non_cancer,renal,prostate,
  CONT. FROM ABOVE: myeloid_neoplasm

SEQ ID NO: 470704 - DNA, 861 bp, Homo sapiens; identical to SEQ ID NO: 338974
  chr6:7888481-7889342
  hypo
  multiple_myeloma vs. lymphoid_neoplasm,upper_gi,lung, liver_bileduct,melanoma,colorectal,pancreas_gallbladder,breast, sarcoma,uterine,renal

SEQ ID NO: 470705 - DNA, 188 bp, Homo sapiens; identical to SEQ ID NO: 338975
  chr6:7890532-7890720
  hypo
  multiple_myeloma vs. melanoma

SEQ ID NO: 470706 - DNA, 242 bp, Homo sapiens; identical to SEQ ID NO: 338978
  chr6:7893721-7893963
  hypo
  multiple_myeloma vs. upper_gi,lung,head_and_neck, colorectal,lymphoid_neoplasm,liver_bileduct, bladder_and_urothelial,sarcoma,ovary,melanoma,myeloid_neoplasm, breast,uterine,renal,thyroid,non_cancer,anorectal,prostate,
  CONT. FROM ABOVE: pancreas_gallbladder

SEQ ID NO: 470707 - DNA, 181 bp, Homo sapiens; identical to SEQ ID NO: 338979
  chr6:7898587-7898768
  hypo
  multiple_myeloma vs. liver_bileduct

SEQ ID NO: 470708 - DNA, 451 bp, Homo sapiens; identical to SEQ ID NO: 338981
  chr6:10319622-10320073
  hypo
  multiple_myeloma vs. melanoma

SEQ ID NO: 470709 - DNA, 955 bp, Homo sapiens; identical to SEQ ID NO: 469926
  chr6:18263786-18264741
  hypo
  multiple_myeloma vs. lung,liver_bileduct, lymphoid_neoplasm,upper_gi,colorectal,myeloid_neoplasm, pancreas_gallbladder

SEQ ID NO: 470710 - DNA, 956 bp, Homo sapiens; identical to SEQ ID NO: 350287
  chr6:18264270-18265226
  hypo
  multiple_myeloma vs. lung,upper_gi,lymphoid_neoplasm, pancreas_gallbladder,head_and_neck,liver_bileduct

SEQ ID NO: 470711 - DNA, 802 bp, Homo sapiens; identical to SEQ ID NO: 339039
  chr6:39158588-39159390
  hypo
  multiple_myeloma vs. anorectal,thyroid,upper_gi,ovary, pancreas_gallbladder

SEQ ID NO: 470712 - DNA, 707 bp, Homo sapiens; identical to SEQ ID NO: 353774
  chr6:40399988-40400695
  hypo
  multiple_myeloma vs. uterine,lymphoid_neoplasm,cervical, breast,non_cancer,prostate,thyroid,colorectal

SEQ ID NO: 470713 - DNA, 204 bp, Homo sapiens; identical to SEQ ID NO: 339064
  chr6:44120364-44120568
  hypo
  multiple_myeloma vs. head_and_neck, bladder_and_urothelial

SEQ ID NO: 470714 - DNA, 115 bp, Homo sapiens; identical to SEQ ID NO: 339073
  chr6:53139871-53139986
  hypo
  multiple_myeloma vs. lung,liver_bileduct, myeloid_neoplasm,breast,sarcoma,cervical,uterine,head_and_neck

SEQ ID NO: 470715 - DNA, 101 bp, Homo sapiens; identical to SEQ ID NO: 339154
  chr6:154727653-154727754
  hypo
  multiple_myeloma vs. liver_bileduct

SEQ ID NO: 470716 - DNA, 146 bp, Homo sapiens; identical to SEQ ID NO: 339155
  chr6:154826922-154827068
  hypo
  multiple_myeloma vs. liver_bileduct

SEQ ID NO: 470717 - DNA, 447 bp, Homo sapiens; identical to SEQ ID NO: 339182
  chr6:160679377-160679824
  hypo
  multiple_myeloma vs. liver_bileduct,head_and_neck

SEQ ID NO: 470718 - DNA, 155 bp, Homo sapiens; identical to SEQ ID NO: 364152
  chr6:161585085-161585240
  hypo
  multiple_myeloma vs. myeloid_neoplasm,uterine,renal, lymphoid_neoplasm,ovary,sarcoma,non_cancer

SEQ ID NO: 470719 - DNA, 2 bp, Homo sapiens
  chr6:161685742-161685744
  hypo
  multiple_myeloma vs. cervical,sarcoma,anorectal,renal, non_cancer,thyroid,bladder_and_urothelial,myeloid_neoplasm, upper_gi,pancreas_gallbladder,ovary,uterine,lymphoid_neoplasm, head_and_neck,prostate,melanoma
ac

SEQ ID NO: 470720 - DNA, 112 bp, Homo sapiens; identical to SEQ ID NO: 339185
  chr6:161725123-161725235
  hypo
  multiple_myeloma vs. sarcoma,ovary

SEQ ID NO: 470721 - DNA, 722 bp, Homo sapiens; identical to SEQ ID NO: 339200
  chr6:168062973-168063695
  hypo
  multiple_myeloma vs. melanoma,ovary

SEQ ID NO: 470722 - DNA, 233 bp, Homo sapiens; identical to SEQ ID NO: 339201
  chr6:168137821-168138054
  hypo
  multiple_myeloma vs. melanoma

SEQ ID NO: 470723 - DNA, 513 bp, Homo sapiens; identical to SEQ ID NO: 339204
  chr6:168529700-168530213
  hypo
  multiple_myeloma vs. prostate,colorectal,uterine,renal, breast,lymphoid_neoplasm,non_cancer,pancreas_gallbladder

SEQ ID NO: 470724 - DNA, 365 bp, Homo sapiens; identical to SEQ ID NO: 339205
  chr6:168672446-168672811
  hypo
  multiple_myeloma vs. myeloid_neoplasm

SEQ ID NO: 470725 - DNA, 611 bp, Homo sapiens; identical to SEQ ID NO: 339206
  chr6:168709592-168710203
  hypo
  multiple_myeloma vs. colorectal

SEQ ID NO: 470726 - DNA, 227 bp, Homo sapiens
  chr6:170339178-170339405
  hypo
  multiple_myeloma vs. non_cancer,colorectal,uterine, head_and_neck,prostate,anorectal,cervical,pancreas_gallbladder, renal
cggggcctcccagcccttcacgcagcgctgacggggcctctgcccaccggccaccctggtctcaagacggagcccacgtctcctgcttgggctggatgagtgacccttccctgcggccatgaacagggagctttaaacgtgttgaggttggaccctgcccagcccggctgaaccccactctgtaggaggcgcaggcatcagacgccggggacgtcatggtggaggag

SEQ ID NO: 470727 - DNA, 229 bp, Homo sapiens; identical to SEQ ID NO: 353862
  chr6:170339543-170339772
  hypo
  multiple_myeloma vs. non_cancer,colorectal,uterine, head_and_neck,prostate,anorectal,cervical,pancreas_gallbladder, renal

SEQ ID NO: 470728 - DNA, 190 bp, Homo sapiens; identical to SEQ ID NO: 339217
  chr7:84219-84409
  hypo
  multiple_myeloma vs. head_and_neck

SEQ ID NO: 470729 - DNA, 154 bp, Homo sapiens; identical to SEQ ID NO: 377877
  chr7:168483-168637
  hypo
  multiple_myeloma vs. lymphoid_neoplasm

SEQ ID NO: 470730 - DNA, 255 bp, Homo sapiens; identical to SEQ ID NO: 339220
  chr7:170034-170289
  hypo
  multiple_myeloma vs. sarcoma,pancreas_gallbladder, lymphoid_neoplasm

SEQ ID NO: 470731 - DNA, 273 bp, Homo sapiens
  chr7:173194-173467
  hypo
  multiple_myeloma vs. cervical
cggaggacaggacccgccccgcgctgccagtgccgaagcttgggttctctgaggactgcgagggggtctcagcactgtgtccacagatggggcagggacctccgcagggaaccttctctcggctgggccagcccaccccaggggctgtagacgagggagttaatgaacacgggatgggttgagccgcctggtttgcccacagaggggcgaggaagggagtggggagtctgctgtgagcggagagaggacagcctgaggcctcaggaacgctgg

SEQ ID NO: 470732 - DNA, 163 bp, Homo sapiens; identical to SEQ ID NO: 364177
  chr7:173496-173659
  hypo
  multiple_myeloma vs. cervical

SEQ ID NO: 470733 - DNA, 736 bp, Homo sapiens; identical to SEQ ID NO: 339225
  chr7:286020-286756
  hypo
  multiple_myeloma vs. head_and_neck

SEQ ID NO: 470734 - DNA, 551 bp, Homo sapiens; identical to SEQ ID NO: 455353
  chr7:287728-288279
  hypo
  multiple_myeloma vs. head_and_neck,cervical,anorectal, non_cancer,prostate,renal,pancreas_gallbladder,liver_bileduct, myeloid_neoplasm,breast,sarcoma,lymphoid_neoplasm,uterine

SEQ ID NO: 470735 - DNA, 172 bp, Homo sapiens; identical to SEQ ID NO: 455354
  chr7:288328-288500
  hypo
  multiple_myeloma vs. head_and_neck,cervical,anorectal, non_cancer,prostate,renal,pancreas_gallbladder,liver_bileduct, myeloid_neoplasm,breast,sarcoma,lymphoid_neoplasm,uterine

SEQ ID NO: 470736 - DNA, 222 bp, Homo sapiens; identical to SEQ ID NO: 455355
  chr7:288057-288279
  hypo
  multiple_myeloma vs. head_and_neck,cervical,anorectal, pancreas_gallbladder,non_cancer,renal,prostate,breast,uterine, sarcoma

SEQ ID NO: 470737 - DNA, 468 bp, Homo sapiens; identical to SEQ ID NO: 348181
  chr7:288328-288796
  hypo
  multiple_myeloma vs. head_and_neck,cervical,anorectal, pancreas_gallbladder,non_cancer,renal,prostate,breast,uterine, sarcoma

SEQ ID NO: 470738 - DNA, 217 bp, Homo sapiens; identical to SEQ ID NO: 339227
  chr7:290557-290774
  hypo
  multiple_myeloma vs. sarcoma

SEQ ID NO: 470739 - DNA, 345 bp, Homo sapiens; identical to SEQ ID NO: 339234
  chr7:378637-378982
  hypo
  multiple_myeloma vs. melanoma

SEQ ID NO: 470740 - DNA, 234 bp, Homo sapiens; identical to SEQ ID NO: 339235
  chr7:380956-381190
  hypo
  multiple_myeloma vs. myeloid_neoplasm,uterine

SEQ ID NO: 470741 - DNA, 365 bp, Homo sapiens; identical to SEQ ID NO: 339239
  chr7:455747-456112
  hypo
  multiple_myeloma vs. pancreas_gallbladder

SEQ ID NO: 470742 - DNA, 183 bp, Homo sapiens; identical to SEQ ID NO: 339240
  chr7:462339-462522
  hypo
  multiple_myeloma vs. head_and_neck

SEQ ID NO: 470743 - DNA, 561 bp, Homo sapiens; identical to SEQ ID NO: 364197
  chr7:462752-463313
  hypo
  multiple_myeloma vs. cervical,head_and_neck,anorectal, pancreas_gallbladder,thyroid,uterine,breast,melanoma,renal

SEQ ID NO: 470744 - DNA, 367 bp, Homo sapiens; identical to SEQ ID NO: 339245
  chr7:531216-531583
  hypo
  multiple_myeloma vs. upper_gi,uterine

SEQ ID NO: 470745 - DNA, 265 bp, Homo sapiens; identical to SEQ ID NO: 339246
  chr7:540536-540801
  hypo
  multiple_myeloma vs. upper_gi,bladder_and_urothelial, pancreas_gallbladder,melanoma,colorectal,head_and_neck

SEQ ID NO: 470746 - DNA, 281 bp, Homo sapiens; identical to SEQ ID NO: 377952
  chr7:1328613-1328894
  hypo
  multiple_myeloma vs. myeloid_neoplasm,lymphoid_neoplasm

SEQ ID NO: 470747 - DNA, 102 bp, Homo sapiens; identical to SEQ ID NO: 455368
  chr7:1460672-1460774
  hypo
  multiple_myeloma vs. thyroid,renal

SEQ ID NO: 470748 - DNA, 30 bp, Homo sapiens; identical to SEQ ID NO: 455369
  chr7:1460958-1460988
  hypo
  multiple_myeloma vs. thyroid,renal

SEQ ID NO: 470749 - DNA, 576 bp, Homo sapiens; identical to SEQ ID NO: 339288
  chr7:1473784-1474360
  hypo
  multiple_myeloma vs. prostate,renal,cervical,lung, head_and_neck,colorectal,ovary,upper_gi,breast,non_cancer, pancreas_gallbladder,melanoma,liver_bileduct, bladder_and_urothelial,uterine

SEQ ID NO: 470750 - DNA, 267 bp, Homo sapiens; identical to SEQ ID NO: 339289
  chr7:1475105-1475372
  hypo
  multiple_myeloma vs. melanoma,sarcoma

SEQ ID NO: 470751 - DNA, 882 bp, Homo sapiens; identical to SEQ ID NO: 339290
  chr7:1476273-1477155
  hypo
  multiple_myeloma vs. liver_bileduct

SEQ ID NO: 470752 - DNA, 883 bp, Homo sapiens; identical to SEQ ID NO: 339291
  chr7:1477156-1478039
  hypo
  multiple_myeloma vs. liver_bileduct

SEQ ID NO: 470753 - DNA, 524 bp, Homo sapiens; identical to SEQ ID NO: 339292
  chr7:1479741-1480265
  hypo
  multiple_myeloma vs. liver_bileduct

SEQ ID NO: 470754 - DNA, 1 bp, Homo sapiens
  chr7:1598548-1598549
  hypo
  multiple_myeloma vs. melanoma
c

SEQ ID NO: 470755 - DNA, 367 bp, Homo sapiens; identical to SEQ ID NO: 339357
  chr7:4153573-4153940
  hypo

SEQ ID NO: 470756 - DNA, 304 bp, Homo sapiens; identical to SEQ ID NO: 364284
  chr7:4349444-4349748
  hypo
  multiple_myeloma vs. cervical,anorectal

SEQ ID NO: 470757 - DNA, 205 bp, Homo sapiens
  chr7:4855734-4855939
  hypo
  multiple_myeloma vs. cervical,thyroid
cgctcagggagcaggaggccaaaaagggcagagccgcctccaggagctggcgagggaggcgccagcagccgtcatgtccaggaatgtgagcccccgacccctcaaccctgcacgaggccctcacccctgtcgaggagctggttgagaagcagtgtcccggagaagaagaagaggtaggcgagcatctgcgaggccacctcggggt

SEQ ID NO: 470758 - DNA, 468 bp, Homo sapiens; identical to SEQ ID NO: 378041
  chr7:4856090-4856558
  hypo
  multiple_myeloma vs. cervical,thyroid

SEQ ID NO: 470759 - DNA, 112 bp, Homo sapiens
  chr7:4857860-4857972
  hypo
  multiple_myeloma vs. anorectal,melanoma,renal,non_cancer, prostate
cggcgcctggtgagccaggccaacactcaccccagcgcgggcctcccaggagcacaggcccccagctgcccctctgccgggcagactgcaccggaggccggcccactcatgg

SEQ ID NO: 470760 - DNA, 258 bp, Homo sapiens; identical to SEQ ID NO: 339371
  chr7:4913172-4913430
  hypo

SEQ ID NO: 470761 - DNA, 527 bp, Homo sapiens; identical to SEQ ID NO: 353922
  chr7:4917102-4917629
  hypo
  multiple_myeloma vs. sarcoma

SEQ ID NO: 470762 - DNA, 175 bp, Homo sapiens; identical to SEQ ID NO: 339453
  chr7:30972844-30973019
  hypo
  multiple_myeloma vs. upper_gi,ovary, bladder_and_urothelial,renal,lung,prostate,head_and_neck

SEQ ID NO: 470763 - DNA, 590 bp, Homo sapiens; identical to SEQ ID NO: 339503
  chr7:50660402-50660992
  hypo
  multiple_myeloma vs. upper_gi,liver_bileduct, pancreas_gallbladder,colorectal

SEQ ID NO: 470764 - DNA, 178 bp, Homo sapiens; identical to SEQ ID NO: 339504
  chr7:50687526-50687704
  hypo
  multiple_myeloma vs. upper_gi,liver_bileduct, head_and_neck,colorectal,lung,cervical,pancreas_gallbladder, uterine,breast,ovary,thyroid

SEQ ID NO: 470765 - DNA, 177 bp, Homo sapiens; identical to SEQ ID NO: 364399
  chr7:50715837-50716014
  hypo
  multiple_myeloma vs. sarcoma,head_and_neck, liver_bileduct

SEQ ID NO: 470766 - DNA, 88 bp, Homo sapiens; identical to SEQ ID NO: 339506
  chr7:50823307-50823395
  hypo
  multiple_myeloma vs. melanoma,anorectal,upper_gi

SEQ ID NO: 470767 - DNA, 332 bp, Homo sapiens; identical to SEQ ID NO: 339507
  chr7:51092672-51093004
  hypo
  multiple_myeloma vs. melanoma,ovary,liver_bileduct

SEQ ID NO: 470768 - DNA, 57 bp, Homo sapiens
  chr7:64345105-64345162
  hypo
  multiple_myeloma vs. sarcoma
cggattcttgcacacagactctttcgggaatggagtccaaagagaagttcccagcgc

SEQ ID NO: 470769 - DNA, 241 bp, Homo sapiens; identical to SEQ ID NO: 378195
  chr7:64345211-64345452
  hypo
  multiple_myeloma vs. sarcoma

SEQ ID NO: 470770 - DNA, 217 bp, Homo sapiens; identical to SEQ ID NO: 339575
  chr7:100405032-100405249
  hypo
  multiple_myeloma vs. bladder_and_urothelial

SEQ ID NO: 470771 - DNA, 380 bp, Homo sapiens; identical to SEQ ID NO: 339576
  chr7:100421158-100421538
  hypo
  multiple_myeloma vs. upper_gi,lung,head_and_neck,sarcoma, cervical,lymphoid_neoplasm,ovary,liver_bileduct,renal,thyroid, prostate,uterine,colorectal,bladder_and_urothelial,non_cancer

SEQ ID NO: 470772 - DNA, 370 bp, Homo sapiens; identical to SEQ ID NO: 364549
  chr7:150889157-150889527
  hypo
  multiple_myeloma vs. ovary,myeloid_neoplasm,upper_gi, breast,anorectal,lymphoid_neoplasm

SEQ ID NO: 470773 - DNA, 128 bp, Homo sapiens; identical to SEQ ID NO: 463893
  chr7:154541944-154542072
  hypo
  multiple_myeloma vs. lymphoid_neoplasm,thyroid

SEQ ID NO: 470774 - DNA, 135 bp, Homo sapiens; identical to SEQ ID NO: 354096
  chr7:154542290-154542425
  hypo
  multiple_myeloma vs. lymphoid_neoplasm,thyroid

SEQ ID NO: 470775 - DNA, 711 bp, Homo sapiens; identical to SEQ ID NO: 378374
  chr7:155623753-155624464
  hypo
  multiple_myeloma vs. anorectal,pancreas_gallbladder

SEQ ID NO: 470776 - DNA, 593 bp, Homo sapiens; identical to SEQ ID NO: 339709
  chr7:155679115-155679708
  hypo
  multiple_myeloma vs. myeloid_neoplasm,upper_gi, colorectal,pancreas_gallbladder,lymphoid_neoplasm,cervical

SEQ ID NO: 470777 - DNA, 270 bp, Homo sapiens; identical to SEQ ID NO: 378377
  chr7:155913340-155913610
  hypo
  multiple_myeloma vs. lymphoid_neoplasm,head_and_neck

SEQ ID NO: 470778 - DNA, 288 bp, Homo sapiens; identical to SEQ ID NO: 339712
  chr7:155916075-155916363
  hypo
  multiple_myeloma vs. lymphoid_neoplasm,anorectal,thyroid, uterine,head_and_neck,non_cancer,cervical,prostate,colorectal

SEQ ID NO: 470779 - DNA, 315 bp, Homo sapiens; identical to SEQ ID NO: 339738
  chr7:157410957-157411272
  hypo
  multiple_myeloma vs. anorectal

SEQ ID NO: 470780 - DNA, 37 bp, Homo sapiens
  chr7:157464624-157464661
  hypo
  multiple_myeloma vs. sarcoma
cgctgtaccccaagaaggggacgggtggggcagcagc

SEQ ID NO: 470781 - DNA, 232 bp, Homo sapiens; identical to SEQ ID NO: 339746
  chr7:157507378-157507610
  hypo
  multiple_myeloma vs. myeloid_neoplasm

SEQ ID NO: 470782 - DNA, 3 bp, Homo sapiens
  chr7:157511449-157511452
  hypo
  multiple_myeloma vs. lymphoid_neoplasm,anorectal,renal, non_cancer,prostate
cgg

SEQ ID NO: 470783 - DNA, 115 bp, Homo sapiens; identical to SEQ ID NO: 354113
  chr7:157511495-157511610
  hypo
  multiple_myeloma vs. lymphoid_neoplasm,anorectal,renal, non_cancer,prostate

SEQ ID NO: 470784 - DNA, 408 bp, Homo sapiens; identical to SEQ ID NO: 339749
  chr7:157513007-157513415
  hypo
  multiple_myeloma vs. lymphoid_neoplasm, pancreas_gallbladder

SEQ ID NO: 470785 - DNA, 250 bp, Homo sapiens; identical to SEQ ID NO: 339753
  chr7:157589680-157589930
  hypo
  multiple_myeloma vs. anorectal,thyroid,non_cancer, prostate

SEQ ID NO: 470786 - DNA, 229 bp, Homo sapiens
  chr7:157607768-157607997
  hypo
  multiple_myeloma vs. thyroid
cgcgggaggcagtggagacgtggaagcaggctccggctgctgggcctgcatgaccggtttccctgcagaagattctgcgcccttcagcctcaccgtcctcacctggcctgggtgctgctgtgggcaggcgctgggcacgctgggaagagcagggccagccgtttgcaggacgggaggctgaggctgtgtgcacctcctgagggctgggccacaggtgggctcaggcctg

SEQ ID NO: 470787 - DNA, 25 bp, Homo sapiens
  chr7:157608040-157608065
  hypo
  multiple_myeloma vs. thyroid
cagggtgccaggcctaggcctccgc

SEQ ID NO: 470788 - DNA, 203 bp, Homo sapiens; identical to SEQ ID NO: 339758
  chr7:157642963-157643166
  hypo
  multiple_myeloma vs. anorectal,thyroid,non_cancer, pancreas_gallbladder,head_and_neck,uterine,prostate, lymphoid_neoplasm

SEQ ID NO: 470789 - DNA, 273 bp, Homo sapiens; identical to SEQ ID NO: 339764
  chr7:157738113-157738386
  hypo
  multiple_myeloma vs. colorectal

SEQ ID NO: 470790 - DNA, 145 bp, Homo sapiens; identical to SEQ ID NO: 339765
  chr7:157744287-157744432
  hypo
  multiple_myeloma vs. anorectal,lymphoid_neoplasm, pancreas_gallbladder,non_cancer,uterine,renal,prostate

SEQ ID NO: 470791 - DNA, 39 bp, Homo sapiens; identical to SEQ ID NO: 463927
  chr7:157934555-157934594
  hypo
  multiple_myeloma vs. lymphoid_neoplasm,anorectal,thyroid, prostate

SEQ ID NO: 470792 - DNA, 92 bp, Homo sapiens; identical to SEQ ID NO: 348285
  chr7:157934659-157934751
  hypo
  multiple_myeloma vs. lymphoid_neoplasm,anorectal,thyroid, prostate

SEQ ID NO: 470793 - DNA, 264 bp, Homo sapiens; identical to SEQ ID NO: 339783
  chr7:158072920-158073184
  hypo
  multiple_myeloma vs. head_and_neck,lymphoid_neoplasm

SEQ ID NO: 470794 - DNA, 377 bp, Homo sapiens
  chr8:972329-972706
  hypo
  multiple_myeloma vs. lymphoid_neoplasm
cggtcccgtgccgaggtagacactctaaacaccacccaccctccctgggagtggacagtcccgtgccaaggtagacgctccaaacagcacccaccctccctgggagtggacggtcccgtgccaaggtagacactccagccgccatccatcctccctgggattggacggtcccatgccgaggtagacactccagccgccacccatcctccctgggagtggacggtcacgtgccgaggtagacactccagccgccacccatcctccctgggagtggacactcccgtgcttaggtagatgctccaaacagcacccaccctccctgggagtggacggtcccgtgccgaggtagacgctccaaacagcacccaccctccctg

SEQ ID NO: 470795 - DNA, 132 bp, Homo sapiens; identical to SEQ ID NO: 463950
  chr8:1471350-1471482
  hypo
  multiple_myeloma vs. anorectal,thyroid

SEQ ID NO: 470796 - DNA, 49 bp, Homo sapiens; identical to SEQ ID NO: 364653
  chr8:1471664-1471713
  hypo
  multiple_myeloma vs. anorectal,thyroid

SEQ ID NO: 470797 - DNA, 93 bp, Homo sapiens
  chr8:1783965-1784058
  hypo
  multiple_myeloma vs. melanoma
cggcctgacgcacacggcatgaaacggtccttcagcctcggtgtctctgggctccctctctgactgaatgcatcatctttttgtttaaaacca

SEQ ID NO: 470798 - DNA, 2 bp, Homo sapiens
  chr8:1784095-1784097
  hypo
  multiple_myeloma vs. melanoma
cc

SEQ ID NO: 470799 - DNA, 494 bp, Homo sapiens; identical to SEQ ID NO: 339822
  chr8:1797609-1798103
  hypo
  multiple_myeloma vs. melanoma

SEQ ID NO: 470800 - DNA, 329 bp, Homo sapiens; identical to SEQ ID NO: 339823
  chr8:1885046-1885375
  hypo
  multiple_myeloma vs. lung

SEQ ID NO: 470801 - DNA, 166 bp, Homo sapiens; identical to SEQ ID NO: 339830
  chr8:8651879-8652045
  hypo
  multiple_myeloma vs. lung,liver_bileduct,upper_gi, prostate,pancreas_gallbladder,colorectal

SEQ ID NO: 470802 - DNA, 110 bp, Homo sapiens; identical to SEQ ID NO: 339831
  chr8:8680452-8680562
  hypo
  multiple_myeloma vs. upper_gi,lung,liver_bileduct, colorectal

SEQ ID NO: 470803 - DNA, 59 bp, Homo sapiens; identical to SEQ ID NO: 339832
  chr8:8680894-8680953
  hypo
  multiple_myeloma vs. liver_bileduct

SEQ ID NO: 470804 - DNA, 62 bp, Homo sapiens
  chr8:8681197-8681259
  hypo
  multiple_myeloma vs. lung,upper_gi
cgtcttcagtctttgacacaggtaatgaacccacaggtcaccgagaagagcatcacctgcga

SEQ ID NO: 470805 - DNA, 15 bp, Homo sapiens
  chr8:8681353-8681368
  hypo
  multiple_myeloma vs. lung,upper_gi
tgcctgtctccatgc

SEQ ID NO: 470806 - DNA, 69 bp, Homo sapiens
  chr8:41643317-41643386
  hypo
  multiple_myeloma vs. myeloid_neoplasm
cgtccattgctcctcggtgctttccagaccctttaaacaccctggcggagccttgctcggcccttctgg

SEQ ID NO: 470807 - DNA, 207 bp, Homo sapiens; identical to SEQ ID NO: 339902
  chr8:49241546-49241753
  hypo
  multiple_myeloma vs. sarcoma

SEQ ID NO: 470808 - DNA, 69 bp, Homo sapiens; identical to SEQ ID NO: 457170
  chr8:49334914-49334983
  hypo
  multiple_myeloma vs. bladder_and_urothelial,melanoma, anorectal,thyroid,non_cancer,lymphoid_neoplasm,prostate,renal, head_and_neck,cervical,sarcoma,pancreas_gallbladder,uterine

SEQ ID NO: 470809 - DNA, 201 bp, Homo sapiens; identical to SEQ ID NO: 339904
  chr8:49339738-49339939
  hypo
  multiple_myeloma vs. melanoma,sarcoma,renal,thyroid, non_cancer,myeloid_neoplasm

SEQ ID NO: 470810 - DNA, 32 bp, Homo sapiens
  chr8:49382262-49382294
  hypo
  multiple_myeloma vs. cervical,bladder_and_urothelial, thyroid,melanoma,non_cancer,renal,lymphoid_neoplasm, head_and_neck,pancreas_gallbladder,uterine,prostate,anorectal, myeloid_neoplasm
cgggaaaagtagacgtcaatcaggtggaaaag

SEQ ID NO: 470811 - DNA, 439 bp, Homo sapiens; identical to SEQ ID NO: 354183
  chr8:49382383-49382822
  hypo
  multiple_myeloma vs. cervical,bladder_and_urothelial, thyroid,melanoma,non_cancer,renal,lymphoid_neoplasm, head_and_neck,pancreas_gallbladder,uterine,prostate,anorectal, myeloid_neoplasm

SEQ ID NO: 470812 - DNA, 97 bp, Homo sapiens
  chr8:49390203-49390300
  hypo
  multiple_myeloma vs. melanoma,renal,head_and_neck
cggacactcactacagcccggtgcctgcggagtattccgaacgcgagatccaaggaaaccacgaaggctcctctgcgggctcccttgcccctctgcg

SEQ ID NO: 470813 - DNA, 52 bp, Homo sapiens; identical to SEQ ID NO: 364719
  chr8:49390625-49390677
  hypo
  multiple_myeloma vs. melanoma,renal,head_and_neck

SEQ ID NO: 470814 - DNA, 211 bp, Homo sapiens
  chr8:49808471-49808682
  hypo
  multiple_myeloma vs. melanoma
cgaagcactatatgagactataaatggaattaatttttgtgaaaacaagaaaaggagtccccgaattaattactgctgtaagattgagcttgagaatttgtcttacaaaatcttttaataatgtattattctactcacaaaacagatattggttttgtgcctagtatgttccctgaggtgtacagggaacctcaaggagctcccagactat

SEQ ID NO: 470815 - DNA, 206 bp, Homo sapiens; identical to SEQ ID NO: 463955
  chr8:56364032-56364238
  hypo
  multiple_myeloma vs. lymphoid_neoplasm

SEQ ID NO: 470816 - DNA, 159 bp, Homo sapiens; identical to SEQ ID NO: 378583
  chr8:56364333-56364492
  hypo
  multiple_myeloma vs. lymphoid_neoplasm

SEQ ID NO: 470817 - DNA, 378 bp, Homo sapiens; identical to SEQ ID NO: 378737
  chr8:142349773-142350151
  hypo
  multiple_myeloma vs. lung

SEQ ID NO: 470818 - DNA, 165 bp, Homo sapiens; identical to SEQ ID NO: 340087
  chr8:142590914-142591079
  hypo
  multiple_myeloma vs. lymphoid_neoplasm

SEQ ID NO: 470819 - DNA, 77 bp, Homo sapiens; identical to SEQ ID NO: 463979
  chr8:142630171-142630248
  hypo
  multiple_myeloma vs. anorectal,thyroid,non_cancer

SEQ ID NO: 470820 - DNA, 337 bp, Homo sapiens; identical to SEQ ID NO: 364861
  chr8:142630288-142630625
  hypo
  multiple_myeloma vs. anorectal,thyroid,non_cancer

SEQ ID NO: 470821 - DNA, 182 bp, Homo sapiens
  chr8:142880985-142881167
  hypo
  multiple_myeloma vs. thyroid,renal,anorectal,non_cancer
cggccacccctccttgcctggccatcctccttgccatgtcacccctcaacgccaacccgtgcatgtgggggtgcatgaccagctgacatgggagtgtgggtcagccccagggccaagggggaagtgggtgagccaagatcccggagcatgacaagggccctggcagctgattggcaggggag

SEQ ID NO: 470822 - DNA, 122 bp, Homo sapiens; identical to SEQ ID NO: 364863
  chr8:142881196-142881318
  hypo
  multiple_myeloma vs. thyroid,renal,anorectal,non_cancer

SEQ ID NO: 470823 - DNA, 121 bp, Homo sapiens
  chr8:143054871-143054992
  hypo
  multiple_myeloma vs. anorectal
gccctcacggtgcctgcgctcacgggtgcctgcgctcacggtgcctgggctcacggtgcctgcgctcacgggtgcctgcgctcacggtgcctgcgctcacgggtgcctgcgctcacggtgc

SEQ ID NO: 470824 - DNA, 241 bp, Homo sapiens; identical to SEQ ID NO: 340094
  chr8:143234575-143234816
  hypo
  multiple_myeloma vs. lymphoid_neoplasm

SEQ ID NO: 470825 - DNA, 311 bp, Homo sapiens; identical to SEQ ID NO: 364879
  chr8:143614687-143614998
  hypo
  multiple_myeloma vs. thyroid,non_cancer,anorectal, pancreas_gallbladder

SEQ ID NO: 470826 - DNA, 242 bp, Homo sapiens
  chr8:143660391-143660633
  hypo
  multiple_myeloma vs. breast,anorectal,uterine
cgtcagagagagcctcaaaccgtcagcgttggccaccgccttgcactgcgcccatgcttggagccccgagccccaggccaggccctgcccgcccgctcagccctgctcgccatgctcccgcccttgctgctggggcggccggcagggagcccacctgaggcgcagagggaggccattgccgggcgctgccaccatgaggagtcccgagtcctggggagacaggtcctgtgcagggaacagag

SEQ ID NO: 470827 - DNA, 5 bp, Homo sapiens
  chr8:143660669-143660674
  hypo
  multiple_myeloma vs. breast,anorectal,uterine
actcc

SEQ ID NO: 470828 - DNA, 260 bp, Homo sapiens; identical to SEQ ID NO: 354278
  chr8:143662794-143663054
  hypo
  multiple_myeloma vs. anorectal,thyroid,breast,non_cancer, prostate,myeloid_neoplasm,colorectal,lymphoid_neoplasm, pancreas_gallbladder,cervical

SEQ ID NO: 470829 - DNA, 200 bp, Homo sapiens; identical to SEQ ID NO: 354303
  chr9:2876419-2876619
  hypo
  multiple_myeloma vs. ovary,sarcoma,cervical

SEQ ID NO: 470830 - DNA, 715 bp, Homo sapiens; identical to SEQ ID NO: 463987
  chr9:2933129-2933844
  hypo
  multiple_myeloma vs. sarcoma

SEQ ID NO: 470831 - DNA, 98 bp, Homo sapiens; identical to SEQ ID NO: 378822
  chr9:2933873-2933971
  hypo
  multiple_myeloma vs. sarcoma

SEQ ID NO: 470832 - DNA, 224 bp, Homo sapiens; identical to SEQ ID NO: 378853
  chr9:37928524-37928748
  hypo
  multiple_myeloma vs. liver_bileduct

SEQ ID NO: 470833 - DNA, 360 bp, Homo sapiens; identical to SEQ ID NO: 340203
  chr9:37950454-37950814
  hypo
  multiple_myeloma vs. liver_bileduct,melanoma,lung, head_and_neck

SEQ ID NO: 470834 - DNA, 233 bp, Homo sapiens; identical to SEQ ID NO: 340210
  chr9:76089552-76089785
  hypo
  multiple_myeloma vs. melanoma

SEQ ID NO: 470835 - DNA, 110 bp, Homo sapiens; identical to SEQ ID NO: 340217
  chr9:80475592-80475702
  hypo
  multiple_myeloma vs. upper_gi,ovary,lung, bladder_and_urothelial,pancreas_gallbladder,colorectal, liver_bileduct,anorectal,uterine

SEQ ID NO: 470836 - DNA, 152 bp, Homo sapiens; identical to SEQ ID NO: 354338
  chr9:92227900-92228052
  hypo
  multiple_myeloma vs. anorectal,uterine,colorectal, prostate,breast,cervical,non_cancer,ovary,pancreas_gallbladder, renal

SEQ ID NO: 470837 - DNA, 107 bp, Homo sapiens; identical to SEQ ID NO: 340259
  chr9:100299592-100299699
  hypo
  multiple_myeloma vs. melanoma,myeloid_neoplasm

SEQ ID NO: 470838 - DNA, 181 bp, Homo sapiens; identical to SEQ ID NO: 340270
  chr9:109689799-109689980
  hypo
  multiple_myeloma vs. lung,pancreas_gallbladder,upper_gi, renal,ovary

SEQ ID NO: 470839 - DNA, 250 bp, Homo sapiens; identical to SEQ ID NO: 340271
  chr9:109690731-109690981
  hypo
  multiple_myeloma vs. lung,upper_gi

SEQ ID NO: 470840 - DNA, 179 bp, Homo sapiens; identical to SEQ ID NO: 340273
  chr9:112040343-112040522
  hypo
  multiple_myeloma vs. lung

SEQ ID NO: 470841 - DNA, 149 bp, Homo sapiens; identical to SEQ ID NO: 340283
  chr9:116708859-116709008
  hypo
  multiple_myeloma vs. liver_bileduct,upper_gi,lung,renal, pancreas_gallbladder

SEQ ID NO: 470842 - DNA, 127 bp, Homo sapiens; identical to SEQ ID NO: 340284
  chr9:116728180-116728307
  hypo
  multiple_myeloma vs. pancreas_gallbladder,melanoma

SEQ ID NO: 470843 - DNA, 121 bp, Homo sapiens; identical to SEQ ID NO: 340285
  chr9:116749805-116749926
  hypo
  multiple_myeloma vs. melanoma,liver_bileduct, bladder_and_urothelial,pancreas_gallbladder

SEQ ID NO: 470844 - DNA, 280 bp, Homo sapiens; identical to SEQ ID NO: 340286
  chr9:116750660-116750940
  hypo
  multiple_myeloma vs. upper_gi,melanoma,liver_bileduct, bladder_and_urothelial,anorectal,head_and_neck,breast,thyroid, renal,colorectal,prostate,ovary,pancreas_gallbladder,non_cancer, lymphoid_neoplasm,lung,uterine,cervical

SEQ ID NO: 470845 - DNA, 134 bp, Homo sapiens; identical to SEQ ID NO: 340287
  chr9:116761540-116761674
  hypo
  multiple_myeloma vs. liver_bileduct

SEQ ID NO: 470846 - DNA, 244 bp, Homo sapiens; identical to SEQ ID NO: 365021
  chr9:116770596-116770840
  hypo
  multiple_myeloma vs. liver_bileduct

SEQ ID NO: 470847 - DNA, 299 bp, Homo sapiens; identical to SEQ ID NO: 340289
  chr9:116790949-116791248
  hypo
  multiple_myeloma vs. colorectal,liver_bileduct, pancreas_gallbladder,ovary,lung,bladder_and_urothelial,upper_gi, lymphoid_neoplasm,melanoma,head_and_neck,cervical,prostate, anorectal,breast,thyroid,renal,non_cancer,uterine,sarcoma,
  CONT. FROM ABOVE: myeloid_neoplasm

SEQ ID NO: 470848 - DNA, 113 bp, Homo sapiens; identical to SEQ ID NO: 340290
  chr9:116796590-116796703
  hypo
  multiple_myeloma vs. ovary,upper_gi, bladder_and_urothelial,melanoma,lung,myeloid_neoplasm, lymphoid_neoplasm,liver_bileduct,pancreas_gallbladder,breast, renal,head_and_neck,cervical,uterine,prostate,anorectal,
  CONT. FROM ABOVE: non_cancer,colorectal

SEQ ID NO: 470849 - DNA, 946 bp, Homo sapiens; identical to SEQ ID NO: 345970
  chr9:116810967-116811913
  hypo
  multiple_myeloma vs. lung,pancreas_gallbladder, liver_bileduct,colorectal,head_and_neck,sarcoma,uterine, melanoma,breast,renal,lymphoid_neoplasm,myeloid_neoplasm,ovary, cervical,upper_gi,non_cancer,bladder_and_urothelial,anorectal,
  CONT. FROM ABOVE: thyroid,prostate

SEQ ID NO: 470850 - DNA, 957 bp, Homo sapiens
  chr9:116811431-116812388
  hypo
  multiple_myeloma vs. lung,melanoma,sarcoma, pancreas_gallbladder,bladder_and_urothelial,liver_bileduct, renal,cervical,lymphoid_neoplasm,breast,head_and_neck,anorectal, thyroid,myeloid_neoplasm,uterine,colorectal,ovary,upper_gi,
  CONT. FROM ABOVE: non_cancer,prostate
cggattgccgggtgagcacgtccgccttctccaaggccggcatgtgccttcgctgctcagcctgtgccttgaactcggtggtgcagagcgtgctgagcaagcggacactgcaggcccgcagcatgcacgaggtcatcgagctgctcaacgtgtgcgaggacctggcgggctccacgggcctggccaaggagaccttcgggtcgctggaggagacgtctccaccaccctgctggaactcggtgacggactcactgttgctggtgcatgagcgctatgagcagatctgcgagttctacagccgggccaagaagatgaacctcatccagagcctcaacaagcacctgctcagcaacctggcggccatcctgacgccggtgaagcaggcagtcatcgagctgagcaacgagagccagcccaccctgcagctggtgctgcccacctacgtcaggctggagaagctgttcacggccaaggccaacgacgcaggcactgtcagcaagctctgccacctcttcctggaggcgctcaaggagaacttcaaggtgcacccggcccacaaggtggccatgatcctggacccgcagcagaagctgcggcctgtgccaccctaccagcacgaggagatcatcggcaaggtctgtgagctcatcaacgaggtgaaggagtcctgggccgaggaggccgacttcgagcccgctgccaagaagccccgctctgctgccgtcgagaaccccgcagctcaggaagatgatcggctaggcaaaaatgaagtgtacgattacctgcaggagcccctcttccaggctacccctgatctcttccagtactggtcgtgcgttacccaaaagcacacaaaactcgccaagctcgccttctggctcctggcggttccggccgtgggcgccagaagcgggtgtgtaaatatgtgtgaacaagcgcttctaatcaaacggaggc

SEQ ID NO: 470851 - DNA, 390 bp, Homo sapiens; identical to SEQ ID NO: 340293
  chr9:116813618-116814008
  hypo
  multiple_myeloma vs. pancreas_gallbladder,melanoma,lung, head_and_neck,breast,ovary,prostate,cervical, bladder_and_urothelial,upper_gi,anorectal,colorectal,thyroid, uterine,non_cancer,liver_bileduct,sarcoma,renal

SEQ ID NO: 470852 - DNA, 216 bp, Homo sapiens; identical to SEQ ID NO: 340294
  chr9:116857267-116857483
  hypo
  multiple_myeloma vs. liver_bileduct

SEQ ID NO: 470853 - DNA, 404 bp, Homo sapiens; identical to SEQ ID NO: 340295
  chr9:116971577-116971981
  hypo
  multiple_myeloma vs. ovary,melanoma,pancreas_gallbladder

SEQ ID NO: 470854 - DNA, 124 bp, Homo sapiens; identical to SEQ ID NO: 340296
  chr9:117045899-117046023
  hypo
  multiple_myeloma vs. bladder_and_urothelial, liver_bileduct

SEQ ID NO: 470855 - DNA, 250 bp, Homo sapiens; identical to SEQ ID NO: 340303
  chr9:124289769-124290019
  hypo
  multiple_myeloma vs. sarcoma

SEQ ID NO: 470856 - DNA, 380 bp, Homo sapiens; identical to SEQ ID NO: 340328
  chr9:129455261-129455641
  hypo
  multiple_myeloma vs. myeloid_neoplasm, bladder_and_urothelial,ovary,uterine,prostate,cervical, anorectal,breast,thyroid,lymphoid_neoplasm,head_and_neck

SEQ ID NO: 470857 - DNA, 275 bp, Homo sapiens; identical to SEQ ID NO: 340329
  chr9:129458627-129458902
  hypo
  multiple_myeloma vs. ovary,anorectal,thyroid,renal, prostate

SEQ ID NO: 470858 - DNA, 233 bp, Homo sapiens; identical to SEQ ID NO: 340335
  chr9:130907031-130907264
  hypo
  multiple_myeloma vs. sarcoma,bladder_and_urothelial,lung

SEQ ID NO: 470859 - DNA, 294 bp, Homo sapiens; identical to SEQ ID NO: 340349
  chr9:132501760-132502054
  hypo
  multiple_myeloma vs. head_and_neck,renal,colorectal, bladder_and_urothelial,cervical,melanoma,breast,lung,uterine, pancreas_gallbladder,upper_gi,myeloid_neoplasm

SEQ ID NO: 470860 - DNA, 113 bp, Homo sapiens; identical to SEQ ID NO: 340356
  chr9:133300407-133300520
  hypo
  multiple_myeloma vs. ovary,sarcoma,colorectal,cervical, uterine

SEQ ID NO: 470861 - DNA, 64 bp, Homo sapiens
  chr9:133799052-133799116
  hypo
  multiple_myeloma vs. cervical,anorectal
cggaatgcccgggttcaggtacacagcctcacggtccccggtgcctgccctgccgcccgcccag

SEQ ID NO: 470862 - DNA, 399 bp, Homo sapiens; identical to SEQ ID NO: 365094
  chr9:133799196-133799595
  hypo
  multiple_myeloma vs. cervical,anorectal

SEQ ID NO: 470863 - DNA, 33 bp, Homo sapiens; identical to SEQ ID NO: 348382
  chr9:135865230-135865263
  hypo
  multiple_myeloma vs. myeloid_neoplasm,thyroid,non_cancer, anorectal

SEQ ID NO: 470864 - DNA, 381 bp, Homo sapiens; identical to SEQ ID NO: 340393
  chr9:136372653-136373034
  hypo
  multiple_myeloma vs. cervical,anorectal, pancreas_gallbladder,breast,bladder_and_urothelial,prostate, uterine,lymphoid_neoplasm,renal,non_cancer,head_and_neck,lung, thyroid,colorectal,myeloid_neoplasm,liver_bileduct,ovary

SEQ ID NO: 470865 - DNA, 321 bp, Homo sapiens; identical to SEQ ID NO: 340395
  chr9:136380597-136380918
  hypo
  multiple_myeloma vs. breast,uterine,ovary,renal, non_cancer,prostate,sarcoma

SEQ ID NO: 470866 - DNA, 19 bp, Homo sapiens
  chr9:136383917-136383936
  hypo
  multiple_myeloma vs. lymphoid_neoplasm,head_and_neck, bladder_and_urothelial,colorectal,breast,prostate,non_cancer, anorectal,cervical,sarcoma,thyroid,uterine,pancreas_gallbladder, renal,myeloid_neoplasm,lung,ovary,liver_bileduct,upper_gi
cgaggcaggaggagtcaga

SEQ ID NO: 470867 - DNA, 115 bp, Homo sapiens; identical to SEQ ID NO: 345980
  chr9:136384021-136384136
  hypo
  multiple_myeloma vs. lymphoid_neoplasm,head_and_neck, bladder_and_urothelial,colorectal,breast,prostate,non_cancer, anorectal,cervical,sarcoma,thyroid,uterine,pancreas_gallbladder, renal,myeloid_neoplasm,lung,ovary,liver_bileduct,upper_gi

SEQ ID NO: 470868 - DNA, 574 bp, Homo sapiens; identical to SEQ ID NO: 340397
  chr9:136385211-136385785
  hypo
  multiple_myeloma vs. lymphoid_neoplasm,myeloid_neoplasm, prostate,non_cancer,uterine,colorectal,thyroid,liver_bileduct, breast

SEQ ID NO: 470869 - DNA, 146 bp, Homo sapiens; identical to SEQ ID NO: 340398
  chr9:136393635-136393781
  hypo
  multiple_myeloma vs. myeloid_neoplasm

SEQ ID NO: 470870 - DNA, 313 bp, Homo sapiens; identical to SEQ ID NO: 340399
  chr9:136397028-136397341
  hypo
  multiple_myeloma vs. anorectal,myeloid_neoplasm,uterine

SEQ ID NO: 470871 - DNA, 643 bp, Homo sapiens; identical to SEQ ID NO: 340400
  chr9:136402186-136402829
  hypo
  multiple_myeloma vs. thyroid,renal,myeloid_neoplasm, uterine,sarcoma

SEQ ID NO: 470872 - DNA, 188 bp, Homo sapiens; identical to SEQ ID NO: 340401
  chr9:136508536-136508724
  hypo
  multiple_myeloma vs. cervical,thyroid,uterine,anorectal, prostate,non_cancer

SEQ ID NO: 470873 - DNA, 51 bp, Homo sapiens; identical to SEQ ID NO: 463997
  chr9:137623301-137623352
  hypo
  multiple_myeloma vs. lymphoid_neoplasm,anorectal,thyroid, renal,non_cancer,head_and_neck,breast,sarcoma, bladder_and_urothelial,pancreas_gallbladder,prostate,uterine, myeloid_neoplasm,colorectal,upper_gi,lung

SEQ ID NO: 470874 - DNA, 153 bp, Homo sapiens; identical to SEQ ID NO: 345982
  chr9:137623543-137623696
  hypo
  multiple_myeloma vs. lymphoid_neoplasm,anorectal,thyroid, renal,non_cancer,head_and_neck,breast,sarcoma, bladder_and_urothelial,pancreas_gallbladder,prostate,uterine, myeloid_neoplasm,colorectal,upper_gi,lung

SEQ ID NO: 470875 - DNA, 473 bp, Homo sapiens; identical to SEQ ID NO: 354414
  chr9:137642188-137642661
  hypo
  multiple_myeloma vs. sarcoma,breast,uterine

SEQ ID NO: 470876 - DNA, 305 bp, Homo sapiens; identical to SEQ ID NO: 340409
  chr9:137645508-137645813
  hypo
  multiple_myeloma vs. breast,bladder_and_urothelial

SEQ ID NO: 470877 - DNA, 163 bp, Homo sapiens; identical to SEQ ID NO: 340410
  chr9:137646079-137646242
  hypo
  multiple_myeloma vs. lymphoid_neoplasm,sarcoma

SEQ ID NO: 470878 - DNA, 191 bp, Homo sapiens; identical to SEQ ID NO: 365124
  chr9:137648346-137648537
  hypo
  multiple_myeloma vs. sarcoma

SEQ ID NO: 470879 - DNA, 752 bp, Homo sapiens
  chr9:138011461-138012213
  hypo
  multiple_myeloma vs. lymphoid_neoplasm,head_and_neck, melanoma
cgggcacggggcaggtggtctacaacggttctatctacttcaacaagttccagagccacatcatcatcaggtttgacctgaagacagagaccatcctcaagacccgcagcctggactatgccggttacaacaacatgtaccactacgcctggggtggccactcggacatcgacctcatggtggacgagagcgggctgtgggccgtgtacgccaccaaccagaacgctggcaacatcgtggtcagtaggctggaccccgtgtccctgcagaccctgcagacctggaacacgagctaccccaagcgcagcgccggggaggccttcatcatctgcggcacgctgtacgtcaccaacggctactcagggggtaccaaggtccactatgcataccagaccaatgcctccacctatgaatacatcgacatcccattccagaacaaatactcccacatctccatgctggactacaaccccaaggaccgggccctgtatgcctggaacaacggccaccagatcctctacaacgtgaccctcttccacgtcatccgctccgacgagttgtagctccctcctcctggaagccaagggcccacgtcctcaccacaaagggactcctgtgaaactgctgccaaaaagataccaataacactaacaataccgatcttgaaaaatcatcagcagtgcggattctgacatcgagggatggcattacctccgtgtttctccctttcgagccggcgggccacagacgtc

SEQ ID NO: 470880 - DNA, 748 bp, Homo sapiens
  chr9:138011717-138012465
  hypo
  multiple_myeloma vs. head_and_neck,lymphoid_neoplasm
cgtgtccctgcagaccctgcagacctggaacacgagctaccccaagcgcagcgccggggaggccttcatcatctgcggcacgctgtacgtcaccaacggctactcagggggtaccaaggtccactatgcataccagaccaatgcctccacctatgaatacatcgacatcccattccagaacaaatactcccacatctccatgctggactacaaccccaaggaccgggccctgtatgcctggaacaacggccaccagatcctctacaacgtgaccctcttccacgtcatccgctccgacgagttgtagctccctcctcctggaagccaagggcccacgtcctcaccacaaagggactcctgtgaaactgctgccaaaaagataccaataacactaacaataccgatcttgaaaaatcatcagcagtgcggattctgacatcgagggatggcattacctccgtgtttctccctttcgagccggcgggccacagacgtcggaagaaactcccgtatttgcagctggaactgcagcccacggcgccccggttttcctccccgccctgtccctctctggtcaaacaacatactaaagaggcgaggcaatgactgttggccagttctcaccggggaaaaacccactgttaggatggcatgaacatttccttagatcgtggtcagctccgaggaatgtggcgtccaggctctttgagagccatgggctgcacccggccgtaggctagtgtaactc

SEQ ID NO: 470881 - DNA, 335 bp, Homo sapiens; identical to SEQ ID NO: 340413
  chr9:138143914-138144249
  hypo
  multiple_myeloma vs. anorectal,breast,uterine,prostate, cervical,colorectal,head_and_neck,lymphoid_neoplasm,non_cancer

SEQ ID NO: 470882 - DNA, 172 bp, Homo sapiens; identical to SEQ ID NO: 365127
  chr9:138247974-138248146
  hypo
  multiple_myeloma vs. lymphoid_neoplasm,breast,cervical, head_and_neck,non_cancer,prostate,renal

SEQ ID NO: 470883 - DNA, 79 bp, Homo sapiens; identical to SEQ ID NO: 365128
  chr9:138265272-138265351
  hypo
  multiple_myeloma vs. thyroid

SEQ ID NO: 470884 - DNA, 323 bp, Homo sapiens; identical to SEQ ID NO: 354418
  chr9:138662685-138663008
  hypo
  multiple_myeloma vs. lymphoid_neoplasm,cervical, non_cancer,thyroid,myeloid_neoplasm,anorectal,prostate

SEQ ID NO: 470885 - DNA, 134 bp, Homo sapiens; identical to SEQ ID NO: 365133
  chr9:138663353-138663487
  hypo
  multiple_myeloma vs. cervical,ovary

SEQ ID NO: 470886 - DNA, 142 bp, Homo sapiens
  chr9:138670510-138670652
  hypo
  multiple_myeloma vs. cervical,thyroid,non_cancer,breast, prostate,ovary
cgggccctcggtcccgccaccagcctggacagcctgctgcagtgtggcatcatctatgcggacaacctggtggtggtggacaaggagagcaccatgagcgccgaggaggactacatggcggacgccaagaccatcgtcaacg

SEQ ID NO: 470887 - DNA, 33 bp, Homo sapiens; identical to SEQ ID NO: 354420
  chr9:138670778-138670811
  hypo
  multiple_myeloma vs. cervical,thyroid,non_cancer,breast, prostate,ovary

SEQ ID NO: 470888 - DNA, 180 bp, Homo sapiens
  chr9:138873235-138873415
  hypo
  multiple_myeloma vs. prostate,non_cancer
cgcaggttgtcgcaggacacgtgttcgtgtccaggtgcgctgggaagggtcctggcggtgctcctctcagcgcaggtcccgaggagctacaggcatgacgctgccttcagaactcccccgagcctgctccttcccagccttggctcgtgaggctcctccgaggaccacgggccttccacg

SEQ ID NO: 470889 - DNA, 10 bp, Homo sapiens
  chr9:138873538-138873548
  hypo
  multiple_myeloma vs. prostate,non_cancer
tcacctggcc

SEQ ID NO: 470890 - DNA, 538 bp, Homo sapiens; identical to SEQ ID NO: 340430
  chr9:138877542-138878080
  hypo
  multiple_myeloma vs. bladder_and_urothelial,sarcoma, uterine,anorectal,breast,non_cancer,melanoma,prostate,renal, colorectal,pancreas_gallbladder,myeloid_neoplasm,head_and_neck, upper_gi,lung,cervical

SEQ ID NO: 470891 - DNA, 485 bp, Homo sapiens; identical to SEQ ID NO: 340433
  chr9:139028149-139028634
  hypo
  multiple_myeloma vs. prostate,colorectal,cervical, pancreas_gallbladder

SEQ ID NO: 470892 - DNA, 93 bp, Homo sapiens; identical to SEQ ID NO: 340434
  chr9:139079359-139079452
  hypo
  multiple_myeloma vs. myeloid_neoplasm,colorectal, lymphoid_neoplasm,renal,head_and_neck

SEQ ID NO: 470893 - DNA, 653 bp, Homo sapiens; identical to SEQ ID NO: 340448
  chr9:139586531-139587184
  hypo
  multiple_myeloma vs. liver_bileduct

SEQ ID NO: 470894 - DNA, 781 bp, Homo sapiens; identical to SEQ ID NO: 340498
  chr9:140937919-140938700
  hypo
  multiple_myeloma vs. lymphoid_neoplasm,ovary,breast,lung, bladder_and_urothelial,prostate,pancreas_gallbladder,uterine, head_and_neck

SEQ ID NO: 470895 - DNA, 259 bp, Homo sapiens; identical to SEQ ID NO: 379161
  chr9:140970069-140970328
  hypo
  multiple_myeloma vs. anorectal,head_and_neck,ovary

SEQ ID NO: 470896 - DNA, 432 bp, Homo sapiens
  chr1:1713574-1714006
  hyper
  myeloid_neoplasm vs. lymphoid_neoplasm, pancreas_gallbladder,lung,multiple_myeloma,cervical, head_and_neck,colorectal,ovary,breast,renal,upper_gi,prostate, anorectal,thyroid,non_cancer,bladder_and_urothelial,uterine,
  CONT. FROM ABOVE: liver_bileduct,sarcoma,melanoma
cgaggaaagggagctggggggtgggggtaggggacagggcgaggccagagagtagtgggaggggccgaggcggcctttcccgggagcgctcggttcccggccggcccttctattggccccagtcactcaggctcccaggtccggctcgggggggagcggggggccgcgccaggccgctgaagtgtccccgtttcgcgtgggcagagcgcgcctccccacgcatcctgctgagggccagcctctgctaggtgcgtgacacggaggggacagaacggaaaccttgtcctgctcaagtgtggacgtgcgtgccacgtgctagagtaaaattgaggtggggaacctccatccctgggacatggagcacaggggcgaccccgcgccgcttggtcaaaggaggtccgaggccctgcaggaacagcccacagccggagc

SEQ ID NO: 470897 - DNA, 232 bp, Homo sapiens; identical to SEQ ID NO: 344931
  chr1:1714067-1714299
  hyper
  myeloid_neoplasm vs. lymphoid_neoplasm, pancreas_gallbladder,lung,multiple_myeloma,cervical, head_and_neck,colorectal,ovary,breast,renal,upper_gi,prostate, anorectal,thyroid,non_cancer,bladder_and_urothelial,uterine,
  CONT. FROM ABOVE: liver_bileduct,sarcoma,melanoma

SEQ ID NO: 470898 - DNA, 28 bp, Homo sapiens
  chr1:1935038-1935066
  hyper
  myeloid_neoplasm vs. sarcoma,non_cancer
cgggaaaggcgtttcatatgggacggag

SEQ ID NO: 470899 - DNA, 344 bp, Homo sapiens; identical to SEQ ID NO: 330664
  chr1:5772056-5772400
  hyper
  myeloid_neoplasm vs. lymphoid_neoplasm

SEQ ID NO: 470900 - DNA, 108 bp, Homo sapiens; identical to SEQ ID NO: 330679
  chr1:7843510-7843618
  hyper
  myeloid_neoplasm vs. liver_bileduct,colorectal,lung, pancreas_gallbladder,sarcoma,breast,renal,uterine,prostate, bladder_and_urothelial,non_cancer,anorectal,cervical,thyroid, ovary,upper_gi

SEQ ID NO: 470901 - DNA, 179 bp, Homo sapiens; identical to SEQ ID NO: 349165
  chr1:7844224-7844403
  hyper
  myeloid_neoplasm vs. liver_bileduct,pancreas_gallbladder, ovary,breast,lung,bladder_and_urothelial,head_and_neck,upper_gi, uterine,non_cancer,melanoma,colorectal,cervical

SEQ ID NO: 470902 - DNA, 125 bp, Homo sapiens; identical to SEQ ID NO: 330686
  chr1:9747572-9747697
  hyper
  myeloid_neoplasm vs. lymphoid_neoplasm,liver_bileduct, upper_gi,lung,pancreas_gallbladder,colorectal,multiple_myeloma, breast,ovary,uterine,prostate,bladder_and_urothelial,renal, melanoma,sarcoma,non_cancer,cervical,head_and_neck,anorectal,
  CONT. FROM ABOVE: thyroid

SEQ ID NO: 470903 - DNA, 122 bp, Homo sapiens; identical to SEQ ID NO: 330687
  chr1:9749342-9749464
  hyper
  myeloid_neoplasm vs. lymphoid_neoplasm,colorectal, head_and_neck,lung,renal,upper_gi,liver_bileduct,breast, pancreas_gallbladder,prostate,cervical,multiple_myeloma,uterine, non_cancer,melanoma,sarcoma,bladder_and_urothelial,anorectal,
  CONT. FROM ABOVE: thyroid,ovary

SEQ ID NO: 470904 - DNA, 28 bp, Homo sapiens
  chr1:20669965-20669993
  hyper
  myeloid_neoplasm vs. multiple_myeloma,head_and_neck
acccgcccccggtgatcctctcagcccc

SEQ ID NO: 470905 - DNA, 29 bp, Homo sapiens
  chr1:23749161-23749190
  hyper
  myeloid_neoplasm vs. colorectal
aaactggctccatgctgcagggaccctgc

SEQ ID NO: 470906 - DNA, 385 bp, Homo sapiens; identical to SEQ ID NO: 349190
  chr1:24126326-24126711
  hyper
  myeloid_neoplasm vs. multiple_myeloma,anorectal,thyroid, colorectal,cervical,breast,upper_gi,liver_bileduct,lung

SEQ ID NO: 470907 - DNA, 807 bp, Homo sapiens; identical to SEQ ID NO: 330733
  chr1:26662538-26663345
  hyper
  myeloid_neoplasm vs. head_and_neck,prostate,breast, non_cancer,multiple_myeloma,anorectal,ovary,uterine,lung, cervical,renal

SEQ ID NO: 470908 - DNA, 308 bp, Homo sapiens; identical to SEQ ID NO: 349195
  chr1:27332673-27332981
  hyper
  myeloid_neoplasm vs. head_and_neck,cervical

SEQ ID NO: 470909 - DNA, 698 bp, Homo sapiens; identical to SEQ ID NO: 330736
  chr1:27901989-27902687
  hyper
  myeloid_neoplasm vs. multiple_myeloma,ovary,upper_gi, colorectal,uterine

SEQ ID NO: 470910 - DNA, 192 bp, Homo sapiens
  chr1:32827549-32827741
  hyper
  myeloid_neoplasm vs. ovary,pancreas_gallbladder,upper_gi
gtcgctcacctcccggcggttgagaccggtcccaggctagaagcagctgccggagccctggccgcgggagaacgctccggtccaggcggagccgggcaggtctctgtggcgtgcccgggcccgggcgtcgaggagggcagcattgtgacccgggccgcggcgcgctgacctcacagagcacgttcctcccac

SEQ ID NO: 470911 - DNA, 103 bp, Homo sapiens
  chr1:33772741-33772844
  hyper
  myeloid_neoplasm vs. thyroid
cgactcggccagcgcctcgggcccaaaagtgccgctgaagtgctggtccacgtccatgcagaacatgaagtgcgcctcgcggcccggcagcccgcccagcgcc

SEQ ID NO: 470912 - DNA, 49 bp, Homo sapiens
  chr1:33772856-33772905
  hyper
  myeloid_neoplasm vs. thyroid
cgcatgcgcgccatcgacacgtcttgccagcgccgctcgcgcgccacgc

SEQ ID NO: 470913 - DNA, 16 bp, Homo sapiens
  chr1:33772942-33772958
  hyper
  myeloid_neoplasm vs. thyroid
gcggggcaccgctccc

SEQ ID NO: 470914 - DNA, 87 bp, Homo sapiens; identical to SEQ ID NO: 369074
  chr1:33772986-33773073
  hyper
  myeloid_neoplasm vs. thyroid

SEQ ID NO: 470915 - DNA, 25 bp, Homo sapiens
  chr1:36788081-36788106
  hyper
  myeloid_neoplasm vs. breast,cervical,lung, lymphoid_neoplasm,multiple_myeloma,head_and_neck
cggctctgcggacagctcggggccc

SEQ ID NO: 470916 - DNA, 209 bp, Homo sapiens; identical to SEQ ID NO: 349215
  chr1:36916114-36916323
  hyper
  myeloid_neoplasm vs. lymphoid_neoplasm,upper_gi,sarcoma, multiple_myeloma,melanoma,ovary,pancreas_gallbladder

SEQ ID NO: 470917 - DNA, 424 bp, Homo sapiens
  chr1:38512641-38513065
  hyper
  myeloid_neoplasm vs. sarcoma,ovary,uterine,non_cancer, head_and_neck,breast
cgtcgctcccggggtcccgcgcgccggccgtgctgattggccgctggggcttcattcacggcccccctaccgtccgcgtacacactcacgccccgggggcgcggccgccacgtggggagtggcgcgggggtggccctgggaccgcaccccctctcgtcctggctgtgtgggccccgctttcccccagcgctggagactccgagcccggccggtcccacattccacgcgagctgaattcccgcccgcatcccgcccgggcagcagggattgccggctccgggaggcgctcgggctccgagaagcggctcagccccgcgcccctccctcctcagtaccgctgccggcggaccaggattcccgcgggtcctggcggctgcgagcgcgaggcggcgcggattcgcggctcggttccggcgcgactgct

SEQ ID NO: 470918 - DNA, 91 bp, Homo sapiens
  chr1:38513154-38513245
  hyper
  myeloid_neoplasm vs. sarcoma,ovary,uterine,non_cancer, head_and_neck,breast
ttcctctagtcccagcgtcacaactccgccgacctcctctgccctgagagcgcgtccggtgcgggcggagtcggacggactctggcttcac

SEQ ID NO: 470919 - DNA, 29 bp, Homo sapiens
  chr1:38513318-38513347
  hyper
  myeloid_neoplasm vs. sarcoma,ovary,uterine,non_cancer, head_and_neck,breast
ggcgggcggcagcggttctacagtcctac

SEQ ID NO: 470920 - DNA, 482 bp, Homo sapiens; identical to SEQ ID NO: 369088
  chr1:39874756-39875238
  hyper
  myeloid_neoplasm vs. lung

SEQ ID NO: 470921 - DNA, 46 bp, Homo sapiens; identical to SEQ ID NO: 356747
  chr1:45097397-45097443
  hyper
  myeloid_neoplasm vs. lymphoid_neoplasm,lung

SEQ ID NO: 470922 - DNA, 87 bp, Homo sapiens; identical to SEQ ID NO: 401
  chr1:45097717-45097804
  hyper
  myeloid_neoplasm vs. lymphoid_neoplasm,lung, liver_bileduct,head_and_neck,upper_gi,pancreas_gallbladder, colorectal,multiple_myeloma,breast,ovary,prostate,uterine,renal, non_cancer,bladder_and_urothelial,sarcoma,melanoma,cervical,
  CONT. FROM ABOVE: anorectal,thyroid

SEQ ID NO: 470923 - DNA, 26 bp, Homo sapiens
  chr1:45098124-45098150
  hyper
  myeloid_neoplasm vs. liver_bileduct,lymphoid_neoplasm, lung,head_and_neck,ovary,prostate,colorectal, bladder_and_urothelial,breast,renal,multiple_myeloma,upper_gi, sarcoma,non_cancer
cgctcctggcttgcctgggtctcttc

SEQ ID NO: 470924 - DNA, 114 bp, Homo sapiens; identical to SEQ ID NO: 403
  chr1:45098213-45098327
  hyper
  myeloid_neoplasm vs. liver_bileduct,lymphoid_neoplasm, lung,head_and_neck,ovary,prostate,colorectal, bladder_and_urothelial,breast,renal,multiple_myeloma,upper_gi, sarcoma,non_cancer

SEQ ID NO: 470925 - DNA, 157 bp, Homo sapiens; identical to SEQ ID NO: 369125
  chr1:51442806-51442963
  hyper
  myeloid_neoplasm vs. multiple_myeloma

SEQ ID NO: 470926 - DNA, 291 bp, Homo sapiens; identical to SEQ ID NO: 330834
  chr1:53387231-53387522
  hyper
  myeloid_neoplasm vs. upper_gi

SEQ ID NO: 470927 - DNA, 207 bp, Homo sapiens; identical to SEQ ID NO: 330837
  chr1:55352463-55352670
  hyper
  myeloid_neoplasm vs. lung

SEQ ID NO: 470928 - DNA, 64 bp, Homo sapiens
  chr1:59612305-59612369
  hyper
  myeloid_neoplasm vs. multiple_myeloma
cggagaaacttcagagcggcaggtgccttcgtttcccgttacctgctgagtctagtcccttcca

SEQ ID NO: 470929 - DNA, 95 bp, Homo sapiens
  chr1:62207675-62207770
  hyper
  myeloid_neoplasm vs. liver_bileduct,head_and_neck,lung
cgttttagaatattttattttgcgtcagcgaatagagaaaacaaaggagggatgagagaacaggaaaggaaaggggcaaaaagacaaagtgttaa

SEQ ID NO: 470930 - DNA, 421 bp, Homo sapiens
  chr1:62207842-62208263
  hyper
  myeloid_neoplasm vs. liver_bileduct,head_and_neck,lung
cctccaaccacaccggtctgtccggatctccctccccgtcagtggcggctgtccccaccacgcgcggtctgatccgccaccccgcccccacagcccacttttcccaggcccttggccatcccgcgcccggtaggaattcacctgcacgtaaacagccagggcaaccgtcctccctccttggagcccgcctcccgcggccccgggctccctcccccgccccctgcgccaccccggtgccccgccccgggcggggagagtcggggcgaggggagggcctgccaggtgaggcgcggtcaccctgggcctctcacttccgcccaggtgaggcagggccgacaccgagcccgcccgacccgggctcccacctgctcctccagcgcaccaggtaaagcgtgaggtcccggctgtgcagtgcgcgctc

SEQ ID NO: 470931 - DNA, 203 bp, Homo sapiens; identical to SEQ ID NO: 356781
  chr1:62208291-62208494
  hyper
  myeloid_neoplasm vs. liver_bileduct,head_and_neck,lung

SEQ ID NO: 470932 - DNA, 65 bp, Homo sapiens
  chr1:86621199-86621264
  hyper
  myeloid_neoplasm vs. ovary,multiple_myeloma
cgcgcaacccctggtccgagcccttttcccagggaaggcatgggagcaggtacagcgcccaaagg

SEQ ID NO: 470933 - DNA, 119 bp, Homo sapiens; identical to SEQ ID NO: 330906
  chr1:94374262-94374381
  hyper
  myeloid_neoplasm vs. lung,head_and_neck,multiple_myeloma, pancreas_gallbladder,upper_gi,liver_bileduct,ovary,breast, uterine

SEQ ID NO: 470934 - DNA, 140 bp, Homo sapiens; identical to SEQ ID NO: 330925
  chr1:110527029-110527169
  hyper
  myeloid_neoplasm vs. lymphoid_neoplasm,liver_bileduct

SEQ ID NO: 470935 - DNA, 365 bp, Homo sapiens; identical to SEQ ID NO: 459281
  chr1:110753530-110753895
  hyper
  myeloid_neoplasm vs. thyroid,multiple_myeloma,non_cancer

SEQ ID NO: 470936 - DNA, 47 bp, Homo sapiens; identical to SEQ ID NO: 459282
  chr1:110753957-110754004
  hyper
  myeloid_neoplasm vs. thyroid,multiple_myeloma,non_cancer

SEQ ID NO: 470937 - DNA, 16 bp, Homo sapiens
  chr1:110754101-110754117
  hyper
  myeloid_neoplasm vs. thyroid,multiple_myeloma,non_cancer
ggagccccgcagcgct

SEQ ID NO: 470938 - DNA, 612 bp, Homo sapiens; identical to SEQ ID NO: 330940
  chr1:115212647-115213259
  hyper
  myeloid_neoplasm vs. multiple_myeloma

SEQ ID NO: 470939 - DNA, 245 bp, Homo sapiens; identical to SEQ ID NO: 462256
  chr1:154474305-154474550
  hyper
  myeloid_neoplasm vs. ovary

SEQ ID NO: 470940 - DNA, 97 bp, Homo sapiens; identical to SEQ ID NO: 455559
  chr1:156215233-156215330
  hyper
  myeloid_neoplasm vs. multiple_myeloma

SEQ ID NO: 470941 - DNA, 27 bp, Homo sapiens
  chr1:156215871-156215898
  hyper
  myeloid_neoplasm vs. multiple_myeloma
tctgagctcaaggccgcggcctggggc

SEQ ID NO: 470942 - DNA, 147 bp, Homo sapiens; identical to SEQ ID NO: 465960
  chr1:156646447-156646594
  hyper
  myeloid_neoplasm vs. anorectal,ovary,cervical

SEQ ID NO: 470943 - DNA, 403 bp, Homo sapiens; identical to SEQ ID NO: 356897
  chr1:156646856-156647259
  hyper
  myeloid_neoplasm vs. anorectal,ovary,cervical

SEQ ID NO: 470944 - DNA, 263 bp, Homo sapiens; identical to SEQ ID NO: 331021
  chr1:168311912-168312175
  hyper
  myeloid_neoplasm vs. lymphoid_neoplasm,melanoma,lung, head_and_neck,pancreas_gallbladder,liver_bileduct, multiple_myeloma,ovary,prostate,uterine,renal,colorectal, bladder_and_urothelial,non_cancer,breast,upper_gi,sarcoma,
  CONT. FROM ABOVE: cervical

SEQ ID NO: 470945 - DNA, 301 bp, Homo sapiens; identical to SEQ ID NO: 349355
  chr1:175048508-175048809
  hyper
  myeloid_neoplasm vs. melanoma

SEQ ID NO: 470946 - DNA, 121 bp, Homo sapiens; identical to SEQ ID NO: 331056
  chr1:185014263-185014384
  hyper
  myeloid_neoplasm vs. upper_gi,uterine,colorectal, bladder_and_urothelial,breast,non_cancer,ovary, pancreas_gallbladder,cervical,prostate

SEQ ID NO: 470947 - DNA, 252 bp, Homo sapiens; identical to SEQ ID NO: 331077
  chr1:202936089-202936341
  hyper
  myeloid_neoplasm vs. pancreas_gallbladder,melanoma, bladder_and_urothelial,upper_gi,prostate,cervical,colorectal, multiple_myeloma,breast,non_cancer,renal,ovary,anorectal,lung, thyroid,uterine

SEQ ID NO: 470948 - DNA, 58 bp, Homo sapiens; identical to SEQ ID NO: 331079
  chr1:203242491-203242549
  hyper
  myeloid_neoplasm vs. lymphoid_neoplasm,upper_gi, multiple_myeloma,bladder_and_urothelial,colorectal,lung, pancreas_gallbladder,uterine,head_and_neck,ovary,prostate,renal, non_cancer,liver_bileduct,breast,anorectal,thyroid

SEQ ID NO: 470949 - DNA, 33 bp, Homo sapiens; identical to SEQ ID NO: 357019
  chr1:224528889-224528922
  hyper
  myeloid_neoplasm vs. multiple_myeloma

SEQ ID NO: 470950 - DNA, 4 bp, Homo sapiens
  chr1:228463167-228463171
  hyper
  myeloid_neoplasm vs. sarcoma
cgag

SEQ ID NO: 470951 - DNA, 118 bp, Homo sapiens; identical to SEQ ID NO: 331141
  chr1:228646027-228646145
  hyper
  myeloid_neoplasm vs. bladder_and_urothelial,ovary

SEQ ID NO: 470952 - DNA, 282 bp, Homo sapiens; identical to SEQ ID NO: 466023
  chr1:233749801-233750083
  hyper
  myeloid_neoplasm vs. lung

SEQ ID NO: 470953 - DNA, 181 bp, Homo sapiens; identical to SEQ ID NO: 349434
  chr1:233750511-233750692
  hyper
  myeloid_neoplasm vs. lung

SEQ ID NO: 470954 - DNA, 25 bp, Homo sapiens
  chr10:735200-735225
  hyper
  myeloid_neoplasm vs. upper_gi
cgcggggaatcgcggccccacaaac

SEQ ID NO: 470955 - DNA, 884 bp, Homo sapiens; identical to SEQ ID NO: 350974
  chr10:735245-736129
  hyper
  myeloid_neoplasm vs. upper_gi

SEQ ID NO: 470956 - DNA, 146 bp, Homo sapiens; identical to SEQ ID NO: 359480
  chr10:6246024-6246170
  hyper
  myeloid_neoplasm vs. lung,multiple_myeloma,upper_gi

SEQ ID NO: 470957 - DNA, 133 bp, Homo sapiens; identical to SEQ ID NO: 333927
  chr10:43725410-43725543
  hyper
  myeloid_neoplasm vs. lung,ovary,multiple_myeloma, prostate,bladder_and_urothelial

SEQ ID NO: 470958 - DNA, 56 bp, Homo sapiens
  chr10:43818322-43818378
  hyper
  myeloid_neoplasm vs. multiple_myeloma,colorectal,ovary, bladder_and_urothelial
cggtttaccgtcaccatggcaacagcgcgtcctgggctggggcggggccagactgc

SEQ ID NO: 470959 - DNA, 130 bp, Homo sapiens
  chr10:43818407-43818537
  hyper
  myeloid_neoplasm vs. multiple_myeloma,colorectal,ovary, bladder_and_urothelial
gccagtgattggccatctgggcgcggggcgggctgagtcagttggagggggcggggctgaggctccggtgaacgccgtaggcccgggctgggccgagggagatgatggatgccgcttcttgccactcccc

SEQ ID NO: 470960 - DNA, 701 bp, Homo sapiens
  chr10:43892074-43892775
  hyper
  myeloid_neoplasm vs. lymphoid_neoplasm, pancreas_gallbladder,multiple_myeloma,melanoma,non_cancer, breast,upper_gi,lung,sarcoma,prostate,anorectal,thyroid, cervical,uterine,colorectal,renal
cgcaaggtgggaggcccgggcgcgcggtaaacgtgttttggcgggaagcagcgccgaggccccgagacaaggtgacggcgacgttcccgcggcctgctcacggcactccagcagcctcggaccgcccggcccggcaggaaggtcggccccagggcctgcgcgggctcgggcgggagcttccgggcggggggcggagcgagcggcgcagcggggagagtgggggcagggacgggagggttcccggagggaagggcgcctcgcgggagggggaggggaggggaggggaggggagggggcccctggcgggcttccggggccctgagggcgagagcgagggcgacggcaaggtggggtgggggctgctccccggcccgccaagctagcgctgcctaggcgggagctcggggacccgcgggccgagcgcggctgaagggagggaagggaagaggcgctcgtaggtctgcgtccgtctccgagcgaccggggcggcggaaagggacctggggggggcggccgggactggagtggcggggccggggcgcccgcgcggcggctcaccacgccagggactggcccgtcggccccgaggaggcgcggggtccggagtccgggaagcggaggcctcgtgatccaagaccggcagccggacgtgggtcacggggtgcagaggaggaagtgccattgccgggcccgccaagatg

SEQ ID NO: 470961 - DNA, 398 bp, Homo sapiens; identical to SEQ ID NO: 454118
  chr10:43892377-43892775
  hyper
  myeloid_neoplasm vs. lymphoid_neoplasm, pancreas_gallbladder,multiple_myeloma,melanoma,lung,breast, cervical,uterine,upper_gi,non_cancer,renal, bladder_and_urothelial,colorectal,prostate,sarcoma,thyroid,
  CONT. FROM ABOVE: anorectal

SEQ ID NO: 470962 - DNA, 171 bp, Homo sapiens; identical to SEQ ID NO: 347088
  chr10:43892970-43893141
  hyper
  myeloid_neoplasm vs. lymphoid_neoplasm, pancreas_gallbladder,multiple_myeloma,melanoma,lung,breast, cervical,uterine,upper_gi,non_cancer,renal, bladder_and_urothelial,colorectal,prostate,sarcoma,thyroid,
  CONT. FROM ABOVE: anorectal

SEQ ID NO: 470963 - DNA, 12 bp, Homo sapiens
  chr10:52177724-52177736
  hyper
  myeloid_neoplasm vs. bladder_and_urothelial
cgccgtagtaga

SEQ ID NO: 470964 - DNA, 66 bp, Homo sapiens
  chr10:61469827-61469893
  hyper
  myeloid_neoplasm vs. liver_bileduct,head_and_neck
cggtgcgcacacacgcgcgtccccaggcgccgctgtgcccccgccgcccaccacgtgccctggcca

SEQ ID NO: 470965 - DNA, 4 bp, Homo sapiens
  chr10:61469994-61469998
  hyper
  myeloid_neoplasm vs. liver_bileduct,head_and_neck
ggcc

SEQ ID NO: 470966 - DNA, 195 bp, Homo sapiens; identical to SEQ ID NO: 460633
  chr10:63656701-63656896
  hyper
  myeloid_neoplasm vs. lymphoid_neoplasm,multiple_myeloma, colorectal

SEQ ID NO: 470967 - DNA, 31 bp, Homo sapiens
  chr10:64565470-64565501
  hyper
  myeloid_neoplasm vs. pancreas_gallbladder, lymphoid_neoplasm,lung
cgggactgccactattaccgggtgctggagc

SEQ ID NO: 470968 - DNA, 643 bp, Homo sapiens; identical to SEQ ID NO: 351052
  chr10:71892158-71892801
  hyper
  myeloid_neoplasm vs. liver_bileduct,multiple_myeloma, colorectal

SEQ ID NO: 470969 - DNA, 250 bp, Homo sapiens
  chr10:74057413-74057663
  hyper
  myeloid_neoplasm vs. multiple_myeloma,ovary,sarcoma,lung, lymphoid_neoplasm,melanoma,pancreas_gallbladder,anorectal, upper_gi,thyroid,uterine,bladder_and_urothelial,non_cancer, prostate,breast,colorectal,cervical,renal,head_and_neck
cgccgctcccctccctccttcccgctcccccgggcaggaaggctcgcgtgcgcgaggccacagcgcaagcgggtgcagagcaggattcgaacagggttccatgcaactccgtgcccagggtcctaccaccgcctgagctcagcggtcttcagccagcggggcccttccacccccttccttaatagttttcctcctccgcctcctgcacggcctccgcctccgcctgaccgtcctcggaaacctcccagcc

SEQ ID NO: 470970 - DNA, 295 bp, Homo sapiens; identical to SEQ ID NO: 347097
  chr10:74057707-74058002
  hyper
  myeloid_neoplasm vs. multiple_myeloma,ovary,sarcoma,lung, lymphoid_neoplasm,melanoma,pancreas_gallbladder,anorectal, upper_gi,thyroid,uterine,bladder_and_urothelial,non_cancer, prostate,breast,colorectal,cervical,renal,head_and_neck

SEQ ID NO: 470971 - DNA, 24 bp, Homo sapiens
  chr10:101283158-101283182
  hyper
  myeloid_neoplasm vs. multiple_myeloma,non_cancer,thyroid, uterine,anorectal,bladder_and_urothelial,ovary
cggggacgagggctggcagcccca

SEQ ID NO: 470972 - DNA, 334 bp, Homo sapiens; identical to SEQ ID NO: 334021
  chr10:102132983-102133317
  hyper
  myeloid_neoplasm vs. pancreas_gallbladder,liver_bileduct

SEQ ID NO: 470973 - DNA, 569 bp, Homo sapiens; identical to SEQ ID NO: 334036
  chr10:102822304-102822873
  hyper
  myeloid_neoplasm vs. colorectal,multiple_myeloma

SEQ ID NO: 470974 - DNA, 737 bp, Homo sapiens; identical to SEQ ID NO: 334066
  chr10:111767130-111767867
  hyper
  myeloid_neoplasm vs. multiple_myeloma

SEQ ID NO: 470975 - DNA, 69 bp, Homo sapiens
  chr10:119494306-119494375
  hyper
cgactctccccgggtcccccaccccagccaagagggaacctgccaatcaggctgcgccaccaccaggct

SEQ ID NO: 470976 - DNA, 275 bp, Homo sapiens; identical to SEQ ID NO: 466141
  chr10:124133662-124133937
  hyper
  myeloid_neoplasm vs. liver_bileduct

SEQ ID NO: 470977 - DNA, 276 bp, Homo sapiens; identical to SEQ ID NO: 359707
  chr10:124134313-124134589
  hyper
  myeloid_neoplasm vs. liver_bileduct

SEQ ID NO: 470978 - DNA, 48 bp, Homo sapiens
  chr10:128994482-128994530
  hyper
ggccggcccccgcgccgcagctcgcgtcgctcgcgtccctccggcccc

SEQ ID NO: 470979 - DNA, 142 bp, Homo sapiens
  chr10:128994545-128994687
  hyper
cggggaggcagcggctgggccagctccggggacgcccgcgcgctcgcttgctcgcgacgcggcggagccagccacagccacccggcttcgcgctcctccgatgtcctcatttactgcaattgtcttcggcgagatctcagag

SEQ ID NO: 470980 - DNA, 3 bp, Homo sapiens
  chr10:128994911-128994914
  hyper
cgc

SEQ ID NO: 470981 - DNA, 123 bp, Homo sapiens; identical to SEQ ID NO: 347132
  chr10:135075001-135075124
  hyper
  myeloid_neoplasm vs. lung,head_and_neck, lymphoid_neoplasm,upper_gi,uterine,breast,colorectal, bladder_and_urothelial,pancreas_gallbladder,non_cancer,sarcoma, melanoma,multiple_myeloma,ovary,prostate,renal,thyroid

SEQ ID NO: 470982 - DNA, 125 bp, Homo sapiens; identical to SEQ ID NO: 466177
  chr11:12131738-12131863
  hyper
  myeloid_neoplasm vs. ovary

SEQ ID NO: 470983 - DNA, 288 bp, Homo sapiens; identical to SEQ ID NO: 466178
  chr11:12132212-12132500
  hyper
  myeloid_neoplasm vs. ovary

SEQ ID NO: 470984 - DNA, 2 bp, Homo sapiens
  chr11:12132611-12132613
  hyper
  myeloid_neoplasm vs. ovary
gc

SEQ ID NO: 470985 - DNA, 126 bp, Homo sapiens; identical to SEQ ID NO: 359788
  chr11:17497697-17497823
  hyper
  myeloid_neoplasm vs. multiple_myeloma

SEQ ID NO: 470986 - DNA, 917 bp, Homo sapiens; identical to SEQ ID NO: 345381
  chr11:19798519-19799436
  hyper
  myeloid_neoplasm vs. upper_gi,head_and_neck,lung, cervical,pancreas_gallbladder

SEQ ID NO: 470987 - DNA, 76 bp, Homo sapiens; identical to SEQ ID NO: 345383
  chr11:32449104-32449180
  hyper
  myeloid_neoplasm vs. non_cancer,melanoma, multiple_myeloma,bladder_and_urothelial,prostate,thyroid, uterine,renal,cervical,breast,lung,head_and_neck,upper_gi

SEQ ID NO: 470988 - DNA, 215 bp, Homo sapiens
  chr11:32455062-32455277
  hyper
  myeloid_neoplasm vs. multiple_myeloma,non_cancer
cgcattccaaaaacatcccggtccctaggccctcgagtaattttgctccaggaaaagcatccgccattgtattagtaaagcgtttactaaattaccgaatcaaaccgaactggcttaggttctcaatagcgtggaaatccactgaaaataaatgaagagggcaaactacaggggctccgcaggttcgggtccgcgccgcccaggcgaaagagagg

SEQ ID NO: 470989 - DNA, 4 bp, Homo sapiens
  chr11:32459404-32459408
  hyper
  myeloid_neoplasm vs. multiple_myeloma
cggg

SEQ ID NO: 470990 - DNA, 17 bp, Homo sapiens
  chr11:43604864-43604881
  hyper
  myeloid_neoplasm vs. upper_gi,melanoma,uterine,cervical, multiple_myeloma,non_cancer
tcgtgcggcaccggagc

SEQ ID NO: 470991 - DNA, 18 bp, Homo sapiens
  chr11:61722665-61722683
  hyper
  myeloid_neoplasm vs. multiple_myeloma,non_cancer, cervical,thyroid,anorectal
cgtgctgggtgagttccc

SEQ ID NO: 470992 - DNA, 213 bp, Homo sapiens; identical to SEQ ID NO: 351207
  chr11:62369471-62369684
  hyper
  myeloid_neoplasm vs. lymphoid_neoplasm,upper_gi, pancreas_gallbladder,uterine,multiple_myeloma,breast,ovary,lung, sarcoma,colorectal,renal,cervical,head_and_neck,non_cancer, melanoma,prostate,thyroid

SEQ ID NO: 470993 - DNA, 428 bp, Homo sapiens; identical to SEQ ID NO: 334279
  chr11:62389464-62389892
  hyper
  myeloid_neoplasm vs. lymphoid_neoplasm,liver_bileduct, upper_gi,multiple_myeloma,pancreas_gallbladder,renal, head_and_neck,colorectal,ovary,lung,cervical,non_cancer,uterine, breast

SEQ ID NO: 470994 - DNA, 28 bp, Homo sapiens
  chr11:64479004-64479032
  hyper
  myeloid_neoplasm vs. thyroid,multiple_myeloma
aggacccgcccgcacttcaccacttcac

SEQ ID NO: 470995 - DNA, 33 bp, Homo sapiens; identical to SEQ ID NO: 359870
  chr11:65307510-65307543
  hyper
  myeloid_neoplasm vs. uterine,multiple_myeloma,cervical, ovary,head_and_neck

SEQ ID NO: 470996 - DNA, 49 bp, Homo sapiens
  chr11:86085693-86085742
  hyper
  myeloid_neoplasm vs. multiple_myeloma,non_cancer,thyroid
cgctgcctcgagcttctgaatcgcctgggcaacctggaagccgcccatc

SEQ ID NO: 470997 - DNA, 114 bp, Homo sapiens; identical to SEQ ID NO: 372840
  chr11:113746570-113746684
  hyper
  myeloid_neoplasm vs. multiple_myeloma

SEQ ID NO: 470998 - DNA, 75 bp, Homo sapiens; identical to SEQ ID NO: 372847
  chr11:117746539-117746614
  hyper
  myeloid_neoplasm vs. multiple_myeloma

SEQ ID NO: 470999 - DNA, 191 bp, Homo sapiens; identical to SEQ ID NO: 334392
  chr11:124616924-124617115
  hyper
  myeloid_neoplasm vs. liver_bileduct,anorectal,colorectal, upper_gi,pancreas_gallbladder,renal,melanoma,head_and_neck, prostate,cervical,lung,uterine,non_cancer,ovary,breast, lymphoid_neoplasm,thyroid,multiple_myeloma

SEQ ID NO: 471000 - DNA, 196 bp, Homo sapiens; identical to SEQ ID NO: 334422
  chr11:134230275-134230471
  hyper
  myeloid_neoplasm vs. liver_bileduct

SEQ ID NO: 471001 - DNA, 213 bp, Homo sapiens; identical to SEQ ID NO: 334523
  chr12:52294173-52294386
  hyper
  myeloid_neoplasm vs. cervical

SEQ ID NO: 471002 - DNA, 194 bp, Homo sapiens; identical to SEQ ID NO: 345427
  chr12:54150983-54151177
  hyper
  myeloid_neoplasm vs. liver_bileduct,multiple_myeloma, lymphoid_neoplasm,renal,pancreas_gallbladder,melanoma, non_cancer

SEQ ID NO: 471003 - DNA, 18 bp, Homo sapiens
  chr12:54387801-54387819
  hyper
  myeloid_neoplasm vs. upper_gi
cgggaggaagaaaaggca

SEQ ID NO: 471004 - DNA, 251 bp, Homo sapiens; identical to SEQ ID NO: 466306
  chr12:54388354-54388605
  hyper
  myeloid_neoplasm vs. upper_gi

SEQ ID NO: 471005 - DNA, 277 bp, Homo sapiens; identical to SEQ ID NO: 334568
  chr12:56472747-56473024
  hyper
  myeloid_neoplasm vs. lung

SEQ ID NO: 471006 - DNA, 437 bp, Homo sapiens; identical to SEQ ID NO: 360169
  chr12:89747140-89747577
  hyper
  myeloid_neoplasm vs. multiple_myeloma, pancreas_gallbladder,lung

SEQ ID NO: 471007 - DNA, 615 bp, Homo sapiens; identical to SEQ ID NO: 334652
  chr12:113796265-113796880
  hyper
  myeloid_neoplasm vs. lung,multiple_myeloma, liver_bileduct,pancreas_gallbladder,upper_gi, bladder_and_urothelial,renal,breast,non_cancer

SEQ ID NO: 471008 - DNA, 345 bp, Homo sapiens
  chr12:120031912-120032257
  hyper
  myeloid_neoplasm vs. melanoma,uterine
cgcgctctctgcggctcccttcctcacggcccggcccgcgctaggtgttctttgtcctcgcacctcctcctcacctttctcgggctctcagagctctccccgcaatcatcagcacctcctctgcactcctcgtggtactcagagccctgatcaagcttcccccaggctagctttcctcttctttccagctcccagggtgcgtttcctctccaacccggggaagttcttccgtggactttgctgactcctctgaccttcctaggcacttgcccggggcttctcaaccctcttttctagagccccagtgcgcgccaccctagcgagcgcagtaagctcataccccga

SEQ ID NO: 471009 - DNA, 62 bp, Homo sapiens; identical to SEQ ID NO: 351426
  chr12:122237462-122237524
  hyper
  myeloid_neoplasm vs. lung,liver_bileduct, pancreas_gallbladder,colorectal,breast,ovary,upper_gi,prostate, head_and_neck

SEQ ID NO: 471010 - DNA, 582 bp, Homo sapiens; identical to SEQ ID NO: 334683
  chr12:122460955-122461537
  hyper
  myeloid_neoplasm vs. upper_gi

SEQ ID NO: 471011 - DNA, 345 bp, Homo sapiens; identical to SEQ ID NO: 351430
  chr12:123874193-123874538
  hyper
  myeloid_neoplasm vs. breast,bladder_and_urothelial, prostate,upper_gi,sarcoma,uterine,colorectal,cervical

SEQ ID NO: 471012 - DNA, 258 bp, Homo sapiens; identical to SEQ ID NO: 360231
  chr12:124456333-124456591
  hyper
  myeloid_neoplasm vs. pancreas_gallbladder,lung, liver_bileduct,upper_gi,ovary

SEQ ID NO: 471013 - DNA, 284 bp, Homo sapiens; identical to SEQ ID NO: 334760
  chr13:44544261-44544545
  hyper
  myeloid_neoplasm vs. melanoma,lung,head_and_neck, pancreas_gallbladder,colorectal

SEQ ID NO: 471014 - DNA, 139 bp, Homo sapiens; identical to SEQ ID NO: 452850
  chr13:74707123-74707262
  hyper
  myeloid_neoplasm vs. multiple_myeloma,uterine,ovary, lymphoid_neoplasm,sarcoma

SEQ ID NO: 471015 - DNA, 212 bp, Homo sapiens; identical to SEQ ID NO: 452851
  chr13:74707414-74707626
  hyper
  myeloid_neoplasm vs. multiple_myeloma,uterine,ovary, lymphoid_neoplasm,sarcoma

SEQ ID NO: 471016 - DNA, 410 bp, Homo sapiens; identical to SEQ ID NO: 452852
  chr13:74707668-74708078
  hyper
  myeloid_neoplasm vs. multiple_myeloma,uterine,ovary, lymphoid_neoplasm,sarcoma

SEQ ID NO: 471017 - DNA, 915 bp, Homo sapiens; identical to SEQ ID NO: 351487
  chr13:74707668-74708583
  hyper
  myeloid_neoplasm vs. lymphoid_neoplasm

SEQ ID NO: 471018 - DNA, 43 bp, Homo sapiens
  chr13:76054897-76054940
  hyper
  myeloid_neoplasm vs. pancreas_gallbladder
cgaagatgacgcgaccagccaaaccggttaaggatttgactgc

SEQ ID NO: 471019 - DNA, 44 bp, Homo sapiens
  chr13:112716634-112716678
  hyper
  myeloid_neoplasm vs. multiple_myeloma
gcacgcgcgcgtgcgcgcgcgcgcacacacacatacacacacac

SEQ ID NO: 471020 - DNA, 93 bp, Homo sapiens; identical to SEQ ID NO: 360351
  chr13:112716721-112716814
  hyper
  myeloid_neoplasm vs. multiple_myeloma

SEQ ID NO: 471021 - DNA, 352 bp, Homo sapiens; identical to SEQ ID NO: 457508
  chr13:112760444-112760796
  hyper
  myeloid_neoplasm vs. multiple_myeloma

SEQ ID NO: 471022 - DNA, 15 bp, Homo sapiens
  chr14:24045264-24045279
  hyper
  myeloid_neoplasm vs. liver_bileduct,multiple_myeloma, bladder_and_urothelial,uterine,cervical,non_cancer
cgagccgggcggtcc

SEQ ID NO: 471023 - DNA, 29 bp, Homo sapiens
  chr14:24045385-24045414
  hyper
  myeloid_neoplasm vs. liver_bileduct,multiple_myeloma, bladder_and_urothelial,uterine,cervical,non_cancer
cgaaagaatccgccggccgccggagtgcg

SEQ ID NO: 471024 - DNA, 61 bp, Homo sapiens
  chr14:29236194-29236255
  hyper
  myeloid_neoplasm vs. lung,pancreas_gallbladder, lymphoid_neoplasm,bladder_and_urothelial,head_and_neck
ggagcgagggagcttcacccccggggcggtggttgtttcttttttctttctttcttttttc

SEQ ID NO: 471025 - DNA, 61 bp, Homo sapiens; identical to SEQ ID NO: 471024
  chr14:29236194-29236255
  hyper
  myeloid_neoplasm vs. uterine,head_and_neck,upper_gi, pancreas_gallbladder,lung

SEQ ID NO: 471026 - DNA, 61 bp, Homo sapiens
  chr14:29236614-29236675
  hyper
  myeloid_neoplasm vs. uterine,head_and_neck,upper_gi, pancreas_gallbladder,lung
cacccccagcaccaccaccaccaccaccaccatcaccaccacccgccgccgcccgccccgc

SEQ ID NO: 471027 - DNA, 66 bp, Homo sapiens
  chr14:37131997-37132063
  hyper
  myeloid_neoplasm vs. lung,head_and_neck,sarcoma, anorectal,colorectal,upper_gi,ovary
cgggtgcgttcgcccagtccccggatgcgtagggaggcccagtggcaggcagctgtcccaagcagc

SEQ ID NO: 471028 - DNA, 586 bp, Homo sapiens; identical to SEQ ID NO: 334893
  chr14:50469917-50470503
  hyper
  myeloid_neoplasm vs. pancreas_gallbladder,upper_gi, colorectal,multiple_myeloma,breast,prostate,uterine,renal,lung, bladder_and_urothelial,non_cancer,cervical,ovary,sarcoma, anorectal,thyroid,head_and_neck

SEQ ID NO: 471029 - DNA, 213 bp, Homo sapiens; identical to SEQ ID NO: 334953
  chr14:69259278-69259491
  hyper
  myeloid_neoplasm vs. multiple_myeloma,head_and_neck, lymphoid_neoplasm,pancreas_gallbladder

SEQ ID NO: 471030 - DNA, 219 bp, Homo sapiens; identical to SEQ ID NO: 347309
  chr14:69261392-69261611
  hyper
  myeloid_neoplasm vs. lymphoid_neoplasm,anorectal, multiple_myeloma,bladder_and_urothelial,head_and_neck, pancreas_gallbladder,sarcoma,colorectal,liver_bileduct,ovary, lung,uterine,renal,breast,upper_gi,non_cancer,cervical

SEQ ID NO: 471031 - DNA, 409 bp, Homo sapiens; identical to SEQ ID NO: 360487
  chr14:74100394-74100803
  hyper
  myeloid_neoplasm vs. uterine,multiple_myeloma

SEQ ID NO: 471032 - DNA, 330 bp, Homo sapiens; identical to SEQ ID NO: 335005
  chr14:93214751-93215081
  hyper
  myeloid_neoplasm vs. lung,bladder_and_urothelial, pancreas_gallbladder,upper_gi,head_and_neck,breast

SEQ ID NO: 471033 - DNA, 377 bp, Homo sapiens; identical to SEQ ID NO: 351623
  chr14:102975682-102976059
  hyper
  myeloid_neoplasm vs. lung,head_and_neck,ovary,uterine, colorectal,bladder_and_urothelial,breast,sarcoma,melanoma, non_cancer

SEQ ID NO: 471034 - DNA, 152 bp, Homo sapiens
  chr14:105196121-105196273
  hyper
  myeloid_neoplasm vs. melanoma,bladder_and_urothelial, ovary,renal,uterine,head_and_neck,prostate,lymphoid_neoplasm, breast
cggcgtcgtggggaggagcgtggcgtcggcgtcgtggggaggagcgtggcgtcggcgtcgtggggaggagcgtggcgtcggcgtcgtggggaggagcgtggcgtcggcatggtggggaggagctgtggggtggcaacccagaggcaaggagg

SEQ ID NO: 471035 - DNA, 19 bp, Homo sapiens
  chr14:105196545-105196564
  hyper
  myeloid_neoplasm vs. melanoma,bladder_and_urothelial, ovary,renal,uterine,head_and_neck,prostate,lymphoid_neoplasm, breast
agcgggtgggtgcggtggc

SEQ ID NO: 471036 - DNA, 37 bp, Homo sapiens; identical to SEQ ID NO: 345464
  chr14:105715538-105715575
  hyper
  myeloid_neoplasm vs. bladder_and_urothelial,lung, colorectal,ovary,upper_gi,prostate,head_and_neck,cervical, anorectal,breast,uterine,renal,lymphoid_neoplasm,non_cancer, sarcoma,multiple_myeloma,melanoma

SEQ ID NO: 471037 - DNA, 339 bp, Homo sapiens; identical to SEQ ID NO: 345465
  chr15:31621317-31621656
  hyper
  myeloid_neoplasm vs. head_and_neck,pancreas_gallbladder, lymphoid_neoplasm,multiple_myeloma,renal,colorectal,breast, bladder_and_urothelial,lung,ovary,cervical,upper_gi,non_cancer, thyroid,liver_bileduct,uterine,prostate

SEQ ID NO: 471038 - DNA, 507 bp, Homo sapiens; identical to SEQ ID NO: 351653
  chr15:31774606-31775113
  hyper
  myeloid_neoplasm vs. prostate,colorectal,breast, lymphoid_neoplasm,bladder_and_urothelial,non_cancer,renal, uterine

SEQ ID NO: 471039 - DNA, 247 bp, Homo sapiens; identical to SEQ ID NO: 335084
  chr15:40762832-40763079
  hyper
  myeloid_neoplasm vs. colorectal,upper_gi,lung, head_and_neck,multiple_myeloma,pancreas_gallbladder,breast, melanoma,renal

SEQ ID NO: 471040 - DNA, 28 bp, Homo sapiens
  chr15:41788111-41788139
  hyper
  myeloid_neoplasm vs. liver_bileduct,upper_gi,lung
gcccaagcctgggtgtagagaccgcccc

SEQ ID NO: 471041 - DNA, 43 bp, Homo sapiens; identical to SEQ ID NO: 351664
  chr15:41788242-41788285
  hyper
  myeloid_neoplasm vs. liver_bileduct,upper_gi,lung

SEQ ID NO: 471042 - DNA, 782 bp, Homo sapiens; identical to SEQ ID NO: 351688
  chr15:60884567-60885349
  hyper
  myeloid_neoplasm vs. pancreas_gallbladder,cervical

SEQ ID NO: 471043 - DNA, 203 bp, Homo sapiens; identical to SEQ ID NO: 335142
  chr15:64454743-64454946
  hyper
  myeloid_neoplasm vs. multiple_myeloma

SEQ ID NO: 471044 - DNA, 195 bp, Homo sapiens
  chr15:67357339-67357534
  hyper
  myeloid_neoplasm vs. upper_gi,colorectal,non_cancer, breast,uterine
cgcacacgttcccgaggctctcggccggtgtgatctcaccgactagagaataaaaacagcccaggggcgccggcgccggccaagggccttgacggggatcagcaagcgcgaggccaagtgcgggccccaacttcctgggcccgggccttccgcgcgccccctctcgggctcgggtcctctccagggtgcactcgc

SEQ ID NO: 471045 - DNA, 189 bp, Homo sapiens; identical to SEQ ID NO: 351703
  chr15:67357544-67357733
  hyper
  myeloid_neoplasm vs. upper_gi,colorectal,non_cancer, breast,uterine

SEQ ID NO: 471046 - DNA, 118 bp, Homo sapiens; identical to SEQ ID NO: 335168
  chr15:72612103-72612221
  hyper
  myeloid_neoplasm vs. ovary,sarcoma,prostate,melanoma, breast

SEQ ID NO: 471047 - DNA, 27 bp, Homo sapiens
  chr15:72612514-72612541
  hyper
  myeloid_neoplasm vs. lung,multiple_myeloma,ovary,uterine, non_cancer,bladder_and_urothelial,breast,head_and_neck,sarcoma, prostate,pancreas_gallbladder,colorectal,thyroid,anorectal
cgagccccagcccccgtgcttggtgac

SEQ ID NO: 471048 - DNA, 79 bp, Homo sapiens; identical to SEQ ID NO: 347351
  chr15:72612906-72612985
  hyper
  myeloid_neoplasm vs. lung,multiple_myeloma,ovary,uterine, non_cancer,bladder_and_urothelial,breast,head_and_neck,sarcoma, prostate,pancreas_gallbladder,colorectal,thyroid,anorectal

SEQ ID NO: 471049 - DNA, 71 bp, Homo sapiens
  chr15:74219413-74219484
  hyper
  myeloid_neoplasm vs. colorectal,lung,multiple_myeloma, bladder_and_urothelial,upper_gi,ovary
cgccgtccctgcccctgccggggcgcgtgggctcggacaccgtgcgcggccaggcgcggcacccattcggc

SEQ ID NO: 471050 - DNA, 56 bp, Homo sapiens; identical to SEQ ID NO: 360702
  chr15:74219620-74219676
  hyper
  myeloid_neoplasm vs. colorectal,lung,multiple_myeloma, bladder_and_urothelial,upper_gi,ovary

SEQ ID NO: 471051 - DNA, 196 bp, Homo sapiens; identical to SEQ ID NO: 347353
  chr15:81294105-81294301
  hyper
  myeloid_neoplasm vs. liver_bileduct,lymphoid_neoplasm, pancreas_gallbladder,lung,ovary,upper_gi,bladder_and_urothelial, breast,head_and_neck,prostate,sarcoma,multiple_myeloma,melanoma, renal,uterine,cervical,colorectal,non_cancer,anorectal,thyroid

SEQ ID NO: 471052 - DNA, 181 bp, Homo sapiens; identical to SEQ ID NO: 360728
  chr15:84323434-84323615
  hyper
  myeloid_neoplasm vs. prostate

SEQ ID NO: 471053 - DNA, 137 bp, Homo sapiens; identical to SEQ ID NO: 464245
  chr15:89921803-89921940
  hyper
  myeloid_neoplasm vs. thyroid

SEQ ID NO: 471054 - DNA, 104 bp, Homo sapiens
  chr15:92459227-92459331
  hyper
  myeloid_neoplasm vs. melanoma,head_and_neck, bladder_and_urothelial,ovary,upper_gi,breast
cgtcctgaccaccctggagcgtaggttcaacctgcagagcgctgacgtgggtgtgatcgctagcagcttcgagatcgggaacctggcgctcatcctcttcgtga

SEQ ID NO: 471055 - DNA, 87 bp, Homo sapiens; identical to SEQ ID NO: 335230
  chr15:93352994-93353081
  hyper
  myeloid_neoplasm vs. multiple_myeloma,lymphoid_neoplasm

SEQ ID NO: 471056 - DNA, 144 bp, Homo sapiens
  chr15:101513869-101514013
  hyper
  myeloid_neoplasm vs. renal,thyroid,non_cancer,uterine, prostate,head_and_neck,breast,cervical,bladder_and_urothelial, lung,multiple_myeloma,pancreas_gallbladder,upper_gi, lymphoid_neoplasm,colorectal,ovary
ggggccacccctctctcttcctgaagcccccgcgatcgtgcaacgggccgcgccgcctcctgctgtgttccacggtgattctcaagagcacgcgggcagtgggcggtgacgccgtgtgtgtgtgcttcctcccgcgcaggtgcc

SEQ ID NO: 471057 - DNA, 179 bp, Homo sapiens; identical to SEQ ID NO: 360766
  chr16:1035474-1035653
  hyper

SEQ ID NO: 471058 - DNA, 208 bp, Homo sapiens; identical to SEQ ID NO: 335262
  chr16:2301873-2302081
  hyper
  myeloid_neoplasm vs. liver_bileduct,pancreas_gallbladder, colorectal,ovary,lung,cervical,upper_gi,non_cancer, multiple_myeloma,prostate,breast,anorectal,uterine,thyroid

SEQ ID NO: 471059 - DNA, 187 bp, Homo sapiens; identical to SEQ ID NO: 335276
  chr16:4234090-4234277
  hyper
  myeloid_neoplasm vs. liver_bileduct

SEQ ID NO: 471060 - DNA, 814 bp, Homo sapiens; identical to SEQ ID NO: 335283
  chr16:8767901-8768715
  hyper
  myeloid_neoplasm vs. pancreas_gallbladder,liver_bileduct, upper_gi,colorectal,multiple_myeloma,ovary,lymphoid_neoplasm, prostate,head_and_neck,non_cancer,lung,uterine,breast,thyroid

SEQ ID NO: 471061 - DNA, 298 bp, Homo sapiens; identical to SEQ ID NO: 335285
  chr16:9186882-9187180
  hyper
  myeloid_neoplasm vs. liver_bileduct,lung, multiple_myeloma,ovary,upper_gi,pancreas_gallbladder,non_cancer, prostate,melanoma,lymphoid_neoplasm,colorectal,breast,cervical, head_and_neck,renal,anorectal,thyroid,uterine,
  CONT. FROM ABOVE: bladder_and_urothelial

SEQ ID NO: 471062 - DNA, 400 bp, Homo sapiens; identical to SEQ ID NO: 335306
  chr16:25078047-25078447
  hyper
  myeloid_neoplasm vs. multiple_myeloma,ovary, liver_bileduct,non_cancer,prostate,melanoma,uterine

SEQ ID NO: 471063 - DNA, 88 bp, Homo sapiens; identical to SEQ ID NO: 335311
  chr16:29607025-29607113
  hyper
  myeloid_neoplasm vs. prostate,anorectal,upper_gi, liver_bileduct,multiple_myeloma,breast,colorectal,ovary,renal, lung,non_cancer,uterine,pancreas_gallbladder,thyroid,sarcoma, head_and_neck,bladder_and_urothelial,lymphoid_neoplasm,cervical,
  CONT. FROM ABOVE: melanoma

SEQ ID NO: 471064 - DNA, 549 bp, Homo sapiens; identical to SEQ ID NO: 347378
  chr16:30959765-30960314
  hyper
  myeloid_neoplasm vs. liver_bileduct,pancreas_gallbladder, upper_gi,colorectal,sarcoma,lung,ovary,breast,cervical,renal, bladder_and_urothelial,prostate,non_cancer,multiple_myeloma, uterine,melanoma,anorectal,head_and_neck,thyroid

SEQ ID NO: 471065 - DNA, 30 bp, Homo sapiens
  chr16:31498993-31499023
  hyper
  myeloid_neoplasm vs. sarcoma
cggcaccccgtgaccggggatctgccgtgg

SEQ ID NO: 471066 - DNA, 291 bp, Homo sapiens
  chr16:31499204-31499495
  hyper
  myeloid_neoplasm vs. sarcoma
ttggtgctaaaccagacagaaggctccatctactccaagcgtgcagctgaacttggggcactcacgagccagaggcggggcacagagcggaacggggcgcggggcggggccgaggggaggcccgcaagcgggcagctgaacgcccctcccgtaggtcatcgtgcagcgctgcctggccgggaagagcctgacccacatcaaggcgggctgcatcctgtgtgggtacctgaagctgacgcccatgtttctcatggtcatgccaggcatgatcagccgcattctgtacccagg

SEQ ID NO: 471067 - DNA, 257 bp, Homo sapiens
  chr16:31548824-31549081
  hyper
  myeloid_neoplasm vs. ovary,bladder_and_urothelial
cggcgtttccccgcggaggtcatgaggtccccacggcccaggccccgtccccggacagccccgggtgccccaggagctccggccgcagctcacctgggaccggcctcccgtggagccaccccttgcccagccgcccccaagttcccgcaggaggaactggcgacagacacgtccagcccgcagccgccggccgcaccggcgctgcactaactgggacgcgccccggggccgcgctggctcggatccgcccagacccc

SEQ ID NO: 471068 - DNA, 63 bp, Homo sapiens; identical to SEQ ID NO: 127134
  chr16:31549116-31549179
  hyper
  myeloid_neoplasm vs. ovary,bladder_and_urothelial

SEQ ID NO: 471069 - DNA, 132 bp, Homo sapiens; identical to SEQ ID NO: 360851
  chr16:67184509-67184641
  hyper
  myeloid_neoplasm vs. pancreas_gallbladder,colorectal, head_and_neck,ovary,lung

SEQ ID NO: 471070 - DNA, 66 bp, Homo sapiens; identical to SEQ ID NO: 468836
  chr16:68269820-68269886
  hyper
  myeloid_neoplasm vs. pancreas_gallbladder,lung, multiple_myeloma,ovary,breast,uterine,liver_bileduct,prostate, cervical,colorectal,anorectal,thyroid,head_and_neck, bladder_and_urothelial,upper_gi,non_cancer,renal

SEQ ID NO: 471071 - DNA, 113 bp, Homo sapiens; identical to SEQ ID NO: 468837
  chr16:68269896-68270009
  hyper
  myeloid_neoplasm vs. pancreas_gallbladder,lung, multiple_myeloma,ovary,breast,uterine,liver_bileduct,prostate, cervical,colorectal,anorectal,thyroid,head_and_neck, bladder_and_urothelial,upper_gi,non_cancer,renal

SEQ ID NO: 471072 - DNA, 106 bp, Homo sapiens; identical to SEQ ID NO: 468838
  chr16:68270022-68270128
  hyper
  myeloid_neoplasm vs. pancreas_gallbladder,lung, multiple_myeloma,ovary,breast,uterine,liver_bileduct,prostate, cervical,colorectal,anorectal,thyroid,head_and_neck, bladder_and_urothelial,upper_gi,non_cancer,renal

SEQ ID NO: 471073 - DNA, 125 bp, Homo sapiens; identical to SEQ ID NO: 347388
  chr16:68270157-68270282
  hyper
  myeloid_neoplasm vs. pancreas_gallbladder,lung, multiple_myeloma,ovary,breast,uterine,liver_bileduct,prostate, cervical,colorectal,anorectal,thyroid,head_and_neck, bladder_and_urothelial,upper_gi,non_cancer,renal

SEQ ID NO: 471074 - DNA, 637 bp, Homo sapiens; identical to SEQ ID NO: 347389
  chr16:68270868-68271505
  hyper
  myeloid_neoplasm vs. melanoma,renal,breast,colorectal, uterine,ovary,prostate,multiple_myeloma,pancreas_gallbladder, non_cancer,anorectal,liver_bileduct,thyroid,upper_gi, head_and_neck,bladder_and_urothelial,lung

SEQ ID NO: 471075 - DNA, 178 bp, Homo sapiens; identical to SEQ ID NO: 452923
  chr16:85932121-85932299
  hyper
  myeloid_neoplasm vs. thyroid,non_cancer,colorectal, multiple_myeloma

SEQ ID NO: 471076 - DNA, 145 bp, Homo sapiens; identical to SEQ ID NO: 335426
  chr17:850237-850382
  hyper
  myeloid_neoplasm vs. anorectal,cervical

SEQ ID NO: 471077 - DNA, 198 bp, Homo sapiens; identical to SEQ ID NO: 351867
  chr17:1011791-1011989
  hyper
  myeloid_neoplasm vs. pancreas_gallbladder,colorectal, multiple_myeloma,ovary,breast,lung,prostate,non_cancer,cervical, renal,bladder_and_urothelial,uterine,thyroid,anorectal

SEQ ID NO: 471078 - DNA, 341 bp, Homo sapiens; identical to SEQ ID NO: 335442
  chr17:4890368-4890709
  hyper
  myeloid_neoplasm vs. upper_gi,liver_bileduct, multiple_myeloma,ovary,bladder_and_urothelial,lymphoid_neoplasm, lung,breast,colorectal,cervical,pancreas_gallbladder,prostate, head_and_neck,non_cancer,uterine,anorectal

SEQ ID NO: 471079 - DNA, 919 bp, Homo sapiens
  chr17:7254483-7255402
  hyper
  myeloid_neoplasm vs. liver_bileduct,uterine,upper_gi, head_and_neck,ovary,anorectal,lung,renal,melanoma,breast, bladder_and_urothelial,colorectal,sarcoma,pancreas_gallbladder, cervical,prostate,non_cancer,lymphoid_neoplasm,thyroid,
  CONT. FROM ABOVE: multiple_myeloma
cgcagtgcccgcggcgcgcacgttcccacccaggctcggagcgcgaggtccccaggtgggccccaaccgccggatcctgcccttctgcactggggcccagccgcctcccggcctttcctccctcccccaggagatgagacgtatcttgacatcttccgcgacttctccctcatggcgtcagacgacccggagaagctgagccgtcgcagtcatgacctccacacgctgtgacccgaggcccacggggcccgcgcctgcctcccttccccgccaccgggccctctgccattaaagcctccgtgcttcgctcttcccttctggttcacttcttgggcgccaccttcgggcccgtagggtgttgggcgctgcggctcccgaggtgcggggagcagctgggggtttgcgagctccagtccagcaaggtgcgactccggggagcgaggcggcagcttcggccgcggcctgagcgcagggcgctgcggggcgggggctctcgggctggggcgacgtggccagcccagtcctgccgaggggtggggctggccctggggctcgctggccccgcgccgccgcggagagagcgcgcccgggccaccccggctggaaggcatccccggaatgcggcggctcagcacccgccccctcgggaattccccgggggagccgctgggagggactcggctcccgggctgggccggccgggcctcgggctctgagcggtgggattagaggctccagccccgccgacttgcagacgtgagatcgggcacacctgagcggcggcggggcggtcgtggccacatccggggcgacgtgcctgagtcaccccgtcccgccagcgtctgccagtccagccagtccgcccagtctctcgcgtccgagactcgcctccagcctcccacctccgcccgggccgcgc

SEQ ID NO: 471080 - DNA, 920 bp, Homo sapiens
  chr17:7254908-7255828
  hyper
  myeloid_neoplasm vs. renal,pancreas_gallbladder,ovary, bladder_and_urothelial,upper_gi,colorectal,breast,head_and_neck, lung,uterine,melanoma,lymphoid_neoplasm,sarcoma,thyroid, liver_bileduct,prostate,anorectal,multiple_myeloma,non_cancer,
  CONT. FROM ABOVE: cervical
cgactccggggagcgaggcggcagcttcggccgcggcctgagcgcagggcgctgcggggcgggggctctcgggctggggcgacgtggccagcccagtcctgccgaggggtggggctggccctggggctcgctggccccgcgccgccgcggagagagcgcgcccgggccaccccggctggaaggcatccccggaatgcggcggctcagcacccgccccctcgggaattccccgggggagccgctgggagggactcggctcccgggctgggccggccgggcctcgggctctgagcggtgggattagaggctccagccccgccgacttgcagacgtgagatcgggcacacctgagcggcggcggggcggtcgtggccacatccggggcgacgtgcctgagtcaccccgtcccgccagcgtctgccagtccagccagtccgcccagtctctcgcgtccgagactcgcctccagcctcccacctccgcccgggccgcgcgagcctcgcgggggcgggggcggggcgccaaggggcggggctgtctcttaaagggccccgggccgctgcccttaggccacttcctgggggcggagaggacctcagcggctgcggcgacacccagggaaggcggcgcggccgggtcccgaaactcctggctgtttccatcagagccctcggacactcccagcccgggctgagcacgcatcgtcgctccccggcggatacaagggggctccgccatccgctcccgtcagttcggcctccatctcctgggacccgcgccggcagccaggccaggcctctgagtggccccagagccctggctggactcgtccacggcggcagcgatctgcccggggtctcggaggccatcccttcagagtcggccctgtgctcgccaccgtcacctgctggttggattcc

SEQ ID NO: 471081 - DNA, 49 bp, Homo sapiens; identical to SEQ ID NO: 335451
  chr17:7748395-7748444
  hyper
  myeloid_neoplasm vs. lymphoid_neoplasm,uterine

SEQ ID NO: 471082 - DNA, 76 bp, Homo sapiens
  chr17:14212398-14212474
  hyper
  myeloid_neoplasm vs. anorectal,thyroid
cgacgttgccacgtgtccgctcctttcgggagctaggggggcgttggcttggacatcccgttctggaagggtggcc

SEQ ID NO: 471083 - DNA, 25 bp, Homo sapiens
  chr17:14212686-14212711
  hyper
  myeloid_neoplasm vs. anorectal,thyroid
ggccacgtgaccagcctcgccgtcc

SEQ ID NO: 471084 - DNA, 300 bp, Homo sapiens; identical to SEQ ID NO: 335481
  chr17:19140744-19141044
  hyper
  myeloid_neoplasm vs. liver_bileduct,multiple_myeloma

SEQ ID NO: 471085 - DNA, 53 bp, Homo sapiens; identical to SEQ ID NO: 347416
  chr17:27940911-27940964
  hyper
  myeloid_neoplasm vs. multiple_myeloma

SEQ ID NO: 471086 - DNA, 58 bp, Homo sapiens; identical to SEQ ID NO: 374100
  chr17:34400043-34400101
  hyper
  myeloid_neoplasm vs. lymphoid_neoplasm

SEQ ID NO: 471087 - DNA, 226 bp, Homo sapiens; identical to SEQ ID NO: 347425
  chr17:36886750-36886976
  hyper
  myeloid_neoplasm vs. multiple_myeloma,colorectal, upper_gi,lung,bladder_and_urothelial,pancreas_gallbladder, melanoma,head_and_neck,cervical,liver_bileduct,breast,renal, prostate,ovary,thyroid,non_cancer,uterine

SEQ ID NO: 471088 - DNA, 879 bp, Homo sapiens; identical to SEQ ID NO: 351953
  chr17:43324795-43325674
  hyper
  myeloid_neoplasm vs. head_and_neck,lung,liver_bileduct, upper_gi,colorectal,multiple_myeloma,pancreas_gallbladder, breast,bladder_and_urothelial,uterine,lymphoid_neoplasm, non_cancer,cervical,ovary,thyroid

SEQ ID NO: 471089 - DNA, 111 bp, Homo sapiens
  chr17:62776313-62776424
  hyper
  myeloid_neoplasm vs. colorectal
cgttcctcgactaggaaagggtatacacttgagtcactaagcacactgggccccggaggcggggtcatcgagctgcccagagccaacaaaccccaaggtggacactgcccc

SEQ ID NO: 471090 - DNA, 61 bp, Homo sapiens
  chr17:62776446-62776507
  hyper
  myeloid_neoplasm vs. colorectal
cgcagcgcactcacgtctgctgggcgggcctcagggagcccaagggccgggtgggcggggc

SEQ ID NO: 471091 - DNA, 30 bp, Homo sapiens; identical to SEQ ID NO: 468885
  chr17:74865491-74865521
  hyper
  myeloid_neoplasm vs. multiple_myeloma,uterine,non_cancer

SEQ ID NO: 471092 - DNA, 1 bp, Homo sapiens
  chr17:74866320-74866321
  hyper
  myeloid_neoplasm vs. multiple_myeloma,uterine,non_cancer
c

SEQ ID NO: 471093 - DNA, 92 bp, Homo sapiens; identical to SEQ ID NO: 455801
  chr17:74965156-74965248
  hyper
  myeloid_neoplasm vs. ovary,non_cancer,colorectal, bladder_and_urothelial,multiple_myeloma,pancreas_gallbladder, cervical,uterine

SEQ ID NO: 471094 - DNA, 3 bp, Homo sapiens
  chr17:74965753-74965756
  hyper
  myeloid_neoplasm vs. ovary,non_cancer,colorectal, bladder_and_urothelial,multiple_myeloma,pancreas_gallbladder, cervical,uterine
ccc

SEQ ID NO: 471095 - DNA, 84 bp, Homo sapiens; identical to SEQ ID NO: 335686
  chr17:75082793-75082877
  hyper
  myeloid_neoplasm vs. liver_bileduct

SEQ ID NO: 471096 - DNA, 170 bp, Homo sapiens; identical to SEQ ID NO: 352027
  chr17:76337740-76337910
  hyper
  myeloid_neoplasm vs. multiple_myeloma,colorectal, pancreas_gallbladder,upper_gi

SEQ ID NO: 471097 - DNA, 67 bp, Homo sapiens
  chr17:80277699-80277766
  hyper
  myeloid_neoplasm vs. colorectal,cervical,renal
cgtgtgtgcagagacgggtgcgcgactccatgcgtgtgtgcagaaacgggtgcatgtggacacgtgt

SEQ ID NO: 471098 - DNA, 404 bp, Homo sapiens; identical to SEQ ID NO: 361176
  chr17:80332292-80332696
  hyper

SEQ ID NO: 471099 - DNA, 1 bp, Homo sapiens
  chr18:34823778-34823779
  hyper
  myeloid_neoplasm vs. liver_bileduct,colorectal,cervical, lung,anorectal
c

SEQ ID NO: 471100 - DNA, 33 bp, Homo sapiens; identical to SEQ ID NO: 464319
  chr18:34823862-34823895
  hyper
  myeloid_neoplasm vs. liver_bileduct,colorectal,cervical, lung,anorectal

SEQ ID NO: 471101 - DNA, 20 bp, Homo sapiens
  chr18:34823977-34823997
  hyper
  myeloid_neoplasm vs. liver_bileduct,colorectal,cervical, lung,anorectal
gcctggcccttggggacaac

SEQ ID NO: 471102 - DNA, 44 bp, Homo sapiens
  chr18:63417693-63417737
  hyper
  myeloid_neoplasm vs. liver_bileduct
cggagagatggatgggctgcagcccctcctactttcacccctct

SEQ ID NO: 471103 - DNA, 336 bp, Homo sapiens; identical to SEQ ID NO: 374470
  chr18:63418336-63418672
  hyper
  myeloid_neoplasm vs. liver_bileduct

SEQ ID NO: 471104 - DNA, 50 bp, Homo sapiens; identical to SEQ ID NO: 455814
  chr19:2302510-2302560
  hyper
  myeloid_neoplasm vs. cervical

SEQ ID NO: 471105 - DNA, 112 bp, Homo sapiens; identical to SEQ ID NO: 374542
  chr19:2302951-2303063
  hyper
  myeloid_neoplasm vs. cervical

SEQ ID NO: 471106 - DNA, 601 bp, Homo sapiens; identical to SEQ ID NO: 335900
  chr19:2461998-2462599
  hyper
  myeloid_neoplasm vs. multiple_myeloma, pancreas_gallbladder,non_cancer,uterine,renal,thyroid,breast, ovary,prostate,upper_gi,colorectal

SEQ ID NO: 471107 - DNA, 598 bp, Homo sapiens; identical to SEQ ID NO: 347527
  chr19:2579147-2579745
  hyper
  myeloid_neoplasm vs. pancreas_gallbladder,lung, bladder_and_urothelial,sarcoma,uterine,head_and_neck,upper_gi, breast,prostate,liver_bileduct,ovary,non_cancer,anorectal, thyroid,renal,colorectal,multiple_myeloma

SEQ ID NO: 471108 - DNA, 36 bp, Homo sapiens; identical to SEQ ID NO: 335909
  chr19:4064382-4064418
  hyper
  myeloid_neoplasm vs. liver_bileduct,multiple_myeloma, lung,colorectal,head_and_neck,melanoma,lymphoid_neoplasm, upper_gi,breast,cervical,renal,prostate,ovary, pancreas_gallbladder

SEQ ID NO: 471109 - DNA, 97 bp, Homo sapiens; identical to SEQ ID NO: 205124
  chr19:4064872-4064969
  hyper
  myeloid_neoplasm vs. lymphoid_neoplasm,multiple_myeloma, pancreas_gallbladder,lung,liver_bileduct,ovary

SEQ ID NO: 471110 - DNA, 291 bp, Homo sapiens
  chr19:5961947-5962238
  hyper
  myeloid_neoplasm vs. liver_bileduct,cervical
cgcgtggttccccttgttttccatggccagtgcttactcctgcacagacaccatctccttcaggaagctcccactgtgagaggcgtgcctgccctgctgcactccctcccgagcaggccttatatcctgccacggggcacgcggagaccacggccacagcagctgaaacagcctatcacccagcgtacaccgcatcaacaccctgcaatgagtgtttgaactaggccctctctctgtcattcatctacacaacaccagctgctacgtactcacaaatatttactaagccct

SEQ ID NO: 471111 - DNA, 45 bp, Homo sapiens; identical to SEQ ID NO: 352170
  chr19:5962455-5962500
  hyper
  myeloid_neoplasm vs. liver_bileduct,cervical

SEQ ID NO: 471112 - DNA, 758 bp, Homo sapiens
  chr19:7459644-7460402
  hyper
  myeloid_neoplasm vs. lung,liver_bileduct,upper_gi, pancreas_gallbladder,colorectal,prostate,ovary,sarcoma, multiple_myeloma,breast,lymphoid_neoplasm
cgttaaccccacaaaacgcccacctaaccctgctgctctccctctggatccccgcaacccagctgtcccctcagagcccccggccctactgacagccaggctcgcattgctctccttcaaaaagccccccaaccccgctgacccgcccctcaaaagtcgccctcaccctcgccgcgagcaccctcccacttcggtgcccgcgcccctctcaaggccgagccgacgccccctcaccacggctcggggagcagcagccccaggtccccgggagcgccccgccctcgagggcacgcctccttccgggtcacgccctctgccccgcctccgaggcgggatcgcgcatgcgctgctctcctcgcgcggcttcccgcttccggctcccagctgctagctactgtggatctgggggggccggacggaggcatcggaggcggctgcgagagtggcagaggagctggcggagagcggcctgcgggcgatcgggccgaggtgaggacggcggcggggcggtcccgaggaaaacggggctcaggagggggccctcggtctcttcagggggtggcctggggcgcgggacccccggggctgcctcgggcctcccgccggctcctgggggacttctccaggcaggcgaacgggtgctggggtgcaggctgctccttcaatgcatggaggctctaggcggcgattgcagggtgcagaggtgcagacgatgcccgcccgctccgtccgagccccagccagtcctggggtgctac

SEQ ID NO: 471113 - DNA, 766 bp, Homo sapiens; identical to SEQ ID NO: 345562
  chr19:7459915-7460681
  hyper
  myeloid_neoplasm vs. lung,liver_bileduct, pancreas_gallbladder,upper_gi,breast,ovary,sarcoma,prostate, colorectal,lymphoid_neoplasm,head_and_neck,multiple_myeloma, uterine,anorectal,bladder_and_urothelial,thyroid,non_cancer,
  CONT. FROM ABOVE: cervical,renal,melanoma

SEQ ID NO: 471114 - DNA, 685 bp, Homo sapiens; identical to SEQ ID NO: 335930
  chr19:8274278-8274963
  hyper
  myeloid_neoplasm vs. lymphoid_neoplasm,thyroid,prostate, non_cancer,cervical

SEQ ID NO: 471115 - DNA, 689 bp, Homo sapiens; identical to SEQ ID NO: 335931
  chr19:8372877-8373566
  hyper
  myeloid_neoplasm vs. lymphoid_neoplasm,lung, multiple_myeloma,pancreas_gallbladder,colorectal,liver_bileduct, head_and_neck,ovary,melanoma,upper_gi,uterine,non_cancer

SEQ ID NO: 471116 - DNA, 291 bp, Homo sapiens
  chr19:10402604-10402895
  hyper
  myeloid_neoplasm vs. prostate,non_cancer
cccctccgtgccttgaggatgataatacgataagatagtgcatgtcaagtgcttaggacatattgagcgctcggagttagttcaaacttggttcttcgacccctagccctgtctccggatgccccgcgcctcgctgctccccggctcttggaagttggctcggaaaggcccgtgagctgcactctggacggactgtttccagcctcagaggccagggtctacctcgcactgggggaccagaatctgagtcctgatgtcaccctcgaaggggacgcattcgtggccactgcc

SEQ ID NO: 471117 - DNA, 170 bp, Homo sapiens
  chr19:10402960-10403130
  hyper
  myeloid_neoplasm vs. prostate,non_cancer
cgaaaaccgggagacccgggagaacgtgaccatctacagtaaggaaggaggcggggtctccgcggctccgaggtgggaccagaggaatgcgaaggcggggcgaagagtgggcgggacctcagtaccggaacaggcgtggcccgaggggcggggcaggtgggggcggagac

SEQ ID NO: 471118 - DNA, 264 bp, Homo sapiens; identical to SEQ ID NO: 464341
  chr19:10402631-10402895
  hyper
  myeloid_neoplasm vs. thyroid,prostate,non_cancer, melanoma,multiple_myeloma,ovary

SEQ ID NO: 471119 - DNA, 341 bp, Homo sapiens; identical to SEQ ID NO: 464342
  chr19:10402960-10403301
  hyper
  myeloid_neoplasm vs. thyroid,prostate,non_cancer, melanoma,multiple_myeloma,ovary

SEQ ID NO: 471120 - DNA, 131 bp, Homo sapiens; identical to SEQ ID NO: 352182
  chr19:10403330-10403461
  hyper
  myeloid_neoplasm vs. thyroid,prostate,non_cancer, melanoma,multiple_myeloma,ovary

SEQ ID NO: 471121 - DNA, 3 bp, Homo sapiens
  chr19:10407174-10407177
  hyper
  myeloid_neoplasm vs. bladder_and_urothelial,cervical, non_cancer,prostate,anorectal,thyroid,renal,multiple_myeloma, colorectal,uterine,breast
agc

SEQ ID NO: 471122 - DNA, 508 bp, Homo sapiens; identical to SEQ ID NO: 335951
  chr19:11144009-11144517
  hyper
  myeloid_neoplasm vs. lung,colorectal

SEQ ID NO: 471123 - DNA, 177 bp, Homo sapiens; identical to SEQ ID NO: 335952
  chr19:11199850-11200027
  hyper
  myeloid_neoplasm vs. liver_bileduct,breast

SEQ ID NO: 471124 - DNA, 200 bp, Homo sapiens
  chr19:12951477-12951677
  hyper
  myeloid_neoplasm vs. thyroid,non_cancer,prostate, multiple_myeloma,uterine
cggggccatgcttgtgtgggtgtggtcagtcgcagagggacggtcattggggggcggagactcaggtgggcggagactcaggtgggacggacagaaaggaggagtcgtacctgaggggcggggccatcccagatgaagccagaatcgtcttggaaggggccaggctgactcggcaacgaaaaaatttagagaggcggggc

SEQ ID NO: 471125 - DNA, 1 bp, Homo sapiens
  chr19:12952279-12952280
  hyper
  myeloid_neoplasm vs. thyroid,non_cancer,prostate, multiple_myeloma,uterine
c

SEQ ID NO: 471126 - DNA, 33 bp, Homo sapiens; identical to SEQ ID NO: 455824
  chr19:14584167-14584200
  hyper
  myeloid_neoplasm vs. multiple_myeloma

SEQ ID NO: 471127 - DNA, 1 bp, Homo sapiens
  chr19:14584882-14584883
  hyper
  myeloid_neoplasm vs. multiple_myeloma
c

SEQ ID NO: 471128 - DNA, 354 bp, Homo sapiens; identical to SEQ ID NO: 454288
  chr19:18117804-18118158
  hyper
  myeloid_neoplasm vs. melanoma,prostate,breast, multiple_myeloma,renal,sarcoma,non_cancer,uterine,ovary

SEQ ID NO: 471129 - DNA, 259 bp, Homo sapiens; identical to SEQ ID NO: 336066
  chr19:30165123-30165382
  hyper
  myeloid_neoplasm vs. anorectal,lung,ovary,breast, lymphoid_neoplasm,renal,uterine,melanoma,pancreas_gallbladder, upper_gi,prostate,non_cancer,head_and_neck,colorectal,cervical, liver_bileduct,bladder_and_urothelial

SEQ ID NO: 471130 - DNA, 122 bp, Homo sapiens; identical to SEQ ID NO: 468917
  chr19:35581628-35581750
  hyper
  myeloid_neoplasm vs. multiple_myeloma

SEQ ID NO: 471131 - DNA, 149 bp, Homo sapiens; identical to SEQ ID NO: 293861
  chr19:35581779-35581928
  hyper
  myeloid_neoplasm vs. multiple_myeloma

SEQ ID NO: 471132 - DNA, 234 bp, Homo sapiens; identical to SEQ ID NO: 336085
  chr19:35738737-35738971
  hyper
  myeloid_neoplasm vs. lung,upper_gi,ovary,breast, pancreas_gallbladder

SEQ ID NO: 471133 - DNA, 63 bp, Homo sapiens
  chr19:38976252-38976315
  hyper
  myeloid_neoplasm vs. sarcoma,melanoma,uterine
cggagcgcctggacctgcagcgcttccactcgcacaccctgcgcctctaccgcgctgtgtgcg

SEQ ID NO: 471134 - DNA, 37 bp, Homo sapiens; identical to SEQ ID NO: 361586
  chr19:38976790-38976827
  hyper
  myeloid_neoplasm vs. sarcoma,melanoma,uterine

SEQ ID NO: 471135 - DNA, 94 bp, Homo sapiens; identical to SEQ ID NO: 455855
  chr19:49127280-49127374
  hyper
  myeloid_neoplasm vs. lymphoid_neoplasm,melanoma, multiple_myeloma,non_cancer

SEQ ID NO: 471136 - DNA, 153 bp, Homo sapiens; identical to SEQ ID NO: 352372
  chr19:50979533-50979686
  hyper
  myeloid_neoplasm vs. pancreas_gallbladder, multiple_myeloma,uterine,prostate,non_cancer,cervical,upper_gi

SEQ ID NO: 471137 - DNA, 248 bp, Homo sapiens; identical to SEQ ID NO: 374908
  chr19:52390956-52391204
  hyper
  myeloid_neoplasm vs. bladder_and_urothelial

SEQ ID NO: 471138 - DNA, 396 bp, Homo sapiens; identical to SEQ ID NO: 336291
  chr19:56151971-56152367
  hyper
  myeloid_neoplasm vs. multiple_myeloma,liver_bileduct, ovary,breast,lung,bladder_and_urothelial

SEQ ID NO: 471139 - DNA, 535 bp, Homo sapiens; identical to SEQ ID NO: 466859
  chr2:45398-45933
  hyper
  myeloid_neoplasm vs. liver_bileduct

SEQ ID NO: 471140 - DNA, 246 bp, Homo sapiens; identical to SEQ ID NO: 466860
  chr2:45969-46215
  hyper
  myeloid_neoplasm vs. liver_bileduct

SEQ ID NO: 471141 - DNA, 176 bp, Homo sapiens; identical to SEQ ID NO: 466861
  chr2:45757-45933
  hyper
  myeloid_neoplasm vs. bladder_and_urothelial

SEQ ID NO: 471142 - DNA, 246 bp, Homo sapiens; identical to SEQ ID NO: 466860
  chr2:45969-46215
  hyper
  myeloid_neoplasm vs. bladder_and_urothelial

SEQ ID NO: 471143 - DNA, 143 bp, Homo sapiens; identical to SEQ ID NO: 357074
  chr2:46450-46593
  hyper
  myeloid_neoplasm vs. bladder_and_urothelial

SEQ ID NO: 471144 - DNA, 128 bp, Homo sapiens; identical to SEQ ID NO: 331190
  chr2:3307454-3307582
  hyper
  myeloid_neoplasm vs. liver_bileduct,lung,upper_gi, colorectal,ovary

SEQ ID NO: 471145 - DNA, 4 bp, Homo sapiens
  chr2:10151899-10151903
  hyper
  myeloid_neoplasm vs. sarcoma,renal,breast,uterine, lymphoid_neoplasm,liver_bileduct,non_cancer,prostate,thyroid
cgta

SEQ ID NO: 471146 - DNA, 2 bp, Homo sapiens
  chr2:10152022-10152024
  hyper
  myeloid_neoplasm vs. sarcoma,renal,breast,uterine, lymphoid_neoplasm,liver_bileduct,non_cancer,prostate,thyroid
gc

SEQ ID NO: 471147 - DNA, 388 bp, Homo sapiens
  chr2:20646879-20647267
  hyper
  myeloid_neoplasm vs. sarcoma,renal,liver_bileduct
cgaggcccggagagacccgggagagagctaggccgagtccaccgcccgagtctgctgcccgagcccgcgttacgcacaaagccgccgatccccggcctggggtgagcagagcgaccaccgcccgggagcagcgcggcgagacgcacggtgcgccctatgcccccgcgcccccaccgcccccgccgcggcagccgaagcgcagcgagagaacgcgccaccgcggggcccgggtgcagctagcgaccctctcgccacctgcgcgcagcccgaggtgagcagtgagcggcgagcgggagggcagcgaggcgttcgcgggccccctcctgctgcccgggcccggcccgctcatggcggccatccgcaagaagctggtggtggtgggcgacgg

SEQ ID NO: 471148 - DNA, 461 bp, Homo sapiens; identical to SEQ ID NO: 357119
  chr2:20647309-20647770
  hyper
  myeloid_neoplasm vs. sarcoma,renal,liver_bileduct

SEQ ID NO: 471149 - DNA, 93 bp, Homo sapiens; identical to SEQ ID NO: 331235
  chr2:25464444-25464537
  hyper
  myeloid_neoplasm vs. lung,head_and_neck, lymphoid_neoplasm,colorectal,bladder_and_urothelial

SEQ ID NO: 471150 - DNA, 251 bp, Homo sapiens
  chr2:27308893-27309144
  hyper
  myeloid_neoplasm vs. multiple_myeloma,lung,colorectal, upper_gi,uterine,bladder_and_urothelial,prostate, lymphoid_neoplasm,melanoma,head_and_neck,non_cancer,breast
cgcccgacgtgtctacgtcggctgaagagacagcgggggcggcgggctcctggggtctcgcctgagacggggcacctagccctgggcgagcgccgcacccgggcccgcagcggcaccgcgcccagagcggcctctccccacgcccggggcgcgccggctcagggaggctcggggccgcccatgcagacttttggcctggcgcgatcccccaagaacccctccagggccggcctgcggaggagccgatcctc

SEQ ID NO: 471151 - DNA, 111 bp, Homo sapiens; identical to SEQ ID NO: 1396
  chr2:27309206-27309317
  hyper
  myeloid_neoplasm vs. multiple_myeloma,lung,colorectal, upper_gi,uterine,bladder_and_urothelial,prostate, lymphoid_neoplasm,melanoma,head_and_neck,non_cancer,breast

SEQ ID NO: 471152 - DNA, 213 bp, Homo sapiens; identical to SEQ ID NO: 331326
  chr2:67624288-67624501
  hyper
  myeloid_neoplasm vs. multiple_myeloma, bladder_and_urothelial,lymphoid_neoplasm,breast,liver_bileduct, upper_gi

SEQ ID NO: 471153 - DNA, 280 bp, Homo sapiens; identical to SEQ ID NO: 331330
  chr2:70369049-70369329
  hyper
  myeloid_neoplasm vs. lymphoid_neoplasm,liver_bileduct, renal,lung

SEQ ID NO: 471154 - DNA, 128 bp, Homo sapiens
  chr2:71453820-71453948
  hyper
  myeloid_neoplasm vs. multiple_myeloma
cgaaaaccccctattgctcccgaggggcaggggctgaccccagcggacgccccttttcgccgatggccgcgacgtgggaccccgcgcgctttccctccctacaggagctcgggcaggcgcgtgccgcc

SEQ ID NO: 471155 - DNA, 228 bp, Homo sapiens; identical to SEQ ID NO: 349516
  chr2:71454386-71454614
  hyper
  myeloid_neoplasm vs. multiple_myeloma

SEQ ID NO: 471156 - DNA, 698 bp, Homo sapiens; identical to SEQ ID NO: 357207
  chr2:73052641-73053339
  hyper
  myeloid_neoplasm vs. ovary

SEQ ID NO: 471157 - DNA, 937 bp, Homo sapiens; identical to SEQ ID NO: 462696
  chr2:75060920-75061857
  hyper
  myeloid_neoplasm vs. upper_gi,colorectal,ovary, bladder_and_urothelial

SEQ ID NO: 471158 - DNA, 213 bp, Homo sapiens; identical to SEQ ID NO: 462705
  chr2:98703022-98703235
  hyper
  myeloid_neoplasm vs. upper_gi,ovary,sarcoma

SEQ ID NO: 471159 - DNA, 201 bp, Homo sapiens; identical to SEQ ID NO: 462706
  chr2:98703475-98703676
  hyper
  myeloid_neoplasm vs. upper_gi,ovary,sarcoma

SEQ ID NO: 471160 - DNA, 77 bp, Homo sapiens; identical to SEQ ID NO: 345029
  chr2:98703736-98703813
  hyper
  myeloid_neoplasm vs. upper_gi,ovary,sarcoma

SEQ ID NO: 471161 - DNA, 22 bp, Homo sapiens
  chr2:113341835-113341857
  hyper
  myeloid_neoplasm vs. multiple_myeloma
cggagatttggagcgcttgtgt

SEQ ID NO: 471162 - DNA, 554 bp, Homo sapiens; identical to SEQ ID NO: 345037
  chr2:113341898-113342452
  hyper
  myeloid_neoplasm vs. multiple_myeloma

SEQ ID NO: 471163 - DNA, 186 bp, Homo sapiens; identical to SEQ ID NO: 331461
  chr2:148602743-148602929
  hyper
  myeloid_neoplasm vs. multiple_myeloma,liver_bileduct

SEQ ID NO: 471164 - DNA, 136 bp, Homo sapiens
  chr2:151342572-151342708
  hyper
cggtacaggtgggcaccgaggcaccgcgggcggccggcagcgcgaagaggaggttcagctgctgcccggcccctgcgccaccagcgcattcctgggtgtaggcgtcacgggcgccgcggctgcctgcgctcagttt

SEQ ID NO: 471165 - DNA, 167 bp, Homo sapiens
  chr2:151342737-151342904
  hyper
accgcgtcgcctctgggattttctcccgcctcccatcacccccgcggcgctccccgcctccccgccaaccagcaggttagatctaggaggggcgcccgccttgagccgggtggttccgccgaggcgcacgcagcgcccatgcaacaccccacagtatcgggccacct

SEQ ID NO: 471166 - DNA, 266 bp, Homo sapiens; identical to SEQ ID NO: 349601
  chr2:151343277-151343543
  hyper

SEQ ID NO: 471167 - DNA, 461 bp, Homo sapiens; identical to SEQ ID NO: 349603
  chr2:157292161-157292622
  hyper
  myeloid_neoplasm vs. pancreas_gallbladder,breast,sarcoma, melanoma,head_and_neck,cervical,renal,uterine,liver_bileduct, upper_gi,lung,non_cancer,thyroid,anorectal

SEQ ID NO: 471168 - DNA, 45 bp, Homo sapiens
  chr2:182521331-182521376
  hyper
  myeloid_neoplasm vs. multiple_myeloma
cggcgacttggggactcggtaacctgtccgggcagtgaggcgagc

SEQ ID NO: 471169 - DNA, 280 bp, Homo sapiens; identical to SEQ ID NO: 357405
  chr2:182521646-182521926
  hyper
  myeloid_neoplasm vs. multiple_myeloma

SEQ ID NO: 471170 - DNA, 171 bp, Homo sapiens; identical to SEQ ID NO: 349657
  chr2:191208170-191208341
  hyper
  myeloid_neoplasm vs. multiple_myeloma,colorectal

SEQ ID NO: 471171 - DNA, 228 bp, Homo sapiens; identical to SEQ ID NO: 369907
  chr2:208633316-208633544
  hyper
  myeloid_neoplasm vs. upper_gi,uterine

SEQ ID NO: 471172 - DNA, 426 bp, Homo sapiens; identical to SEQ ID NO: 331594
  chr2:216946200-216946626
  hyper
  myeloid_neoplasm vs. liver_bileduct,lung,ovary, colorectal,renal,sarcoma,cervical,prostate,uterine,breast, head_and_neck,bladder_and_urothelial,non_cancer,thyroid, anorectal,multiple_myeloma,upper_gi,pancreas_gallbladder

SEQ ID NO: 471173 - DNA, 3 bp, Homo sapiens
  chr2:219826725-219826728
  hyper
  myeloid_neoplasm vs. multiple_myeloma
cgg

SEQ ID NO: 471174 - DNA, 163 bp, Homo sapiens; identical to SEQ ID NO: 331637
  chr2:224702626-224702789
  hyper
  myeloid_neoplasm vs. pancreas_gallbladder,liver_bileduct, head_and_neck,lymphoid_neoplasm,upper_gi

SEQ ID NO: 471175 - DNA, 168 bp, Homo sapiens
  chr2:232260775-232260943
  hyper
  myeloid_neoplasm vs. multiple_myeloma,ovary, pancreas_gallbladder
cggccccgcggccctggacaccgctccaggaccctggcggctgggaccccaggtcttgccggcagctgggtcccctctcccttccagacccctgagggccccctgcgtccgggccactctcctcctctcggggcttccttccgcgggacctcggaccgccgcccgccc

SEQ ID NO: 471176 - DNA, 41 bp, Homo sapiens; identical to SEQ ID NO: 349699
  chr2:232260984-232261025
  hyper
  myeloid_neoplasm vs. multiple_myeloma,ovary, pancreas_gallbladder

SEQ ID NO: 471177 - DNA, 254 bp, Homo sapiens; identical to SEQ ID NO: 357495
  chr2:233283897-233284151
  hyper
  myeloid_neoplasm vs. lung,multiple_myeloma

SEQ ID NO: 471178 - DNA, 38 bp, Homo sapiens
  chr20:2801696-2801734
  hyper
  myeloid_neoplasm vs. lymphoid_neoplasm,multiple_myeloma, pancreas_gallbladder,liver_bileduct
cgtggtcacagacgcgccgggagggagggggccacgtc

SEQ ID NO: 471179 - DNA, 63 bp, Homo sapiens; identical to SEQ ID NO: 361804
  chr20:5297756-5297819
  hyper
  myeloid_neoplasm vs. cervical

SEQ ID NO: 471180 - DNA, 78 bp, Homo sapiens; identical to SEQ ID NO: 336375
  chr20:19673407-19673485
  hyper
  myeloid_neoplasm vs. lymphoid_neoplasm,multiple_myeloma, pancreas_gallbladder,bladder_and_urothelial,colorectal,ovary, melanoma,head_and_neck,uterine

SEQ ID NO: 471181 - DNA, 151 bp, Homo sapiens; identical to SEQ ID NO: 459615
  chr20:25566244-25566395
  hyper
  myeloid_neoplasm vs. ovary,uterine,anorectal,thyroid, renal,lung,breast,pancreas_gallbladder

SEQ ID NO: 471182 - DNA, 59 bp, Homo sapiens; identical to SEQ ID NO: 352472
  chr20:25566411-25566470
  hyper
  myeloid_neoplasm vs. ovary,uterine,anorectal,thyroid, renal,lung,breast,pancreas_gallbladder

SEQ ID NO: 471183 - DNA, 262 bp, Homo sapiens; identical to SEQ ID NO: 336415
  chr20:30196349-30196611
  hyper
  myeloid_neoplasm vs. head_and_neck,lung, pancreas_gallbladder,upper_gi,colorectal,ovary,uterine, bladder_and_urothelial,renal,non_cancer,cervical,prostate, breast,thyroid,anorectal,multiple_myeloma,liver_bileduct

SEQ ID NO: 471184 - DNA, 215 bp, Homo sapiens; identical to SEQ ID NO: 347677
  chr20:43976984-43977199
  hyper
  myeloid_neoplasm vs. liver_bileduct,colorectal, pancreas_gallbladder,prostate,lung,upper_gi,sarcoma,ovary, uterine,melanoma,breast,cervical,renal,non_cancer,head_and_neck, thyroid,bladder_and_urothelial,anorectal,lymphoid_neoplasm

SEQ ID NO: 471185 - DNA, 33 bp, Homo sapiens; identical to SEQ ID NO: 461001
  chr20:44879699-44879732
  hyper
  myeloid_neoplasm vs. head_and_neck

SEQ ID NO: 471186 - DNA, 1 bp, Homo sapiens
  chr20:49435030-49435031
  hyper
c

SEQ ID NO: 471187 - DNA, 115 bp, Homo sapiens; identical to SEQ ID NO: 345644
  chr20:58514400-58514515
  hyper
  myeloid_neoplasm vs. sarcoma,renal,colorectal

SEQ ID NO: 471188 - DNA, 33 bp, Homo sapiens; identical to SEQ ID NO: 336506
  chr20:60639846-60639879
  hyper
  myeloid_neoplasm vs. ovary,renal,lung,prostate, pancreas_gallbladder,uterine,colorectal,non_cancer,upper_gi, bladder_and_urothelial,cervical,multiple_myeloma,breast, liver_bileduct,sarcoma,melanoma,head_and_neck

SEQ ID NO: 471189 - DNA, 390 bp, Homo sapiens; identical to SEQ ID NO: 347694
  chr20:62273399-62273789
  hyper
  myeloid_neoplasm vs. breast,uterine,ovary,lung, multiple_myeloma,colorectal,liver_bileduct,anorectal,upper_gi, non_cancer,thyroid,pancreas_gallbladder,prostate,cervical, head_and_neck,renal

SEQ ID NO: 471190 - DNA, 881 bp, Homo sapiens; identical to SEQ ID NO: 336551
  chr21:36163875-36164756
  hyper
  myeloid_neoplasm vs. liver_bileduct,head_and_neck,renal

SEQ ID NO: 471191 - DNA, 98 bp, Homo sapiens; identical to SEQ ID NO: 336586
  chr21:46686353-46686451
  hyper
  myeloid_neoplasm vs. head_and_neck

SEQ ID NO: 471192 - DNA, 9 bp, Homo sapiens
  chr21:46707016-46707025
  hyper
  myeloid_neoplasm vs. renal,prostate,multiple_myeloma
cgcagtgac

SEQ ID NO: 471193 - DNA, 354 bp, Homo sapiens; identical to SEQ ID NO: 336607
  chr22:22292773-22293127
  hyper
  myeloid_neoplasm vs. lymphoid_neoplasm,multiple_myeloma, lung

SEQ ID NO: 471194 - DNA, 174 bp, Homo sapiens; identical to SEQ ID NO: 457951
  chr22:24819901-24820075
  hyper
  myeloid_neoplasm vs. non_cancer,thyroid,anorectal

SEQ ID NO: 471195 - DNA, 61 bp, Homo sapiens; identical to SEQ ID NO: 295272
  chr22:24820486-24820547
  hyper
  myeloid_neoplasm vs. non_cancer,thyroid,anorectal

SEQ ID NO: 471196 - DNA, 221 bp, Homo sapiens; identical to SEQ ID NO: 345667
  chr22:47199299-47199520
  hyper
  myeloid_neoplasm vs. lymphoid_neoplasm,breast,uterine, pancreas_gallbladder,upper_gi,prostate,cervical,non_cancer, bladder_and_urothelial,multiple_myeloma,colorectal, head_and_neck,renal,anorectal,ovary

SEQ ID NO: 471197 - DNA, 194 bp, Homo sapiens
  chr3:3221338-3221532
  hyper
  myeloid_neoplasm vs. lymphoid_neoplasm,lung, multiple_myeloma,liver_bileduct,upper_gi
cgcagcgtcctgctgatctccttcgccggccatgtctgtttacccgcaaaggaggctgggacagggcggtgccgaagactccgagggagggcccgtgtcgcgcggctgccgcgcaccggggccacagcgccccctggcggccccaggggagcagacggcggcgcgtacccaagcctgaaagtgatggcctaggc

SEQ ID NO: 471198 - DNA, 46 bp, Homo sapiens; identical to SEQ ID NO: 107798
  chr3:3221564-3221610
  hyper
  myeloid_neoplasm vs. lymphoid_neoplasm,lung, multiple_myeloma,liver_bileduct,upper_gi

SEQ ID NO: 471199 - DNA, 206 bp, Homo sapiens
  chr3:5137574-5137780
  hyper
  myeloid_neoplasm vs. multiple_myeloma,cervical,renal, non_cancer,thyroid,bladder_and_urothelial,prostate
cgttttatttggacgctctgaatccgttttcccctagcacatcggcagagcagaccgcctgcctcggccttgtcaacgccaagggtgttttggacggatgtgtctatcctgaaagcttccagcctggctttgaacttgacttggcaacggatgaaaacctcggcgagcatccccagacaaccccgctgcgcgtcagagcgctgctc

SEQ ID NO: 471200 - DNA, 357 bp, Homo sapiens
  chr3:50374299-50374656
  hyper
  myeloid_neoplasm vs. lymphoid_neoplasm,lung, multiple_myeloma,liver_bileduct,pancreas_gallbladder,ovary, head_and_neck,colorectal,breast,bladder_and_urothelial,renal, prostate,uterine,upper_gi,non_cancer
cggtcggctttagtcatagctggataatgcccggctcaggtctaccacaagccatacagctgctttttccgtgttcaacctgtctgtgacagaaaccaagggggccccggcacccagcatctaggcggtggaatcggggtcttacgcacggttccgcgggcaggtccccggccaggacccgcggggagccacgtagccaggagggtggggctgcccaccgacccaggacgcggcaacggaccggggagggcggagctccagcgaccgcttcccctcccgcccgccggcaccccctggctcccacctggtcccggcgcggcctgcgagctagcgaggttcgcgcggtgaagtactgct
